United States Patent Application Publication US 2013/0332133 A1 - sequence listing, part 44

SEQ ID NO: 286713 - DNA, 798 bp, Unknown
  Bacterial polypeptide expressing nucleotide sequence isolated from the Sargasso Sea
aaacaatttttcaagaaatgattgtgttatttctgttggtggaggaataacaggtgatgttagtggatttgctgctagtttatttaaaagaggtttgaaatttataaatttgccgactactctattatctcaagtagattcttcaatcggtggtaaaacaggagtaaattcaaaatacggaaaaaacctaattggtagtttttatcagccaaatttggttattaccgatattcaatttctaaactcattatcaaaaagagaaattatttgtggatatggagagattttaaaacatgccctaatagcaaataaaaatttttttatttttttaaataaaaatgtcaaagaagttttaaatctttcctcaccgtttattgaaaaggcaatttatgaaagttgtaaaataaaaaaggtaattgttgagaaagatgaaaaagaaaaaaatttaagaaaaactttaaattttggtcatacatttgcacacgcctatgaggctagcctgggttatcataaaaaattaaatcatggagaagctgtaatacttggaatgataacagccttaaatttcagtacaaaaaattcttttctaaaaaaaaaagaatatgaattaattattaatcatattcataagactagattgcctttttcgttaaaaaaattttttagtttaaaggatttaaataaaatttcattttttatgactaaagataaaaaaaataattcatcaaaaataaatttgatattgttaaaaaaaataggctcaccagtacttaataaagaatatactaaaaaaaatat

SEQ ID NO: 286714 - DNA, 748 bp, Unknown
  Bacterial polypeptide expressing nucleotide sequence isolated from the Sargasso Sea
aatgaaattaaaaattaaaacaaaagtaaatagttattccgtaattattggaaaaaatctttgctcaaaaataaataaaacgatcttaaatgaaagaatatattctcaaaaatttttacttgtttatgatagtaaagtaccaactaaaatgatcaaatctatatcaagtagatttaataaaaaaaaaatagaaaagaaaaaaatagtttttaacgaaaaaagtaaaaatttcaaaactgtttcatctattgtaaaaattcttgaaaagaaaaattttagtagaaatgattgcttaatttctgttgggggtggtatatgtggagatgtatgtggatttgcctcaagtatttttaaaagaggtttaaattttattaatgtgcccacaactttgctaagtcaagtcgactcagcgattggcggaaaaacaggaattaattctttatcaggaaaaaatatgataggatctttctatcaaccttcattagttatttcagacattaatttcttaaaaagtttacctaaaaaagaaatgatatgtggatatgccgaaatattgaagcattctctaataagtaacaaaatatttttcaaattcttgaaaaaaaattttattaagattttaaatcataatcacaaatttttagaaagggcgatttataaaagttgtttaatcaaaaaacaggtagttgagaaagatgaaaaggagaaaaatattagaagagttcttaatttaggtcatacttcgctc

SEQ ID NO: 286715 - DNA, 886 bp, Unknown
  Bacterial polypeptide expressing nucleotide sequence isolated from the Sargasso Sea
tcgaaagaatgtgaccatgaaaacagtaaccgtaccacttgagaactattcttacgatattttgattggtgagaacttgatatcaaacattcctagttatttagagaaccttttaagtcgtaagttcatagctattgtcaccgacaaaaatgtagaaagtcttcatctatccaagtttgttaaagttctgtccgaagcaggaattgaaactaatattttaacaatcaatcccggagaaggcagcaaatcttggaaaactcttcaaatgacggttgattggatgttggcaaataaaattgaacgaaatgacattgtagtcgctttgggtggcggcgtagtgggtgatcttgtaggttttgctgctgcaatattaaggcgtggcattcgatacattcagtgtccaacttcacttttagcacaagtagatagttcagttggcggcaaaacaggaataaatactatccacggaaaaaatttggtcggtgctttttatcaacccacccaagtaatttcagatatatcaacattaaacacaataaaagagagagatttcctcgctggttatggggaggtagtaaaatacggcctactgggagattataaattttattgttggttggaaacaaattttgcaaagataaaagaacgagacaccaaaacactcattgaagctgtagcccattcatgtgagatgaaggcagaaattgttattaatgatgaaaaagagcatgggaacagagcattattgaacctgggacatacattttgtcacgcattagaagcagctactggctactctgatcgcatgttgcatggggaaggtgtcgcaataggatgtatattagccttcgatctatctgcaaaaattggggttaacatcacaaga

SEQ ID NO: 286716 - DNA, 700 bp, Unknown
  Bacterial polypeptide expressing nucleotide sequence isolated from the Sargasso Sea
tatgaaaataaaaaaattaaatattaaaacaaaaagtcaaaattataacattataattggttcaaatttaatttcagaaattttccaaataatcaaaaatgattcaataaaatttcataaatgtttaattatttttgacaaaaatattccaaaaaaaataattgataagataaaatattctttcagagagaaaaaaatgtatattcattttatttctgctaatgaaaaaaataaaaattataaaaccgcaaatataattcttaatattctgctcaaaaataatttctcacgatcagactgtttgatttctgtaggtggtggtatcacaggtgatatagttgggtttactgccagtttatttaaaagaggtatacaatttataaatgtaccaacaactcttttagcacaagtcgactcttcaattggtggaaaaactggaattaatacaatatatggaaaaaatctaataggaactttcttccaaccaaagttagtaataagtgacagtatttttttaaattcactaccccgtagagaaataatttgtggttatggagaaattctcaaacattcacttatatcaaataaaaaattttttaattttttaaacaaaaatattttaaggatcttaaatcttaagtcgccatttttagaaaaagcgatatatgagagttgtaaaattaaaaaattagttgtttga

SEQ ID NO: 286717 - DNA, 691 bp, Unknown
  Bacterial polypeptide expressing nucleotide sequence isolated from the Sargasso Sea
ttatagagaagactgtataatttcatttggtggaggaattacaggagatgtggttggatatgctgccagcacattcaaaagaggaataaaatttattaacatgccctccactttattagctcaagtcgactcttcaataggtggcaaaacaggtattaataataaatttggaaaaaatcttgttggaagtttttatcagccagatttagtaatttcagatattaatttactacgtaccctccctaaaagagaaattatatgtggatatgctgaaatactaaaaagtagtttaattgatagcaaaaaaaattttgtttttttagataaaaattttaataggattttaaacctaaaaggaaattttataattaatgcaattttaaatagctgtttattaaaaaaaaaaatcattgaaaaggatgaaaaagaaaaaaatttaagaaaatctttaaatcttggccatacttttgctcacgcatatgaggctactcttggttactcaaaaaaattaaatcatggagaagctgttatatttggtctaatgaatgctgtaaattttagtaaagaaaaaaaaattatttcaaattcaaattcagaattaataaataatcatattaaaaagattgaaataaaaaataaatatagaaacctttttaataaaaggaaaattacatcaattcttaattttatg

SEQ ID NO: 286718 - DNA, 597 bp, Unknown
  Bacterial polypeptide expressing nucleotide sequence isolated from the Sargasso Sea
tgatcgacaccgacagtctgcgcactttgcccgagcgcgaggttagcgccgggctggctgaaatcgtcaaatacggtttgatccgggacgcggatttcctgacctggcttgagcagaacatggcagcgttgcgtgcgctggacgcggcgctggtgacctacgcgattgagcgctcttgcgccatcaaagctgaggtggtcgcggccgatgagcgcgaaggcggcgtgcgcgccatcctgaacctggggcacacctttggccatgctatcgaggcgcatcaaggctacggcagctggctgcacggcgaagcggttggcgccggcatggcgatggccctggacctgtcctgcaggctcggctggattacggacgctgagcgagatcgcggtgttgcgctgatcagcgcggcgggtctgccgacggtaccacccaagggcatggttgccgctgattttgaacgtctcatgtcggtcgacaagaaggtgctggatggtcagctgcgcctggtgctcttgcgcggcatgggtgaggccgttgtgacagctgaatttactgctgatgcgttgcgtcagtgtctggtggggtttgagcaatgag

SEQ ID NO: 286719 - DNA, 829 bp, Unknown
  Bacterial polypeptide expressing nucleotide sequence isolated from the Sargasso Sea
tatgaatacaaataaaatttcaattaaaacaagcactaagaactacccaattgtaattggaagagatttaataggtaaaattgataaaattttaaaagctaatagtctaaaatttgataaatgtttaattgttacagacaaaaatattcccaataagtttaaaagacttttatacaaaaagttaaacacaaataaactttttaaaatagaaataacggcatcagaaaaaaacaaaaattaccgaacagttgaaaaaattcatacagttttatttgaaaatagatttaatagagaagattgtgttatttcttttggtggaggaattattggagatatagttggattcgcttctagcacatttaaaagaggcatgaaatttgtaaatattccctcaactttactgtctcaagtggactcatcaataggaggcaaaacaggtgtaaataataaatttggaaaaaatttgattgggagtttttatcaacctgatttagttatttctgatatgaatattttagcttctttaccagaaagagaaattatttgtggatatgctgaaatattaaaaagtagtattattgataattttaataattttctctatttagaccaaaatttaaaaaaaattttaaaattaaagtcacctttcattgaaagatccataattaaaagctgtaatttaaaaaaaaaagttgtggaaaaagatgagaacgaaaaaaactacagaaaggtattaaatttaggccatacctttgctcattcttatgagtctactttaggtttttctaaaaaattaaatcatggagaagctgtaatcttaggtataaaa

SEQ ID NO: 286720 - DNA, 514 bp, Unknown
  Bacterial polypeptide expressing nucleotide sequence isolated from the Sargasso Sea
atgaaaaaaataaatctaaagacatcaaatacaaatgtgccgatatatgtcgggaatggtattttaaataattttgaaatctcaaaatatgttttcaataaagatgtgttaataataactaatacaaaggttggtaagctgtatttgaataaaacaaagagactcttcatagaatataaagttaattcgcttgtattaccagatggtgaaaagtacaaaaacaatgaaacattaaaaaaaatatatgacttccttgtaaaaaatcactatgacagatctctaactattgttgcattaggtgggggtgttattggtgatttggtagcatttgctgcagatacgtttatgagaggagtttcattgatacatattcctacaacattgttatctcaagtagactcatcaataggaggtaaatgtggtataaatcataaattaggcaaaaacctaatcggatcatttaagcatccaaatttagttttaatagatacttctgtcttgaaatctttaccaa

SEQ ID NO: 286721 - DNA, 762 bp, Unknown
  Bacterial polypeptide expressing nucleotide sequence isolated from the Sargasso Sea
caagtatcttaaaaagagggattaattttataaacttaccatctacattgttagcacaagtggattcatcaattgggggtaaaacgggaattaactcaaataggggaaaaaatctcattggttcattttaccagccaaaaatagtaattagcgaacttgggtttttaaaaagtttatctagaagaaatttggtctgtggatttgcagaaatcttaaagcactctttaatccacgacaataaattttttaattcactaatcaaaaatacagaaagtatattggaaaaatttgatttcaaaataattaaagatgtaattacaaaaagctgcaaaattaaattgtattttgttaatcaagatgaaaaggagaagggtcaaaggatgattttaaattttggtcatacttttgctcatggtattgaggcagcaaatggctattcaagaaagataaatcatggtgaagctgtactaatgggaatgatgttagcaacaagactgtcatttagaaaaagaatctgctcttacaatacattggataaaattgaaactatttatgaaactaataatttacctaaaaatttaataagttttttctcaaaaaaaggtttaaacaaagttgtgagttttatggaaattgataaaaaaaattacgataataaaataaacttaatacttttaaaaaaaataggaaaaaccacaaatcccggagattttagaataagtccaaaagaaatgaggaatgttctaaaaaaaattagttaat

SEQ ID NO: 286722 - DNA, 663 bp, Unknown
  Bacterial polypeptide expressing nucleotide sequence isolated from the Sargasso Sea
aagttttatttgaaaataggtttaatagagaagattgcgttatttcttttggtggaggaattattggggatatagttggatttgcatctagtacatttaaaagaggcatgaaatttgtaaatattcccacaactttactggctcatgttgattcatccataggaggaaaaacaggtgtaaataataaatttggaaaaaatttgattggaagtttttatcatccagatttggttatttccgacatgaatattttagcttctttaccagaaagagaaattatttgtggatatgctgaaatattgaaaagtagtattatagataattttaataattttctttatttagacaaaaatttaaaaaaaattttaaaattaaaatcacctttcattgaaagatccataattaaaagctgtaatttaaaaaaaagagttgtagaaaaagatgagaaagagaagaactacagaaaagtattaaacttaggtcatacctttgctcatgtttatgagtctactttaggtttttctaaaaaattaaatcatggagaagctgtaattttaggtattaaaaatgcagttgaattcagttttaaaagaaaaattttatcaaaacaaaaatttaatattattttaaatcatattaatagaatcaggatgaaaccataaa

SEQ ID NO: 286723 - DNA, 779 bp, Unknown
  Bacterial polypeptide expressing nucleotide sequence isolated from the Sargasso Sea
aatgaaattaaaagttaaaactaatataagtaattactctgtaattattgggaataatctttgcccaaagataaataatataatcttaaatgaaggaatatactctcaaaaatttttacttatttatgatagtaaagtaccaagtcaaatgattaaatctattataagtaaatttaataagaaaaaaatagaaaagaaaaagattatttttaatgaaaaaagtaaaaatttaaaaaccgtttcttctattgtaaaaattcttgaaaagaaaaattttagcagaaatgattgtttaatttctgttggagggggtatttgtggagatgtttgcggatttgcatcaagtatttttaaaagaggtttgaactttgttaatgtacccacaactttacttagtcaagttgactccgcgattggaggtaaaacaggaataaactcgttatcaggaaaaaatatgataggatctttttatcaacctgctttagttatttcggacataaattttttaaagagtttacctaaaaaagaaatgatatgtggatatgccgagattttaaaacattctcttataaaaaatgaaatatttttcaactttttaaaaaaaaactttatcaagattttgaatcataatagtaaatttttagaaaaggcaatttataaaagttgcttaataaaaaaagaggtggttgagaatgacgagaaggaaaagaataccagaaaggttttaaatctgggtcatacttttgctcatgcttatgaagcaacaattggttataaca

SEQ ID NO: 286724 - DNA, 661 bp, Unknown
  Bacterial polypeptide expressing nucleotide sequence isolated from the Sargasso Sea
atgaaacaagttaaattaaatataaataccaaaactcaaaaatatccaattattattggctctaatttaacctcaaatatttcaaatattattagaaaaaattcaataaattttaggcaatgtttaattataattgataagaatgttcctaagaaatttatttttaatattaaaaaatcattaaaacaaaaaaaagtttatacttatttatttaaagcaaatgaaataaataaaaatataaattatgtaaataaaattttagaaattttgttaaaaaaaaatttttcaagagatgattgtgtcatttctgttgggggaggaataacaggtgatgtgagtggatttgctgctagtttatttaaaagaggtttaaaatttataaattttccgactaccctattgtctcaagttgactcatctattggtggaaaaactggaattaattcaaagcatgggaaaaatttaattggtagtttttaccagccaaatttagttattacagatattcaatttctaaaatcattgtcaaaaagagaaattatttgtgggtatggagaagttttaaaacattctttaatatctaataaaaaattttttggttttttaaataaaaatattaaaaaagtcttaaatcttcacactccatttatcgaaaaaacta

SEQ ID NO: 286725 - DNA, 476 bp, Unknown
  Bacterial polypeptide expressing nucleotide sequence isolated from the Sargasso Sea
aatgaataataaaattttaaaggttaaaactcaacagggtacttatccaataataattggtcacaacactattaaagaaattggtaaatatataaaaccaataataagcaacaatagaatttttattatttctagtaaaaaagttattgaaatttataaaacgaagctattaaaggaacttaataaaaataatataaaaactattctgataactatcaatgatagcgagaaagaaaaaaattttaatactattgtaaagattactaacactcttttaaaaaaaggaattgatagaaatgactcattaattgcttttggaggaggagttataggagatattactggatttgtctcaagcattactctgagaggaattaaatttattcaaatccctacaaccttattgggctcagtagattcatctgttggcggtaaaacaggagtaaacacttcaaatggtaaaaatttgataggga

SEQ ID NO: 286726 - DNA, 969 bp, Unknown
  Bacterial polypeptide expressing nucleotide sequence isolated from the Sargasso Sea
tcacaagtttaaaagactcttatacaaaaagttaaaaacaaataaacttgttcaaatagaaattgcagcatcagaaaaaaataagaattaccgaacaattgaaaaaattcataaagttttatttgaaaatagatttaatagagaagattgcgttatttcttttggtggaggaattattggagatatagttgggtttgcatctagtacattcaaaagaggcatgaaatttgtaaatattcccacgactttactggctcaagtggactcatccataggaggtaaaacaggtgtaaataataaatttggaaaaaatttgattggaagtttttatcaacctgatttagttgtttctgacatgaatattttagcttctttgccagaaagagaaattatttgtggttatgctgaaatattaaaaagtagtattatagataattttaaaaattttctttatttagacaaaaatttaaaaaaaattttaaaattaaaatcacctttcattgaaagatccataattaaaagctgtaatttaaaaaaaagggttgtagaaaaagatgagaaagagaagaactacagaaaggtattaaatttaggtcatacctttgctcatgcttatgagtctactttaggtttttctaaaaaattaaatcatggagaagctgtaattttaggcattaaaaatgcagtcgaattcagttttaaaagaaaaattttaacaaaacaaaaatttaatattattttaaatcatattaatagaataggtatgaaaccaaaaattaaaaaattatttaaaaaaagacatgtatttaaaattatgaattatatgagaagtgataagaaaaataattcaaataatattaacttaattttagtgaaagattttggaaaaataataattgactttcagattaaccctacaaatttaaaaaaatatctatctagtagtttaaattatttgatttgcaacga

SEQ ID NO: 286727 - DNA, 688 bp, Unknown
  Bacterial polypeptide expressing nucleotide sequence isolated from the Sargasso Sea
gttgaaaaaattttcgaatgtaaatattttaatagaatatcttattaaaaataaatttaacagaaacgacttggtaattgctgttggtggtggaataattggagatttttcaggttttgtagcgagtatttttaaaagaggtgtaaactttattaatgtacctacaacattgttggcacaagttgactcggcaataggcggtaaaactggtgttaattcaaaaaccggaaaaaatttaattggttcattctatcaaccaaaattagtattatcagatatatcttttttaaaaagtcttcctaaaagagaattcatttgtggttttggggaaatattaaagtactcacttataaaagatcaaaagttttttaattttataaaaagaaattcaaaacaaattttaaaaggaagcgacttaaatattttaaaatacattgttttaagaagctcaaaaaataaggttcattttgtagttgcagatgaaaaagagtccaacaaaagaatggttttaaactttggtcatacatttgcacatggaatagagtcttcaaataatttttctaaaaagataaaccatggagaagcggtacttatcggaatgttcttagctacaaaactttcttttaataaaaatatttgctccttgaagaccatggaagaaatagaaaaaatttatatttcaaattaa

SEQ ID NO: 286728 - DNA, 733 bp, Unknown
  Bacterial polypeptide expressing nucleotide sequence isolated from the Sargasso Sea
taaaaaaaatcttgagacagttaaaatcctaacaagccatttattaaaaaataaaattgatagagacgacactctgattgctcttgggggaggcgtaataggcgatctagtaggatttgtagcaagtataaccctcagaggattaagctttattcaagtgccaacgactttactatcacaagtagactcatcagttggtggtaaaactggagttaatactccaattggaaaaaatttgattggatctttttatcaacctgcccttgttatttctgacgtaggtatgttgaagagcttacataaaagagaggtattgtcaggttatgcagaagtaatcaagtacggcattataatggacaaaacgttttttaattggttattaaaaaatgataaatattttataaacttaaatgctaattacttaatagagatagtatataaatcttgtaaaaataaagcaaaaatagtgaatcaagatgaaaaggaaaaaaatattagagccttattaaaccttggtcatacttttggacacgccattgaatcacttaataattataaaaaaacaattgtgcatggtgaggctgttgcgattggaataataatggctttagagctatctttcttagaaggaaaaatatcaaaagacattattaataaaatagagatacattttgataaaataggcattaaaagaaaaataccaaatcaattaaaacgacatttaagcacttca

SEQ ID NO: 286729 - DNA, 856 bp, Unknown
  Bacterial polypeptide expressing nucleotide sequence isolated from the Sargasso Sea
atgaaaattcaaaaattaaagtttaaaagtaaaagtaaaccttacacggtcattattggtgataaaacaattaatgctttatcaaaagaaataaaatttttatgccctaaaacaaaaaaaattgcaatttttttagataaaaatattccaagaaaatttaaaaaaatttttattaaaaaattaaaaaaatataaagtaagtatcattcctttcaaagcagatgaaaaatctaaatcaatgtcaactgttagtatttatttaaataaattattgaaaaaaaactttaatcgttcagatttagtcttaagtgttggaggtggtattactggagatgttattggctttgtagcaagtatttacaaaagaggtataaactttattaatattccaactactttacttgctcaagttgactcggcaattggtggaaaaactggtgttaatacaacacatgggaaaaatttagtcggatcattttatcaacctaagttagtcatcattgatacgtcctttttaaattctttacctcaaaaggaaatagtttgtggatatgctgaaattttaaaacactctttgattaaagataaaaaattttttatttggttaaaaactaatacaaaaaatattttattaaaaaagaaaagacaactagattatgcaatcaaaaaaagttgccaaattaaaatgtcttttgtaaacaaagacgttcatgaaaaaaatcttaggatgatattgaactttggtcatacctttgcccatgctatagaaattaaaaataattattcaaagaaaactacccatggtgaagcagtattatctggtattatattagcaacaagaattatcagtaataaaa

SEQ ID NO: 286730 - DNA, 792 bp, Unknown
  Bacterial polypeptide expressing nucleotide sequence isolated from the Sargasso Sea
aacttccaaaaagaattagaaagatttgtccaaaggttaaaaacatagcaattattattgaccttaatgttcctgtaaaatttagacaaagcttattgaaaaagcttaaaaattataatgttgtttttttcaattttttaccaaatgaaaaagctaaatctattaacactgtaaatttatttttaaacaagctgttatccaaaaattttaatagggatgatttaattattggtattggaggaggaattactggggatgtagttggatttgttgctagtgtgttcaaaagaggtataaattttataaatattcccactacattacttgctcaagtcgactcagccatcggaggaaagacaggagttaattcaccattcggaaaaaatcttatcggcgcattctatcaacccagattagtaatcagcgatactctttttttaaaatctttgtcaaaaaaagagatgatttgtggttatgctgaaatattgaaacacgcaattattaaagataatacattttttaattggcttaaaaaaaatacgaaatcaattcttttaaaaaaggcgaatgaattagcgtatgctattaaaaaaagctgtcagattaaaataaattttgtaaacaaagatgtaaatgaaaaaggtttaagaatgtctcttaattttggtcatacttttgctcatgctattgaggctgaaaataatttttctaaaaaaattactcatggtgaagcagtgcttgctggaatgatattagaaacaagactttctgttattaaaaaaagtttgtaaa

SEQ ID NO: 286731 - DNA, 824 bp, Unknown
  Bacterial polypeptide expressing nucleotide sequence isolated from the Sargasso Sea
tatggataataatgttcctaaaaaatttgacaaaattctaaaaattaaacttaaaaactataagctatactttttcaattattctgctagtgaaaaaacaaaatctatgtatcatgtaagttactttgtaaataaattacttcatgccaattttaaccggtctgatttaattattgcagcaggtggaggtataacaggggatgttgttggatttgttgctagtatatttaaaagaggtataaactttataaatctcccgacaactttgcttgctcaagttgactccgctataggaggaaaaactggagtaaattcaactcacggaaaaaatcttattggagctttctatcaacctaaattagtattaagtgatatagtttttctcaaatcacttcctaaaaaggaaataatttgtggatatgcagaaatattaaaacatgcaattataaaagaccaaaatttttttaattggcttaaaaaaaattctaattctattttctcaaaaagaccgaaagaattaatttatgctattaagaaaagttgtgaaataaaaattttttttgtaagtaaagatctaaatgaaaaaggtttgcgtatgactttgaatttcggacatacatttgctcatgctatagaagcaaaaaataaattttcaaaaaatattactcacggggaagcagttttagcaggaatgatttttgcattaagactttcaataataagaaaagtttgtgataaaaaagtatttaataaaattaaagaaatatttaatgataataaactgaattatacttacctaagatttaaaaattcaaaaaaaattt

SEQ ID NO: 286732 - DNA, 910 bp, Unknown
  Bacterial polypeptide expressing nucleotide sequence isolated from the Sargasso Sea
caacaaggaattcaaactatccagcctgagagtattaaagggaggaaaattgcaattatttctgacgatgatgcagcaattaataatctagccgcgctcaaaaaggctttatcaagctatgacattaagaccatagaaattattttgccccctggtgaaaaaaataaagaattaattgttgcagagagcattattgataaacttttatcaaaaaaatttgaacgcggtgatattatcattgggcttggagggggagtaattggggatctgtcgggtttcgttgcaagtattatacaccgaggagttaaatttattaacataccaacgactttattagcacaggtagactcttcaataggaggaaaaacaggggttaatagtaaatatgggaaaaatcttattggttgcttcaagcaaccggagttagttatttgtgatataaattcactatccacacttccaaagagagatctactggcgggttatgctgagctaataaagcatgcgctcattggagatgctgaattattcagctatctccaaaataatgtcaaaaatatatttaatgaccatgctattttgcaggaagtcatacacagaagtgcgcttgtaaaagcagatatcgtaatggaagacactcatgaaaaaaatataagggctcaattaaacttaggccacacttatggtcatgccattgagtcattctacaaatacgatgggcgtttactccatggagaagccatatcgattggaattattatggctttcaaaacatccctcaggcttggtttatgtgcagcagaccaccttcatattgttgaagatcatttcaataatattggtttactgactgatttgaaaagtttagacgggaaaaaaatattacctgaaaaaattatgaccttatgcg

SEQ ID NO: 286733 - DNA, 739 bp, Unknown
  Bacterial polypeptide expressing nucleotide sequence isolated from the Sargasso Sea
ttgattgatgagtttgtatgggaactttataaagatcaccttagcctccaagccctttttgggacaacaagaaaaaaaattgttttgaaaatgttacctaggggtgaaaaagcaaagtgttttgatgtctacgagagaatgtgtgaagaaatattaaaagagggaattcatcgaaactttcatgtcattgcttgtggtggtggagcaattagtgatatctctggttttattgcgtcttcccttttgagaggcctttcttggagtgttatacccacaactcttctatctatggttgatgcttctattggaggtaagacgggcattaattcaaagtttgggaaaaacttgattggagcttttcatatgccagaccatgtttggcttaatcccctttttttggaaacacttccaaaaatagaggggttaaatggttatggagaagttcttaaatatagttttctagatagaacaataaaggaatctcttttaaattcaaaatctaagatcggtgaaatgattctactttgtgcaaattataaaagcagtttagtggaagaagactttaaagaaaagggtcctagaaaatatttaaacctaggccatacttttggtcatgcttttgaaaaaatgcatcccatttctcacggagaagccgtctattggggaatgagactattatttcatatttttgaaagggaagatctacttattgaatgtgatgaaatggtcaatgagtgaa

SEQ ID NO: 286734 - DNA, 778 bp, Unknown
  Bacterial polypeptide expressing nucleotide sequence isolated from the Sargasso Sea
atgaaacaaactagattaaatataataactaaaaccgaaaaatatccaataattattggatcaaatttaacctccagcatatcaaaaatttttaaatcaaattcaattggtttcgataaatgtttgattgttgttgataaaaatgttccaaaaaaatttgtctcaaatattaaaaggtcttttaaaaataaaagtatttttgtgttattttttaatgctagtgaaaaaaataaaaatattaatagcgttaataaaattctagaatttttattaaataaaaacttttcaagaaatgatgttttaatttctttaggaggaggaattacaggtgatgtaagtggttttgcggctagtcttttcaaaaggggcctaaagtttgcaaatattccgacaactcttttagctcaagttgattcatcaataggaggaaaaactggggttaattctaagtatggtaaaaatttaataggaagtttttatcaaccatcattagttctctcagatattcaatttcttaaatctttatcaaaaagagagatagtttgtggatatggagaaatattgaagcattcattaattgaaaataaaaaattttttatttttttaaataaaaatcttaaaaagattttaagtctttcatctccatttattgaaaaagcaatctatgaaagttgtaaaattaaaaaaaagatagtcgaaaaagatgaaaaagaaacagcattaagaaaagtattaaattttggtcatacatttgcccatgcttatgaggcaggcttag

SEQ ID NO: 286735 - DNA, 772 bp, Unknown
  Bacterial polypeptide expressing nucleotide sequence isolated from the Sargasso Sea
ttaaatgaaagaatattttctcaaaaatttttacttgtttatgacagtaaagtgccagcccaaatgattaaatctataataagtagatttaataaggacataatagaaaagaaaaagattgtttttaatgaaaaaagtaaaaatttaaaaactgtttcatctattgtaaaaactcttgaaaaaaataattttagcagaaatgatagtttaatttcagtcggaggtggtatttgtggagatgtatgtgggtttgcatcaagtatttttaaaagaggtttaaattttattaatgtacccacaactttactgagtcaggttgactcagcgattggcggaaagacaggaattaattctttatctggaaaaaatatgatcggatctttttatcaaccttctttagttatttcagatatagatttcttaaagagtttacctaaaagagaaatgatatgtggatatgctgagattcttaaacattctcttttaaaagacaaaatatttttcaaatttttaaaaaaaaattttattaaaattttgagccataatcatacagttttagaaaaaacaatttataaaagttgtttaatcaaaaaggaaatagttgagaaagatgagaaggaaaaaaatattagaaaagttcttaatttaggtcatacttttgcccacgcctatgaggcaacagttgggtacaatagagggctaaatcacggagaggctgttttattaggaattatgtcggctgttgaatttagtagaaaaaaaaatatttgaa

SEQ ID NO: 286736 - DNA, 787 bp, Unknown
  Bacterial polypeptide expressing nucleotide sequence isolated from the Sargasso Sea
aaaatttttaaataatttaaaagataataattttcaggccaaaatgttccttatcaaggctggagaatcatataaaaacttaaaaaccttaagtgaaatatatgatgtagcatttgaatttggtttagatagaaattcaataattattgcccttggaggaggaattgttggagatgtaagtggttttgcagctgcgacttggctgagaggtatcgaatatattcaaattccaacaacattattatcaatggttgattcatctgtgggaggaaaaacaggagtaaatcatccaaaaggtaagaatttaattggagctttcaatcaacctaaagcagtttttattgatccaaaaactttaaaaagtttgcccaaaagagaatttagtgcaggcatggccgaagtaataaaatacggagtaataagagataaagaacttttcgaatacttagaaattgaaaaaaacaaaaatgaacttatgaatctcaaaaatgaatatctaattaaaataattaatagttcaattaaaacaaagtctcatattgtttctcaagacgaacatgaaaatggtgttagagcaatattgaattatggtcattcttttggtcacgttgttgaaaatttatgtggatacggcaaatttctacatggtgaggcaatatcaattggtatgaatattgcgggggaaatagcaattgagaaagggttatggtctaaagaagaattagagagacagaagaatcttttgaagagttacgatcttcctaccgagatccccaaaataaataaa

SEQ ID NO: 286737 - DNA, 723 bp, Unknown
  Bacterial polypeptide expressing nucleotide sequence isolated from the Sargasso Sea
tttaaaaataaaaatcataattattcaattattatttggtaaaaatgtgctaaatattctgccgaaaagaataaaattaatttgtccaaatacaaaaagtatagcaattttatttgatgacaatgttccaaaaaaatttaaaagtattttaaaaaaaaaactcaaaaactataaacttttatttttaccattcgaggccaatgagagaaataaatcttttgcaactataaattcctatttaaaaatattacttaaaaaaaatttaaatcgttcagacctccttattagtattggtggtggtattacgggcgatgtagcaggatttatagcaagtatttttaaaagaggaattaattttattaatattccaactacccttcttgcacaagtagactcggcaattggaggaaaaactggagttaattctgagtatggaaaaaatctaataggatcattttatcaaccaaaattagttatcagtgacacttcttttattaattctttaccgagaaaagaaatgatttgtggctacgctgaaattttaaaacactctataattaaagatttaggattttttaagtggttaagaaaaaatacaaagttaattttatcaaaaaattcaaaagccttaacatatgcaatcaaaaaaagttgtcagataaaattatattttgttacaaaagatttaaatgaaaaaggcttaaggatgattttgaatttcgg

SEQ ID NO: 286738 - DNA, 919 bp, Unknown
  Bacterial polypeptide expressing nucleotide sequence isolated from the Sargasso Sea
aaaaatatgcaaaaaaagaatgaaaaagttttttgtattatagattcaaaaatcaggaataatttaaatattaataataaaaaaaatattataattatttcctttaagtgtggagaaaaaataaaaacttttgatggatacaaaaatttagctgaaaaattaattttaaaagatgtgaatagaaaatctgcagttattgcaatcggaggaggttcattaggtgatttagtaggatttgttgcaagtactttattaagaggtttagatttttttcttatacctacaactcttttgtctcaagtagatagctcaattggaggaaagaatggcattaatacaagatttggaaaaaatttattaggaaccttctttcagccaaaagaagttttaatagatatttccgttttaaatagtttgccaagaaaagaaattagatcgggatatgcagaaataataaagcatgctttaataaaagattatgcattttttaactggttagaaaaaaatgcaaataaattattaaatttaaataaatctatattagaacaagcaatttataaatcgataatgataaagctttattacgtcataaaagatgaaaaagaatttttatccaacaataattctagagcaatgttaaattttggacacacaattggacatgctatagagaaccactataattatgaaaaatttaatcatggagaggcaatctctattgggatgataactgaagcaaaaatatcaaattatctcggtttattatcatctaaagaattagaaaaaataataatgcattttaaaaaatgtaaactaaaaatttatgataagatattgaaggatagaatattaataaaaattttagcgaaagataaaaaaaattttcaaaacaacatcaatttttcacttataaaacaga

SEQ ID NO: 286739 - DNA, 461 bp, Unknown
  Bacterial polypeptide expressing nucleotide sequence isolated from the Sargasso Sea
tatagattcaatcttagaaattttactgaataaaaatttttctagagaagatagtttattggcaatagggggaggtataactggggacgttggtggttttgctgcaagtttatttaaaagaggattacattttataaatattcccacaactcttttggctcaagtagactcatcgattggtggtaaaacaggagtaaattctaagtatggaaaaaatcttattggtagcttctatcaaccaaaattagtcataagtgatataaatactttaaaaacacttaataaaagagaaattgtttgtgggtatggtgaaattttaaaacactctataatctctaaaaagaaattctttaaatatttggatcagaattttgatgacattattaaacttaaatctccttatatagaaaaaacaatatttgaaagttgtaaaattaaaaaagacgtatttgaaaaagatg

SEQ ID NO: 286740 - DNA, 472 bp, Unknown
  Bacterial polypeptide expressing nucleotide sequence isolated from the Sargasso Sea
atgaagaaaattaaattaattgtaaaaacaacttctaaaaaatattcaataaatattggattaaatattgtaaaaaaaatatcaaatataattaaatctaatagaataaattttgaaaaatgcataattattgtagataaaaaagtaccaaaaaagaaattattagatttaaaaaataatcttttctgcaaaaaaaaaataattcatttttttagttctagtgaaaaaaataaaaatcaaaaaaatgttaataaaattttaaataaactttttaaaaacaattttaatagaaatgactgtataatttcacttggaggaggtattacaggcgatgtagctagttttgcggcaagtacatttaaaagaggaataaaattcattaatattccaacaactttacttgctcaagtagactcctcaattggaggaaagactgggatcaataataaatatggaaaaaatttaattggaa

SEQ ID NO: 286741 - DNA, 787 bp, Unknown
  Bacterial polypeptide expressing nucleotide sequence isolated from the Sargasso Sea
atgaaaaattataagttattgataaaaactaaaagcaaaaaatatacaattattattggaaaaaatattttaacaaaaattaaaaattattttataaatgagaaaatttattataataaatgtttaattgtagttgacacaaaaatttctaaaacatccttaaataaagttaaaaaaaattttaataaaaaagattgtattgtttataactttgtttcaaatgaaaaaaataaaaatttaaattcagtaaacaaaataattaatttattatttaaaaataattttagtagagatgattgtttgatttctttaggaggtggaataacaggagatgtagttggttttgccgcaagtatttataaaagaggattaaagtttataaatattcctactacattattatctcaagttgactcatcaattggaggcaaaactggaataaataacatttatggtaaaaatttaattggaagtttttatcaaccagatttggtaatctcagatatttctacgcttaaaactcttccggatagagaaataatttgtggatatggagaactattaaaacactctttaattaaaagtaaaaaaaattttaattacctaaataatttttataaacagataattaaacttaaaactccatacattcaaaaagcaatatttgaaagttgtaaaataaaaaaaagtattgttgaaaaagatgaaaaggaaagtggtttaagaaaaattttaaattttggacatacttttgcacatgcttatgaagcaacattgggatttcaaa

SEQ ID NO: 286742 - DNA, 853 bp, Unknown
  Bacterial polypeptide expressing nucleotide sequence isolated from the Sargasso Sea
aatgaaaaaaataagaatcaacttagcataaataaaattttacaaattttattaaaaaataattttaatagaaatgacactataatctctataggtggtggaattactggagatatatctggatttacagcaagtatttttaaaagaggaattaaatttattaatgtgccatcaactctacttgcacaagttgattcatcaataggtggtaaaaccggaataaattctaaatatggaaaaaatatgattggtagtttttatcaaccaagtttagttatttcagatatagattttttaaaaactctaccaaaaaaagaaatcatatgtggatatggtgaaattttaaaacattcattgataagtaataaaaaattttttttatttttaaataaaaatgcttttaaggttttaaacctaaaagaaccatatattgaaaaagcaattttcaatagttgtttgataaaaaaaaaagtaattgaaaaagatgaaagagaaaaagatttaagaaaaattctaaactttggtcacacgtttgcacatgcttttgaagctactctaggatattcgaaaaaactaaatcatggtgaagcagtaatattgggaattatgtgcgcttcaaagtttagtctaaaaaataaattattatcgactaaaaattttaatttaatcaaaaatcacttaattgaaaataagttaccattcaaattaaagaaatatttttcaaataaattactcaaaaaaataatttcatttatggaaaaagataaaaaaaataatacaaaaaagattagtcttgttttaataaaaaaaataggtgagccaatttacaatataaattttgaaaataaaaaat

SEQ ID NO: 286743 - DNA, 844 bp, Unknown
  Bacterial polypeptide expressing nucleotide sequence isolated from the Sargasso Sea
attataatagataataatgtaccaggaaaatttaaacaaattttaaaatctaaactcaaacattataaaccaatttttttctcttttaaaccaagtgaaaaatcaaaatcgatgcaatatgtaaattattatatagaaaaattattattaaataaatttaatcgtagcgatttagtaataagtgtaggtggtggtattacaggtgatctggctggatttgttgctagtatttttaaaagaggtataaactttgtaaatattccctccacattacttgctcaagtcgactcttcaattggtgggaagactggtgtaaattctattcatggtaaaaatcttataggttcattttatcaacctaaactagttatagtagataccaagtttcttaagtctttgccaaaaaaagaaatgatttgtggatatgctgaaatacttaaacatgccattatcaaagataagattttttttgaatggctaaagaaaaacacaaaaaatattttatttaaaaagtcaaaagatttaattttcgctattaaaagaagctgccaaatcaaaatgtattttgtaaacaaagatgttaatgaaaaaggtttaagaatggttttaaattttggtcatactttcgcacatgctattgaagcaaaatatggttactctaaagcaataacccatggtgaagctgttctttcgggaatgatattggctactagactttcagtcattaaaaaagtttgtaatgaaaaaattttaaaacaaattgaaaaaatttatatgaataataatttaaattttgtattaaaaaaattttctaaaactaaatctattttaaatttaataccct

SEQ ID NO: 286744 - DNA, 910 bp, Unknown
  Bacterial polypeptide expressing nucleotide sequence isolated from the Sargasso Sea
attggaatttaaaaaatgtttaatcataatagataaaaatatccctacaaaatatttatctttactaaaatttaaattgagaaataaaaaaacgtttattcataaatttaattcttctgaaaagaataaaaattttcaaagtgtaaattttttactagaaatattattaaaaaataattttaatagggatgacctattaatctctgtgggaggagggataattggggatgtatctggctttgtagcgaatatatttaaaagaggaataaaatttgtaaatattccatctacattattggctcaagttgactcatctataggtggtaaaactggtattaataataaatatggaaaaaatttagtaggcacgttctatcaaccaaatttagttttatctgatatatcactattaaaatctttaccaaaaagagagaagatttgtggttacggtgaaatacttaaacatagtttaatttcaaaaaaaaaaatatttatttttttgaaaaaaaattatcaaaatattcttgatataaagtccccgtacatcgaaaaagccattaaagatagctgtaatataaaaaagaatattgttcaaaaggacgaaaaagaaagtggtttaagaaaaatattaaatttaggacatacttttgcacactcattcgaagcagcactgaatttttcaaataaacttaatcatggtgaggcagtccttttgggtttgaaaaatgaaattttatttgcttataacaagaaaattatttctaaaaaagatatgttagaaatttttgatcatctaaattcacttgatattaaattagatataaacaatttttttaaaaagaaagatattgaaaaaatattaaaatttatgaaatcagacaaaaaaaatgtttctttaaaaataaatctt

SEQ ID NO: 286745 - DNA, 672 bp, Unknown
  Bacterial polypeptide expressing nucleotide sequence isolated from the Sargasso Sea
aatgattaaaaaagtatttgctggagtaaataagaagtatccaatcatcattggtaaaaaatctatattaaaggatttcttacctaaagcagttaagaacaactctaaaatattgattgtcactgatactgggatacctacagaaataataaaatcagttagcaaaatccttgagaaaggatcaaaaattataaaaattcacaaagttgctaaaggagaaaaatcaaagtcttttgctcaatttgaaagaattcaaaacaagcttgcgaagctccgttttgataggactgactgcattattgctttgggtggtggcgtcgttggtgatttagcaggttatgttgcttcaagctatcagcgtggtgtcgatttcattcaaatcccaacaacgctattggctcaagttgattcttctgttggagggaagacagcgattaatttagagcatggtaaaaatctagtgggtgctttttataacccgaaattagttttaatttgtccagaattcttaaaaactctttctaaccgggaatactttgccggattagctgaaatccttaaatacggattgatacgcaataagaagatttttaatatatttgaaacgagttatgaaaaaattcatacaagacatcaaaagactttaaacgaattgattcttctgtctgttaa

SEQ ID NO: 286746 - DNA, 859 bp, Unknown
  Bacterial polypeptide expressing nucleotide sequence isolated from the Sargasso Sea
attttaccaaaaaatgtttttgtaataaaaattgaatcttcagagaaaattaaaagtatatctagttatcacagcttaactaaaaaggtattatcaaaaggaatagatagaaattcagttattatagcaataggaggtggcacaattggtgatttgtcaggatttgtagctagtactatattaagaggtgtaaaatttattttaatgcctactacattactttcacaagttgatagctctataggaggtaaaaatggaataaatactagtatgggaaaaaatttaattggaactttctataatccagatgctgtatacatagacccaaaaattctaagctctttatcaaaaagagaaataaaatcaggatatgcagaaataataaaacattcactaataaatgacttatcatttttcaattggcttgatcaaaatcacaaaaaaatattttcattagaaaaaaatgcaattgtttattcaatttataaaagtgttaaaattaaatcaaaatatgtagaacaggataataaagaaagactaataaataaaaattctagagcaattcttaattttggtcatacatttggacatgccatagaaaccttttataattataaaacaaaaataacacatggtgaagccatttcaataggtatgatttttgcttcaaaattatcaaaaaatttagggtatatttctattgatgaattagataaaattattaatcattttaaaagaactggcttacctataagagacaataatataaattataaaaaaatattaactattctaaaaaaagataaaaaaaataataatgataaaatcaatttaatacttctagaaaaaataggtagag

SEQ ID NO: 286747 - DNA, 574 bp, Unknown
  Bacterial polypeptide expressing nucleotide sequence isolated from the Sargasso Sea
atgagacccattaatttaaaggtaaaaactaagcatgaaaattatcgaattataattggttctaatataatcaaaaatttagattcatatttaaaaaaaaattcaataattttcaatcaatgtcttttagtaattgataaaaatataccaaatagaatgattttaaagataacaaaatctttgaagaaaaagaaagcatttaaatttatatttactgctaatgaaaaaaataaaaatataaaatatgttaatcaaattttacaaattttacttgataaaaatttttcaagacaagattgtattattactattggtggaggcattacgggtgatgtcggtggttttgcagcaagtttgtataaaagaggtctaagttatattaatattccaacaactttattatctcaagtcgactcatcaataggaggtaagacaggtgtaaatacaaaagaaggtaaaaacttaataggaagtttttatcaacccaaaatagttattagtgatactgaatttttaagatcattaaataaaagagaaattatttgtggttatggtgaagtttttaaacattctt

SEQ ID NO: 286748 - DNA, 691 bp, Unknown
  Bacterial polypeptide expressing nucleotide sequence isolated from the Sargasso Sea
gttggaggcaaaactggaataaatacttcacatgggaaaaacttggtgggtactttccatcaacctaaatgtgtaattattgatactaaaattctaaaaacacttcctaaacgtgaactctatgctggatttgctgaagtaattaaatattctttaatcatggataaaaatttttataattatttgaatatcaattatgacaaaattctcaatttaaaagaaccatacataaatcatactgtttataaatcatgtcaaataaaatctcaaatagttagtaaagatgaaaaagaaaatggaattagagctatactaaatttaggacatacttttgctcatgcttttgaatctgaattaagttataaatctgatcttatacatggtgaagcagttgctatcggtatttgtatggcatttagactttcaagtaagttaaatctttgtaaaaattctgaagttaaaaaggttgaaaatttaatttcaaagtacaagttacccaccacaataaatgaaataaaaacaatttcattcaaaagaaaaaatgtttttaaaaaacttttctctgataaaaaagtaaaagatgggaaattaacttttattttatgtcaaagtattggtaaggctatgataaaaaatgatattgatgaaaatacgataattaattttttaaaagaagaaataaatgaatgaa

SEQ ID NO: 286749 - DNA, 820 bp, Unknown
  Bacterial polypeptide expressing nucleotide sequence isolated from the Sargasso Sea
atgaaaatatctaaaataaatgtaaaaaataaaaatacaaattacccaatatttattggtaatggggtaataaatttattgggaaaacaaatcaaaaaattatgtcctaagtcaaaaaaagtggttattatttttgataaaagaataccaaacaaatataaattcaaaattaaaaaacaggttaaaaattataagctgtatatttatgaatattttccaaatgaaaatttaaaatctttcacaaaagtaaatcatctagttgagagtttgctaaagaataatctaagtagagctgatgtaataatttcagcaggcggagggattattggtgattttgcaggatttgtagctagcattttaaaaagaggggtaaattttattaacataccatctacattgcttgcacaagtagactcttcaattggtggtaaaactggggttaattcaatcaagggcaaaaatctcattggttcattttaccaaccaaggttagtgataagtgaaattggtttgctaaaaagtttgaaaaaaagagaaagaatttgtggatttgcagaaattttaaaacattcaattataaaagatagtcaattctttgaaaaattaaaaaaaaatactgataaaatattaaaaaaccctaactccgacattatgagagatataattgcaaaaagttgtaaaattaaattattttttgtcaatcaagatgaaaaagaaaaaaatcaaagaatgatattgaactttggacatactttcgcccatggaatagaggcagcgaataaattttctagtaaaattaatcatggcgaagctgttttaa

SEQ ID NO: 286750 - DNA, 706 bp, Unknown
  Bacterial polypeptide expressing nucleotide sequence isolated from the Sargasso Sea
gctcaagtagattcttctgtgggtggaaaaacaggtattaataattcatatggcaaaaacctagttggaagtttctatcagcctgaggttgtggtatcagatataaatttactaaaatcattaaatactagggaaattatttgtggatatgctgaaatatttaaaagtagcctattagagagctatcaaagtttcaactacttagacaaaaatattaaagatattttaaagcttaaagaaccatttataaacaaggctattctcaagagttgtaatttgaaaaaaaaaatagttcaaaaggatgaaacagagaaaaacttaagaaaagttttaaatctaggacatacatttgcacatgcttatgaaagttgtttaggattttctaaaaaactaaatcatggcgaggcggttataattggaattaagaattcaatcgaatttagtaaaaagaaaaatttaataagtataaaatcttatgaattcattaaaaatcatattaataaaataccattagataaaagttttaaatcattatttaaaaaaaaagatataaataaaataatatcctttatgaaatctgacaaaaaaaatagctcaaaaaaaattaatttaatactatttaaaaatttcggtaaaataaaaactgattttcaaatcactgaattttctttaaagaaatttttaaattcacaactaagtaattaaa

SEQ ID NO: 286751 - DNA, 932 bp, Unknown
  Bacterial polypeptide expressing nucleotide sequence isolated from the Sargasso Sea
aaaaaaatataatactaaagtttataaaattacagctacagaaaaaacaaaaaactttatatatgcacaaaagttaattgaaaatattttaaagcatattttaaatagatcagattgtataatatctttcggaggtggaataactggagatttgtctgcttttgtttctaacctcacaaaaagaggaataaaatttattaacatcccaacaactcttttggctcaggtagatgcatcaattggaggaaaaaccgccgtcaattcccgacaaggtaaaaatcttattggaacattttatcaacctgattttgttttgattgatatttcaattttaaaaaatttaccacgcagagaaatgatttgtggttatggagaaatattaaaacatgcattaattttaaatagaaatttttttttatggttaactaaaaatgcaaaaaaaattattaatgataaaaataaaaaagttacaaaattagcaattattcaaagttgtaaaattaaatctaaaatagttagtcaagacgaaaaagaaaaaaatttaagaatgattttaaattttggccacacatttgctcatggatttgaagcggctacaaatttttcaaaaagattaaatcatggagaggctgtgttattgggaatgatcactgcaagtcatttgtcttataaaattaaattattacctagaaatgatttatctcttatcaagaaacactatactgaactaaaattaccaatgaaaatagataaattttttaaaaaaaataaaataaataaaattgtttcttttatgcaaaaagataaaaaaaattcagataataagattaatctaatcttaataaaaaaaataggaaaggtttcaaagccaataataattaattttaataaaaataaaattaaaaattttttaaataatttatataaataaa

SEQ ID NO: 286752 - DNA, 632 bp, Unknown
  Bacterial polypeptide expressing nucleotide sequence isolated from the Sargasso Sea
tatgaaagtatctaaactaataattaaatcaagttctggaaaatatcctatattaataggttctaacgtaatctctaatatatccaagttaatgtttgataactcaataaattttgaaaaatgcttattggtggtagataaaaatgttccaaaaaaatttatttctaaaattaaaaaatcattgaaaaataaaaaattatttatttttttaattacagccaatgaaaaaaataagaatcaaaaaacaactaattcaattcttaaaattttacttgataaaaatttttctagggaagattgtttaatagcagttggaggcggaattactggtgacgtaagtggttttgctgcaagtttatttaaaaggggtttaaaatttataaacatacccaccactttactgtctcaagtagactcatctataggaggcaaaactggaataaacacaaaccaagggaaaaatcttattggaagtttctaccagcccagactagtaattagtgatacaaattttttaaaaactcttagcaaaagagaagttatttgtggatatggtgaaattttgaaacacgcaattatatcaaataaagttttttataattttttaaataaaaattttttcaatattataa

SEQ ID NO: 286753 - DNA, 874 bp, Unknown
  Bacterial polypeptide expressing nucleotide sequence isolated from the Sargasso Sea
tattcttgatcgaggagaaaaagctaaatctcttaaaaactttcaaaaaatattaaattttttagctaacaataattttgatagagctgatctaataatagcagttggcggtggagtggttggagatatctcaggttatgttgccagctcatacctcagaggtattcaatttattcaaataccgacaacactgcttgctcaggtggattcttctgtaggcgggaagaccgcaattaatattgcagctggtaaaaatcttgttggagcattttataatccaaaagctgttatcgtagatacatcggtccttgatactctgcccaacagagagtttaaagctggattagcagaagttattaaatatgcgttaattcaagataaatctcttttttcattgcttaaaaaatattctcagaaagtactatccatggatcctaaaattatcgaggaaataattttttcatccattcaaaccaaagcaaagattgttaccaaggatgaaaaagaaaatggcattcgtgcaattttgaattttggtcatacttttggacatgctattgaagctcagagtaagtataaaaaaattcttcatggagaagctgtcgctaaagggatgaagattgcgtctaggatttcctatttagaaaatcttattactgcaaaagaacatcaagagattattgaattattgcaagagtttgaatttgacttatctctcagccaatacaaataccgagagttaaaaccatatatatttagagataaaaaaattaaaaaaggtaagttaaatttgatactgcttaatcaaatatcagatgcaatagtgacaaattcatttgaaataaaaaatcttcaaaaaggccttcaagattaa

SEQ ID NO: 286754 - DNA, 838 bp, Unknown
  Bacterial polypeptide expressing nucleotide sequence isolated from the Sargasso Sea
ttttctaaaattaattgtgattgacaaaaatgtcccaacaaaatttaaatcaaaatttgttaaaaatctaaaatctagtttaaaaaaaatttatatttttaatgctaatgaaaaaaataaaaatcagaaaaatgtagaattaatacaaaaaattttatttaaaaatagatttaatagggatgactgtttaattgcttttggaggaggtattactggagatgtagttggatattgcgcaagtacctataagagaggaataaaatttataaatattccgactaccttgctttctcaagttgattcatcaattggtggaaagactggtataaataatacttatggtaaaaatcttgtaggaagcttttaccaacctagcttggtagtttcagacctggacgttcttaaatccttaaatacaagagaaataatttgtggttatgcagaaattcttaaaagtagtttattagatagtttaataaaatttaaatacttagataaaaatttcaaaaatataattaatttaaaacaaccatttataggaaaagcaattctaaatagctgcaagctaaaaaagaaaattgttcaaaaagatgaaactgaaaaaaatttgagaaaggttcttaatttaggtcatacatttgcacatgcttatgagtctaaattaagtttttcaaataaattaaatcatggtgaggcagttataattggtattaaaaatgcgcttgcattcagttataaatacaaacttctaaaaggaagatcttataatttaatcatgaatcatataaataagattccttttaaaaaaaaatttaaagaactttttaaaataaaagat

SEQ ID NO: 286755 - DNA, 814 bp, Unknown
  Bacterial polypeptide expressing nucleotide sequence isolated from the Sargasso Sea
tatgaaagctcaacaaataaaaattaatactaaatcaaagaaatattctatttttatagggtctaaattaataagtaaattagacaaaattttaatagctcaaaaaatttcatttcccaaagttatggtagttattgataaaaatataccttcaaaatttaaatcaatattaattaaaaaattaaattctaaatttataaaaaaatatatttttattgcagatgaaagaaataaaaatcaaagaaatgtagatttaattcaaaatattttatttaaaaatagattcaacagagatgattgtatagttgcgtttggaggaggtatcaccggagatgtagttggctattgtgcaagtatctataaaagaggaattaagtttattaatattccaacaactttgctttcccaagtagattcatcaattggaggtaaaactggaataaacaattcttatggtaaaaatttattgggaagtttttatcaacctaatttggtaatttcagatacagatttactcaagtctctaaactcaagagagataatttgtggctatgcagaaatacttaaaagtagtttgttggacagtattaaaaattttaaatatttggataataatctaaacagcatattaaaattaaaacaaccctttattgagaatgcaatattaaatagttgtaatttaaaaaaaatggttgttcagaaagacgaggatgaaaaaaatttaagaaaaatacttaatttaggtcatacgtttgcacatgcctttgagtcttgcttaggtttttcaagtaaattgaatcatggtgaggctgtt

SEQ ID NO: 286756 - DNA, 754 bp, Unknown
  Bacterial polypeptide expressing nucleotide sequence isolated from the Sargasso Sea
cgacctgaccggctttgttgccgcttgttaccagcgtggcgtgcgttttattcaaattcctaccactttgttgtctcaggtggattcttcggtgggtggcaaaaccgcagtgaaccatccactgggtaaaaatatgattggtgcttttaagcaaccggatctggtgctgattaatactgctgttttaagctctctacctgcctcagaattcgcagctggtatggcggaagtcatcaagtatgcactaatcagcgatctggcatttttcaattggctggagcaaaatcagcaggcgatccgtgaactgcaacctgcagtcttaggtgaaatgatccgccattgttgccagatgaaagccgacattgtcagccgcgatgaaacagagcagggcgaacgggctttactcaatttaggccatacctttggccatgctattgaagcctttctggggtatggccactggttacacggtgaggctgtggccgtaggtatggtgatggccacacaactagcggtgagccgtggtgatgtcagtcgcgacgagttacaacgtatcattcgcttattgtctgcttttaatttgcctgtagcgcctcctgtgcaaatgaagatcgcagattttatgccctatatgaaaaccgataaaaaagtacaggcaggcaaaatgcgctttatcgttccgatctccttgggacaaagtgcaatagtcgatgatgtgaccgaacaagaactaatggctatcttcagcatatga

SEQ ID NO: 286757 - DNA, 811 bp, Unknown
  Bacterial polypeptide expressing nucleotide sequence isolated from the Sargasso Sea
gcatttgagcagcgtctggagcgcagctcgttgatgctggccttgggtggaggggttgtcggagacatgaccggatttgcagcagccacctggctgcgcgggatccaggtgattcaggtccccacgacccttctggccatggtcgatgccgccatcggcggcaaaacaggggtgaaccatcccggcggcaagaacctgatcggcgcctttcaccagccgagcctggtgctgatcgatcccgaaacgctcaacacattgcccgagcgggagttcagggccggcatggcggaagtgatcaagtacggaattcttggcgatcccgcgctgttccagtgcctggaggaggggccagaacccaactcagctgctggccttggcaacagccggctcgaaaccattctggaacgatcggcagcggccaaagcacgggtggttgctgcggacgaacgggaaggggggctgcgggccgtgctgaattacggccataccttcggtcatgtggtggaaaccctctgtggttacggcacctggctgcacggcgaggcagtggccatcgggatggtggcggtcgggcagttagccgtgaaccgcggcagctggacggcggacgaggccgggcgccagacgcagctgatccagcgctgtgggctaccgacggcctggccggatctggaccctgacgccgtgctgcgcacccttcagggagataagaaagtgaaagacggtcgcttgcgcttcgtgctgcccatggccatcggccgcgtggagatccgcgatgacatcagccgggatgaaatcctgcattgtctgg

SEQ ID NO: 286758 - DNA, 748 bp, Unknown
  Bacterial polypeptide expressing nucleotide sequence isolated from the Sargasso Sea
agtcttaagaggaatagacttaattcaagtaccctcaacattgctagcacaagtagacagctcagttggaggcaaaactgcaataaactctgggtatggtaaaaatttaatcggtacattcaaacaacctaaatgtgtaattatttcaactgatcttctaaaaactttaaaaaaaagagatttagtttctggttatgctgagattctaaaatattcatttatcaaagataaattattttttggttggttagaaaaaaatgctaaaaaaattttatccttaaatactgaaagttgtatttatgcaataaaaaagagttgttctatcaaatctgatattgtgtcaaaagatgagaaagaaaagggtattagagaactattaaatttcggacatacatttggacatgcaattgaatcaattacaggatattccaataagattaagcatggagaagccatatttattggaatgtatctagcaataaagttttctattttcttaaaattatgtgatgaaaaagttgcaataaattatgccaaacatttaaatggtttagggattcatttcaaattagatgattatggtcttaatatctcttataaagaattcattaaacatatgaaatttgataaaaaagttaaaaatggtaaaatgaaatttgtactaataaaaaaaattggagttcctgttcggatttttttggaggatgtaagattgctttctatctttttaaagaatgaattaaaataa

SEQ ID NO: 286759 - DNA, 453 bp, Unknown
  Bacterial polypeptide expressing nucleotide sequence isolated from the Sargasso Sea
aatgcaaaaggtaagtgtaggtttagaaaaacactcctacgacatattaattggccatggtttaatcaaaaattctggtcaaataattgcaccgttgctatctaacaatcgtgttgttgtaatcacagatcagaacgttgctttattacatttgcgttcttttgaaagttcgatgaaatcagcaggagtatccgtttcctcattagttcttccctgtggtgaaagtacaaagtcctggaatcacttaattcgagttgtggaatggattttagagcagaaagtagagcgtaacgatctggtggtcgctctcggcggtggagtgataggtgatttagtgggcttcgcagccgcaactgtaagacgcggcgtacaatttgcgcaaattccgacttctttgcttgctcaagtcgatagttccattggaggtaaaacgggtattaatgtgagtttcgg

SEQ ID NO: 286760 - DNA, 806 bp, Unknown
  Bacterial polypeptide expressing nucleotide sequence isolated from the Sargasso Sea
aataatttgtatagggggtggtattgctggagatgtatctagttttgctgcaagtatttataaaagaggtcttaaatttattaatattccaacaactctattatcccaagttgactcttctataggtggaaagactggtgttaataccaaattcggtaaaaatttaattggttcattttaccaaccagacttagtagtttctgatacaacatttcttaaaagtttacctcgtagagaaataatttgcggatatgctgaaatattaaaacattcgctaattaacaataaaagattatttcattttttaaataataatctaagcaatattttaaaattaaaaaaaaaatttattgagaaggcaattttagagagttgcaaaataaaaaaggaaattattgaattagatgaaagagaaagcaatttaagaaaaagtttaaattttggccatacatttggtcatgcatatgaagcttcattgaattactcaaaaaaattaaatcatggagaggcggtcctttatggtattttatctgctacaaaattaagtaaaaaattaaaaacattaaataatgaagagtatcaaataataatagaacatctatcgaaattaaaatttgataatctaaaaaaattttttaataaaaaagatatagataaaattgtacgctatatgactgtagataaaaaaaatacatcaaaaaaaataaattttattacattaaaaaaaataggtagatataatttaaaaaatcaacttaatccttcagaagttagaaattttattaaattaaatttatttaattaaa

SEQ ID NO: 286761 - DNA, 695 bp, Unknown
  Bacterial polypeptide expressing nucleotide sequence isolated from the Sargasso Sea
aaaaaattatctaaaaatatttctaaaattataaaatctaactcaattgattttaacagatgtcttttagttatagatagtaatgttcctaaaaaatttatttatactatttcaaaagctttaaaaaataaaattatttatatccattttttaaaagcaaatgaattaaataagaacatgaatagtattaataagatattagaaattttattaattaaaaatttttcaagagatgactgtttgatatctattggaggaggaattactggggatttaagtggttttgccgcaagtctttttaaaagaggacttaaatttataaacataccaacaactcttttatctcaagttgactcatcaattggtggcaagactggtataaatactaagtatggaaaaaatctaattggaagtttttaccagcccgatcttgtcatttctgatactgaatttttaaaatcattacctaagagagaaatagtttgtggatacggagaaattttaaaacattcaattattgggaataaaaaattttacaattttttaaacaaacataaaaagaaggttttagaactaacttccccgtttcttgaaagagctatttatgaaagttgtaaaattaaaaaatctgtagttgaaaaagacgaaaaagagaaaaatttgagaaaaattttaaattttggtcattcgtttgc

SEQ ID NO: 286762 - DNA, 913 bp, Unknown
  Bacterial polypeptide expressing nucleotide sequence isolated from the Sargasso Sea
tctaagatttgataaatgtttaatcgttacagataaaaatattcctcacaaatttaaaaaacttttatacaaaaatataaaaacaaataaacttgttaaaatagaaattacagcatcagaaaaaaataagaattaccgaacaattgaaaaaattcataaagttttatttgaaaataggtttaatagagaagattgcgttatttcttttggtggaggaattattggggatatagttggatttgcatctagtacatttaaaagaggcatgaaatttgtaaatattcccacaactttactggctcaagttgattcatccataggaggaaaaacaggtgtaaataataaatttggaaaaaatttgattggaagtttttatcaaccagatttggttatttccgacatgaatattttagcttctttaccagaaagagaaattatttgtggatatgctgaaatattgaaaagtagtattatagataattttaataattttctttatttagacaaaaatttaaaaaaaattttaaaattaaaatcacctttcattgaaagatccataattaaaagctgtaatttaaaaaaaagagttgtagaaaaagatgagaaagagaagaactacagaaaagtattaaacttaggtcatacctttgctcatgcttatgagtctactttaggtttttctaaaaaattaaatcatggagaagctgtaattttaggtattaaaaatgcagttgaattcagttttaaaagaaaaattttatcaaaacaaaaatttaatattattttaaatcatattaatagaatcaggatgaaaccaaaaattgaaaaattatttaaaaaaacacatgtttctaaaattatgaattatatgagaagtgataagaaaaattattcaaataatattaacttaatt

SEQ ID NO: 286763 - DNA, 761 bp, Unknown
  Bacterial polypeptide expressing nucleotide sequence isolated from the Sargasso Sea
gcatttaaagagaggaataaattttataagcgtaccaacaacattattatctcaggtagatgcagctgtaggaggaaagactggagttaattctaagtatggtaaaaatttaataggatctttttctcaaccaaaattagtaattagtgatacatctgttttaaaaagtttacctaaaaaagagatggtatgtggttatgcagaaatattaaagcatgctgttataaatgataaaaaatttttcaactggttaaaattaaatacaaaatatattttttctcatcactcaaagaagttaatttatgcaatcaaaaaaagttgtaatattaaattatttttcgtcaataaagatgtgaaggagaaaaattcaagaatgattcttaatttcggacatacttttgctcatgctatcgaagtaaagaataattattcaaaaaaaattacacatggcgaagctgttcttgctggtatgattttagctacaaagctttcagtagtaaaaaaagtttgtaataaaaaaaccttgagagatcttatggaaatttacgcaacaaataatttaagctattcttttaaaaaatataaaaagaccaaagaaatcaacagtctaattccttatttgaaaaatgataaaaaaaacaatgatgaaaaaataaattttatattattaagcaagataggcaaaactactatgccttataaaaacaaaattactattaaagaattaaaaaagcatataggactctttactcaatactaat

SEQ ID NO: 286764 - DNA, 868 bp, Unknown
  Bacterial polypeptide expressing nucleotide sequence isolated from the Sargasso Sea
aagggcctgactatgaaaaaagtaacagtgccactagatactaggtcctatgacattttgattggggaagacttaatccctaactttcctattcatttagagggcattttaagtcgtaactttttagcaattattacagataaaaacgtggaaaaaatccacctatctagactagttaacgctctgtctgaagttggaattgaaactaaaatattgtcgattgaccccggtgaaggaagcaaatcttggaaaactctccaaatgacggttgactggatgttggaaagtaaaattgaacgcaatgacatagtggttgctttgggtggtggtgttgtgggggatcttgtaggctttgctgcagcaatattaaggcgtggtgttcgttttattcaatgtccaacttcacttttagcgcaagtagatagttcagtgggaggcaaaacgggaataaactccgcatatggcaaaaatttggttggtgctttttaccaaccatcacaagttatttccgatatttccaccttacacacaataaatgaaagagatttcttagccggttacggagaggtagtgaaatacggtttattgggtgatcatgatttttattgttggttggagaaaaattttacaaagattaaagaaagagacacccagacacttatcaccgctgtagctcattcatgtgagatgaaggcagaaattgttaccaatgatgaaaaagagcatgggaatagggcattgcttaatttgggacatacattttgtcacgcgcttgaagccgctactggttactcagaccgcatgttgcacggggagggggtggcaattggatgtattttagcttttgatctatctgcaaggatggaat

SEQ ID NO: 286765 - DNA, 454 bp, Unknown
  Bacterial polypeptide expressing nucleotide sequence isolated from the Sargasso Sea
caaatttatttacaatgcaaatgagaaaaataagaaccagaaaaatgttggtaaaattttagatcttttgctaaaaaagaatttttcaagagaggactgtttaatatctattgggggcggcattaccggtgatgttgcgggttttgctgcaagtttattcaaaagaggtttaaaatttgttaacattccaacaacattgttatcacaagttgattcatctgttggtggaaaaacaggtattaacacatctcagggcaagaatttaattggaagtttttatcaacctaaaattgttatcagcgatgtaaacgttttgaggagtctaccatttagagaagtagtttgtggttacgcagaaatagtgaagcatgcattaattgcaaataaaaagttttataattttctagataaaaatgttgatgacatattaaaacttaagtctccaaccattgaa

SEQ ID NO: 286766 - DNA, 868 bp, Unknown
  Bacterial polypeptide expressing nucleotide sequence isolated from the Sargasso Sea
  misc_feature (776)..(776): n is a, c, g, or t
aaagtgtttaattgttacagacaaaaatattcctaaaaaatttaaacaacttttatacaaaaaactaaagacaaaaaaacttttcaaagtggatatcttagcatctgaaaaaaataaaaattatgatactgtagagaaagttcattcaattttgtttaaaaatagatttaatagagaagattgcgttatttcttttggtggaggaattgttggtgatatagttggttttgcatcaagcacttttaaaagaggtataaaatttattaatattccttcaactttactctcacaagtagactcatcaataggtggtaaaactggtgtaaataataaatttggaaaaaatttaattgggagtttttatcagccagatctagttatatcagatatcaacattttagactcattgcctagaagagaaattatttgtggatatgctgaaatattaaaaagcagcattattgagaattatactagctttatttatcttgataaatacctacaacaaattttagaattaaagtcaccttttattgaaagatcaattttaaaaagttgcaatttaaaaagaatggtagtggagatagatgaaagagaaaaaaattttcgtaaagtattaaatttaggtcatacctttgctcatgcatatgaatccgcgttgggtttttccaaaaaattaaatcatggagaagctgtcattttaggtataaagagtgccacacagttcagttacaataaaaaaattttatcgaaatcaagattagataatatttcanaccatattgaaaaaattgggataaatttaaaaattaataattttttcaaaaagaaacattctactaaaattttaaattatatgaaaaatgat

SEQ ID NO: 286767 - DNA, 893 bp, Unknown
  Bacterial polypeptide expressing nucleotide sequence isolated from the Sargasso Sea
tatgaaaccctttaaacttaacgtaaaaacaaaggatgaaaactatcctataataattggttcaaatataattacaaatttagcgatatattttaaagaaaattcaattaattttgatcaatgtcttttgataattgataagaaagttccgagtaaaatgatttctaaaatcaccaaatccttaaagagaaaaaaaatctctaaattcttatttaatgctaatgaaaagaataaaaacctaataatagttaataaaattattcaaattttacttactaaaaatttttcaagacaagattgtataataactattggaggaggtatcactggagatgttggaggttttgctgcaagtttatataaacgtggcttacaattcattaacttacctacgactctgttatcccaagtagattcgtcagttggtggtaagacgggagtgaatactaaagagggtaaaaatcttataggaagtttttatcaacctaaaattgttattactgatactgattttttaaaatctcttccaagaagagaaattatttgtggatatggtgaagtttttaaacactcattaatattaaataaaactttttataaatacttaaataataatgcttcaaaaattttgaatttaaagaaaccgtttatagagaaggcaatttatcaaagttgtaagataaaaaaaataattgtcgaaaaggatgaaaaagaaaaaggaattagaaaaatattaaactttggtcatacctttgcccatgcttatgaggcaacacttggatattcaaaaaaacttaatcatggtgaagcagttatacttggaatttatacggcactaaaatttagtttggatgttagattaattaaaataggagagtatgaaataatttata

SEQ ID NO: 286768 - DNA, 817 bp, Unknown
  Bacterial polypeptide expressing nucleotide sequence isolated from the Sargasso Sea
aatgcagaaaataaaatttaaaaactctaacaaagattactcaatattaattggaagtaatattttaagtgtgttgtcatcaaaaattaaatctctttgtccacaaactaaaaaagtagctttaatttttgataaaggggttccaattaaatataaaaaaattttattaagaaatttaaagcgttacaatgtgttcatctataaaatcaatgcaaatgaaaaagctaaatcaataaagtcagcaactttcttgttagagaaattgcttttaaaaaattttaatagaaccgatttaatcattggcattggaggaggaattacaggagatataagtggatttgttgctagtattttaaaaagaggtgtaaattttataagcataccaacaacgctactatcacaagtagatgcagcagtaggtggtaaaacaggtgtcaattctaagtatggtaaaaacttaattggatctttctctcaaccaaaattagtaattagcgatatatcttttctgaaaagtttaaaaagaaaagaaatggtatgtgggtatgcagaaatattaaaacatgctgttattaaagataaaaatttttttaactggcttaaatataacactaaatatattttttcccacaattcaagaaagctaatatatgcaattaaaaaaagttgtaacattaaattattttttgtaaacaaagatgttaacgaaaaaaatttacgaatggttcttaactttgggcatactttcgctcatgctatagaagtaaaaaataattattcaaaaaaaattacacacggtgaggctgttcttgcaggg

SEQ ID NO: 286769 - DNA, 889 bp, Unknown
  Bacterial polypeptide expressing nucleotide sequence isolated from the Sargasso Sea
tatgaaagtacataagataagcgccaaaactaaaaatacaaagtatcctatacttgttggaaatgacgtaataaaattacttggaaaacaagtccgtcttgtttctccaaatacaaaaaaggttgcgcttatactggataaaaatattccaaaaaaatataaaaaaaaaataaaaaaacaattaaaaaattactacatttatacaaaagaatatttaccctcggaaaatcttaaatcatttagatacgtaaattttcttgctgagaaattattagaaaaaaacttcaatagaaatgatattataatagctgctggaggaggaataattggtgacttcgctggatttacagcaagtattttaaaaagagggattagttttgtaaatttaccatctacacttttgtcccaggtagattcttcaattggggggaaaactggaataaattctaaaaaaggaaaaaatttaattggctcattttatcaacctaaattagtaatttctgaattgtcgtttttaaaaagcttaccaaaaagagagttggtctgtggttttgcagaaattttgaaatattcattaattcgggatcaaaacttttttaaatggatcaaaaaaaattcaaaaaatattttaaaagaaaaaaataatgaaattttgaaacatgcaatagttagaagttgtaaaaataaaatttattttatttcaaatgatgaaaaagagactggaaaaagaatgttattaaattttggtcatacctttgcgcatgctattgaagctgcgagtaattttttcaaaaaaataaatcacggagaagctgttcttattggaatgcttttagctacaaagctatctgttaaaaaaaatatttgttctaattcaacactaaaacaa

SEQ ID NO: 286770 - DNA, 460 bp, Unknown
  Bacterial polypeptide expressing nucleotide sequence isolated from the Sargasso Sea
tatgaaaaaagtaacagtgccactagatacaaggtcctatgacattttaattggggaagacttaatccctaactttcctttacatttagagaatattttaagtcgtaaatttttagcaatcattactgataaaaatgtcgaaaaaatccacttgtctagactagttaaggctctttctgattcagaaattgaaacaaaaatattatcaatcgatcccggtgagggaagcaaatcttggaaaaccctccaaatgacggttgactggatgttggcaactaaaattgaacgcaatgacatagttgttgctttgggtggtggtgtcgtaggggatcttgtaggctttgctgcagcaatattaaggcgtggtattcgttttattcaatgtccgacttcacttttagcgcaagtagatagttcggtgggaggcaaaacgggaataaactccgtccatggcaaaaat

SEQ ID NO: 286771 - DNA, 871 bp, Unknown
  Bacterial polypeptide expressing nucleotide sequence isolated from the Sargasso Sea
cattaaggactaccttcccagcgcagtatcaaaaaataacaaaattcttattatttttgataagaatattcctgatgattatatcgaacttgtcagaaaatccattccttctagcaaagtaactgacgtgctcaaaattaagcctggtgagcaatcaaaatcattttctagctttcaaatgatcctcaacaagcttgctaaaaagaaatatgatagatcggattgtatagttgccattggaggaggtgttgttggagacttgagtggttttgtagctgcaagctatatgagagggatagattatattcaagtaccaacttctcttcttgcgcaagtcgattcgtccgtaggaggaaagactgctattaacattgagtctggtaaaaatcttgttggagcctttaagaatcctaagttagtgttgatatcttcgaccctattaaaaaccctcccggagagagaattcaaatcaggaatagcagaaataattaagtatggattaatttataacaagaaaattttcaacatctttgataagcaacataaactgattctgaaaagaaaccaaagagtaattgaagagcttatacatgagtcggttaagacaaaagcaaaaattgtcactgaagatgaaagagagttaggtataagagctatattgaactttgggcatacctatggtcatgcaatagaagcaataaataattatgaaaatattttacatggtgaagctgtagctatgggtatgagaatggcttctaaaatgtctatgcttgagggccacttaaatgaaaaagcttataaaaaaataatcaatgtttttgatgctcttggttttcctaaaaatacatcaaataattattctgatcta

SEQ ID NO: 286772 - DNA, 667 bp, Unknown
  Bacterial polypeptide expressing nucleotide sequence isolated from the Sargasso Sea
catgccaattaatttaaaagtaaaaacaaaaacagaaaattacccaatcataattggttcaaatttaataagtaaattaaatttttatttaaacagagaatcgattttttttaatcaatgtcttctagtcattgacaaaaatgttcctaagaagatgatttcaaaaatatcaaaatctttaaaaagaaataaagttcataaatttatatttaaggcaagtgaagaaaataaaaatataatttctgtaagaagagtcttgcaaattttactcaacaaaaatttttcaagacaagattgtttaatcacaattggtgggggaattactggagatgttggtggttttgcagcaagtttatataaaagaggtcttaactttgtcaacattccaacaactctcctatctcaagttgattcctctattggaggcaaaactggggttaacacagaagaaggaaaaaatcttattggaagtttttatcaaccaaaaatggtaataagtgatgtagattttttaaaatcattatctaagagagaaattatttgtggttatggtgaaattttcaaacattcattgattttaaataaaagtttttttaaatatctagataataattcttcaaatattataaatttgaaaagtccatttattgaaaaagccatcctcgaa

SEQ ID NO: 286773 - DNA, 800 bp, Unknown
  Bacterial polypeptide expressing nucleotide sequence isolated from the Sargasso Sea
tatgagcgcggttactagggtttccgtccatccagagggcggagcctatgaaatttttgtaggtgctgacgttatgcactctgctggtcaaaggatcgcgaaggcgctgggccaacgacaaatctttataattaccgatgaaaatatttcgctcctatataagtcgcagttggaaagtaacttagcggaagccggtcatgaggttgaaaccgttgttgtcgctcctggggaaaggtcaaaaaatttccagtcactggagtacgttgtgggtgagatcttgaggcggggtgtgagtaggcactcccttgtagtagcctttggtggaggagtggtcggtgatttggcaggttttgtgtcaagtattatgttgcgtggaatagactatgtgcagatacccacgaccttgttgtcacaggtggatagttctgttggcggtaaaactgcgattaatactaacttaggtaaaaatttggttggaaccttttatcagcctaaacttgtgctagtggatacgggccttttaaagagcttgccctcgagagagttaagagcgggttatggcgaggtagtcaaatatgccttgctaggcgatgcgccgttgtttgaatggttggaacataacggtggggatgtacttggagtggatgcggaggcttgccggtacgtggtagcggcatgctgtcaaaacaaagctgagattgtaactagggacgaacgggagaaaggttctaggctcctcttgaatctaggacatacttttgggcatgccatggaggctgaccttagttatgacaatagac

SEQ ID NO: 286774 - DNA, 832 bp, Unknown
  Bacterial polypeptide expressing nucleotide sequence isolated from the Sargasso Sea
aatgattagaaataaaccaataggcattttatcaagaaaagctagttacgatatatggataggaaaaaatttattaaaaaaaagaaaaagcgatcttaaattaactttaggcgaaaagaaaatagcaattataacggataaaaatgtgcacgcttgtcaatattcaaatctgttaaatcaagtaaccgatttagatataaacccccacttgcttttaattgaacctggtgagtcatcaaagagctgggatattttgaaaaaggtgcttaattggctaactgagctaaactttgataggactgactatattattgctttcggtggaggcgtagttggcgatttagtttcccttgctgctagcttgtttcgtagaggtataaatttgattcaagttccgaccaccttattatctcaagtagatagttctgttgggggtaagaccgctataaatagtgggtccgctaaaaactctattggaactttttatcacccaaaggctgtttattgcgacacatcgtttctaagcacattatcagaaagagattttctctctggatatgcagaggtttttaaaatggcgcttgtatttgacaaagatttctacaaattcttgctaaaaaaccagaaacatacgctagcaagagatcataagatcttaatatatatcatagagaaatcacttgaactaaaaagtaagattgttgaaatcgacgaaaccgagaagggagaaagggcactattaaactttggtcatacctttggacatgccttagagagttatttcaattattcacaaaagctgttgcatggagaagcagtttcgctgggcatg

SEQ ID NO: 286775 - DNA, 886 bp, Unknown
  Bacterial polypeptide expressing nucleotide sequence isolated from the Sargasso Sea
tttttttataaagtattaataatatacgactcgaagattaaatttaaagaagttttaaaaataaaattaaaattgagaaaaaaagaggtgcttatttataaatttgtatcaaatgaaaaatctaaaaagtttaatactgttaataaaataattagtaagttattaaaaaataattttactagacaagactgcattattgcattcggaggcgggatcacaggagatttatcaggtttcgtgtctagtatttataagagaggaattaaatttattaatatcccaactactttattagctcaagtagatgcgagcataggaggtaaaacaggcatcaatcatgagatttatggcaaaaatttaataggttcgttttatccccctaatcttgttatatctgatacgaattatcttaaatctttaagtaaaaaagaattaatttgtggatatgcggaaatatttaagcatagtttaatttacagtaaacaaaatttcctttttttagaaaaatttcataaaaaaattatatcactagaaaaaaatattctagaaaaagcaattttagaaagttgtaaaatcaaaagaagtattgttcaaaaagatgaaaaagagaaaaatttaagaatgatgctaaatcttggtcatacatttggtcatgcttatgaagctgcttgtggatataaaaaaatcttaaatcatggtgaaggagtaatgcttggaataaaaactgcaactttattcagtttaatagaaaaaaaattatctttaaatgaatttaaaagaataaatcagaatatattaaatttaaattttaatttaaaactcaataagttttttaaattaacagatataaataaattaataagtttcatgaaaaatgataaaaaaa

SEQ ID NO: 286776 - DNA, 612 bp, Unknown
  Bacterial polypeptide expressing nucleotide sequence isolated from the Sargasso Sea
catgaatcaatctaaaatcaaaataagaacaaaaaatcaatcatataatatagttgttggtaaagatttaattaaaaatttttctaaattattaaaaaataattttatttattttaataaatgcttgcttgtagtagataataatgtaccaaaaaaaatagtaaaaaaaatttattcacaattaaaaaaaaataaattccttttttactttaaatctactgaaaaaaataaagatcaaaaaagcattgataagttactaaatatacttttaaaaaataattttaacagaaatgactgtataatatctcttggtggaggaatagttggagatgttacgggttttgcagcaagtatttttaagcgtggtataaaatttgtaaatataccaacaaccttattagcgcaagttgattccagtattggtggaaaaactggaattaataccaagtatggtaaaaatcttattggaagtttttatcaaccaaatttggtaatttctgacacaatatttctaaagtctctaccaaaaagagaaattatttgcggatatgcagaaattctaaagcattctttaataatgaacaaaaaacttttttcatatcttgataaaaa

SEQ ID NO: 286777 - DNA, 737 bp, Unknown
  Bacterial polypeptide expressing nucleotide sequence isolated from the Sargasso Sea
tcaaatcccaactactttgttggctaatgtagacagcagtgtgggaggaaaaacagctgttaatcatcctttaggaaaaaacactatcggatctttcaaacaacctgaatatgtttgcattgagttatcattccttaagacattgccatcacgtgagttaaaagctggcttcattgaacttttaaaacatggtatcattcatgacgaagaattatttgattttattcaaagctattctctagagccgcttaattttgaatttttagaagaagctatacttcgctcgtgcaccattaaaggtcggattgttgaaaaagatgaaactgaaaatggtatacgtgctactctgaattttggacacactctcggacatttgatagaaactcacgcaggttacgggaagtatctacatggtgaggcggttggattagggatgttttttgctgcatttgtttcatggcgctacgacaatttgaaggaaaatgaatggatgaaaattaaaaattatctcagaaaaattttaattagtatcaaacttcctccaatagaccaaaatctttttcgtgagatgattttgcatgacaagaaatcacaaaaacagtctataaacttcattatgctttgtaaattgggtgagagttatatcaataaggaaacttcagttgatatgctttgggaagagtttaagaagtttgtagaaaaattcgcagattttattgaaattgaattaagataat

SEQ ID NO: 286778 - DNA, 634 bp, Unknown
  Bacterial polypeptide expressing nucleotide sequence isolated from the Sargasso Sea
atgagaacaattgaagtaaatcttgataaagatccatataaagttctatattctgatcttcaacaaggaattcaaactatccagcctgagagtattaacgggaggaaaattgcaattatttctgatgatcatgcggcaaataataacctagacgtgctcagaaaggctttatcacgctatgacattaagataatcgaaattattctgtcccccggtgaaaaaaataaagaattaatggttgcagaaaatattattgataagcttttatcaaaaaagtttgaacgcggtgatcttataattggacttggaggaggagtaattggggatctgtctggtttcgttgcaggtattatacatcgaggagttaaatttattaacatacctacgactttattagcacaggtagactcatcaataggagggaaagcaggtgttaatagcaaatatgggaaaaatcttattggttgcttcaagcagccggaattagttatttgtgatataaattcactctccacacttccaaaaagagatctactggcgggttatactgaactaattaagcatgcactcattggagatgctgaattattcagctatctccaaaataatgtcaaaaatatatttaatgaccata

SEQ ID NO: 286779 - DNA, 757 bp, Unknown
  Bacterial polypeptide expressing nucleotide sequence isolated from the Sargasso Sea
aatgactgcattatatctttatggaggcggtattgtcggagatgtgtcaggttttgcagccagtatttttaaaagaggattaaaatttgttaacatacctacaacacttttggctcaagtagattcatccattggtggtaaaacaggtgttaacaataaatatggaaaaaatttaatcggatcttttatgcaacctgatttagttatatctgatgtaaatatgttaagttctcttaaaaaaagagaaataatttgtggttatggtgaaattttaaaacactcattaattagtaatgaaaaaattttcaactatttaaaaaaaaattatctcaaaatatttaaattaaaatctccatttattgaaaaaactattgcagatagttgtaagattaaaaaaaatatcgttcaattagatgaaaaagaaaaaaatttaagaaaagttttaaatttagggcatacttttgctcacgcatatgaagctgcactttcttattcaaaaaaacttaatcatggagaagcggttattttgggaattgttagtgctgcaaaatttagtgttaaaaataatattttaaataaaaaagattataagcagataataaatcacataaaaaatttaaaaataccgataaatttaaatttttattttaaaaagaaagatattaatttaattattaaatatatgaagtcagataaaaaaaacaattcttcaaagataaatttaattttaattaaaaaaataggaaaagtaatttta

SEQ ID NO: 286780 - DNA, 820 bp, Unknown
  Bacterial polypeptide expressing nucleotide sequence isolated from the Sargasso Sea
tatgaaaatatctaaaattcaggtaaaaaataaagatacaaattattcaatactagtaggtcatggggcagtaaatttgcttggagaacaaattaaaaaattatgtcccaaaacaaaaaaggtaggtttaattttagataaaaatatacctatgaaatataaaaaaaaaattaaaaaacaaataaaaagatacgaagttcatctttatgaatttacgcctaatgaaaatctaaaatcattcacaaaagctaacaatcttatagagagtttactaaaaaataatttcaatagaagcgatgtcattattgcggcagggggtggaataattggtgattttgcaggtttcgtagcaagtattttaaaaagaggaataaactttataaacttaccttccacattattagctcaggcggattcctctattggaggtaaaacaggagttaactcaataaaaggtaaaaatcttataggttcattttatcaaccaaaagtggtcataactgaacttggattccttaaaagtttatctaaaagaaatttcatttgtggatttgctgaaattttaaaacattctctaatttatgacagcagtttttttaaaacactcgataaaaattcgaacaacattttagaaaaaattgattttgaaatgataagatatgtgatttcaaaaagttgtaaaattaaattacattttactaataaagatgaaaaagaaaaaaatgctagaatgatattaaattttggtcatacctttgcgcatgggattgaggctgctaacaattattcaagaaaattaatcatggggaagcggttctag

SEQ ID NO: 286781 - DNA, 682 bp, Unknown
  Bacterial polypeptide expressing nucleotide sequence isolated from the Sargasso Sea
atgagcgacgccgagaccgttcgcgtcgaccttggggacagatcttacgacatcgtcattggcgatggtgtgctttcgcgtgccggtagcttaatagcggacgcggtacccggcgtccggccggtcgtcgtaactgacgaaacggtagcgtccctgcatctcgaaaccttttcccaggcgcttgagaaagacggtattgcattcgatacgatcgtgcttccaccgggcgaacaaacaaaagattttaagcatttagaggaattgcttgactgtctcctgacccgaggaatcgatcgctcgacggtgctgatcgccttgggcggcggcgttattggggatctcaccggatttgcggctgcaattgctctccgcggtatcgacttcgtacaggtgcctacgacgttgctggcgcaggtcgacagttcagtcggcgggaagaccgcaatcgacacgccaaaaggcaagaacctcgttggggcctttcatcaaccgaggctggtcctcgccgacgtcggtgttctcgacacgctgccgcgtcgcgacttgatggcgggatacgccgagaccgtaaaatatggtctgatcgatgatgctgaattttttggttggcttgaagggtatgctgtggcgctgatcgacggagatatggcagtgcgtcgtcacgccgtcgggaaagctgccg

SEQ ID NO: 286782 - DNA, 757 bp, Unknown
  Bacterial polypeptide expressing nucleotide sequence isolated from the Sargasso Sea
aatcaaaccagaaattacttaacctattcttttgaatataatgttgatgagagtcttaaatcattcaagcacgtaatttcattaaatgaaaaattgctgagtaaaaattttaatagaaatgatataattattgcagttggtggaggagttgtaggtgattttgctgggttttctgcaagcataattaaaagaggtataaattttattaatattccctcgacttttttggcccaggttgactcagctatcggaggcaaaactggaattaatacaaaaaaaggtaaaaatttaattggaactttctctcagccaaaattagtactaagtgaacttggattattaaaaagcttgccaaaaagagagatgatttgtggttttgccgaagtcttaaaacatgcaattataaaagacaaagatttttttaagtggatagaaaaaagagctgaagaaattatttttaacaaaaacatggagataattaaaacaacaattattaggagttgtaaaataaaaattttttttgtaacaaaagatgaaaaagaaagaggagatagagcaatacttaactttggtcatacttttgcacatggtttagagggtgcgagtaatttctccaaaaagattaatcatggcgaagcagttttagttggaatgtatttagcaacaaaattgtctgaacaaagaaaaatatgcagtgttaaaacttttaatagattgaagaatttttatagaaaaaataatttgcctaataacataa

SEQ ID NO: 286783 - DNA, 685 bp, Unknown
  Bacterial polypeptide expressing nucleotide sequence isolated from the Sargasso Sea
tatgaggccaattaagctaatagttaatactaattcaaataaatatccaattataatcggtagaaatttaatttctaatttatcagaaatatttaaaaaaaattctatcgtgtttaaaaaatgcttattagttttagataaaaatattccagatagatatatcaaacaaatttcagaatccctcaagagatatgagctttataaatttatttacaatgccaatgaaaaaaataaaaatcagaaaaatgttagtaaaattttagatgttttacttaagaaaaatttttcaagagatgactgtttaatatctattggaggagggattactggtgatgtagcaggttttgctgcaagtttattcaaaagaggtttaaagtttgtgaatattccaacaacattgctatcacaagtagactcatctgttggtggcaaaacaggtattaacacatctcaaggtaagaatttaattggaagtttttatcaacctaaaattgttatcagtgatgtagactttttgaaaagtcttccttttagagaaatagtctgtggttacgcggaaatagtaaagcatgcattaattgcaaataaaaaattttataattttttggataaaaatatttatgaaatacttaaacttaagtctcctacaattgaaaaatctatttatgaaagttgtaaagtcaaa

SEQ ID NO: 286784 - DNA, 719 bp, Unknown
  Bacterial polypeptide expressing nucleotide sequence isolated from the Sargasso Sea
tttgaaaactttaagtaaaatatatgacgttgcatttgaatttggtttagatagaaattcaataatcattgcccttggagggggaatagttggagatgtcagtggttttgcagctgcgacttggcttagaggtattgaatatattcagattccaacaacattattatcgatggttgattcatccgttggagggaaaacaggagtaaatcatcctaaaggaaaaaatttaattggagctttcaatcaacctaaagctgtttttattgatccagaaactttaaaaagtttgcccaaaagagaatttagtgcaggtatggccgaagtaataaaatatggagtcataagagataaagaacttttcgaatacttagaaattgaaaagaacaagaatgaacttataaatctcagaaatgaatatttaattaaaataattaatagttcaattaaaacaaagtctcatattgtttctcaagacgaacatgaaaatggtgttagagcaatattgaattatggccattcttttggtcacgttattgaaaatttatgtggatacggcaaatttctgcatggtgaggcgatatcaattgggatgaatattgcgggtaaaatagcaattcagaaagggttatggtctaaagaagaattagagagacagcagaatctattggagagttacgatcttcctaccgagattcctaaaataaataaaagagacgttc

SEQ ID NO: 286785 - DNA, 905 bp, Unknown
  Bacterial polypeptide expressing nucleotide sequence isolated from the Sargasso Sea
aatgatcaaaaaagtcttagtcggtgatgaaaaatataaggttcttattgggaggaacggaattttcaaagactttcttccaaattcgttagcaaaaaataaaaaaatacttgtcatttctgatgaaaatattccaagaaaatatattgagctagttataaaatctgttccttccgataaagttgttaacatacataagattaagcctggcgaagaatcaaagtcatttgcaaacttcgaaatcattctcaataaacttgctaaaaagaaatatgatcgctctgattgtatagttgctattggtggtggcgttgttggagacctaagcggctttgtcgcagcaagttatatgagaggtatagattatattcaaataccaactactcttctttctcaagttgattcgtctgttggaggaaagactgccattaatattgaatctggaaaaaatcttgtaggagccttcaagaatcctaagctagtattaatatcttcaacctttttaagaaccctccctgatagagaatttagggcaggaatagcagaagtaataaaatatggattaatttataacaaaagaatatttaatatctttgaaaaagaaaataaattaattcttaaaagaaatcaaagaataattgaaaaacttattcatgagtcagtaaagacgaaggcaaaaattgtgactgaggatgaaaaagagttaggcatcagagctatattaaactttgggcacacctatggccatgcgatagaagcaaaaaataattacaaaaatattttacatggagaggctgtagcgatgggcatgagaatggcttcaaaaatgtctatgttggagggccacataaatgaaactgcttacaaaaaaataattaatgtttttgatatgcttggtctttcta

SEQ ID NO: 286786 - DNA, 664 bp, Unknown
  Bacterial polypeptide expressing nucleotide sequence isolated from the Sargasso Sea
tatgaaaaacactaaactaatagttaaaaccaaaagtaaaatatatccgatttattttggtaataaaatacttagtaaaattggaactttattaaaaaataatttacctggggttaaaaaagtatgcattattagtgataataaattacctaaaattttacttaaaacattaaataaatctctaaaaaagtatgaagttaaaatttataaactacattctagcgaaaaaataaaaagccttaaaatagctaacaaaattatcgaaggactcttagattataattttaatagatcagattgcataattgctcttggcggcggtgttattggagatttgtccgcctttatatcaaatctaacaaaacgaggaataaaatttattaacattccaactacattgttagctcaagttgatgcatcgataggaggaaaaactggaattaattctaaagaaggaaaaaatcttataggaactttttatcaaccagattttattttaaccgatgtatcaattttaaaaagtttacctcaaagagaaattatagctggctacggagaaatattaaaacattcgttaatatcagataaaagattctttttttggctttttaaaaatggaaaaaaaataatctatgaaaaaaatactaatttattaaaacaagca

SEQ ID NO: 286787 - DNA, 772 bp, Unknown
  Bacterial polypeptide expressing nucleotide sequence isolated from the Sargasso Sea
ctgtggttttgctgcaagtttatttaaaaggggtttaaaatttataaatttgccaactacacttttatctcaagttgattcctctgttgggggtaaaactggtgtaaattcgaagtatggtaaaaatttaattggaagtttttatcaacccaacttagttattacagatattcaatttcttaaatcattaacaaaaagagaaatagtttgtggatatggagagattttgaaacattcattaatatcaaacaaaaaattttttaactttttgaataaaaatattaaaaaaatttttaatctctcctcaccatttattgaaaaagcaatttataaaagttgtgaaataaaaagaaaagttattgaggaagatgaaaaagaaaaaaatttaagaaaaattttaaattttggacatacattcgcacatgcctacgaagctagtttaggatatagtaaaaaattgaatcatggagaagctgtgatattaggtatgaaaactgcattaaattttagtttaaaaaatttatttttaaaaaaaaatgaatataaaataattgttaatcatatcaaaaatgctggtttgccttcttcattgaataaatttttcagtttaaaggatttaaataaaattctgtcatttatgataaaagataaaaaaaataattcctctaaaataagtttggttttgttaaagaaaattggatctccagtatttgataaagaatatacaaaaaaaaatatttatttatttcttaaaaattatttaagagattaa

SEQ ID NO: 286788 - DNA, 797 bp, Unknown
  Bacterial polypeptide expressing nucleotide sequence isolated from the Sargasso Sea
taacgctagcgaaaaacaaaaatctttaaagatagccaacttgtatttgaaaaaacttttaaagaaaaattttaatagatcagatttagtcataagcgtaggtggtgggataacaggagatttgattggattcgtagcaagtatttttaaaagaggtattaattttataaatgtccctacaactttgcttgcgcaagctgatgcagctattggtggaaaaactggtgtaaattccgtttttggaaaaaatctaattggttcattttatcagcctaagttagttataaatgatactgcatttcttaaatctttgcctcgaaaagagttgatttgtggatacgcagaaatactaaagcactctattattaaagataaaaaattatttatttggctcaaaaaaaatacaagaaaacttttgtcaaaagactccaagaaacttatttatgcgataaaaaaaagttgcgagataaaattatttttcgttaacaaagacgttaatgagaaagatttgagaatgacacttaactttggtcatacatttgcgcatgctatagaggtaaaaaataattattcaaaaaatattttacatggagaggcagttttatcaggcatggtgttagctgccagattgtcaaatttacttaaaatttgtaataataaaactctcgaagatataactgaaatttataaaagaaataaacttacttatactataaaaaaatattctaattatagaaaaatcaatgagttattgccttttttattgcatgataaaaaaaatgataatgacaaaatca

SEQ ID NO: 286789 - DNA, 775 bp, Unknown
  Bacterial polypeptide expressing nucleotide sequence isolated from the Sargasso Sea
tatgaaacaaattaaattaaatataaaaaccaaaactcaaaaatatccaataattattggctctaatctaacctcaagtatttcaaatattgtaagaaaaaactcaataaattttagacaatgcttgattgtagtggataaaaatattcctaagaagtttatatttaatattaaaaaatcttttagaaaaaaaaaaatttatatttatttatttaacgcaaatgagataaataaaaatattaactacgttaataaaattttagaaatcttattaataaaaaatttttctagagatgattgtgttatttctgttggtgggggaataacaggtgatgtaagtggatttgctgctagtttatttaagagaggtttaaaattcataaatttgccaactacactattatctcaagtagactcttctatcggtggtaaaactggagttaattcaaagtatgggaaaaatttaattggtagtttttatcagccaaatttagttattacagatattcaatttcttaaatcattgtcaaaacgagaaattatttgtggatatggagaagttttaaaacattctttaatatcaaataaaaaattttttaattttttaaataaaaatattaaaaaagttttaaatctctcatcaccatttatagaaaaagcaatctacgaaagttgcaaaataaaaaaaatagtagttgaaaaagatgaaaaagaaaaaggtttgagaaaaattttgaattttggtcatacttttgcacacgcctatgaggctagt

SEQ ID NO: 286790 - DNA, 946 bp, Unknown
  Bacterial polypeptide expressing nucleotide sequence isolated from the Sargasso Sea
agcgggacagacaaatataaaatttttattggtaataatattttatcgagctcaggctcattaataaaaaagaaattaattaatccacgagtttttatagtaactaatagatttatttataagctttacggaaagaaattagagaactcattaagaaaaaataaaataagtttcaacaagataataattaatgatggcgagcgatacaaaaatatcaaaactattaatttaattacgactaaacttctcaaatataaggttgatagaaacgatactttaattgcttttggagggggtgttattggtgatattgtaggtttttcagcaagtatcacattaagaggcatcaattttattcagatacctacaacattattatcacaagttgactctgcagtagggggtaaaacaggcgtcaatactaaagaaggcaaaaatctgataggtactttttatcaacctaaattagtgatttctgacgtctcgctattaaaaactctaccaaaaagggagattttatctggctatgctgaaataattaaatatggacttattatggataaaaaattccttaattggcttttagataatgagtcaaagcttattacatttaacaaaaaatatcttattgaggctatttttcactcttgcaaaaataaagcaataattgtaagacaagatgaaaaagaaaataatataagagcaatactgaatttaggtcatacttttggacatgctattgaagcaataaataattaccaaaaatcattaacacatggagaagccgtgtctattggcattatgatggctcttgaaatgtcatcacttcaaggaaacattttagataaaaatattaataaaataaaagatcatttccaaaaattaaaaatgaaaaccaaaatacctatcaatataaagagcaagtcatcacttaataaattaaaaa

SEQ ID NO: 286791 - DNA, 782 bp, Unknown
  Bacterial polypeptide expressing nucleotide sequence isolated from the Sargasso Sea
tatgaataatttatttcaagtacagtcattaaaagatattaatttacaaatttcatgtaacgactttcaattaataaagacaaccttatcaaaattaaataatacaacaacttcaaaatgtgttgttataacaaatacttctcttacttctatttgttataagaagattgagacacaactttcagacgttttttcttcggttcatttaattgaggttccagagggagaagtagaaaagaatttaggtcgtgtatctaatttattggatcttctaatggatataaacttagaaagacgtgattatattattgctttagggggtggcgttataggtgatttggtagggtttgtagcttcaatttataaacggggagtaaatttagtgcaaatcccaactaccctacttgctcaagttgattcatcaattggtggaaagactggcgtaaatcatcaggtaggtaagaatttaattggtagttttttccagccagatcttattttttcagatattggttttttagcctctttacctaaacgagaatggttatgtggtatggctgaagttgttaaatatggcgttatttctaactatgagttttttgaatatattgaattaaatacgcagtcgattaaggcgtttgatgtaaatcacgattcaaagctatggttacatttagtatctgtttcggcaaatgaaaaagttaatgttgtacaaaaggatgagaaagaatctggattaagagaaatattaaactacggtcatacttttgctcatgctattg

SEQ ID NO: 286792 - DNA, 855 bp, Unknown
  Bacterial polypeptide expressing nucleotide sequence isolated from the Sargasso Sea
aacaattgaaaaaatccatacagttttatttgaaaacaggtttaatagagaggactgtgttatttcttttggtggaggaattattggagatatagttggtttcgcatctagtacatttaaaagaggcatgaaatacgtaaatattccaacaactttactatcccaagtagactcatccataggaggcaaaacaggtgtaaataataaatttggaaaaaatttgattggaagtttttatcaacctgatttagttgtttctgacatgaatattttagcttctttaccagaaagagaaattatttgtggatatgctgaaatattaaaaagtagtattatagatagttttaataattttctctatttggataaaaattataaaaaaattttaaaattaaaatcacctttcattgaaagatccataattaaaagctgtaatttaaaaaaaagagttgtagaaaaagatgagaaagagaaaaattacagaaaggtattaaatttaggtcatacctttgctcattcttatgaatctactttgggcttttctaaaaaattaaatcatggagaagctgtaattttgggtattaaaaatgctgtagaatttagttttaaaagaagaattttatcaaaacaaaaattaaatattattataaatcatattaataaaattgagatgaaaccaaaaattgaaagattgtttaaaaaaaaacatgtttctaaaataatgaattatatgagaagcgataagaaaaataattcaaataatattaacctcattttaataaaagattttggaaagatagtagttgactttcaaatcagtccttcagatttaaaaaaatatatctctgaaagttt

SEQ ID NO: 286793 - DNA, 719 bp, Unknown
  Bacterial polypeptide expressing nucleotide sequence isolated from the Sargasso Sea
tacattgctggcacaggtagactcctcaataggaggaaaaaatggagtaaattcaaaagctggaaaaaacttaataggttcgttttatcaacctaaattagtaatatctgatttgtcttttttaaaaagtcttccaaaaagagaattgatttgtggttttggtgaggtactaaaatactcacttattagagacaaaaagttttttgattatattaaaaggtattctaaagaaattttaaaaggaaatgacttaaatattttaaaatatcttgttttaaggagtgcaaaaaataaaattcattttgtaatcggtgatgagagggagtctaataaaagaatgactttgaattttggccatacatttgcacatggaatagaatcttcaaataattttactagaaaaattaatcacggagaggcagttttaataggaatgttattggctataaaactttctctagataaaaatatttgctctatcaagactttgaaagaagtagagaaaatttatgcctcaaataaattaccgtcaaatttaaatcaatatttaaataaaaaacagattttaaatattcctaaacttatgataaatgataagaaaaatgatgatgataaaataaacctgattctacttaaacgaataggtaaaactactattcctggtaaaattaaaatgtccgtgagtcaggtaaataaattcttaaaaaaaattaattaat

SEQ ID NO: 286794 - DNA, 799 bp, Unknown
  Bacterial polypeptide expressing nucleotide sequence isolated from the Sargasso Sea
attaaaacaaaaaatttaggaaacaattattcaattttaattggtgagaatatacttaaaattttacccaaaaaaattaaatctctttgtccaaaaacaaagaggatagttataataattgataaaaatattccaaaaaaatttaagaatattttagttaagaatttaaaaagatataaacttataatttatacttttgaagcaaatgaaagaacaaaatcgttgaatactgtaaatacttatttaaatcttcttcttaaccaaaatttaaatagatcagatttaattattagtgttggtggaggtattacaggcgatgttgtaggatttatttcaagtatatttaaaagaggaattaatttcataaatataccaacaactttgctagctcaagtagactcttcaattgggggaaaaactggagtcaattctttttacggaaaaaatttggttggttcattttatcaaccaaagttagtaatttcagatatatcctttcttaaatctcttccaaaaaaagaaatgatttgcggatatgcagaaattttgaaacattcattaatcaaagacaaaaactttttcaattggttaaaaaaaaatacccacaatctttttttaaaaaaaaattttgaattaattcattctataaaaaaaagttgtttaattaaattacatttcgtaaacaaagatgtctcagaaaaaaacctaaggatgatattaaattttggtcatacttttgcacacgctatagaagttaaaaataaatattcaaaaaaaattacccatggtgaagctgttc

SEQ ID NO: 286795 - DNA, 725 bp, Unknown
  Bacterial polypeptide expressing nucleotide sequence isolated from the Sargasso Sea
tatgaaacaatttaaattaaatataaatacaaaaacacaaaaatatccaataataattggcagaggtctattaaatgatttgcctaaattattaaaacataattcattatatttcacaaaatatttaattgtgatcgataataaaattaaaaaaaaagtaatattaagaattttaaaaaaatttaataaaaaaaatattataacttttttatttaatgctaatgaaaaaaataaaaatcaaaaaaatgttgacaaaattcttgctgtattattaaaaaataattttcaaagaaacgattgcttgatatcagttggaggtggtattactggggatgtatcaggttttgcctctagtatttataagagagggattaattttgttaacattcccacaacgcttcttgctcaagttgactcttctatcggtggaaaaacaggaataaatacatcttttggaaaaaacttaataggatcattttatcaacctaaattagttatatctgatattgatttcttaaaaacccttccaaaaagggagataatttgtggttatgcagaaatatttaaacattcgttaatctttgaaaaaaaatttttttccttcttagataaaaatgcaaatgaaatattgaatttaaaaagtcctttcatagaaaaatctatagttaaaagttgcgagataaaaaaaaaaattgttgaactagatgaaaaagagaaaagtctaa

SEQ ID NO: 286796 - DNA, 742 bp, Unknown
  Bacterial polypeptide expressing nucleotide sequence isolated from the Sargasso Sea
gagtattttaaaaaaacataatatattttttaaaaaatgtttaatagttgttgacaaaaacattccatctaaatttaaattaaccttaataaaaaatttaaaaacaaaaaagaaatttatctacaattttactcctagtgaaaaaaataaaaattataaaagtgttaatcaaattcataatcttttatttaataaaagatttaatagggaagattgtgttatttcctttgggggcggaataacaggagatgttgttggatttgcatcaagtacatttaaaagaggaataaaatatataaatattccttcaacattactatcgcaagttgactcatcaattggaggcaaaacaggtattaataataattttggaaaaaatttaataggaagtttctaccaacctgaattagtagtttctgacattaacatattaaaatctcttccaaaaagagaaattgtatgtggatatgctgaaatacttaagagcagtttaatagataattataaaaatttttattttttagataaaaatttaaaaaatattcttcaattaaaatcaccatttatagaaaaagcattaattaatagttgcaaactaaaaaagagaattgttgaacaggatgaagtagaaaaaaactttagaaaagtacttaatcttggacatacatttgctcatgcatatgaatcctctttaaacttttcaaataaacttaatcatggagaagcagtaattcttggcata

SEQ ID NO: 286797 - DNA, 816 bp, Unknown
  Bacterial polypeptide expressing nucleotide sequence isolated from the Sargasso Sea
aattgacaaaaatgttccaattaaatttaaaactgacttaaaaaaaaaattaaaaagttataacctattattcttatctttttcagctagtgaaaaaaataaatcctttaatgcagtcaattattatttgaatattttgctatctaaaaattttaatcgatccgatttaataattagtgttggtggcggaattactggtgacgttgctggttttgttgcaagtattttcaaaagaggaattaattttattaatattcctaccacattgctcgcacaggtagacgcagccattggtggaaaaactggaataaattctaattgcggtaaaaatcttataggatcgtttcatcagccaaaactagttatcagtgatacatcttttataaattctttatctaaaaaagagatgatctgtggatttgctgaaattttaaaacattctattataaaagataaaaaattttttaattggttagaaaaaaatgcaagattaatattttccaaaaaaaataaagaattaacttatgctataaaaaaaagttgtgagattaaaattcattttgttacaaaagatgtaaacgaaaaaggattaagaatgattttaaacttcggtcatacatttgcgcatgcaatagaggtaaaaaataattactccaaaaaaattactcatggtgaggccgttttatctggaatgattttagcaactaaattatcagtagtaaaaaaaatctgttcgactaaaactctaagtcaaatcaaaaacatatatctaaaaaataagttagattttacctttaaaaaatattcaaatcaaaa

SEQ ID NO: 286798 - DNA, 834 bp, Unknown
  Bacterial polypeptide expressing nucleotide sequence isolated from the Sargasso Sea
aatgcctaaattaaaaaaaaacaaaaattttaatttaataactattcaggggggagagaaaattaaatctttaaaatattttgaagatattactaataaattattaaaattaaaaatagatagaaaatcttgcatcattgcaattggtggaggtactataggtgatttatcaggatttattgcaagtacagttttaagaggtgtaaaatttattttggtcccaactacgcttctatctcaagttgatagttctataggaggaaaaaatggggttaatacatcatatggaaaaaatttagttggtacattttatcaacccaataaagtcataattgaccactcaattttaaattttttgtcaaaaaaacaaattatatcaggttatgctgaaattcttaagcatgctataataaaaaataaagaattttatttttggcttaagaaaaattataaaaaaattataaaattagaatccaaatatatatcaattgcaataatagaaagtataaaaattaaggcacattttgttaaaatagatgaaaatgaagttttaattaatgataattctagagctatattaaattttggtcatacctttggacatgcattggaatcaatgaataattataaaagaaatcttactcatggtgaagccatctctataggtatgtgtctggcaatgaaaatttcatataaaatgaatttaatatcaaataatgaatacaataattttattcttcatttaaaaaatgtagggctgcctatttacgataaaaggatagaaaataatactatatataatgtgatgatgaatgataaaaaaaatactgaaaa

SEQ ID NO: 286799 - DNA, 528 bp, Unknown
  Bacterial polypeptide expressing nucleotide sequence isolated from the Sargasso Sea
catgaaaattattgatgttgatttaggcagtcatagctatcctatatatataggagattcgctattatctgaaaaacaattattgactcaatttattacaagcaaacaagtattagttataacaaacgaaaaaatagcgccattgtatttaaaagttattgaagaacacttagttgaacatagttataaaacatttgtattaccagatggagagccttataaatccctagatagtttaaatcaaattattactacattaattgaaaataaatacagtcggacgtgtactttgattgctttggggggtggggttataggagatttaactggtttcgctgcttcttgttatcaacgaggtgtaaaatatatacaaatacccacaacattacttgcacaggttgattctgctgttggtgggaaaacagctgtgaatcatccactagggaaaaatatgattggcgcatttcaccaaccatattgtgttttttccgacacatctgttttagctactttgcccgatagagagtt

SEQ ID NO: 286800 - DNA, 829 bp, Unknown
  Bacterial polypeptide expressing nucleotide sequence isolated from the Sargasso Sea
ggtattgagagaagtgatacactgattgcgcttgggggaggagtaattggtgatttagctgggtttataagctcaataatatatagaggcataaatttcatacaaataccaacaaccttacttgctcaagttgattcttctgttggaggaaaaacagcaataaatgttaaacaaggtaaaaacttagtcggtagtttttttcagcctaaagcagtaataactgatgtaaattatttatcgtctctctcagatagagagataaaatgtggaatatctgaaattattaaatatggaataattggtgatagaagttttttttattggctaaaagaaaatatttctaaactaaaaaaactagataatgaatgcctaattcatgcaattcagaaatcctgccaaatgaaggcagatattgttcaaaaagatgaaaaagaaaaaggagaaagagctttgctaaatcttggccatacatttgggcatgcgcttgaaaaacacttcactaaagatggaattctcttacatggagaggctgttgctattggtatggcttatgctgcaaaattttcatttaatactggtgttcttgaacaagatgaatgcgatatgattattgatcttatatctgatagtggtttaccaacatctataaatgacataaaaggtgaaatcacaaaacaggagatcttaaatttaatgatgtacgataaaaaaagagtaaatcaaaagaatactctaatattaataaaaaaaattggtgaatcctttattaataagaatataactgatgaagaaataatagatttttttgataaggagagcattcaataat

SEQ ID NO: 286801 - DNA, 622 bp, Unknown
  Bacterial polypeptide expressing nucleotide sequence isolated from the Sargasso Sea
atgaaaaaaattaaactaattataaaaacaaaatctaaaaattactctatatttataggttctaatataattaacagtatagcaagtatattaaaattaaataatttttcttttgaaaaatgtttaattatttatgattcaaaagtaccaaaaaaaaaacttaatattttaaaaaacaaaataaagtctgaaaaaaaaattatttatctttttaattcaagcgaaaaaaataaaaattttaaaaatgttgatttaattttaaatagattattcaaatttaattttagtagaaaagactgcattatatcttttggtggaggtattactggagatgtgtcagggtttgctgccagtatttacaaaagaggattaaaatttatcaatattcctactacgcttttggcacaagtagattcttcaatagggggtaaaaccggtgttaataatagttatggaaaaaatttgattggttcttttatgcagccagatctggtagtttcagatataagtatgctaagttctctcccaaaaagagaaataatttgtggttatggagaaatattaaaacattctataatcaaaaatagaaaagcatttaattatctaaagaataattattcta

SEQ ID NO: 286802 - DNA, 469 bp, Unknown
  Bacterial polypeptide expressing nucleotide sequence isolated from the Sargasso Sea
aatgaagataagaaagataattgataaacaaccacacgaaattgaatttttaaaaatagctcaattagaaaaaaaattaattaataatatttcaaatagcgatattttaatttttgataggaatattgcagaaattggattaatcaaaaagcttttaaaaagatttcctaaacgttgtattgttattaagtgccatgagaaaattaaaaatatacacaactattcgtctataattgagaaaataattaaattaggagttcaacgtaaaactataatttactcatttggtggtggaacactcggagatctttcaggctttttagcatcaactatattaagaggagttgaacatataatgatacctacttctcttttagcaatggtagatagctcaattggtggaaagacaggaattaatagcaaatttggtaaaaatttaattggtactttttatcttccaaaaaaagta

SEQ ID NO: 286803 - DNA, 878 bp, Unknown
  Bacterial polypeptide expressing nucleotide sequence isolated from the Sargasso Sea
aattgttgctaaccgccacattatcatcgtcagcgacaagaatgtggctaaccttcacctcacccgtcttaaagctagcttcaaatcctttgctcgtaaagttgatcattttgcgataatcgctggtgaggccagcaaatccatgacaatgctctcgcgcctgcttgacgatattttggcactgggggttgaccggtcagtgctgctagtcgcctttggtggtggcgtagtcggagatctggctggatttgcagcagcaagccttttacgcggcgttgatttcgttcagataccaacgagccttctagcccaagttgatagctcagttggcggaaaaacaggtgttaatgccacggcaggtaaaaatcttattggcgcatttcatcagccaaaggctgtcctcgcagatacaagcctcctaatcagcttaccagaacgtgaattgcgggccggatatgccgaagttgcaaaatacgggctattgggtgatgcaaggtttttcgcctggctggaaaagaacagctctgcagttcttgcgcttgaaccaaatgcgattatgtacgccatacgtaaatcttgcgaggccaaggcacgcatagtcgaggcggatgagcgcgaggctggaaagcgagcgttacttaatttaggtcatacattcgcacatgcctttgaggccgagtcaggctataatggtagccttcttcacggtgaagccgttgccgctggcttgggactggcattcgatctgtcagttgatttagggatttgcgctgccgatgatgcgaataggtgcaaaactcaccttcggactgtcgggttgccatcagggcagtctgatctcgctactggcaatatttccgctaaccggcttattgagc

SEQ ID NO: 286804 - DNA, 667 bp, Unknown
  Bacterial polypeptide expressing nucleotide sequence isolated from the Sargasso Sea
atgaaaattcataaaattcaaataaatacaaaaacaaaaaaatattctatttttattggttctaatttaatttccaaaataaataaaattctggcatcccaaaaattttcattttcaaaaattttaattgttattgataaaaatattccatttaagtttagatctaaattaatcaagaacttaaaaactgatgtaaaaaaaacatatatctttaatgctaatgaacgaaataaaaatcaaaaaaatgtagacttgatacaaaagattttattcaaaaatagatttaatagggatgactgtttgattgcttttggaggtggaattactggagatgttgttggatattctgcaagtacttacaaaagaggaattaaatttataaatattccaacaacattactttctcaagttgattcatcaattggtggcaaaactggtataaacaattcctatggtaaaaatcttgtagggagtttttatcaacctgatatagttatttcagatatagatatactcaaatctttaaaatttagagaaataatttgtggttatgcagaaatattgaaaagtagtttattggatagtttaaaaaaatttaaatatttggataaaaattttaaaggcataattaatttagaacagccaattataggtaatgctattctta

SEQ ID NO: 286805 - DNA, 754 bp, Unknown
  Bacterial polypeptide expressing nucleotide sequence isolated from the Sargasso Sea
atttattgcaagcacagtattaagaggcttagatttttttcttataccaacaacacttctatctcaagtagatagctctattggtggtaaaaatggaattaacacagtctatgggaaaaatttaattggaactttctatcagccaaaagaagttttaatcgacatttctattttaaatagtttaccaaaaaaagaaataaaatcaggatatgccgaaattgttaaacatgcactaattaaagattattcatttttttgttggttggaaaaaaatgcaaataaattacttaatttaaatagttctattttagaaaaagctattcataaatcaattttgataaaactattttatgtaaaaaaggatgaaaaagagtttttattaaataataattctagggcaatgttaaatttcggacatacaattggtcatgctatagaaagtcattataattacaaaaaatttaatcatggagaagcaatttctataggaatgattactgaggcaaagatatctaattaccttggtttactgtcatcaattgaattagaaagaattatattacattttaagaattgtagacttaaaacttatgatgatatattaaaggataagttattattaaataaaataattaaagataaaaaaaattttctaaataatattaatttttcattaatagataaaataggaagttcaattttttacaaaaaactagacaagcaaaaagtttataaaatattacaaaacatataa

SEQ ID NO: 286806 - DNA, 775 bp, Unknown
  Bacterial polypeptide expressing nucleotide sequence isolated from the Sargasso Sea
catataggtgaaaatttagctaatgaaatacctaatattatttcaccctttgtgaaaaggaataaaatcttcatagtttgcgatgaaagtcttggatcaataatactaccagaaattaaaaattcatttatcgaggcgggcttcgaagtacttatatctttagtgaaatccggtgaggaaagtaaaagttttgaaagtttggaacttacaatatcagagcttttagataatggaattgaaagaaacgatgcagtaattgctataggtggaggagtaattggcgatttagcaggatttataagttcgataatttatagaggtataaattttatccaagtaccaacaactctattagcacaagttgattcttctgtaggaggtaaaacagcaataaatgtcaaacaaggtaaaaatttaattgggtcattttatcaacctaaagcagtaataactgatgtgagttttttatcatctctttcagaaagagagataaaatgtggattatcagaaattgttaaatatggagtcattggtgatagagattttttttattggttaaaagaaaatgtcgacaacctaaccaaactaaatcaggattgtctaatctatgcaattgaaaaatcttgctcaatgaaggcaaatatagttcagaaagatgaaaaagagagaggagatagagccttactaaattttggtcatacatttggacatgctcttgaaaaacactttacaaaaaatgaggtacttctgcatggagaagctgtagctataggaa

SEQ ID NO: 286807 - DNA, 658 bp, Unknown
  Bacterial polypeptide expressing nucleotide sequence isolated from the Sargasso Sea
aatgaaatcagaaattattaaagttacatttagtaataaggtcgataatttatcatatccaatatttgtgggtgctaatttaatatataattgtgaaaaaattttaaaaaaatttatacacaataaaaaaattattttaattcatgacaaagttttttataaaaaaaacgaaataaatgaaagttttgttgcctttataaatttaattgaaaaatttacttcctcagttaacctaataggtatttctggaggtgacaaaacaaaaaatatatctgaactaaatcatattatagaaaaatctctatcatttgaaatagatagagatagtatagttattgcatttggtggaggcgtaattggagatatagcaggatttgctgcgtcaattctattaagaggaataaattatattcaaattcctacaactcttctatctcaagtcgatagttcagtgggggggaaaactggaattaactcacgtaaaagtaaaaatctaattggttctttccatcaaccactcgctgttataatagatataaacctgctaaacacacttcctaaaagggaatttttagctggactggtagaagtaattaaatatgggcttattaaagacgataaattttttcattatgtggaagaaaattataagcaaatt

SEQ ID NO: 286808 - DNA, 709 bp, Unknown
  Bacterial polypeptide expressing nucleotide sequence isolated from the Sargasso Sea
ttctttttccagcacccttctctctcaagtggatgcatctgttggtggcaagacagcaataaatcactctcaaggtaaaaatatgatcggggctttccatcaacccattaaagtttatgctgatctagagcttttgaactctcttcctaaggttgaaataagcaatggtctttctgaagtcatcaaacacgccttaattagtgacaaaaaatactttaattggttagaagaaaatattgaaagtattatttcattaaaaactgaagcattgggacatgctattaccagatctatagaaattaaagcagagattgtctccaaagatgaaaaggagaaaggcattagaaaatttttaaattttggtcatacctttggccactctatagagctgtatgggggatttagagaattcagtcatggacaatctgtggccttgggcatgttaatggctatggaattatctaagctaactgaaggattttctaaagaagatctaattaaatcaaagaagttaatcattaaagcaaaccccgatttaaatataaaaatagcttttgatgagaaaaaactcatagaaaatatgtcggttgataagaaaagagcaggcaataagatattttttgttcttttggaagaaattggacaagcaaaagtaaaagcagatattgatgagtccaatataataaaagctatacagtcattggtctaa

SEQ ID NO: 286809 - DNA, 871 bp, Unknown
  Bacterial polypeptide expressing nucleotide sequence isolated from the Sargasso Sea
actccaacggatttacgatttcctgatggagaaaaaggccaatcggggaaccgtgatggtggctttcgggggaggagtgatcggggacatggccggttttgctgcagcgaccttcatgcggggaatcaaaatgatccaggtgccgaccaccctcttggcccaggtggacagcagtgtaggcggtaaaacggcagtgaatcatcccttgggaaaaaacaccatcggtgcattcaagcaaccggatcatgtcagcatcgatctcgagttcttgaaaaccctgccctcccgtgaacttcaggcaggctacttcgaattggtaaagcatgggttgacgcatgaccgggaactgctcgattttcttcaagaaggcaaactggaacccttggatttggattttctggaagaagcggttttccggtcctgccgggtgaaggtaagaatcgtggagcaggacgaaaccgaagccggactcagagcaatcctaaattttggtcacaccctcggtcacctgatcgaaacccattgcggttacggaacgtatcttcatggagaagcagtcggaaccggaatgctgtttgcggcgtttctctcaaaacaggaacaactactggatccgtcttcctgggaaaccatccgggagtttctggaacccaaacttcgatccgtaactcttcccaaactggattatgatctcttcagcagcctcctgcttcatgacaaaaaagccagcagggaagcggtgaacttcatccttcttcgagagattgggagttgttatatccagaaagaaatgcccctggatttgatttggaaacacttcaatggattctgtgaagagtttcccgatctgtgtcagttgatgaccgactga

SEQ ID NO: 286810 - DNA, 945 bp, Unknown
  Bacterial polypeptide expressing nucleotide sequence isolated from the Sargasso Sea
gcagggatactgaataatatcagcgaagaacttttaaaaattggaataacaaagaatagaaaaatacttgtgatttcaaataaagaagtatcaaatttgtatggaaaaaaattcctaaataatttaaaagataataaatttcaggccaaaatgttccttatcaaggctggagaatcatataaaaacttaagaaccttaagtgaaatatatgatgttgcatttgaatttggtttagatagaaattcaataattattgcccttggaggagggattgttggggatgtaagtggttttgcggctgctacttggctgagaggtatccaatatattcagattccaacaacattattatcaatggttgattcatctgtgggaggaaaaacaggagtaaatcatccgaaaggtaaaaatttaattggagctttcaatcaacctaaagcagtttttattgatccagaaactttaaaaagtttgcccaaaagagaatttaatgcaggcatggccgaagtaataaaatacggagtaataagagataaagaacttttcgaatacttagaaattgaaaaaaacaagaataaacttataaatctcaagaatgagtatctaattaaaataattaatagttcaattaaaacaaaatctcatattgtttctcaagacgagcatgaaaatggtgttagagcaatattaaattatggtcattcttttggtcacgttattgaaaatttatgtggatacggcaaatttctacatggtgaagcaatatcaattggtatgaatattgcgggggaaatagcaattgagaaagggttatggtctaaagaagaattagagagacagaagaatcttttgaagagttacgatcttcctaccgagatccccaaaataaataaagaagatgttctaaacatacttatgggcgataaaaaagttcgtgacggcaaa

SEQ ID NO: 286811 - DNA, 848 bp, Unknown
  Bacterial polypeptide expressing nucleotide sequence isolated from the Sargasso Sea
tatgaaagctcagaaaatacattttaaaaattctaataaaggttacgcgatattaattggaagtaatatcttaaaagtattgtctttaaaaattaaatcactatgtccaaaaacaaaaaaaatagctgtaatttttgataaaggtgttccttcaaaatataaaagaattatattaaataatttaaaaaaatatgaagtttacatctataattttaatgctaatgaaaaaacaaaatctataaaatcagtaacttctttaatagataagttgctttataaaaattttaatagatcagatttaatcctcggcgttggaggaggaattacagttgatttcagtggatttgtagcaagtattttaaaaagaggattaaattttataagtatacctacaacattattatctcaggtggatgccgcagtaggaggaaaaaccggggtgaattctaagtatggtaaaaacttaataggatctttttctcaacccaaattagtaattagtgacacatcttttttaaaaagtttatcaaaaaaagaaatggtatgcgggtatgcagaaatattaaaacatgcagttataaatgataaaaaattttttaactggttaaaattaaatacaaaatatattttttctcatcattcaaggaagttaatttatgctattaaaaaaagttgcaatattaaactattttttgtcaataaagacgttaacgaaaaaaatttaagaatgatgcttaattttggtcatacttttgcgcatgctatagaagtgaaaaataattactcaaaaaatattactcatggtgaagctgttcttgcaggcatgatattagctactaaactttctg

SEQ ID NO: 286812 - DNA, 883 bp, Unknown
  Bacterial polypeptide expressing nucleotide sequence isolated from the Sargasso Sea
aaatgggaaaaacaaataaaaattaaaacaaaaaaccaaaattataatattgtcatatctgatggtagtgcaaaaaaatatttaaaaaaaatgatttcttcaaattttaaagtttttttgattattgataaaagaatttcaggtcgttttagtaatattataaaaaaaagaaaaaatgtttttgtaataagaattgacgcatcagaaaaaataaaatctataaattcttattggaaaattattagtttcttgcttgaaaaaaaaataaatagaaattcaaaaatcattgctattggaggaggtacaataggtgatcttagcggatttgttgcaagcactgtgctcagagggttgaaatttacattaataccaagtactttgctatcacaagtagatagttcaattggaggaaaaaatggaataaattcaaaacatggaaaaaatcttatcggaacattttaccaaccagataaagttataattgatccttctttgcttaaatctttaccaaaaaatcaattaaaatcaggatatgcagaaatagttaagcatgcattaattaacgacaaatatttttttaattggcttaaacaaaactataaaaaagttttattgttaaaaagaaaagaattaatatatgctatttataaaagtattagaattaaggcaaaatttgtattcagagatgaaaaagaaaatttaataaatgcttattcaagatctatgttaaattttggccatacttttggacatgctttagaaaccttgaataggtatagctctaaacttttacatggtgaggctatttcaataggaatggttcttgcttcaaaatatcctataaatttaaaaatattagtaaattcgaacttgaagaaataat

SEQ ID NO: 286813 - DNA, 737 bp, Unknown
  Bacterial polypeptide expressing nucleotide sequence isolated from the Sargasso Sea
aaaatttataaacatacccactactctactatctcaagtagactcatctgtaggaggtaaaactggaataaacacaaatcaagggaaaaatctcattggaagtttctaccagcccagactagtaattagtgacacaaatttcttaaagtctctcagtagaagagaggttatttgcggatatggtgaaattttaaaacatgcaattatatcaaataaagttttttataattttttaaataaaaattttatcaatattataaaactcaaatcaccatttatagacaaagctatatatgaaagttgtaaaataaaaaaattagttgtcgaaaaagatgagaaagaaaatggtatgagaaagatattaaactttggtcatacttttgctcatgcatacgaagcatcatcaggcttttctaaaaaattaaatcatggtgaagctgtaattttaggtatgaataccgcattatcatttagttataaaaataaatttctaaatttcaaagaatatagcttaataaaagaacatatttataattctaaattaccatccaatttaaaaaaatatttttcattaagggatctcaaaaaaattttaaattttatgacgaaagataaaaaaaataattctgataaaataaatttagtactattaaaaaaaattggtaatccaataattagtaaaaaatataagaaaacaactttaagtttatttttaaaaaaagaattaattaattgat

SEQ ID NO: 286814 - DNA, 894 bp, Unknown
  Bacterial polypeptide expressing nucleotide sequence isolated from the Sargasso Sea
ggcaggccagcaggtcatgatcgtaactaacgataccgttggccccctgtatcttgagaaggtgaaaggctgttttcccggcaaggccattgacgtagtgaccttgcccgatggagaacagttcaaggattggcagacgcttaacctcattttcgacgcgcttctggaaaaacgacatacccgcaaaacgacactcgttgccctgggcggcggcgttgtgggtgatatggcgggtttcgcggcggcctgttaccagcgtggcgttcccttcatacaggttccaaccacgctgctctctcaagtggactcgtctgttggggggaaaacagggataaatcacccgcttggcaagaacatgatcggtgctttccatcagccgcaggcggtgctgatcgataccaacagcttgcaaacactgccggagagggaggtgtctgccggtctcgcagaggtgatcaaatatggcctgattcgggacgagtctttcctggcctggcttgaggattccatggagagcctgttgcgacttgatgctgaggcattaggtgaggcgatctatcgttcctgtgtctgtaaggcggaagttgttgcgcttgacgaacgagagggtgggttgcgtgcaatcctcaatcttggtcatacctttggtcatgccattgaaacctttgcaggctacggcaactggttacacggtgaagcggtgggtacgggtatgatgatggcagccgatctctcggtgagagaggggctgatctcggcggatgaccgggctcgggcggttgctctgattcggcgcgctcgtttgccggagtgggcaccgagcggtatgacatcagaggacttcatgaatctgatgtccgtggacaagaagaatgttgatggtcggctacggtt

SEQ ID NO: 286815 - DNA, 829 bp, Unknown
  Bacterial polypeptide expressing nucleotide sequence isolated from the Sargasso Sea
agctcgggctctttaataaaaaagaaattaataaattcacgtgtttttataattacaaataaatttattcataaactttacggaaaaaaattagagaactcactaaaaaaaaataaaataaattttaataagataataattaatgatggtgaaaaatacaaaaatattaaaactattaatttaattacatctaaacttctcaaatataaggttgatagaaacgatactttaattgcttttggtggaggtgttatcggcgatattgttggtttttcagcaagtatcacattaagaggcattaattttattcagatacctacaacattattatcgcaagtcgattctgcagtaggaggcaaaactggcgtcaatactaaagaaggcaaaaatctgataggtactttttaccaacctaaattagtgatttcggatgtttcactattaaagactcttccaaaaagggagattttatctggctatgctgaaataattaagtatggacttattatggataaaaaattccttaattggcttttacataatgagtcgaagcttatggcatttaacaaaaaatatttaatcgaggctgtttttcactcttgcaaaaataaagcaataattgtaagaaaagacgaaaaagaaaaaaatataagagcaatacttaatctaggtcatactttcggacatgctattgaagcaataaataattaccaaaaatcattaacacatggagaagccgtatctataggcattatgatggcccttgaaatgtcatcacttcaaggaaacagtttaaataaaaatataaataaaataaaagatcatttca

SEQ ID NO: 286816 - DNA, 790 bp, Unknown
  Bacterial polypeptide expressing nucleotide sequence isolated from the Sargasso Sea
tatgaaaagcattaatttaaatgtaaaaactaaatctaaatcatattcaattataattggaaaaaatattattaaaaatatatctagtttttttaaatcaaataatattaattttgaaaaaattttaatagttacagataccaaaataccaataaaaaaattaagtatattaaaaaaaagtatttcttcaaaaaaaataattattcatcactttaaagcaaatgaaaaaaataaaaatttaaaaaatattaatttaattttagaaaaattatttaaaaataacttcaatagaaatgactgtattgtgtcatttgggggaggaataacaggagacgtatctggttttgctgcaagtatatacaaaagaggattacaatttgtcaatattccttcgacattgttggctcaagtagattcttccattggaggaaaaacaggtgttaataataaatatggaaaaaatttaattggatctttcatgcagccagatttagtcgtgtctgatgtcagcttgttgcattctctatcaaaaagagaattaatctgtggctatggtgaaattttaaaacatgcaataattagtgatataaaagtttttaaatatttaaaagaaaacttttcaaaaatattaaaattaaaaaccccttttatagaaaagacaattgcagatagttgtaatataaaaaagaatatagttcaaaaagatgaaaaagaaaaaaatttaagaaaaattttaaatttaggacatacatttgctcatgcttacgaagctacgctttcatattctaaa

SEQ ID NO: 286817 - DNA, 724 bp, Unknown
  Bacterial polypeptide expressing nucleotide sequence isolated from the Sargasso Sea
ggggcctgcccctggtggcacataccaacaacacttgttgcgcaggtcgacagtgctattggaggaaagaccggcatcaatcttgatgcaggaaaaaaccttgttggttgtttctggcaaccacaaggcgtcttttcagatatccaaacactctccacgctgcctgaccgagaataccgaagcggtttagcagaagtaatcaaatatggcatcatccttgatgaagagttctttggttggctcgaagaccataccgatgaactgttgtccagagaatcttccgctctcatgcatgctgtgagtcgttcctctgccttgaaagctcacgttgtggaaaaagacgaacgtgaggtgactggcctgagggcaattcttaattacggacacacgtttgcacatgcgtttgaaaaggcggcaggctacgggacacttttgcatggagaagctgtatcgataggaatggcatgtgctgctcggttagcacacagtcttgaccgtgtcggggaggatatggtctgtcgacaaaatactctcatctcaaaattccaattaccacaatcactcccgtctttagacgtgtccaaagatgatctcatcacaatcatggcccgtgacaagaaatccgttcatggtcaacttcgatttatcctgccaaacaagatagggcacgttgaaatgattgctgatattcatcccgatcttgtgaagtctgcgatacaatgat

SEQ ID NO: 286818 - DNA, 874 bp, Unknown
  Bacterial polypeptide expressing nucleotide sequence isolated from the Sargasso Sea
attgggttcgaatataattcaaaatatttcaaaaatattattaaaagaaaaaatatattttgaaaaatgcttaattgttttagataaaaatatcccattaaattttatttcaatattattaaaaaaactgaaaacaaaaaaagttgtttataaatttaaagctttagaaaaaaataaaaattataaaaatgtagacaaaatacataatattttatttaaacataaatttaatagaactgattgcattatttcatttggtggtggaataacaggtgatgttgttggcttttcggcaagcacttttaaaagaggtattaaatttatcaatataccatcaacattattatcacaggtagattcttctattggaggaaaaactggtatcaacaatagttttggtaaaaatctagttggtagtttttatcaaccagacttggttatttcagatactaaattattaaaatctctaccatatagagaaattatttgtggttatgctgaaattctaaaaagcagtttgattaataataaaaaaaattttgattatttagaaaaaaattataaaaatattattaatttacagcctccatttatagaaaaagcaataatttttagctgtaagttgaaaaaaaaagttgtcgaaaaagatgaaaaagaaaaaaattatagaaaagtactaaatcttggtcacacatttgctcatgcttacgaatctacattaaaattttccaacaagcttaatcatggtgaagctgtgataatgggaataaaaaatgcaattcaatttagtaaaaataataaatacctttctaaacatagatttaattttattaataatcatataaataaaaattggattaatgcacaaatttaa

SEQ ID NO: 286819 - DNA, 649 bp, Unknown
  Bacterial polypeptide expressing nucleotide sequence isolated from the Sargasso Sea
aatgaaaactcttcaagttaaattacccggacgcagttataatattgacattggtttcaatattctccaaacacgacttccaaaggttgttttgaaacaaaacaccgatctggtagtagttgttacgaatcaaaccctgcaaaacttatatccagaccatataaaatgtatattagaaaattccggaatacaagttgctgcatgcgtactgcctgatggtgagcaatacaaaaatctagattccctctcaaaaatttttgatttcttgatgaaggtcagtgcaaatcgtaaaacattattaatagcatttggcggaggagttatcggagatatggctggttttgcggctgcaacttttgttagaggaatatcatacattcaaataccgactactttgctggctcatgtagatagtagtgtgggaggaaaaacagcagttaatcaccctttaggcaaaaactctattggtgctttcaaacagcccgaatatgtttgcattgagttgtcattcctgaaaacattgtcttctcgtgaattgaattccggctatattgaacttttaaaacatggtattattcacgatgaagaattatttgattttgtgcaaatcaattctctagagccacttgattttgaatttttagaagat

SEQ ID NO: 286820 - DNA, 871 bp, Unknown
  Bacterial polypeptide expressing nucleotide sequence isolated from the Sargasso Sea
catgaattatataaataaaattttagatattttactcaataaaaatttttcaagagatgattgtttgatttctgttggaggtggtataacaggtgatattgctggttttgcagcaagtttgttcaaaaggggcatgaaattcattaatatacctactactcttttagcccaagtagactcgtcaatcggtggtaagacaggagtaaatagtaagtatggaaaaaatctaattggaagcttttatcaaccagatttagtaatttctgatataaaatttcttaaaactcttccaaaaagagaagttgtttgtggttatggtgaaattctaaaacactcacttattgctaataggaatttttataattttttaaataaaaatagcagtaaaatacttaatctttattctccctttatagaaaaagcaatttatgaaagctgcaagatcaaaaaaaaaatagttgaaaaagacgaaaaagaaaaggggttaagaaaaattttaaattttggtcacacatttgctcatgcatatgaagcatctttgggttattcaaaaagattaaatcacggtgaagcagtaatacttggattgcaatctgctttaaattttagtttggcaaataattttataaaaaaaaatgagcatgatttaattataaatcatattcatgatgcaaaattaccgtcagatataaacaaattttttaaaaaaaaagatttaaataaaattctgtcattcatgtctaaagacaaaaaaaataaaacaaataagattagtcttgttttgcttaaaaaaattggatctcccataataaataaggagtataaaaaaaaaagtttgggcctatttttaaaaagccaattaagtaattaa

SEQ ID NO: 286821 - DNA, 547 bp, Unknown
  Bacterial polypeptide expressing nucleotide sequence isolated from the Sargasso Sea
atggtaacttatagcaatggagtttgccctatatattctggttgggatatatatgccgatattccaaaaatcttttcacaattaaatattcaaggtaatttatttctaatctctgatagaaatgtatatagcttatatggagaagaagtagaaaaatttatagcttctacaggtaaaaaagttttttctcatgagttggagccaggggaacataataaaacgtttgattcaatatctaatgtgtatagttggctagcagaatcaaaagcgcaaagacgcgataccattgttgctttaggaggtggagttgttggggacatggctggttttgtagcagcaacatataatcgtggcctaggatttatacaaattccaactagcttagcagctatggtcgacgcttcagttgggggaaaaactgcggttgatttacctgaaggtaaaaatcttgttggtgctttttatcaaccaaaagtggtaattgctgacgtttctacccttaaatctttaccacaccgtgaaactatggaaggttgggctgaggcta

SEQ ID NO: 286822 - DNA, 581 bp, Unknown
  Bacterial polypeptide expressing nucleotide sequence isolated from the Sargasso Sea
tatgaagaaagtaaccgtgccattagatactagatcctatgatattttgattggtgaggacttaatcccttactttcctattcatttagagggcattttaactcgtaactttttagcaattattacagacaaaaacgtggaaaaaacccacctatctagactagttaaagctctgtctgcatctggaattgaaactaaaatattatcgattgatcctggtgaaggaagcaaatcttggaaaacactccaaatgacggttgactggatgttggcaaataaaattgaacgcaatgacatagtcgttgctttgggtggtggtgttgtcggggatcttgtaggctttgctgcagcaatattaaggcgtggtattcgatttatccaatgtccaacttcacttttagcacaagtagatagttcagtcggcggcaaaacaggaataaactcagtacatggcaaaaatttagtgggcgctttttaccaaccatcacaagtcatctccgatatttctaccttacacacaataaatgaaagagatttcctagccggatacggtgaggtagtgaaatacggcttattaggcg

SEQ ID NO: 286823 - DNA, 667 bp, Unknown
  Bacterial polypeptide expressing nucleotide sequence isolated from the Sargasso Sea
taaaattttagatattcttttaaaagaaaacttttctagagaagattgtctaatctcaattggtggcggaattacaggagatattagtggctttgctgctagtttgttcaaaagaggactaaaatttataaatgttccaacaacccttttatcgcaagtagattcttcaattggaggaaaaactggagttaacactaagtatggaaaaaatttaattggaagtttctatcaacctcatttggttgtttctgatattcaatttttaaaaacacttccaaaaagagaaattatttgtggttatggcgaaattttaaaacattctttaattgctgataaaaaaatttttaattatttagatagaaatagtgaaaaaattttaagccttacttcgccttttatagaaaaaacaatttacgaaagttgtaaaattaaaaaaaatgttgttgaaaaagatgaaaaagaaaaaggacttacaaaaattcttaattttgggcacacatttgcacatgcatatgaagcatctttaggctactcaaaaaggctaaaccacggtgaagcagtgatacttggaatgaaaactgctttaaattttagtttaaaaaataatctgctaaagaatgaagagtataatttaataatcaatcatattggtaattcaaatttacca

SEQ ID NO: 286824 - DNA, 784 bp, Unknown
  Bacterial polypeptide expressing nucleotide sequence isolated from the Sargasso Sea
gctgtgcccaaatacaaaaaaaattgcagtcatatttgacaaaaatgtccctaatacttttaaaacaaaaattaaaaaactattaaaaaaatacaaaatatttataaaagactattctccaagtgaagggttaaagaattttttgaatgtaaatattttaatcgaatatcttattaaaaataaatttaatagaaatgatttagtaattgctgttggaggtggaataattggagatttttctggctttgttgcaagtatttttaagagaggtataaactttattaatgtacctacaacattattggcacaagttgactcggcaataggcggtaaaactggtgttaattcaaaaactggaaaaaatttaattggttcattctatcaacctaaactagtaatatcagatatatcttttttaaaaagtcttcctaaaagagaattcatttgtggatttggagaaatattaaagtactcacttataaaagatcaaaagttttttaattttataaaaaaaaattcaaaacaaattttaaaaggaagcgacttagatattttaaaatacttagttttaagaagttcaagaaataaggtttattttgtagttgcagatgaaaaagagtccaacaaaagaatgattttaaattttggtcatacatttgcgcatggaatagaatctacaaataagttttccaaaaaaattaaccatggagaagcggtgcttattggaatgctattagcaacaaaactttctttttataaaaatatttgttctttaaaaactgta

SEQ ID NO: 286825 - DNA, 465 bp, Unknown
  Bacterial polypeptide expressing nucleotide sequence isolated from the Sargasso Sea
tattaaggactaccttcccaacgcattatctaaaaataataaaatacttattatttctgataagaatatccctactagttatatcgaacttgtcagaaaattcattccttctagcaaagtaattgacgtactcaaaattaaacctggtgagcaatcaaaatcattttctaactttcaaatgatcctcaacaagcttggtaaaaagaaatatgatagatcggattgtatagttgccattggaggaggtgttgttggggacctgagtggtttcgtagctgcaagctatatgagagggatagattatattcaaatggcaacttctcttcttgctcaagtcgattcgtccgtaggaggaaaaactgctattaacattgagtcaggtaaaaatctcgttggagcctttaagaatcctaagttagtgttaatatcctcggccttattaaaaaccctcccagagagagaatt

SEQ ID NO: 286826 - DNA, 931 bp, Unknown
  Bacterial polypeptide expressing nucleotide sequence isolated from the Sargasso Sea
ccgtcaggtggtgattatttctaatccagtggttgcagggctgtatttgcctgctgtcactgcattatttcctgattcaacagttcactcctttattttacctgacggcgaagcctacaaaactcttcactcttttgagcaggtgatgtcctttttacttgagcacaaagtcaaccgcgatgtgttactcgtggctttgggtggcggcgtcattggggatctgacaggttttgtcgcggcttgttatcagcgtggtgtacgctttattcaaattcctaccactttgttgtctcaggtggattcttcagtgggtgggaaaacagcggtcaatcatccgctggggaaaaacatgataggggctttcaagcaacctgatctggtgctgattaacacctctgttttaagctctttacctgcctctgaatttgctgccggtatggcggaagtgatcaagtatgcgctaatcagcgacctggcatttttcaattggctggagcaaaatcaacaggctatccgtgagctgcaacctgctgttttaggtgaaatgatccagcattgttgccagatgaaagccgacattgtcagccgggatgaaactgagcagggcgaacgggccttattaaatttaggccatacctttggccatgcgattgaagcctttttaggttacggtcaatggttacacggcgaggctgtggctgtgggtatggtgatggcgtcacaacttgcagtaagtcgtggtgctctgaaccatgaagaattacaacgtataatgggtttattgtctgcttttgatttgcctgtggcacctccggcacaaatgagcattgcagactttatgccctatatgaaaacagataaaaaagtacaggctgggcaaaatgcgctttattgttcctacggctctgggacaaagtgcaatagtcgatga

SEQ ID NO: 286827 - DNA, 898 bp, Unknown
  Bacterial polypeptide expressing nucleotide sequence isolated from the Sargasso Sea
aaaaattaaaattgtttgtcctaaagtaagaaaaatttctttaatttttgatactaaagttcctaaaaattttagaaaaaaaatttttcagaatttaaaaaaatatgacttgttaaattataatttaaatgcaaatgaaaaaacaaaatcaattgacacagtaaataaaattataaataaattacttgccgaaaattttaatagatctgatttaataattggtgttggaggaggagttactggagatttagcaggttttgtagctagcatatacaaaagaggtataaattttattaacctacccactactttgctttctcaagtggatgctgccattggtggaaaaacaggagtaaattcaaaacatggtaaaaatttaattggatctttttatcaaccaaaattggttttaagcgatataacatttttaaaaagtttaccgaaaaaagaaatagtttgtggatatgcagaaatactaaagcatgcaattatttttgataaaaaattttttgaatggcttaaattaaatacaaagtatattttagataaaaattttggaaaattaatttatgctattaaaaaaagctgtaaaattaaattattttttgtaaataaagatactaatgaaagaaatcaaagaatgattttaaactttggtcatacttttgctcatgctatcgaagtaaaaaataattattctaaaactacaactcatggcgaagctgttttggctggaattattttagccactaaattatcagttattaaaaatgtatgtaatttaaaaattttaaaagaattaatctcaatttatcaaaaaaataatcttaactatactataaaaaaatattctaatttaaaaaatataaccaatttaaatcccatttttgaaaaatga

SEQ ID NO: 286828 - DNA, 793 bp, Unknown
  Bacterial polypeptide expressing nucleotide sequence isolated from the Sargasso Sea
atgaaagaaattaaatttaataataataaacaaaaatattcaataattattggaaaaaattctttaaatcaattatcaaaaagaataaagtttttatgtccaggaacaaaaaaaattgcattaattatagacaaaaaagttcctaaaaaatttaaaaaacaaattttaaaaagtttaaaaaattatgaattgattagcttaagttttaacgcaaacgaaaaagcaaagtcaataaattcggtaaatttattattaaataaattacttaaaaaaaatttaaacagatcagatttaataattggtattggaggtggaataactggagacttaagtggtttcgttgcaagtatatttaagagaggtataaattatataagtattccgaccaccctactttctcaggttgatgctgctataggtgggaagaccggagttaactcaacacaaggtaaaaatttaatcggctcattttttcaacccaaattagtaattaacgacatatcttttttaaaaagtttaaataaaaaagaaattatttgtggttacgctgaaattttaaaacatgcaattattaaagactcaattttttttaaatggttaagaaaaaatacaaaaaatgttttttcacttaatcaaaaagatttaatttatgcaattaaaaaaagctgcgagataaaacttcattttgtgaacaaagatactaatgaaaaaaaaataagaatgactttaaacttcggccatacattcgctcatgcaattgaagttaaaaataatttttcaaagaaaatcacac

SEQ ID NO: 286829 - DNA, 797 bp, Unknown
  Bacterial polypeptide expressing nucleotide sequence isolated from the Sargasso Sea
taaaaatttaaaaagtgtaaataaaattttagctaaattatttaaatttaattttaatagaaatgattgcattatatctatcggtggaggaataactggtgatgtatcaggatttgctgcaagtatttttaaaagaggattaaaatttataaatattcctacaacacttttatctcaagtagattcgtcaattggaggcaaaactggtgtaaataatgaatatggaaaaaatttaattggatcatttatgcagccggacttggttatttcagatatttctattttaaaatcacttccaaaaagagaaataatttgtggatatggtgagattttaaagcattcattaattaaaaataaaaatacatttaagtatttagataaaaactatcttaaaataataaacttaaaatcaccttttatagaaaaatcgatcgctgatagttgtaaaattaaaaaaaatattgtcgagcatgatgaaaaagagagaaatttgagaaaaattttaaatttaggtcacacatttgcgcatgcatatgaagctacactttcttatacaaaaaaactcaatcatggagaagctgtaattttaggaattattagtgctgcaaaatttagttttgaaaaaaatattttgaataaaaatgattataatcaaataattaatcatacaaaaaatttaaaaattccactgtatttgaaatattattttaaaaaaaatgatataaataaaataattaaatatatgaaagctgacaaaaaaaataattcttccaaaaataaatttaattttaattaaa

SEQ ID NO: 286830 - DNA, 894 bp, Unknown
  Bacterial polypeptide expressing nucleotide sequence isolated from the Sargasso Sea
acttttatacaaaaagctaaaaacaaataaactttttaaagtagaaatatcggcatcagaaaaaaataaaaattatcgaacaattgaaaaaattcatacaattttatttaaaaacaggtttaatagagaagattgtattatttcttttggtggcggaattattggggatatagttggtttcgcatctagtacatttaaaagaggtatgaaattgataaatattccatcaactctactgtctcaagtggactcatcaataggtggtaaaacaggtgtaaataataaatttggaaaaaatttgattggaagtttttatcaacctgatttagtggtttctgatatgaatattttagcttctttaccagaaagagaaattatctgtggatatgctgaaatattaaaaagtagtattatagatagttttaataattttctctatttagataaaaatttaaaaaaaattttaaaattagaatcacctttcattgaaagatccataattaaaagctgtaatttaaaaaaaagagttgtagaaacagacgaaaacgaaaaaaactacagaaaggtattaaatttaggtcacacttttgcccattcttatgaatctactttaggattttctagaaaactaaatcatggggaagctgtaattttaggtattaaaaatgcagtagaatttagttttaaaagaggaattttatcgaaacaaaaatttaatattatcttgaatcatattaatagaattgaaatgaaaccaaaaattgaaaaattatttaaaaaaaaacacgtatctaaaattatgaattatatgagaagtgataaaaaaaataattcaaataacattaacctaattttaataaaagattttggaaaaataatagttgactttcagat

SEQ ID NO: 286831 - DNA, 901 bp, Unknown
  Bacterial polypeptide expressing nucleotide sequence isolated from the Sargasso Sea
aaaaaaaactacgaaataaaaaaaatatttttattcaattttaatgccaacgaaaaaaataagaaccaaactactataaattcaatcttagaaattttacttaataaaaatttttctagagaagatagtttattagcaatagggggaggtataactggagacgttggtggttttgctgcaagtttattcaaaagaggattgcattttgtaaatatccccaccactcttttggctcaagtagactcatcgattggtggcaaaacaggagtaaattctaagtatggaaaaaatctcattggtagcttctatcagccgaaattagtcataagcgatatagatactttaaaaacactcaataaaagagaaattgtttgtgggtatggtgaaattttaaaacactctataatctctaaaaagaaattctttaaatatttggatcagaattttgataacattatcaaacttaaatctccttatatagaaagggcaatatttgagagttgtaaaattaaaaaagacgtggttgaaaaagatgaaaaagagagcaacttaagaaaaaaattaaattttggtcacacttttggtcactcatttgaagcttcattaggatattctaaaagattaaatcatggtgaagctgttatcctaggaatgatggttgcattaaaatttagcaataagaataaattcctaaattctaatgattataaattaatttctgatcactataaaaattcaaaattaccttcaaatattaaaaaatattttaaaaggaaagatcttgataaaattattaaatttatgaaaactgataaaaaaaacaattctgataaaataaagaaagttttattgaaaaaaatgggccaaataattttaaatcaagaatactcagtaaaaaatt

SEQ ID NO: 286832 - DNA, 621 bp, Unknown
  Bacterial polypeptide expressing nucleotide sequence isolated from the Sargasso Sea
catgcagcagattcaggttcaattaggtgatagaagttaccccatttacattggccagaatttgatgagtgatggcgagttatttactcgctacctgcaacataaaaaagtgctaattgtttcaaacgataccattgctccgttgtacctaaaacaggtacaacaagcgatgagtgcttgcacatcgattgaaactgttattttgcctgacggcgaacaatacaaagacctgcaacacctcgatttaatctttagtggattacttgagcataattttgctcgagattctgttttagttgcgctcggtggtggtgtggttggtgacatgacgggctttgctgcggcatgttatcagcgaggtatcgattttatccaagtgccgacaacgttactgtcacaagttgattcctctgttggcggtaaaacggctgtcaatcatccgcttgggaaaaacatgatcggtgcattttaccagcctaagtctgtcattattgacaccctgtgtttacagacattgccagcaaaagagtttgcggcaggtatggccgaggtgatcaaatatggcattatttgggataacgatttttttcagtggcttgagcagaatgtagagtctctgaa

SEQ ID NO: 286833 - DNA, 671 bp, Unknown
  Bacterial polypeptide expressing nucleotide sequence isolated from the Sargasso Sea
tatgaaaattgataaaatcgtagttaaaaataaaagtataaactacccaataattgttggtaatggtgcaattagtttattaaaaaaacaggttagtagattatgcccgcatacgaaaaaagttgcgatagtatttgacaaaaatgttccaaatattttcaagattaaaattaaaaaacttctaaataaatataaaatattttttaaagactattctccaagtgaggagctaaaaaattttcaaagtgtaaataatttaattgaatatcttataaaaaataaatttaatagaaatgatcttgttgtagctgtaggcggtggaataatcggtgatttttcaggtttcgctgcaagcattttcaaaagaggcctaaacttcattaatgtgcccacaactttgttagcacaagttgattctgcaataggaggtaaaactggtattaattcaaaaactgggaaaaacttaataggttctttttatcaacctaagttagtaatatccgatttatcttttttaaaaaccttgccaaagagagaatttatttgtggatttggggaaatattaaagtactcactaataagggataaaaaattttttaattttattaagaaaaattcaaaagaaattttgaatggaagaaactatgatattttaaaatatcttgttttaa

SEQ ID NO: 286834 - DNA, 316 bp, Unknown
  Bacterial polypeptide expressing nucleotide sequence isolated from the Sargasso Sea
cttgatattggaagatggagagagcaccgaaactgagaaaacatggtcaaccataatagataagcttatagatatgaaggcgaatcgtgatacgacaattatagcattaggtggaggtgtgataggagatatcgccgggtttgcggctgctacttatatgcgaggattgccttttattcagataccgacctctctcttagcacaagtagattcatcagttggcggcaaagcaggaattaatcatcctaaaggtaaaaatctagttggatctttctatcagccaatagctgttgtgtcagatattgatacactaaaa

SEQ ID NO: 286835 - DNA, 802 bp, Unknown
  Bacterial polypeptide expressing nucleotide sequence isolated from the Sargasso Sea
atgtccaataaaatcaaagttgatttaggaaataatagctacaatgtcagtttgattgaaagtttcaaaaattcagttgtaaagtttgcttcttcaacaaaatctcaatgcatgctaattacccaacaagaaattttaaatctttacaaagatgaaatagatgagctatctaatttaccaaatgtaaatatctttttgattgatcaaggtgaaaaagcaaaatcatttgaatccatatctttaatagttaatgagatgtctaaaaagcattttgatagatcatcattagtttttgcggttggtggaggtgtcgttggagatgttggagggtttgcatcatcaatttttatgcgaggaattaaatatattcaatatccaactactttacttgcaatggttgactctgctattggtggaaagacaggaataaacttaaaagatggtaaaaatttggttggaagaatttatcaacctatagctgtagaaattgataccaattttttgtcaactttaccagacagggaactgcaagctgctcttgcagaggtagtaaaatacggttttatttatgacagagaattttttgattttgtagttgctaattcaactgaaattcaaaataaagatatagatgttttacaaaaaataattatccaatgttgcgaaataaaaagtgatattgtaagtgaagatgaaaatgagaatgaacttagaatgattttaaattttggtcatactgttgggcatgcaattgaatcattcactgattacaaaaatttattacatggagaagcaatttttt

SEQ ID NO: 286836 - DNA, 757 bp, Unknown
  Bacterial polypeptide expressing nucleotide sequence isolated from the Sargasso Sea
gcttcaatactcctaagaggtatagattttattcagataccgactactctactagctcaagtagatagctcggtaggaggtaagactggtattaatagtactaaaagtaaaaacttaattggctcttttcatcaaccaatcgcagtcatagcagatatagatatacttaagacgttacctaaaagagaatttttagctggcttggttgaagttataaagtatggccttatttacgacgttagattttttgacacattagaaaataattacaaagatattttaaattatgatcagttaaagttaaatgaagtaattagcaaatcttgtgaaataaaatctttaataataaaagatgatgaaaaagaaaatggtaaaagagcccttctaaatcttgggcatacatttggccatgctattgagtcatttggtaaatacgatggaacaattattcacggtgaagcagtatcaattggaatttgcttagcattcaaactttctagtaaaatgggctattgtccttatattgaaacagagcgagtagtaagtttttttaaaaaattaaatctgcccacctctttacaagaggtacaaaaccttcctatttcaacatcagaaatgttaaaaaaattcaaatatgataaaaagaataagaataatcagttaacatttattcttaatgaaaagattggaaaatcttttataaaaaataatatggatgagaatattttaactaaattcttaaatgatgagatataat

SEQ ID NO: 286837 - DNA, 796 bp, Unknown
  Bacterial polypeptide expressing nucleotide sequence isolated from the Sargasso Sea
taaatcaaattcaattgattttaataaatgtttaattgttgttgataaaaatgttccaaaaaaattagtctcaaatattaaaaagtctttaaaaaataaaagtatttttgtgttattttttaatgctagtgaaaaaaataaaaatattaatagcgttaataaaattctagaagttttattaaataaaaacttttcaagaaatgatattttaatttctttaggaggaggaattacaggtgacgtaagtggctttgcggctagtcttttcaaaaggggcataaagtttgcaaatattccaacaactcttttagctcaagttgattattcaataggtggaaaaactggagttaattctaagtatggtaaaaatttaataggaagtttttatcaaccatcattggttctatcagacattcaatttcttaaatctttatcaaaaagagagataatttgtggatatggagaaatattgaagcattcattaattgaaaataaaaaattttttattttcttaaataagaatcttaaaaagattttaagtatttcatctccatttattgaaaaagctatctatgaaagttgtaaaattaaaaaaaagatagtcgaaaaagatgaaaaagaaacagcattaagaaaagtattaaattttggtcatacatttggccatgcttatgaggcaggcttagggtataatcataaagtaaatcatggtgaagcagtgatacttggaatgaagacagcacttaattttagtttaagggaaaatatgctcagtaaaaatgaatataatttaatt

SEQ ID NO: 286838 - DNA, 625 bp, Unknown
  Bacterial polypeptide expressing nucleotide sequence isolated from the Sargasso Sea
tatgattataaataaaataaaagtaaaaacaaaaacaaaaaaatatttaatattaattggacctaatattattaaaaatatttcaagtattttctctaatcaaaaaatgtcatttgaaaaatgtcttgttgtagttgataaaaatattccaaaaaaatttcaattaaacttattaaaaaaattaaaattaaaaaaactattaattcataaatttaatgccagcgaaaaaaataaaaattataaaaatgtagataaaatacataaaatattattaaaaaatagatttaatagagaagattgtctaatttcttttggaggaggaattgtaggagatgttgtgggtttcgcttcaagcacttataaaagaggaataaaattcattaatattccatcaacacttttagctcaagtagactcttctatagggggcaaaacaggaatcaataatcaatttggtaaaaatttaataggtagtttttatcaaccagacttggtaatttctgataccagtcttttgacttctttgccacaaagagaaattatatgcggttatgctgaaatttttaaaagtagcttaatagataactacaaaaattttaattttttaaataaaaatatttataaa

SEQ ID NO: 286839 - DNA, 691 bp, Unknown
  Bacterial polypeptide expressing nucleotide sequence isolated from the Sargasso Sea
tatgacaattttatccgctggaagaggtacaaccaaatataatattcatatttatgataaaaaacttccaaaaaatgccattgataatcatataggtaaaaataataaaatattaattatcactgattctggcgtcccaaaaaaatttttagatgaacttaaaaaaaatatcaaaaataacaacttatattttcttattttacaaaatggagagagatctaaatcatttattacttaccaaaaaataataaataaattaattcaatataaatttgaccgatcagatcttttaattgcatttggcggaggtgttgttggggatattactggattcgtagcttcttcttatttaagaggtataaaatatattcaaataccaacaactctattggcacaagttgattcttctgttggtggaaaaacagctatcaacgttaaagaaggtaaaaatctcattggagcattttataatccacatttagttttaatttcaacatattttttaagcactttgtctgaaagagaattcaaatcaggattgggagaagtagtaaaatatgcacttattggtaacaaaaaattaaaaaaaattatagagaaaaatccgatcgaaataattcaaagaaaaagttcaattctaaaagttatcattgaagaatctataaagacaaagtcaaaaattgttactcaa

SEQ ID NO: 286840 - DNA, 736 bp, Unknown
  Bacterial polypeptide expressing nucleotide sequence isolated from the Sargasso Sea
atgaaagattataaattagtaataaatacaaaaacaaaaaaatacccaatttatattggatataatattttaaaatcatctaacaaaatttttaaaaataataaacttgatattaaaaagtgtttaattgttgttgacaaaaatgttcctaaaaaaaatgtattaattttaaaaaaaaatattaaatcaagtaaagtttttattcattattttaactctaatgaaaagaataaaagtttaaaatatgttaattctattcttgctatattatttaaatataattttaatagagaagattatatatttgccttagggggcggtattactggcgatctagttggttttgttgcaagtatattcaaaagaggaattaaatttataaatgtaccaacgactttattatctcaggttgactcttctatcggtggaaaaactggagttaataatatttttggaaagaatcttattggatcattttatcaaccagaattagtaatttcggatgttaaaatcttaagctctttaaataaaagagaaattatttgtggatatggtgaactttttaaacattcagtaatctcaaaaaaaagtagctttaattacctaaataaaaataaatttaaaattttagatttaaagactccctttttagaaaaagctatttatgaaagttgtaaaattaaaaaaaatgtcgttgaaaaagatgaaaaagaaaaaaatttgaggaaaattttaa

SEQ ID NO: 286841 - DNA, 667 bp, Unknown
  Bacterial polypeptide expressing nucleotide sequence isolated from the Sargasso Sea
ttgatcttcggttgtggtaaaacagcaattaatgctaaacaaggtaagaatttaattggttcattttataatccaaaatttgttctaatatctacccattttttaaaaacattgcctgaaaatgaatataaatcaggcctaggcgaagtaattaagtatggttttataggtaataaaaaacttaaaaagattatcgaaactaatgcaaaaaaaataattataagagatgaaaaaatattaaaacttatcatagaagaatcaattaaaacaaaatcaaatattgtcaccaaagatgaaaaagaaacggggattagagcaatattaaattttggccatacctttggtcatgctattgaggcctacaatggattcaaaaatattacacatggtgctgctataaccctaggaatggttattgcttcaaaaatttcttactttgagggccatatcaaagactatcaattagataatgtaattaatactatagactcactgggcttaaatacagatcacaaaaagtataaatactcgcatcttaaaaaatatattacatctgataagaaagttgctgatggcaaaataaatttagtcttgattgataaaaaatttaatgcttttaaaacatctaaatttagtcatagaaatattattaaagcattaggttaag

SEQ ID NO: 286842 - DNA, 627 bp, Unknown
  Bacterial polypeptide expressing nucleotide sequence isolated from the Sargasso Sea
aatgaataagctaattgtaaaaacaaataataaaaattatcctatttatgttggtaatcatattttaaaaaatctaggaaaaatactcgttaatgaaaaaataaattttagaaaaactttaattttggttgatagaaaaataaagaaaaaatttataaaacaaactttaaatagccttaagaataaagaaaattatataattagatttaaatcaactgaaattaacaaaaatattaatgaggtagaaaaaattattaattttcttttaagtaaaaacttttcaagacatgattgtgtaatatccatgggtggaggtattttgggtgatctgactggttttgtttcaagtatctataaaagagggataaaatttattaatattccgacaaccttactctctcaagttgatgcaagtattgggggtaaaactggagttaatcaaaaaaaatttggaaagaatttaattggatcattttatcaaccagaactagttttatccgatacggaatttttaaaaacattaaatcgaaaggagttaatatgcgggtatggagaaattttaaaacatagcttattacagggaactactaactttagttatttggataaaaattttaataatatatt

SEQ ID NO: 286843 - DNA, 754 bp, Unknown
  Bacterial polypeptide expressing nucleotide sequence isolated from the Sargasso Sea
attgggcgaaaatatacttagaattttaccaaaaaaaattaagtctttatgtccaagaacaaaaaatatagctattattttagacgacaatgttcctggtaaattcaaaaacaaattacgaaatttacttaaaaattacaaaattttatttttatcttttaatgctaatgaaagaaataagtctttaaatgtagtaaataattatttaaataatttgttatctaaaaattttaaccggtctgatttgatcatttctgtaggaggcggaattactggagatgttgttggctttctttcaagcattttcaagagaggtataaattttattaatattccgactactctacttgcccaggttgactcggctattggcggaaaaactggagtaaattctagttacggcaaaaatttaataggttctttttatcaaccaaaattggttatcagtgatacttcattcatcagttctttaccaaaaaaagaaatgatttgtggttatgctgaaattttaaaacattctattataaaagataaaaaatttttcaattggttagaaaaaaattcaaaatcaattcttgccaagaaaaaaaaagaattgacttacgcaattaaaaaaagctgtgagatcaaaatttactttgttaataaagatgtgaacgaaaaaaatttacggatgattttaaattttggacatacatttgcacatgcaatcgaggtaaaaaatagctactctaaaaatatttctcacggcgaa

SEQ ID NO: 286844 - DNA, 476 bp, Unknown
  Bacterial polypeptide expressing nucleotide sequence isolated from the Sargasso Sea
tatgaaacaaaaaataataaaggttaaaactaaaagtaaaaattacgaagttcatattggtaccaatctaattccaaaacttaaaaatattttaaaaaaaaataaagtattattttcaaaatgtttgattgtaattgacagtaagataccgaaaaaatttataacattactcttaagaaatttaaaaaatcaaaaaatttatactttaaattttaatgcaaatgaaaaaaataaaaattacttaagtattgacaaaatacataatgttttatttaaaaataatttttatagagaggattgtataatttcatttggtggaggaattacaggagatgtagttggatatgcggcaagcacatataaaagaggaataaaatttattaacataccttccactttattagctcaagtcgactcttctataggcggaaaaacaggtattaacaataaatttggaaaaaatcttgtaggaagtt

SEQ ID NO: 286845 - DNA, 784 bp, Unknown
  Bacterial polypeptide expressing nucleotide sequence isolated from the Sargasso Sea
gtttaactttaatagaaatgattgcataatatctttgggcggcggcataactggagatatatccggttttgctgcaagtatatataaaagaggtattaaatttattaatatacctacaacacttttagctcaaatagactcctctattggtggaaaaactggggtaaataataaatatggaaaaaatttaattggttcgtttatgcagccagatattgttctttctgacattagttttttaaaatctttacctaaaagagaattaatatgtggttatggagaaattattaaacatgcaataattagtaacaaaaatatatttaattacttagataaaaatatttataatattttaaaattaaaatctccatttattgaaaaaacaattgccgatagttgcagagttaaaaaagatattgtagaaaaagatgaaaaagaaaaaaacttaagaaaaattttgaatttaggtcatacatttgctcatgcatatgaagcaactagcaattattcaaaaaaattaaatcatggagaagccgtaattttaggtatcataagttctgcaaaatttagttatacaaataaattactcaaaaaaaaagattatgaaaaaatatttaatcatataaaaaaattaaactttcctttaaatttaaataattattttaaaaaaaaagatgtcaatttaattataaaatatatgaagtcagacaaaaaaaacatttcttcaaaaataaacttaattctaataaaaaaaattggtaaaattatcttagatttaaggttc

SEQ ID NO: 286846 - DNA, 796 bp, Unknown
  Bacterial polypeptide expressing nucleotide sequence isolated from the Sargasso Sea
tatgaaaatatccaaactaataattaaatccagttctggaaaatatcctatattaataggttctaatgtaatctctaatatatctaagttaatgtttaataattcaataaattttgaaaaatgcttattggtggtagataagaatgttccaaaaaaatttatttctaaaattaggaaatcattgaggagtaaaaaattatttatttttttgataacagctaatgaaaaaaataagagtcaaaaaacaactaatacaattcttcaaattttacttgataaaaatttttctagggaagattgtttaatagcagttggaggtggaattactggcgacgtaagtggttttgcttcaagtttatttaaaaggggtttaaaatttgtgaacatacctactaccttactatctcaagtagactcatctataggaggcaaaactggaataaacacaaatcaagggaaaaatcttattggaagtttctaccagcctagactagtaattagtgatactaattttttaaaatctctcaacaaaagagaaattatttgtggatatggtgaaattttgaaacacgcaattatatcaaataaagttttttataattttttaaataaaaatttctttaatattataaaactcaaatcaccatttatagataaagccatatatgagagttgtaaaataaaaaaattagttgttgaaaaagatgagaaagaaaagggtatgagaaaaatattaaattttggtcatacttttgctcacgcatatgaagcatcattaggtttttctaaaaaacta

SEQ ID NO: 286847 - DNA, 781 bp, Unknown
  Bacterial polypeptide expressing nucleotide sequence isolated from the Sargasso Sea
ataggagatttatcgggatttgttgcaagtattatattaagaggcgttaacatagttcatttccccactacattattagctcaggttgatagctcaatcggtggaaaaacaggggtaaataataaaatttatggtaaaaatttaattggaactttttttcaaccaaaactcgtaatttgcgacacaagctttctaaaaacactgccaaagagagaaattatctctggatttgcagaggttataaagtatggcgttttatttgacaagaaattttttacatggttagaaaataattttgaaaaaattttaaaaaacgatcaatcaaaattaacttatctaatcaataaaagtgtacgtattaaatcatattttgtatcaaaagatgaattcgacaaaaaagataggagagctcttttgaatttaggccacacatttgctcattcgcttgaaaaatgcgccggttactctagaaacttactccatggtgaagcagtggctataggcatatgtatggcatcaagattatctctaaagcttggttatttatctattaaagattatcaaagaattgagttattattaaaaaattttggtctaccaacaaatttagattatttaaaaactttaaaagataaaaaaaataatataatcaaaaatatgagcaatgataaaaaagttttaaaaggtaaattgaattttgtactttgtcgaagtattggaaaagcttttgtttacaaaaaggaaataaatattaatttgttaaaaaaaacaattttataaa

SEQ ID NO: 286848 - DNA, 643 bp, Unknown
  Bacterial polypeptide expressing nucleotide sequence isolated from the Sargasso Sea
cggtaaccaccctctaggtaaaaacatgattggtgcattttaccaacctgtttatgttgctatcgataccgactcgctggcgacactgccgccaagagaatttgctgccggtatggcagaagtgattaaatacggcatcatttacgatgctccgttttttaagtggcttgaagaaaacgttaacgcacttacgtctcttgatactgaaattcttacctacgccatttcccgctgttgtgaaattaaagctgatgttgttgctaaagacgagcgagaaggtggtctgcgcgccattctcaatttgggccacacgtttggccacgcaattgaagcagagcaagggtatggcaattggttacatggcgaagctgtggccgctggtactatacttgcttgtaaagctgcagaaggtttatcgtggttttcagcgtcagaaacacgtcgcgtgtctgcgctatttgaagcgtttgcattgcctgttaaagggccaagtagcatgactaaggacgactacgttaagcacatgaaacgcgataaaaaggtggaagcaggcaatattcgttttgtccttccccaaggtattggcaaagcggtggtcaccaaggacgttaccgacgacattctaactgacattattgcttag

SEQ ID NO: 286849 - DNA, 721 bp, Unknown
  Bacterial polypeptide expressing nucleotide sequence isolated from the Sargasso Sea
aatgattaaaaaagttttagttggtgatgaaaaatataaggttcttattggtaagaataagatctttaaagattatcttcccagcgcagtatcaaagaataataaaatttttattattactgataaaaatatccctactgcatacattgaactcataaaaaaatcgattccctctaataaagtaactgacttgattaaaattaagcctggagaggaatcaaaatcatttactaactttcaaatgattcttaataagcttgctaaaaaaaaatatgatcgatcggattgtatagttgccattggaggtggtgttgttggggacttgagtggttttgttgctgcaagctttatgagaggcatagattatattcaaataccaacctcacttcttgcccaagttgattcatcagtaggaggaaaaactgccattaacattgagtccggaaaaaatcttgttggcgcctttaagaatccaaagttagtattgatatcttcagccttattaaaatcactaccggagagagagttcaaatctggaatagcagaaataattaaatatggactaatttataacaagaaaatattcaatatttttgataagcagcataagcaaattctaaaaagaaaccaaagggtaattgaagagcttattcatgagtcagttaaaacaaaagcaaaaattgtcactgaggatgagagagagttaggcataagagctata

SEQ ID NO: 286850 - DNA, 994 bp, Unknown
  Bacterial polypeptide expressing nucleotide sequence isolated from the Sargasso Sea
catgtcaaagatagcagcaggtaaaggtgacactaaatataatatttatatttcaaataagatatctaaaaggactcttaatcaatatttaaaaacttataacaaactattagtagttacagatagtggtatacctaaagagcatcttaaaaatttaaaatcaaatatcaataataaaaatgtatacttttttacattgcctatgggcgaaaactcaaagtcattttctttatatcaaaagattattaatgaactggttaaatttaattttgatcgcacagacgctcttattgcttttggtggtggtgttgttggtgatattacaggatttgtagcagcaacttatttaagaggtatttgttacattcagattcctacaacacttcttgcacaagtggattcttcaattggaggaaaaactgctataaatattcctcaaggtaaaaatcttgttggatcattcaataatcctaagtgtgtttttatctcaacatatttccttaatactcttcctcaaaaagaatttaactcaggtcttggagaaatagttaagtatgcattaattggaaacagaaaattaaagaaacttattgagaataatcctcaacaaataaaagataaaaaagaatccatcttgagaattattattgaggaatctatcaaaacaaaatcaaaaattgtaactagagacgaaaaggaatcaggagtgagagcaatattaaattttggtcatacatttggacatgctattgaagcatataatgattataaaaacatttcgcatggtgcagctattacactgggtatgataattgcttcaaaattatctttttatgaaggacatattagagattatcaacttgacaatgttattaatatagtcgattcactggggctaaattctgatcatcgtaaatataattattttaagcttaagaaatttatggcaaatgataaaaaagtgtctaaagggaaattaaatttcataatgatt

SEQ ID NO: 286851 - DNA, 1084 bp, Unknown
  Bacterial polypeptide expressing nucleotide sequence isolated from the Sargasso Sea
atggaaaggttgaaggtcgaactgggtgaacgcagctatcccatcgagatagccgcaggtctgttgcagcacgcagaggtgctgacgcaaaccatcaagggcaagcgggtcatgattgtgaccaacacagtggttgcgcccttgtatcttgagcggattgcccagttgctgtcgggctatcaagttgaacacctgatcctgccggatggcgaggcctacaagaccctggctacctttgagcggatcatgtccgctctgctggaaaccaaccatggtcgtgataccactctgattgccctgggtggcggtgtgataggggacgttgtcggcttcgctgctgcaagctatcaacgtggcattccgttcattcaagtgcctaccacactgctttcccaggttgattcctccgttggtggcaagactgccgtcaaccatcccctcggcaagaacatgatcggggccttctatcagcccagacacgtcgtgatcgataccgagtgcctccagaccctgcctacccgcgaatttgccgccggcatggccgaggtgatcaaatacggcatcatctgggatgtcgaattcttctgctggctcgaagccaacatgtcccgtctgcaggcgcaggagccggccgcgctggcctacgccatccgccgctgctgcgagatcaaggccgatgtggttggccaggacgagaccgaacacggtgtgcgtgccctgcttaatctgggccacacctttggccatgccattgaagccgagaagggctatggcaactggctgcacggcgaagccgtggcggcaggcaccatgctggccgccaataccgccctggcccgtggggacgtgaccgagcaacaggtagaccgtatccgggccttgctgctggcagccaatctgccggtgacggcgccgccagagatggattttgcggccttcattcgtcacatgcgccgcgacaagaaggtgctggaaggcaaattgcgtctggtgctgccggtcggcataggtcatgcccaggtggtggccgatgtctccgatgctgaactgctggcggtgatcgagtctggtcgtgacgaataaa

SEQ ID NO: 286852 - DNA, 1108 bp, Unknown
  Bacterial polypeptide expressing nucleotide sequence isolated from the Sargasso Sea
atgaaacaaactagattaaatatattaactaaaactgaaaaatatccaataattattggatcaaatttgaccttaagcgtatcaaaaatttttaaatcaaattcaattgattttgataaatgtttaattgttgttgataaaaatgttccaaaaaaattcgtctcaaatattaaaaagtcttttaaaaataaaaatatttttgtgttattttttaatcctagtgaaaaaaataaaaatattaaaagtgttaataaaattctagaagtcttattaaataaaaacttttcaagaaatgatgttttaatttctttaggaggaggaattacaggtgatgtaagtggttttgcggctagtcttttcaagaggggcctaaagtttgcaaatattccaacaactcttttagctcaagttgattcatcaataggcggaaagactggagttaattctaagtatggtaaaaatttaataggaagtttttatcaaccatcattggttctctcagatattcaatttcttaaatctttatcgaaaagagagataatttgtggatatggagaaatattgaagcattcattaattgaaaataaaaaattttttattttcttaaataaaaatcttaaaaagattttaagtctttcatctccatttattgaaaaagctatctatgaaagttgtaaaattaaaaaaaagatagtcgaaaaggatgaaaaagagacagcattaagaaaagtattaaattttggccatacatttgcccatgcttatgaggcagggttggggtacagctataaactaaatcatggtgaagctgtaatacttggaatgaaaacggcactgagttttagttttaaggaaaacatgcttcgtaaaagtgaatacaatttaattataaatcatattgataattctggtctaccttcttctataaaaaaatatttttctatcaaagatttaaataagattttatcttttatgatcaaagataaaaaaaataattctaaaaaaattaacttagttttgttaaaaaaaatcggtaagccaattttcaacaaacaatactccaaaaaaaaaataaatttatttctgaaaaaatttttaactaattaaa

SEQ ID NO: 286853 - DNA, 1072 bp, Unknown
  Bacterial polypeptide expressing nucleotide sequence isolated from the Sargasso Sea
tatgaggacgctaacagtaaatctcgaagatcggagttatccaatttacattggggccggtattagtcttaaagatgagctttattctaaacacataaacgcaaataaaattgctttgatcactaatgaagaaatcgcagatttatacctttcagaaatcagccaaacattaacattatttgatctcaaagttcttgtgcttccggagggtgagagcgagaagaatcttgagaccgttcagaaagcggttgagttcttatcggataatgaaattgatagaaaagcatcaattattgctctaggcggaggagtagtgggagatataaccggctttgttgcttcttcttatatgagaggaattaatttccttcaggttccaacaacactcttggctcaggttgattcctctgtaggaggaaaaacaggcgttaatacaaaaaaggggaagaatctcattggcgccttttatcagcccagtgctgtaattgcagatacaaggtttttaaaaactttagagcctcaacgattttcagagggcttagcagaagtgatcaaatacggtttgatacgagatcttgatttctttgaatggctggaggtcaacaccagtaaaatattggcattggaacctaaagttatgactcatcttattgagaggtgttgtcaaattaaagccgagattgtttctgaagacgagagagaaggttctgttagagcaatattgaactttggacatacctttggccacgcaattgaaagccttacagattatagtgtttattcacatggagaagcagtagcaatgggaatggttatggcatccaacatgtcacacaaaatggacatgctatcttccgaggataaaaaaagaataactaacctcatcaaatccatgaatttgccgacaaataagcccgatctagacaaaaatgatttttttgagagcatgagacgcgacaaaaaaactcaagatggccaaataaggttgatattattagagagcattggaagagcaatgattgcgagcgattatcccaaagaattattaatgaaaaccatattggaatcttag

SEQ ID NO: 286854 - DNA, 795 bp, Unknown
  Bacterial polypeptide expressing nucleotide sequence isolated from the Sargasso Sea
tatggctaaagaaatcttcgctggcaaaaacgataagaaatacaaaataattatttcagcaaatgctatatctaaaaaaaatcttggtcctctgctaaaagaacacaataaagctcttatcatttctgataacggagtgccgttgaatattacaaggaaagttacttatattagcaaagcctttagcaaagttttttcagttactctgacaaaaggcgagcaagcaaaatccattcaaaactttcaaaaaattctagatcttttggccgaaaataactttgatcgaaccgatgcaattattgcggttggtggaggagttgttggagatattgcaggttatgtagccagctcatatctaagaggagtgcaatttatacaaataccaaccacccttcttgcacaagttgactcatctgttggtggtaaaactgcaataaatatttctgctggcaaaaatcttgttggtgccttttataatcctaaaggagtaattatcgatacctcagttttgacatcactacctcaaagagagtacagagctgggctagctgaagttgtaaaatatgcattaattaagaataaatatctctttactctcctgaaagaaaatgttcaaaaaattttattaatggacaaaaaaattattgaagaagtgatttttgaatccataaaaactaaggcagaaattgttacaaaagatgagaaggaaaatggtcttagagcgatattaaattttggtcatactttcggtcacgcaattgaagctcatggaaattataaaaaaattcttcatgg

SEQ ID NO: 286855 - DNA, 779 bp, Unknown
  Bacterial polypeptide expressing nucleotide sequence isolated from the Sargasso Sea
tatggctaaagaattgtttgctggtcagaatgaaagtcgatacaaaatcattattggcaaaaatactatttcaaaaaaaaatcttttttaccttttaaaagaacataacaaggttctaattattactgataatggtgttccattaaaaattaaaaataaagttacctctatatgtaaagcttactcaaaagttttagcaatatcgttaaagcagggggagagagcaaaatctattcagaattttcaaaaaattcagaattttttagcaaacaaaaattttgatcgatcagatgcgataattgctttgggcggaggtgttattggagatatttcaggatatgttgcaagctcatatcttcgtggaatcaaatttatacaaatccctaccacccttctagctcaagtagattcatcagtaggtggcaaaaccgccataaatattttagcaggtaaaaatctagtaggagcattttataatcctaaaggagtgataatagatactatggttctggattcacttcccgcaagagaatttaaggctggattagctgaggttataaaatatgccttgattaaaaatagatatcttttttctttattacgagaaaattcaaaagaaattcgatctatgggaaataagcttattgaggaaataatttttgaatcaatcaaaaccaaagcaaagattgtttcaatggatgaaaaagaaaatggaatacgcgcaactttaaattttggtcatacctttggacatgctattgaagcagatggaaaatata

SEQ ID NO: 286856 - DNA, 781 bp, Unknown
  Bacterial polypeptide expressing nucleotide sequence isolated from the Sargasso Sea
tatgaatacaaataaaatatcgattaaaacaagcactaagagttaccaaattgtaattggaagagatttaataagtaaaattgataaaattttaaaagctaatcacttaaaatttgataaatgtttaatagttacagacaaaaatattcctcaaaaatttaaaagaattttatacaaaaaattaaaaataaataaacttattaaaatagaaataacggcatcagaaaaaaacaaaaattaccgaacaattgaaaaaattcatacaattttatttgaaaataggtttaatagggaagactgtattatttcttttggtggaggaattattggagatatagttggtttcgcatctagtacatttaaaagaggcatgaaatacgtaaatattccctcaactttactatcacaagtagactcatccataggaggcaaaacaggcgtaaataataaatttggaaaaaatttgattggaagtttttatcaacctgatttagttgtttctgacatgaatattttagcttctttaccagaaagagaaattatttgtggatatgctgaaatattaaaaagtagtattatagataattttaataattttctctatttagacaaaaatttaaaaaaaattttaaaattaaaatcacctttcattgaaggatccataattaaaagctgtaatttaaaaaaaagagttgtagaaaaagatgagaacgaaaagaactacagaaaggtattaaatttaggtcatacctttgctcattcatatgagtctactttaggc

SEQ ID NO: 286857 - DNA, 797 bp, Unknown
  Bacterial polypeptide expressing nucleotide sequence isolated from the Sargasso Sea
tatgaaaaatcaagaaataaaatttaataattcaaattataaatactctattataattggaaaaggtatactaggtatactctcaaagaagataaaaaaactttgtcctaaggtaaaaaaaatagcaattataattgataaaaaagtacctaataaatttaaaattattttaaaaaaaaatcttaaaaattataatgttacttttttaatttttaactcaagtgaaaagtcaaaatctttttactctgtaaattatttcataaataagttgcttcaaataaatcttaatagaaacgacttaatcatttcagttggtgggggtatcactggagatgtagttggatttgttgctagtatatataaaagaggcattgattttataaatataccgacgactttacttgcacaagtagactctgcaataggtggaaaaactggagtaaattcaaagcaaggaaaaaatctaattggttctttctatcagccaaagttagttttaagtgatactaactttattaacacattatctaataaagaaatgatatgcggatatgctgaaattcttaagcacgctattattaaagataagaattttttcaaatggcttcaaaaaaactcaccaaaaatttttttaaagcatcctaaggtattaacttatgcaattaaaaaaagttgtatcattaaagtttatttcgtaacaaaagatgtcaatgaaaaaggtttaagaatgaaactaaatttcggacatacttttgcacatgctattgaaacaaaaaataattactctaaaaattttt

SEQ ID NO: 286858 - DNA, 1012 bp, Unknown
  Bacterial polypeptide expressing nucleotide sequence isolated from the Sargasso Sea
atgagaacattaaatgtaaatttagaagacaggagttatccaatatacattggcagcgatgtcagtctggataataagctctactcaaagcatataaaaacaaaaaaaattgctttgattacaaatgaacaaattgcagatttatacctctcagaaatcacccaaacgttaaacgcatttgatctaaaaacactcatccttccagaaggagaggccgaaaagaacttagagactattggaaaagcggttgaattcctatctgacaatggaatcgatagggattcatcaatcattgctttcggcggaggcgtgattggtgacatcacaggctttgtggcctcatcttatatgagaggcataaagttccttcaggtcccaactacactgttggcccaggttgactcctccgtagggggaaagacaggtgtgaatataagtaccggaaaaaatctgattggtgctttctatcaaccgagtgctgtgattgcagacataagatatttaaatacccttgaacccaatcgtttctcagaaggtttagcagaggttataaaatacggactgattcgtgatgaggatttcttcgcatggttaggcaacaacaccgacagaatattggctttggagcctgaagtcatggctcatctcatcgagaggtgttgccaaattaaagctgaaatagtctctgaagatgagagagaaggatcagtaagagcaatattaaattatggccatacttttggtcatgcgattgagagccttaccgattacagcgtctatactcatggggaagcagtttcaatcggcatggttatggcagcaagcatggctgaaagaatgggaatgctgtctcaagaagataagaaggacataaccagccttcttgaatctgtaagtttaccaaccaggaagcctgacctgaatagcaatgattttctcgaaagcatgaagcgtgataaaaaagtccaagatggtggaataaggttgatattattagagagcattgggaaag

SEQ ID NO: 286859 - DNA, 937 bp, Unknown
  Bacterial polypeptide expressing nucleotide sequence isolated from the Sargasso Sea
gttggctgaagctttttttggggggcttgatgttaccttttttgaaattgaagatggagagcagtataaaagcttccaaacatatcgggcggttatcgattttctcgtatccaaagagtttgatagaacgctgaacctggtcgcacttgggggaggagttgttggtgatctttgcggtttcgtatcagctacctatcttaggggtgttaacttcatccagataccgaccacgcttttggctcaggtggactcttcagtaggcggaaaaacaggtattaatcaccctgcgggtaagaatctaataggcgctttttatcaaccttcagcggtattaatagatcctgatgtgttgctgagtttgcctaaaagagagtacgttgctggtctcgcggaagtcatcaagtatggtttaatttacgatcaggattttttctcctggatagaatctaatgcctcaaacctagcgtcaagagaaatccctgccgtcgcaacggctataactaggtcttgtgagatcaaggcagaaatcgtctcgctggacgagcgtgaattgggaattcgagcaatacttaatttcggccacactgtagggcacgcgattgagaccgttagtggttacggtacgtggcttcatggagaggcggtctcaattgggatagagatggcgtgttctttatctcacaagatggggctcattgaacttgatgtgctggagcgaattagacgaacgttgattgacctgggattgccgatcgcggcttccaacttatccgactctgatgtggatcgactagtagatacgattcgcctagataaaaaagttaaagacggtcttttgacttttattctaattctagagatcggaaaagttaaaatagagactggcgtttcagaaaaaagtgtcagagaggttttaattcaggctttgtcgaattag

SEQ ID NO: 286860 - DNA, 1018 bp, Unknown
  Bacterial polypeptide expressing nucleotide sequence isolated from the Sargasso Sea
tggcattggtaaagaactaactcaagttgggattaacaaagatagaaaaatacttattgtttctaataaagaaatatcaaaattatttggagagaaaattcttaataatttaaaaaagtataattttaatgctgaaatattaaatattaaagcgggagaatctaataaaaatttagcaagtttaagtgagatatttaatgctgcttttgagtttggtttagataggaattccctaatgattgcacttgggggagggatagttggcgatgtcactggttttgcagccgctacatggttaagaggtattgaatatattcaaatccctaccacattattatctatggttgattcatcggtaggtgggaaaacagccgttaatcatcctaaagggaaaaatctaataggagctttttatcagccaaaagcagtttttattgaccctgaaaccctaacaacgttaccaacgagggaattcaaagcaggcatggcggaagtaatcaaatatggagtcataaaagacaaatctctttttgaatacttagaaaataaaaataatagagataaaattctcaatctcgaaaacgaatcattaataaaaataatcaataaatcaattaaaactaaggcttgtatagtttctgaagacgagaaagaaaatggtattcgagcaatattaaattatgggcattccttcggccacgtaatagaaaatttgtgtggatatggagagtatctacatggcgaagcaatatcaataggaatgaagattgcaggagacattgcaactgaaaaaaatttgtggccaaaagaacattcttcaaggcaagatcatcttattgaaagctatggtctaccgacacaaacacctaaaattaaaaagaatgaagtaatgaaaatacttatgggtgataaaaaagtacgtaatggaaaaatgagatttatattacctataaagcttggagaagttgatatatttaatgatataaatgagacgcaattcctaaaatatttcgattag

SEQ ID NO: 286861 - DNA, 772 bp, Unknown
  Bacterial polypeptide expressing nucleotide sequence isolated from the Sargasso Sea
gttgcaagtatttacaaaagaggaattaatcttaataagtattccctccacacttttggcacaagttgactcatcaattggaggaaaaacagctgttaattcagtaggtggtaaaaatcttattgggacgttttatcaaccaaaattagttttaagcgatttaacacttttaaaaagtttatcaaagagaaatttagtctgcggttttgcagaaattttaaaacattcaataataaaagatggtaaattttttaacaaattagacaaggacaaaaataagatttttgaaaactttaattttaatgttttgtcagagataatatttaaaagttgtaagattaaattatcttttgtaaataaagatgaaaaagagcaaaatgaaagaatgatactaaattttggacacacttttgctcacggaattgaagcggcaaataaatactctggaaaaattaatcatggggaggctgttttaattggaatgattttagcaactagactctcttttattaaaaaagtttgttctaaacaaacattagataaaatagaaaaactttatttaaatcagaaactacttaaaaagtttttaaactttctaaatataaataatttaaataaaatagttaactttatggaagttgataaaaaaaattatggcaaaaaaattaatctaatacttcttaaaagaataggtaaaacgacaaaaccaggtcaatatagatttagtcctcaagagatgaagaaagttttaaaaaaaattataagattttaa

SEQ ID NO: 286862 - DNA, 1114 bp, Unknown
  Bacterial polypeptide expressing nucleotide sequence isolated from the Sargasso Sea
gatgcgaacccttccggttgaattgtcggggagagaatacaagatcgaaatcggtgtcggaaatctgcgggattcactgctttccgtcatccgtaagtttgatctggaacgggtggtgaccgtgacgaactccactctggaacaattttacccagcccaaatcaacaagcttcttgaaccggaaggttatcagaatgacacctgtatcctgcccgacggtgaggaatacaagaacctggaaacactccaacggatttacgatttcctgatggagaaaaaggccaatcggggcaccgtgatgttagctttcggaggaggagtgatcggggacatggccggtttttctgcggcgaccttcatgcggggaatcaaaatgatccaggtgccgaccacactgttggcccaggtggacagcagtgtcggcggtaaaacggcagtgaatcatcccttggggaaaaacaccatcggtgccttcaagcaaccgaatcatgtcattatcgatcttgagttcctgaaaaccctgccctcccgtgaactccaggcgggctacttcgaattggcaaagcatggcttgacgcatgaccgggaactgctcgattttcttcaagaaggcaaactggaacccttggatttagattttctggaagaagcggttttccggtcctgccgggtgaaggcaagaatcgtggagcaggacgaaaccgaagccggactcagagcgaccctaaattttggtcacaccctcggtcacctgatcgaaacccattgcggttacggaacgtatcttcatggagaagcagtcggaaccggaatgctgtttgcggcgtttctctcaaaacaggaacaacttttggatcagacttcctgggaaaccatccgggagtttctggaacccaaacttcgatccgtaactcttcccaaactggattttgacctcttcagcagcctcctgcttcatgacaaaaaagcaagcagggaagcggtgaatttcatccttcttcgagagattgggagttgtttcatccagaaagaaatgcccctggatttgatttggaaacactttaccgtattctgtaaagagtttcccaatctgtgtcagttgacgactgactga

SEQ ID NO: 286863 - DNA, 1069 bp, Unknown
  Bacterial polypeptide expressing nucleotide sequence isolated from the Sargasso Sea
atgagaacattaaaggtaaatctggaagacaggagctatccaatatacattggcagtgatgtcagtctcaataatgaaatctactcaaagcatataagctcaaataaaattgctttgatcacaaacgaacaaatcgcagatttatacctctcagaaattagccaaacgttaaacgcattcgatctaaaaacacttgtccttccagaaggagagactgaaaagaacttagagactgttggaaaagcagttgaattcctatctgacaacggaattgatagggattcgtcaatcattgcttttggtggaggggtgattggtgacatcacaggctttgtggcttcatcatatatgagaggcataaagttccttcaggtcccaacaacactattggcccaggttgattcttccgtaggtggaaagacaggtgtgaatataaatacaggaaaaaatttgattggttctttctatcaaccgagtgctgtgattgcagacacaagatatttaaatagccttgagcccaatcgtctctcagaaggtttagcggaggttataaaatatggactgattcgtgatgaggatttcttcaaatggctaagtaaaaacaccagcagaatattggcattggagcctgaagtcatgacccatctgatcgagaggtgttgtcaaattaaagctgaaatagtctctgaagatgagagagaaggatcaataagagcaatattaaattatggccatacttttggtcatgcaattgagagccttactgattatagcgtttatactcatggcgaggcagtttcaatcggcatggttatggcagcaagcatggctgaaagaatgggaatgctttctcaagctgataagacagacataaccaatctccttgaatctgtaaatttaccaactaagaagcctgatctaaatagcaatgattttctcgaaagcatgaaacgcgataaaaaagtccaagatggtgaaataaggttgatattattagagagcattgggagagccgtcatcagcaacgattaccccaatgagattttgatggaaaccatatcggaataat

SEQ ID NO: 286864 - DNA, 820 bp, Unknown
  Bacterial polypeptide expressing nucleotide sequence isolated from the Sargasso Sea
tatgacaaaaacaaaaaccataacaattaatttagataggaattcttatgatatccatataggtgaaaatttagctaatgaaatacctaatattatttcaccctttgtgaaaaggaataaaatcttcatagtttgcgatgaaagtcttggatcaataatactaccagaaattaaaaattcatttatcgaggcgggcttcgaagtacttgtatctttagtgaaatccggtgaggaaagtaaaagttttgaaagtttagaaattacaatatcagagcttttagataatggaattgaaagaaacgatacagtaattgctataggtggaggagtaattggcgatttagcaggatttataagttcgataatttatagaggtataaattttatccaagtaccaacaactctattagcacaagttgattcttctgtgggaggtaaaacagcaataaatgtcaaacaaggtaaaaatttaattgggtcattttatcaacctaaagcagtaataactgatgtgagttttttatcatctctttcagaaagagagataaaatgtggattatcagaaattgttaaatatggagtcattggtgatagagattttttttattggttaaaagaaaatgtcgataatctaaccaaactaaatcaggattgtctaatctatgcaattgaaaaatcttgctcaatgaaggcaaatatagttcagaaagatgaaaaagagagaggagatagagccttactaaattttggtcatacatttggacatgctcttgaaaacactttacaaaaaatgaggtacttctgcatggagaagctgtag

SEQ ID NO: 286865 - DNA, 1081 bp, Unknown
  Bacterial polypeptide expressing nucleotide sequence isolated from the Sargasso Sea
atgacaaaacaaattcaggttgatttaggtgaacgtagttatcccatttatattggccagagtttgatgagtgatggcgagaccctgtctcgctacctgctgaaaaaacgtatccttatcgtcaccaatgaaactgtcgcgcccttgtatcttaagcagatccaagacacgatggcttcgtttggtgaggtaaccagtgtcatccttcccgatggcgagcaattcaaagatttaacgcatttagattccatttttacggctttgctgcaacgcaattatggccgtgattctgtgctggtggccctcggtggcggggtgattggtgacatgacgggttttgccgctgcctgttaccaacgtggtgtcgattttattcaaattccgaccacgctactatcgcaagttgattcttccgttggcggaaaaaccgcagttaatcatccgcttggcaaaaatatgatcggggctttttatcagccacagatcgtcattatcgatactgaatgcttgcagaccttgcccgcgcgtgaatttgccgctgggatggcagaagtcattaagtatggcatcatgtgggatgctgaattttttcaatggcttgagaacaatgttcaagcattgaaaagcttagatactcaagctttggtctatgcgatttctcgctgctgtgagattaaagccgatgtcgtgagccaggatgagaccgaacagggcgtccgcgcgctattaaaccttgggcacacctttggtcatgcgatcgaagccgagatgggttatggtaattggctgcatggtgaagcggttgcggctggcacagtccttgctgcacaaacggctaagtccatgggattgattgatgagtcaattgttcgtcgtattgtgcaattgttccatgctttcgatctgccagtaacagcgccggaatctatggatttcgacagttttattaaacacatgcgtcgcgataagaaagtgttaggtggtcagatccggctggtacttccaacggccattggtcgagctgatgtctttagccaagtcccggaatcgaccctagaacaggttatctgctgcgcataaa

SEQ ID NO: 286866 - DNA, 1114 bp, Unknown
  Bacterial polypeptide expressing nucleotide sequence isolated from the Sargasso Sea
atgactgaaacaaaaaaaataaaaatcaacttagatgaagagtcatatgatattcatattggcgtaaatttatcagatgaaataccaaatatcgtttctgaactaacatcaagaaataaaattttcttaatatgtgatgaaagtttaggctcactaatactgcctcaggtcaaaaattcattatcaaaggctggatttgaaatatttgtttgttttgttaaatcaggtgaaaatagtaaaagttttgaaattcttgaaaaaacaatagcagaactcttaaataatggtattgagagaagcgatacactgattgcgcttgggggaggagtaattggtgatttagctggatttataagttcaataatatatagaggcataaattttattcaaataccaacaaccttacttgctcaagttgattcttctgttggaggaaaaacagcaataaatgttgaacaaggtaaaaacttagtcggtagtttttttcaacctaaagcagtaataactgatgtaaattatttatcgtctctctcagatagagagataaaatgtggaatatctgaaattattaaatatggaataattggtgatagaagttttttttattggctaaaagaaaatatttctaaactaaaaaaactagataatgaatgcctaattcatgcaattgagaaatcctgccaaatgaaggcagatattgttcaaaaagatgaaaaagaaaaaggagaaagagctttgctaaatcttggccatacatttgggcatgcgcttgaaaaacacttcactaaagatggagttctcttacatggagaggctgttgctattggtatgacttatgctgcaaaattttcatttaatattggcgctcttgaacaagatgaatgcgatatgattattgatcttatatctgatagtggtttaccaacatctataaatgacataaaaggtgaaatcacaaaacaggagatcttaaatttaatgatgtacgataaaaaaagagtaaatcaaaagaacactctaatattaataaaaaaaattggggaatcctttattaataaggatataactgatgaagaaataatagatttctttgataaggagagcattcaataat

SEQ ID NO: 286867 - DNA, 1108 bp, Unknown
  Bacterial polypeptide expressing nucleotide sequence isolated from the Sargasso Sea
atgaaaccaattaaattgataattaagactaattctgaaaaatatccgatatttattggaaaaaatcttattacaaaaatatcaagtttgatggtcaataattccattaaatcaaaaaaatgtttattggtagttgacagaaaagttcctaaaaaatttatttctgaaattaaaaaaaaactacggaataaaaaaatatttttattcaattttaatgccaacgaaaaaaataagaaccaaactactataaattcaattttagaaattttattgaataaaaatttttctagagaggatagtttattagcaatagggggaggtataactggagacgttggtggttttgctgcaagtttatttaaaagaggattatattttataaatattcccacaacccttttggctcaggtagattcatctattggtggcaaaacaggagtaaattctaagtatggaaaaaatctcattggtagcttctatcaaccaaaattggtcataagtgacatagatactttaaaaacacttaatagaagagaaattgtttgtgggtatggtgaaattctaaaacactctataatctctagaaaaaaattctttaaatatttagatcagaattttgatgacattattaaacttaaatctccttatatagaaaaggcgatatttgagagttgtaaaattaaaaaagatgtagttgaaaaagatgaaaaagaaagcaacttaagaaaaaaattaaattttggtcacacttttggtcactcatttgaagcttcattaggatattctaaaagattaaatcatggtgaagctgtcattttaggaatgatgatggctgtaaaatttagcaataagaataaattcctaaacattaatgattataaattgatttctgatcattacaaaaattcaaaattaccctcagatattaaaaaatattttaaaagtaaagatcttgataaaattattaaatttatgaaaactgataaaaaaaataattctgataaaataaagttggtattattaaagaaaatgggccaaacaattttaaatcaagaatactcagtaaaaaatttaaatggattcttaaaaaatgaattaattgattaaa

SEQ ID NO: 286868 - DNA, 1102 bp, Unknown
  Bacterial polypeptide expressing nucleotide sequence isolated from the Sargasso Sea
atgagaacaattgaagtaaatcttgataaagatccatataaagttctatattctgatattcaacaaggaattcaaactatccaggctgagagtattaaagggaggaaaattgcggttatttctgataatgacgcagcaaataataacctagacgcgctcaaaaaggctttatcacgctatgacattaaactaatcgaaattattttgtcccccggtgaaaaaaataaagaattaatgattgcagaaagtattattgataaacttttatcaaaaaagtttgaacgcggtgatcttatcattggacttggaggaggagtaattggggatttgtctggtttcgttgcaagtataatccatcgaggagttaaatttattaacatacctacgactttattagcacaggtagattcatcaatcggagggaaaacaggcgttaatagtaaatatgggaaaaatcttattggttgcttcaagcaaccggaattagttgtttgtgatataaattcactctccacacttccaaaaagagatctacttgcaggttatgctgagctaataaagcatgcgctcattggagatgctgaattatttagctatctccaaaataatgtcaaaaatatatttaatgaccataccattttgcaggaagccatacacagaagtgcacttgtaaaagcagatatagtaatggaagatactcatgaaaaaaatataagggcccaattaaacttaggccacacctatggtcatgctattgagtcattctacaaatatgatgggcgtttacttcatggagaagccatatcgattggaattattatggctttcaaaacatcccttaggcttggtttatgtcaggcagatcatcttcatattgttgaagatcatttcaataaaattggtttgctgactcatttgaaaagtttaaatggaaaaaaaatattacctgaaaaaattattgatctaatgcgaaatgataaaaaagtcacgaatgggacaataaatttagtactcccaagagaaatagggcgtgttgaaatccgaaatgatgttaatgaaaatgtcattcaggatgtacttcacgaaacactccatctttaaa

SEQ ID NO: 286869 - DNA, 1108 bp, Unknown
  Bacterial polypeptide expressing nucleotide sequence isolated from the Sargasso Sea
tatgaaaaataataaaattataatcagtacagtgaattctaaatatgagattttaattggatcaaatctaataaataaacttgataaaattttaaaatctaaattacctaagtctgaaaaatatttaattatatttgatagcaaagtcccatttaagatgatcaaaaaattaaaacaaaaaatcaaaaaaaaagtgattttgtataaattttcctcaagtgaaaaaaataaagaccagcataatgtaaataaattactaactgtaatgcaaaaatataactttaatagaaatgattctttaattgcagttggaggcggagttgttggtgatgtttctggatttgctgcaagtatttttaaaagagggctaaaatttattaacataccaacgactttattagcgcaagttgatagtagtataggtggaaaaactggtattaacacaagctttggtaaaaatttaataggatctttttatcaaccaaatctagttatagccgacattgacttcttaaaatctcttccaaaaagagaaatcatttgtggatatgcagaaatttttaaacactctattatttctgacaaaaagttctttaattttttacttaagaattttgataaaataatcaaacttaaacaaccatttattaataaagctatttataaaagttgtttgattaaaaaaagaatagttgaaaaagacgaaaaggaaaaaaacttgagaaaaactcttaaccttggacatacttttgcacattcttacgaagctgcatacaaatactcaaaaaagctaaatcatggcgaggcggttttgcttggaattaatagtgcctctgaatttagtttaaaggagaaatttttaaatctaagagagcatgatttaataataaagcatatttacgctattgataaatcactcaatttaaaaaattattttagtcgtaaagatgtaagtaaacttttagagtttatgaagaatgataaaaaaaataatagtaataaaataaacttaattttaattaaaaaaattggaaatgtaacatataataatttttttgatttaaataagatctctaaatttttgagacttcaattttataatatatga

SEQ ID NO: 286870 - DNA, 1063 bp, Unknown
  Bacterial polypeptide expressing nucleotide sequence isolated from the Sargasso Sea
atgattaaaaaagttttagttggtgaaaaaaaatataaggttcttattggtaagaataagatctttaaagattatctaccgagtgcagtttcaaagaataataaaatatttattattaccgataagaatatccctactgcatacattgaactcataaaaaaatcgattccttctaataaagaaattgacttgtttaaaattaagcctggagaggaatcaaaatcatttactaacttccaaatgattctcaataagcttgctaaaaagaaatatgatcgatcggattgtatagttgccattggaggtggcgttgttggagacttgagtggttttgttgctgcaagcttcatgagaggcatagattatattcaaataccaacttcacttcttgctcaagttgattcatcagtaggaggaaaaactgcaattaacattgagtctggaaaaaatcttgtcggagcctttaagaatccaaagttggtgttgatatcttcagccttattaagaacacttccggagagagaattcaaatctggagtagcagaaataattaagtatgggctaatttataataagaaaatattcaatatttttgataagcagcataagcaaattctaaaaagaaaccaaagagtaattgaagagcttattcacgagtcagttaaaacaaaagcaaaaattgtcactgaagatgagagagagttaggcataagagctatattgaactttgggcacacctacggtcacgcgatagaagcaataaataattacaaaaatgttttacatggtgaagccgtagctatgggtatgagaatggcttctaaaatgtccatgttagagggtcacttaaatgaaaaggcttataaaaaaataattaatgtttttgatgctcttaactttcctaaaaatacatcaaataattattcagacctaaagaagtttattttgagtgacaagaaggtcaaaggtgggaatattaatttaatacttttaaaaggaattggccagtcattccaaactcaaaaatttaattttgagaatttcaaaaaatctttttcttagg

SEQ ID NO: 286871 - DNA, 1105 bp, Unknown
  Bacterial polypeptide expressing nucleotide sequence isolated from the Sargasso Sea
atgaatacaaataaaatttcaattaaaacaagcactaagaactacccaattataattggaagagatttaataggtaaaattgataaaattttaaaagctaatcatttaaaatttgataaatgtttaattgttacagacaaaaatattcctcaaaagtttaaaagaattttatacaaaaagttaaaaataaataaactttttaaaatagaattaacagcatcagaaaaaaacaaaaattaccgaacaattgaaaaaattcatacagttttatttgaaaataggtttaatagagaagactgtgttgtttcttttggtggaggtattattggagatatagttggtttcgcatctagtacatttaaaagaggcatgaaattcataaatattcccacaactttactatctcaagtagactcatccataggaggcaaaacaggtgtaaataataaatttggaaaaaatttgattggaagtttttatcagcctgatttagttgtttctgacatgaatattttagcatctttaccagaaagagaaattatttgtggatatgctgaaatattaaaaagtagtattatagataatttaaataattttctctatttagataaaaatttaaataaaattttaaaattaaaatcaccttttattgaaagagcaataattaaaagctgtaatttaaaaaaaagagttgtggaaaaagatgagaacgagaagaactatagaaaagtattaaatttaggtcatacctttgctcattcttatgagtctgctttgggcttttctaaaaaattaaatcatggagaagctgtaattttaggtattaaaaatgcggtagaatttagttttaaaagaagatttttatcaaaacaaaaatttaatattattataaatcatattaataaaattgagatgaaaccaaaaattgaaaaattgtttaaaaaaaaacatgtatctaaaattatgaattatatgaggagcgataagaaaaataattcaaacaacattaacctaattttaataaaagattttggaaagataatagttgactttcagatcagtccttcaaatttaaaaaaatatatttctaacagtttaaattaat

SEQ ID NO: 286872 - DNA, 1066 bp, Unknown
  Bacterial polypeptide expressing nucleotide sequence isolated from the Sargasso Sea
atggcagaaataccagctggcaaaggtaagtcaaaatataaaatacatataactggtaaaagcctacctaaatctgagattaatagacaaatcggtttaaataataaagttttgatagttactgatagcggcattcctaaaacatatattaaagaattaagaaaagttattaaaaataaaagtgtaaatgtaataaccttgagtcagggtgaaaaatcaaaatccttttcttcatatcaaaaaatattaaacaaactattaaatttaaaatttgatcgttctgacaaattaatagctttaggcggaggagttgtaggtgatattactggattttgtgcagctacatatctcagaggtattgaatatattcaaatacctacttctttattagcacaagttgattcttcggttggtggtaaaacagcaattaatgctaaacaaggtaagaatttaattggttcattttataatccaaaatttgttctaatatctacccattttttaaaaacattgcctgaaaatgaatataaatcaggcctaggcgaagtaattaagtatggttttataggtaataaaaaacttaaaaagattatcgaaactaatgcaaaaaaaataattataagagatgaaaaaatattaaaacttatcatagaagaatcaattaaaacaaaatcaaatattgtcaccaaagatgaaaaagaaacggggattagagcaatattaaattttggccatacctttggtcatgctattgaggcctacaatggattcaaaaatattacacatggtgctgccataaccctaggaatggttattgcttcaaaaatttcttactttgaaggtcatatcaaagactaccaattagataatgtaattaatactataagctcattaggcttaaatacagatcataaaaaatataaatattcacatcttaaaaaatatattacatctgataaaaaagttgctgatggcaaaataaatttagttttgattgataaaaaatttaacgcatttaaaacgtctaaatttaatcataaaaatattattaaagctttaagttagg

SEQ ID NO: 286873 - DNA, 679 bp, Unknown
  Bacterial polypeptide expressing nucleotide sequence isolated from the Sargasso Sea
aatggttgattcatctgtgggaggaaaaacaggagtaaatcatccaaaaggtaaaaatttaattggagctttcaatcaacctaaagcagtttttattgatccagaaactttaaaaagtttgcccaaaagagaatttagtgcaggcatggccgaagtaataaaatacggagtaataagagataaagaacttttcgaatacttagaaattgaaaagaacaagaatgagcttataaatctcaagaatgaatatctaattaaaataattgatagttcaataaaaacaaagtcttatattgtttcgcgagacgaacatgaaaacggtattagagcaatattgaattatggtcattcttttggtcacgttattgaaaatttatgtggatacggcaaatttctacatggtgaggcaatatcaattggtatgaatattgcggggaaaatagcaattgagaaaggtttatggtctaaagaagaattagaaagacagcaaattctattagagagttacgatcttcctactgagatccctaaaataaataaagaagaggttctaacaatacttatgggcgacaagaaagttcgtgatggcaaaatgagatttatattaccgaaagaaattggtgcagttgatatatacgatgacgtagaagattcattatttttaaagtttttttcttaa

SEQ ID NO: 286874 - DNA, 1108 bp, Unknown
  Bacterial polypeptide expressing nucleotide sequence isolated from the Sargasso Sea
tatgaaaaaaattagattacttgtcaaaacaaagtctaaaaaatatcctattattattgggtctaatattattaatcaaattaattatttattaaatttgaacaatattaattttgaaaaaagcttaatagtttttgataaaaatgtaccaaaaaaaaaactaaatataattaagcaaaaattaaaaacaaaaaaaaatataattcatatttttaatgcaaatgaaaagaataaaaatttcaaaagtataaatttaattttaaataagttgtttaagtttaactttaatagaaatgattgcataatatctttaggtggtggcataacgggagatgtatctggatttgctgccagtatttataaaagaggtattaaatttgttaatattcctacaacacttttagctcaaatagactcttcaattggggggaaaactggagtaaataataaatatggaaaaaatttaattggctcgtttatgcagccagatattgttctttctgacattagttttttaaaatctttacctaaaagagaattagtatgtggttatggagaaattgttaaacattcaataattagtaacaaaaatatatttaattatttagataaaaatattaataatattttaaaattaaaatctccatttattgaaaaaacaattgccgatagttgcagagttaaaaaaaatattgttgaaaaagatgaaaaagaaaaaaacttaagaaaaattttgaatttaggtcatacgtttgctcatgcatatgaagcaactagcaattattcaaaaaaattaaatcatggagaggctgtaattttaggtatcataagttctgcaaaatttagttatataaatagattactcaaaaaaaaagattatgaaaaaatatttaatcatataaaaaaattaaattttcctttaaatttaaataattatttaaaaaaaaaggatgtcaatttaattataaaatatatgaagtcagacaaaaaaaatagctcttcaaaaataaacttaattctaataaaaaaaattggtaaaattatcttagatttaaggttcgacaagtttataataaaaaaatatttatataatgagttaagtaattga

SEQ ID NO: 286875 - DNA, 1072 bp, Unknown
  Bacterial polypeptide expressing nucleotide sequence isolated from the Sargasso Sea
catgcttaaattaactgttaatttggacgagcgaagttatcctatttatattgggcaatctgcacttcaagataatggccgtctaattcatcatattggtgattgtcggcctatcatcattactaatgacacaattgaacctttatatctacaaggcttacttgattcattagctgaattaaatcctctttcctttatcatacctgatggtgagcaatacaagtcactagagtggtttgaaaaaatatccgcttttttactgcaaaataattgtggtcgcgatacttgtttgattgcattaggtggtggcgtagttggtgatttaactggttttgtagctgcatgttatcaacgtggcgtgccgtttattcaaatacctacaacacttttatcgcaagtggattcatctgttggtggaaaaacagcggtgaaccatccgttaggaaaaaacatgattggggctttttatcagccacaagctgtttttattgatactcagtctcttcatacactcccaaaaagagagtttgcggcaggaatggctgaagttatcaagtatggtttaatatacgataccgagctttttacttatttagagcaaaatgttgaaaacttacagcagctaaatgaaacatgcctgcagcatatcatttacaggtgctgtgaaattaaagcgttaatagttgctgaggatgaaaaagagcaaggtctcagagcattgctaaacttggggcataccttcggtcacgcaattgaagcccaaatgggttatggtaagtggcttcatggtgaagctgttgctacgggtatggtgttagcttctcagttggctcacactcgaggtgacttaacgcagcaggatgtagcgcgtattgtggatgttattaaacaatataacttaccaactgaagtacctgcagatatgacgagtgaacaatttttattgcacatgcgcaaagataaaaaaaataaaaaaggaactatccgttttattttacccactcaatttggtcaatgtgcattggtagacgatgtatctgacgatcaagtccgagcattaatcgagcactaa

SEQ ID NO: 286876 - DNA, 1108 bp, Unknown
  Bacterial polypeptide expressing nucleotide sequence isolated from the Sargasso Sea
tatgaaaaatagaaaaattattataaacacaaatgaaaataaatatcctattttaataggaaaaaatttatcatttaaattaggaagcatactttccaaaaattcaattaaaccatccaaaattttatttattattgacaataaagtgccaaaaaaaataattagtaaaattacaaaatctatcaaaaaaaaatatcaaatattatattttaattctaatgagaagaataagtgtcagaaaagtattaataaaataattgatatactgcttaaaaacaattttaatagaaatgattgtttaatatccattggtggaggtattactggagatacagctggatatgcagctagtatttttaaaagaggaatggtttatattaatattccttcaactcttcttgctcaagtagatgcatcgattgggggtaaaactggtattaatactaaatatggaaaaaatttgattggttctttttatcaaccagcactagttatatcagatacaaatttcttaaaatctttaccaaaaagagaaattttatgtggttatggtgaaatttttaaacactcaataatatttgatagaaaattttttctttttttagacaaaaatttagacaaaattctaaaactacaaacaccatatattgaaaattcaatattaaaaagttgtattataaaaaagaaaattgtcgagaaagattttaaagaaaaaaatttgagaaaaacacttaatttaggtcatacctttggtcacgcatatgaagcttgcttgggatattcaagaaaattgaatcatggggaggcagttatacttggtattgctagtgcgacagcctttagctatttaaatagattattaaatttttcaaattataaattaattttaaatcatatttcgaaaataagtaaaaatcttgagataaaaaaatattttaatataaaaagtaaaaataaaatacttaaatatatggtaaacgataaaaaaaattttgataaaaatatcaatcttgttttaatcaacaacataggaaaggttaatttcaagaataagtatgctttatctaaaattaacaaattcctcagtcatcaactaaagtcaatctga

SEQ ID NO: 286877 - DNA, 1078 bp, Unknown
  Bacterial polypeptide expressing nucleotide sequence isolated from the Sargasso Sea
atgaaaagaataccacttaaattaaataccaaaaaaatacctatatacatcggaaataacttattacgtgatggtgtagttaatgattatatcaagcataaagatgttgtaataattacaaataccaaagttgctaaactacatctaagtcatgttaagaagtctataaagaattgtcgcattcaaactttaatattacccgatggtgagaaatataaaaatattgctacattaaataaaattcacgattatttagttaagaataaatttaaccgagaccttacaattatagctttaggtggaggagttattggagatcttgctggatttgcatctgatacttttcttagaggagtaaatcttatacatataccaacaactttgcttgctcaggttgactcctcaattggtggcaaaactggtgtaaatcataagaatggaaaaaacttaattggaagtttcaagcacccaacagtaatctttatagatataatttttttaaaaacattatcaaacaagcaatttatttcagggttagcagaggttattaaatatggagctattggcaatgcatcttttctaaaatggctgaataagaaatctgtaagtattctagagaggaaacctgaagatctaattaaattaattaccgtatctgttaaagctaaagtaatgatcgtccaaaaagatgaagaagaatcgaacttgcgggctcatttaaactttggtcatactctaggtcatgcaattgaatcagccatgaaatataaagggattctacatggggaagcgataagtattggaatggtcttcgccgcggcaatatctgtagagcaaaactctctagaaatagctgaatataatcttttagaaaatacattgacgaatatgggtctacctaccagtataccaacaaaccttaaaaaccaaatgattatgaaacatatggcttttgataaaaagaaaaagaatggaaaaaatcattttgttcttttggattcaatcggtaagagctgtatatctaataaactaaccaatacttatatatctacattcgttaaaacatttcagagttaaa

SEQ ID NO: 286878 - DNA, 1069 bp, Unknown
  Bacterial polypeptide expressing nucleotide sequence isolated from the Sargasso Sea
atgagaaaattaaatgtaaatttagaagacaggagctatccaatatatattggcagcgatgtcagtctggataatgagctctactcaaagcatataaaaacaaaaaaaattgctttgatcacaaatgaacaaattgcagatttatacctctcagaaatcacccaaacgttaaacgcgtttgatctaaaaacactcatccttccagaaggagagaccgaaaagaatttagagactgttggaaaagcggttgaattcctatctgacaatggaatcgatagggattcttcaatcattgctttcggcggaggcgtgattggtgacatcacaggctttgtggcctcatcttatatgagaggcataaagttccttcaggttccaacttcactgttggcccaggttgactcctccgtagggggaaagacaggcgtgaatataagtaccggaaaaaatctgattggtgctttctatcaaccaagcgctgtgattgcagacataagatatttaaatacccttgaacctaatcgtttctcagaaggtttagcagaggttataaaatatggactgattcgtgatgaggatttcttcgcatggttaagcaacaacacagacagaatattggctttggagcctgaagtcatggctcatctcattgagaggtgttgccaaattaaagctgaaatagtctctgaagatgagagagaaggatcagtaagagcaatattaaattatggccatacttttggtcatgcgattgagagccttaccgattacagcgtctatactcatggggaagcagtttcaatcggcatggttatggcagcaagcatggcagaaagaatgggaatgctgtctcaagaagataagaaagacataaccagcctccttgaatctgtaaatttaccaaccaagaagcctgaccttaacagcaatgattttctcgaaagcatgaagcgtgataaaaaagtccaagatggtgaaataaggttgatattattagagagcattgggaaagccatcatcagcaatgattaccccaatgagattttgatgaaaaccatatcggaataag

SEQ ID NO: 286879 - DNA, 637 bp, Unknown
  Bacterial polypeptide expressing nucleotide sequence isolated from the Sargasso Sea
atggacagcggcggcgcgatgacaaccgtgacggtggagctgacgcgcccctatgacgttgtgattggccagggctcactgcagcagctgggcgagcgcctcaagcagcaagccatccgggtgggcaccaaagttttggtggtgtcgaaccctgtggtggctgagcactacggcgccacggtgatgggatcgctcagtgccgctggctaccaggccgagctgctggtgattgaagccggggaggagcaaaaaacaccggccaccgtggctcagatccacgacaaggcctacgccatgcagctcgagcgcagctcattgatgctggcgctcggcggcggtgtggtgggtgacatgaccggttttgcggcggccacttggttgcgaggtgtcgccgtggtgcaagtgcccaccaccttgctggcgatggtggatgccgccattggcggcaaaaccggcgtgaaccatcccggtggcaagaacttgatcggcgcttttcaccagcccaggttggtgatgattgattcggtcaccctgggcacgctgccgatccgcgaagttcacgccggcatggctgaagtgatcaagtacggcgttattggcgatccggtgctgtttgaggccctcgaagcccacggcc

SEQ ID NO: 286880 - DNA, 639 bp, Unknown
  Bacterial polypeptide expressing nucleotide sequence isolated from the Sargasso Sea
catggtcgcctcacccaccctgcgtcggatcgccgtcgccctggaacgcaacccctatgaggtggtgatcggcgccggtggcctgagccgccttggggacgaactcctgaacgccgcaattcagcccggccgacggatcctggtggtcagcaacccggatgtcgccgccccctatggagagggatgcctgcaaagtctgcggctccagggcttccacgccgacctgctggtgattgatgcgggagaagaccgcaagactccagccacggtggccgccatccatgacgccgcctttgagcagcgcctggagcgcagctcgttgatgctggccttgggtggaggggttgtcggagacatgaccggcttcgcagcagccacctggctgcgagggatccgggtgattcaggtccccaccacccttctggccatggtcgatgccgccatcggcggcaaaacgggggtgaaccaccctggcggcaagaacctgatcggcgcctttcaccagccgagcctggtgctgatcgatcccgaaacgctcaacaccctgccggagcgggagttcagggccggcatggcggaagtgatcaagtacggaattcttggcgatcccgagctgttccagtgcctggaggaggggcc

SEQ ID NO: 286881 - DNA, 1054 bp, Unknown
  Bacterial polypeptide expressing nucleotide sequence isolated from the Sargasso Sea
tgtaattggaagagatttaattgttaaaattgataaaattttaaaagctaaccgtctaaaatttgataaatgtttaatcgttacagataaaaatattcctcacaagtttaaaagaatcttatacaaaaagttaaaaacaaataaacttgttaaaatagaaattgcagcatcagaaaaaaataagaattaccgaacaattgaaaaaattcataaagttttatttgaaaatagatttaatagagaagattgcattatttcttttggtggaggaattattggggatatagttggatttgcatctagtacattcaaaagaggcatgaaatttgtaaatattcccacaactttactggctcaagtggattcatccataggaggcaaaacaggtgtaaacaataaatttggaaaaaatttgattggaagtttttatcaacctgatttagttgtttctgacatgaatattttagcttctttgccgaaaagagaaattatttgtggatatgctgaaatattaaaaagtagtattatagataatttaaataattttctctatttagacaaaaatttaaaaaaaattttaaaattaaaatcacctttccttgaaagatccataattaaaagctgtaatttaaaaaaaagagttgtagaaaaggatgagaaagagaagaactacagaaaggtattaaatttaggtcatacctttgctcatgcttatgagtctactttaggtttttctaaaaaattaaatcatggagaagctgtaattttaggcattaaaaatgcagttgaattcagttttaaaagaaaaattttaactaaaccaaaatttaatattattttaaatcatattaatagaatagggatgaaaccaaaaattgaaaaattatttaaaaaaagacatatatctaaaattatgaattatatgagaagtgataagaaaaataattcaaataatattaacttaattttagtgaaagattttggaaaaataataattgactttcagattaaccctacaaatttaaaaaaatatttatctaatagtttaaattaa

SEQ ID NO: 286882 - DNA, 872 bp, Unknown
  Bacterial polypeptide expressing nucleotide sequence isolated from the Sargasso Sea
aatgaaaaaaatcactgttgatctaaaatcaagatcttatccaatttatatagaaccaggccttgtaaaaaagattcactcatatctatctgaatataacaaaggtcaaaaatgggtaattatttctcaacaaaacattatggaaattattggctatgacattgaaaaatacttgattgagaaaggatttgactgcatccattttactttaccaattggagaagctgcaaaaagtatgaacgagtataatcgagtaattagacaaatgatagaaaatgaatgcgatagaaaaacctttattgtttctctcggtggtggtgctgtaggcgatgtcgctggattcatagcttcgacctacatgcggggaatagcttacattcaaataccaaccaccttactatctatggttgactcctccatcggtggtaaaacaggagttaatacttctgaagggaaaaatttaattggatccatctaccaacctagagcggtttttattgatcaagagatactaaaaacacttccaaaacaagaaattatctctggtctaggcgaaataattaaatatggtgcgatagcaaatcaaaatttctttgataaagtatcagaatggttagatgacatacaaaattttccatataataaggctatagaaatttgctgtaaaataaaagcagatattgtttccaaagatgagcacgattttggagtgagaaaaatattaaactttggacatacaattggacatgcacttgaatcactttatggtttcaaaaatataaggcatggtgaagctgtggcattaggaatgatctgctccggatatatttctaacaagctaaataaactagataagaatcaatattttctgt

SEQ ID NO: 286883 - DNA, 502 bp, Unknown
  Bacterial polypeptide expressing nucleotide sequence isolated from the Sargasso Sea
aatggctaataaggttaaagtcgatttaggaaacaatagttacaatatcactatgattgaagattttaaagattctgttaaaaggtttgcgagctcaactgaatctcaatgcatgttaattacacaagagaatatttttgatctttataaaaatcaatttaatgatctatcaaatatttcaaatgtaaatatttttttgattgatgaaggcgaaaaagcaaaatcattcgattcaaccatatctattgttaatgaaatggctgataagcgttttgatagatcttctttagttttagcaattggaggaggtgttgttggtgatatagcaggctttgctgcatcaatttatatgagaggtgttaagtatattcaatatccaacaactttactggcaatggtagactcttcaatcggaggaaagacaggaattaatttagaagatggtaaaaatttagttggaagaatatatcagccgatagcagtagaaattgatactaatttt

SEQ ID NO: 286884 - DNA, 946 bp, Unknown
  Bacterial polypeptide expressing nucleotide sequence isolated from the Sargasso Sea
aatgattaaatctataataagtagatttaacaaggataaaatagaaaagaaaaaaattgtttttaatgaaaaaagtaaaaatttaaaaactgtttcatctattgtaaaagttcttgaaaaaaataattttagcagaaatgatagtttaatttctgttgggggaggtatttgtggagatgtatgtgggtttgcatcaagtatttttaaaagaggtttgaattttattaatgtacccacaactttactgagtcaggttgactcagcgattggcggaaaaacagggattaattctttgtctggaaaaaatatgatcgggtctttttatcaaccctcattagttatttcagacatagattttttaaagagtttacctaaaagagaaatgatatgtggatatgctgaaattctaaaacattctcttataaaagataaaatatttttcaaatttttaaaaaaaaatttcattaagatcttgagccatgatcgcaaatttttagaaaaaacaatttataaaagttgtttaatcaaaaaggaaatagttgagaaagatgagaaggaaaaaaatattagaaaagttcttaatttaggtcatacttttgcccacgcctatgaggcaacaattggttataacaaagggctaaatcacggcgaggctgttttattaggaattatgtcagctgttgaatttagtagaaaaaaaaatattttaaaaaagagtgattttgggcaaatcactgagcacttaagaaaattaaattataataatttaaataaatattttaaacttaatgatatatcaaaaattattttttatatgaagcaagataaaaaaaataaagataataaaataaatttgattctccttaaaaatattgggaaacccatactgaataaatcatttagagaaaataatattagattatttttaaaaactttaatttattga

SEQ ID NO: 286885 - DNA, 850 bp, Unknown
  Bacterial polypeptide expressing nucleotide sequence isolated from the Sargasso Sea
tgaagctgcaaaaagtatgaaagagtataatcgggcaattagccaaatgatagaaaatgaatgcgatagaaaaacctttattgtttcgctgggtggtggtgctataggcgatgtcgctggattcatagcttcgacctacatgcggggaatagcttacattcaaataccaaccaccttactatctatggttgactcctccattggcggtaaaacaggagttaatacttctgaaggaaaaaatttaattggatccatctaccaacctaaagcggtttttattgatcaagagatattaaaaacacttccgcgacaagaaattgtctctggtctaggtgaaattattaaatacggcgcaatagcagatcaaaatttatttgataaagtatcagtatggttagatgatatacaaaattttccatttaatcaagctatagaaatttgctgtaaaataaaggcagatattgtatccaaagatgagcacgatcttggagtgagaaaaatattaaattttggacatacaattggacatgcacttgaaacattctatggtttcaaaaatataaagcacggtgaagctgtggcattaggaatgatctgctctggatacatttctcacaaactaaataaactagataaaaatcaatattttcggttaagaaataccataaataagcttccacttccagtattaaaaaagtttaacgagaatcagatatttgattccataaaaaaagataaaaaatatgaaaatggtaaattaaaatttatcatactaaatcaaattggtaatgcagaaataacaaaccaagtagatgaaaaacttctgcttaaatccttatcagagctttag

SEQ ID NO: 286886 - DNA, 631 bp, Unknown
  Bacterial polypeptide expressing nucleotide sequence isolated from the Sargasso Sea
tatgaaaaaaaataaaattttggtaaatacaaataatggttcctacccaatactaattggcatgggccttatcaataatttaaaaaaaattttaaattcttattcaatcaaatcatctaaatatttagtcatttttgataaaaatattccaaaaaaatatattaaaattataaaaagaaatatccaaaaaaaaactatttttgtaaaattttcttcaagtgaaaaaaataaaaatcaaaaaagtgtaaattctattttaaatattttgctaaaaaataattttaatagaaatgactgtgtaatatcgattggtggtggtataattggtgatgtttctgcctttgcttcaagtatttttaaaagaggtataaaatttattaacatacccacaacattgcttgcacaagttgattcttctataggaggaaagacaggaattaatacaaaatttggaaaaaatctaattggatctttttatcaacctaatctagtaatatcagatataaactttttaaattcacttccaaaaagagaaattatttgtgggtatggtgaaatattaaaacattcaattatagcaaacaaaaaattttttgtttttctatcaaaaaatatctttaaaattataaaa

SEQ ID NO: 286887 - DNA, 1117 bp, Unknown
  Bacterial polypeptide expressing nucleotide sequence isolated from the Sargasso Sea
atgaaacaaaaaataataaaggttaaaactaaaagtaaaaattacgaagttcatattggtatcaatctaatttcaaaattaagaaatattataaaaaaaaataaattatcattttcaaaatgtttaatagtaattgatagtaagataccaaaaaaatttagaacaatactcttaggaaatttaaaaaatcaaaaaatctatactttaaattttagtgcaaatgagaaaaataaaagtaacttaagtatcgataaaatacataatgttttatttaaaaataatttttatagagaagactgtataatttcatttggtggaggaattacaggagatgtagttggatatgcggccagcacatttaaaagaggaataaaatttattaacataccctccactttattagctcaagtcgactcttctataggtggtaaaacaggtattaataataaatttggaaaaaatcttgtaggaagtttttatcagccagatttagtaatttcagatattaatttactacgtaccctccccaaaagagaaattatatgtggatatgctgaaatattaaaaagtagtttaattgatagcaaaaaaaattttatttttttagataaaaattttaataagattttaaacctcaaaggaaattttataattaatgcaattttaaatagctgtttattaaaaaaaaaaattattgaaaaggatgaaaaagaaaaaaatttaagaaaatctttaaatcttggccatacttttgctcacgcatatgaggctagtcttggttactcaaaaaaattaaatcatggagaagctgttatatttggtttaatgaatgctgtaaattttagtaaagaaaaaaaaattatttcaaattcaaattcagaattaataaataatcatattaaaaagatagaaattaaaaataaatataaagatctttttaataaaaggaaaattacatcaattctaaattttatgaaaagtgataaaaaaaataaatcagatagtataaacttaatattaataaggaattttggaaaattaaacctaaattatcaggccaaatctgttgaattgaacaagtttttattaaaagaattaaacaaagcttatttgtaaa

SEQ ID NO: 286888 - DNA, 1066 bp, Unknown
  Bacterial polypeptide expressing nucleotide sequence isolated from the Sargasso Sea
tatgattgaattatcagcaggaaaggcaaatacaaaatataaaatatatatttcaaagactactctaactaaaaaagtattaagtcgaaatattgataaagataagaaaattttaattattaccgattctggtattcctaaaaaatatattaaagaacttaaaaaacaactaataaataagtcggtatatgtttattcaattgatagcggggaaaaatcaaaatcctttcgaacatatcaacaaatcattaataagttaattgatttagaattttctaggtctgatttaataattgcttttggtggaggtgtggtaggtgatatatccggcttttgtgcctcttcttttttaagaggaattgattacatacagattccaacaacacttcttgcccaagttgactcttctgtaggaggcaaaacagctatcaatgtacctcaaggaaaaaatttagttggagcattttataatccacgtgttgtattaatatctactgtttatcttaaaactctaagcgaaagagaatataaatcaggattgggcgaagttgtaaaatactcattaattggaaataaaaagcttaaaaagttattagaagagcataccgaaaaagttgttaatcgtgatgacaaaattttaataaaaattatcgaggaatcaattaaaacaaaatctaagattgttactgaagatgagaaagagagtggtattagagcaattctaaattttggacatacttttggacatgctattgaagcatttaataaatataaaaatctttcgcatggtgctgcaataactcttggaatgattattgcctctaagatttcatactatgagggtcatataaaaaatcatcaattggataatattataaatatgattgactctcttaatctggatactgattattcaaaatataattactccgatctaattaagtatgtaaaatcagacaaaaaaatttctaaaggcaagttgaatctagttttaattaacaagcaacttaatgcttttaagacctcaaaatttgataaaaaaagtgtactgcgggcatttagttaa

SEQ ID NO: 286889 - DNA, 1006 bp, Unknown
  Bacterial polypeptide expressing nucleotide sequence isolated from the Sargasso Sea
tatgaaaaagtttgcagaaaacaaagaaattctgttggtctgtgacccggaaataggtagatcaaaaattgaaggtgttttagatgaacttaaaagatgcgagccctccaaccttaagaaacttgaaatagcttgcagtgaagaaataaagaatttttcttcagtagaaaaaatccatgacgtacttattaattcatcttttagtagagattgcttattgataggactcggaggaggaatactaactgatattactggttttgccgcttctacataccaaagaggtgttaattttcttctaatccctacaacgttattggcacaagttgatgcttcagttgggggaaaaactgctgtaaatcataaattagctaagaatatgattggcgctttccatcaacccatagaggtaattatttcagtagatttcttagatagccttccagacagagaaataaggtctggtttggttgaaatgattaagcatgggttaattcttgatcaaacatattttaattggcttgaaaaaacatcgaaaaagatccttaatctagataaagagaccctagtagaggcaattgcaaaatcagtagaaataaaagcaaaaattgtttcagaagatgaaaaagaaagaggaaaaagagcgttacttaattttggtcatacttttggacatggaattgaagttttgggcaactacaaaacttacaatcatggagaagcagttgctttaggaatcatttgtgcattaaggctctcagaaagccattatgatttgaataaagatatccttagacgtactaaagagctttatgagtcttatggaatagaagcaaaacccaaaaaagcaataaatccaagtgatctactttcttttatgcaattagataaaaagaaatcaggaaatgaacttgcatttatattgcttcaagatattggaaaggccaataaagttagcggtttatcaaataaagaggtagaaaagtcaattttagaggctttttag

SEQ ID NO: 286890 - DNA, 742 bp, Unknown
  Bacterial polypeptide expressing nucleotide sequence isolated from the Sargasso Sea
gctgcatgttatcagagaggagttaaatttatatcaaatacccacaactttgctagcacaagtagattcatctgtaggaggcaaaacagcagttaatcatacttcaggtaaaaatatgataggagctttctatcagccatctgctgtattttcagatacatctgttttatcaacgctaccagagagagagttttcagcaggtctagccgaagttattaaatatggaattatcaaagatggaaaatttttcgattggctagaggaaaatcttagttcattagtcatgcgagatgaaaagtcattatcatatgtaattgaacgttcctgtattaataaggcagaagtggttgctgaagatgaaaaagagattgggtatagagccatattaaatcttggacatacatttggccacgcgatagaaacagcgctgtcttacaaaaaatggttacatggagaggctgttggttgcggcatgttaatggcagccgatttatcaaggagattaggtatttttgagcaaagtgatcttgatagaataaaatcgttattaattaaggcaaatctaccagtgaaaatacataaggacgtacaattcgaaaaaatatatgaaaatatgaagattgataaaaaaagtaaagagggtattttacatttggttttgttaaaaaatattggcgaagcttttttaacctcagagtattctgatgaattattgaaagaaacaatcgagagttttttgtga

SEQ ID NO: 286891 - DNA, 1069 bp, Unknown
  Bacterial polypeptide expressing nucleotide sequence isolated from the Sargasso Sea
gatgagaacattaaaggtaaatctggaagacaggagctatccgatatacattggcagtgatgtcagtctcgataatgaactctactcaaagcatataagctcaaaaaaaattgctttaatcacaaatgaacaaatcgcagatttatacctctcagaaattagccagacgttaaacgcattcgatctaaaaacacttgtccttccagagggagagactgaaaagaacttagagacagttggaaaagctgttgaattcctatctgacaacagaattgatagggattcctcaatcattgcttttggcggaggggtgattggcgacatcacaggctttgtagcttcatcttatatgagaggcataaagtttcttcaggtcccaacaacactactggcccaggttgattcttccgtaggtggaaagacaggtgtgaatataaatacaggaaaaaatttgattggttctttttatcaaccgagtgctgtgattgcagatataagatatttaaatagtcttgagcccaatcgtctctcagaaggtttagcagaggttataaaatacggactgattcgtgatgaggatttcttcaaatggctaagtaagaataccaatagaatattggcattggagcctgaaatcatgacccatctgatcgagaggtgttgtcaaattaaagctgaaatagtctctgaagatgagagagaaggatcaataagagcaatattaaattatggtcatacttttggccatgcaattgagagccttactgattacagcatctacactcatggagaggcagtttcaattggtatggttatggcagcaagcatggcagaaagaatgggaatgctttcacaggatgataagacagacataactagactccttgaatctgtaaatctaccaaccaagaagcctgacctaaatagcaatgattttctagaaagcatgaaacgcgataaaaaagtcctagacggtgaaataaggttgatattattagagagcattgggagagccatcatcagcaatgattaccccaatgagattttgttggaaaccatattggaataa

SEQ ID NO: 286892 - DNA, 1096 bp, Unknown
  Bacterial polypeptide expressing nucleotide sequence isolated from the Sargasso Sea
atgaagaaaattaatataaatacaaatataggatcatacaaaatatatattggaaataaaattctaaataaagtagattttatacttaaaaaaaataatataatctcaaataaattcttaattataattgatagcaatgttccaaaaaaatataaaaaaatatttaaatcaaaatattttaaaaaaaaatatattatttcaattagatttaatgaaagagaaaaaaattaccactcagtagagaaaattttagaagttttacaaaaaaataattttaatagaaatgattctattatatgtttaggtggcggtattgctggtgacttatgcggattttcagcaagtatatttaaaagaggactaaagtttatcaatatacctacaactttattatcacaggtagactcatcaataggtggcaaaacaggttttaatacaaagtttggaaaaaatttaattggaacattttatcaaccttctattgttgtttctgatacagaaactctaaatagcctcagtaaacgagaaattatctgtggttatgctgaaatattaaagcatgcattaattcaaagtaaaagtttttataacttcttagcaaaaaatggaaaaaatgtattgaaactaaactctaaagaactccagattgctatttacagaagctgtttaattaaaaaaaaagtaattcaacttgacacaatggaaaaaaatattcgaaaaattttaaattttggacatacttttggtcatgcgtatgagtcaacattaaatttttcaacaaaattaaaccacggagaagctgtattattaggtataattagtgcaactaaattaagtaataagttaaaaattttaaataaaaaaaattataaggacataattaatcattttgaaaaattatcactacctaatgatattaaaaaaaaatttaataaaaaaaatatagataaaatacttacttttatgaaaaacgataaaaaaaatattgataaccatattaacttaattttattatccgatataggtaaaactactaattataaaattaataaaaaacatttaaaaaagtttttaaaagatgaactaaataaataaa

SEQ ID NO: 286893 - DNA, 1108 bp, Unknown
  Bacterial polypeptide expressing nucleotide sequence isolated from the Sargasso Sea
atgaaacaatctagattaaatatagtaactaaaaccgaaaaatacccaataattattggatcaaatttaaccttaagtatatcaaaaatttttaaattaaattcaattgattttgataaatgtttgattgttgttgataaaaatgttccaaaaaaattcgtctcaaatattaaaaagtctttaaaaaataaaaatatttatttgtttttttttaatgctagtgaaaaaaataaaaatattaatagcgttaataaaattctagaggttttattaaataaaaacttttcaagaaatgatgttttaatttctttaggaggaggaattacaggcgatgtaagtggttttgcggctagtcttttcaaaagaggcctaaagtttgcaaatattccaactactcttttagctcatgttgattcatcaataggtggaaaaactggagttaattctaagtatggtaaaaatttaataggaagtttttatcaaccatcattggttctctcagatattcaatttcttaaatctttatcaaaaagagagataatttgtggatatggagaaatattgaagcattcattaattaataataaaaatttttttaatttcttaaataaaaatcttaaaaagattttaagtctttcatctccatttgttgaaaaagctatctatgaaagttgtaaaattaaaaaaaagatagttgaaaaagatgaaaaagaaagagcattaagaaaagtattaaattttggtcatacatttggccatgcttatgaggcaggcttagggtacagtcataaactaaatcacggtgaagctgtgatacttggaatgaagacagcacttaattttagtttaagggaaaatatgctaagtaaaaatgaatacaatttaattataaatcatattgataattctgttctaccttcttcaataaaaaaacatttttctatcaaagatttaaataagattttatcttttatgattaaagataaaaaaaataattctaaaaaaatcaatttagttttattaaaaaacattggtaagccaattttcaacaaacaatactcgaaaaaaaaggtaaacttatttttaagaaaatttttaactaattaaa

SEQ ID NO: 286894 - DNA, 938 bp, Unknown
  Bacterial polypeptide expressing nucleotide sequence isolated from the Sargasso Sea
tatgaaaccaaaaaaattaataattaaaactgtttctcaaaaatattcaattcttatcggtcctaatttaatagtaaatatttcaaaaataatgaaaaaaaatttaaataattttgaaaaatgtttatttattgttgacaaaaaagttcctaaaaaatttattttttttataaaaaaatcatttcaaaataaaaatattttttttgaatatcttacaatgaatgaaaaaaataaaaatttacaaacagtaaataaaattcttaaaattttattaataaaaaatttttcaagaaaagattgtttaattactattggtggaggcataacaggtgatgtaggtggatttgctgctagtttattcaagagaggtcttcaatttgtaaatattccaactacgctcctatcccaagttgactcttcggtaggaggtaagacgggtgtaaatacgaaatacggaaaaaatcttatcggaagtttttaccaaccaaatttagttataagtgacaccaattttttaaagacacttccgtatagagaaattatttgtggatatgctgaaatattaaaacatgctttaatagcaaataaaaaattttttaaatatcttgataaaaattttttaaaaattcttagattacattctccttttttagaaaatgcaatttatgagagttgtaagattaaaaaaaatgttgttcaaaaagatgaaaaagaacaagactttaggaaaattttaaattttggccacacatttgcacatgcatttgaggctacgcttggttattcaaaaaaactgaatcacggtgaagcagttatattaggaatgtatattgctttgagttttagtaacaaaaataaaattttaaaaaaaaatgaatactcattaattttaaatcattttaaaaagtcttcattaccatcaaatattaataaatttt

SEQ ID NO: 286895 - DNA, 527 bp, Unknown
  Bacterial polypeptide expressing nucleotide sequence isolated from the Sargasso Sea
tatgaaaattataaaaaaaattaaagttgacctaggggaccgatcttacccaataattattggaaatggaatctacggaaataaaaatctttatagaaatagtaatccaaaaaattctattttagtatctacaaagaaaattaaaaatttaaaaaactcaagtattccaaaaagattctataactcagagatattaattggtgatggagaaaattttaaaaatttaaattcatgtgaatcaatttataaaaatcttcttaaaaataaatattcaagagactgctgcttattagcatacggaggtggcgtaattggcgatataactggttatgtggctgcaacatatttaaggggcgtaaactttattcaagtaccaaccactttattgtcaatggttgattcgtccgttggtgggaagaccggtgttaatcattcccttggaaaaaacatgatcggagctttctatcaacctcagtcagtaattatagatttaaattctttgaaaaccttgccaaaaaaacaattaa

SEQ ID NO: 286896 - DNA, 757 bp, Unknown
  Bacterial polypeptide expressing nucleotide sequence isolated from the Sargasso Sea
tgttgttggagacataagcggatttgtggcaagcacatatctcagagggatagatttcattcaaattccaacaacgcttttggctcaagttgattcatccgtgggtggaaaaacagctatcaattcaaaaaacggaaaaaacctttttggtgctttttataatccttctttggtaatcattgatccctctcatctaaattcattagcagaacgagaatataaagctggactagctgaagttataaagtatgggctcattgataacaggaagttatttaattatctgaaaaaaaactatgagtctattttagataaagacaacaaggctctaagctttattatttcagaatctataaaatctaaagcaaaaatagttcaacaagatgaaagagagaaaggcttgagagcaattttaaattttggtcacacttttgggcatgcactcgaagcaaagtacaaatacaaaaaatatttacatggtgaagcggttgctattggtatgagatgtgcttccaaaatctccttggaactgaaattaattacaaccaaagaatttgaagcagttctagaattattcgataagcttaaaatcaaaagtaatttaccaaatttaaaattgaatgatttaatgccctacttaaaaagagataaaaaaatactcaaaggcaagataaggtttgtgctgctggatggtatctctaaagcgaaaatcgaagataaggtaagttcgaaagttataagaaatatttttaattaa

SEQ ID NO: 286897 - DNA, 808 bp, Unknown
  Bacterial polypeptide expressing nucleotide sequence isolated from the Sargasso Sea
cttggatcttaaatttgatcgttcagataccttaatagctttaggtggtggagttgttggagatataactgggttttgtgcagcaacataccttagaggaattgattatatccagatacctagcacattgcttgctcaagtagactcatcagtgggtggcaaaacagcaataaatgttaaacaaggcaaaaatttaattgggtcattttataatccaaaattagttttaatatctactaactttttaaaaacattatcagaaaatgaatataaatctggcttaggtgaaatactaaagtatgcttttataggtaataaaaaacttaaaaagattattgaatctaataccaataaaattaataagagagatgacaaaatattaaaaattattattgaagaatcgattaaaacaaaatctaaaatcgtgacattagatgagaaagaaaatgatattagagcaatactaaattttggtcatacttttggccatgctattgaagctcataataaatataaaaatattacgcatggtgcagcaataacattaggaatggttatagcttcaaaaatatctttttttgaaggtcatataaaagattaccaattggataatataataaatatgattgattcattgggtttaagttcagatcatggaaaatataagtattcgaatctaaaaaaatactttttatctgataaaaaagtcactaatggcgaattgaatctaatcttaatagataagaaatttaatgcttttaaaacatcaaaattcaatcaaaaaaatattattaaagctctgagctag

SEQ ID NO: 286898 - DNA, 693 bp, Unknown
  Bacterial polypeptide expressing nucleotide sequence isolated from the Sargasso Sea
actcttcgataggtggcaaaactggtataaattcaaattatggaaaaaacctgattggtagtttttatcaaccaaacttagttatatcagatgttgattttcttaagtcgcttccaaaaagagagataatttgtggatatggtgaaattttaaaacattctttaattagagataaaaatttttttaaatttttgaataaaaatgtaagtaaaattactcaactgacttctccatttattgaaaaagcgatttatgaaagctgcaaaattaaaaaaagtgtagttgaaaaagacgagaaagaaaaacatttaagaaaagttctaaattttggacatacatttgctcatgcttatgaagcgagtttaaattacagtaaaaaattaaatcatggtgaggcagtaattttaggcatgaaaactgcgttgagttttagcctaagtttaaaaatgcttgaaaaaagtgattacaatctaatattaaatcatgtcaataaattaaatctatcaatatccgttaataaattttttacaaaaaaaaatttaaataaaatattatatttcatggcaaaggataaaaaaaataaatcccaaaaaattaatttagtattgttgaaaaaaattggatctccacagataaataatgaatattcaaaagaaagaataaaaaaattttttaacgattacttaacatagg

SEQ ID NO: 286899 - DNA, 1117 bp, Unknown
  Bacterial polypeptide expressing nucleotide sequence isolated from the Sargasso Sea
atggtcgcctcaccaactctgcgtcggatctccgtcgctctggaacgctacccctacgaggtggtgatcggcgccggtgggctgaatcgcctcggggacgaactgctgacagcgggcattcagcccggtcgccggatccttgtggtcagcaatcctgacgtggccggcccctacggagaggcgtgtctgcagagcctggcccagcagggcttccatgccgacctgctggtgattgatgcgggggaagaccgaaaaacgccagccacggttgccgccatccacgacgctgccttcgaacggcacctggagcgcagctcgttgatgctggccctggggggaggggttgtcggagacatgaccggcttcgcagcagccacctggttgcgtggaatcccggtgattcaggttcccaccactctgctggcgatggtcgatgccgccatcggcggcaagacaggggtgaaccatcccggcggcaaaaatctgatcggcgcctttcaccagccgagtctggtgctgatcgatcctgagacgctcaacaccttgcccatcagggagttccgggcgggcatggcggaggtaatcaaatatggaattcttggcgatcccgatcttttccactgcctggaggaagggcctgaacccgattcagctccgggcctgggcagcggccggcttgaaatcattctggaacgatcggcagcggccaaagcacgggtggttgccgcagatgaacgggaagggggcctgcgcgctgtcctgaattacggccacacctttggccacgtggtggaaaccctctgtggatacggcacctggctgcacggagaagcggtggcgatcgggatggtggccgttggccagctggccttgaaccgtggcagctggaccgagaaggacgccgagcgccagaagcaattgatccagcgctgcggtctgccgaccgcgtggccggatctcaaccctgatgcggtgctgcgcactcttcagggggataagaaggtgaaggacggtcggctgcgattcgtgctgcccacagccattggccatgtggagatccgcgatgacatcaaccgggatgagatcctgcgttgtctggagcagttgcgaggctgaa

SEQ ID NO: 286900 - DNA, 1108 bp, Unknown
  Bacterial polypeptide expressing nucleotide sequence isolated from the Sargasso Sea
atgaaaattcataaaattcagatcaatacaaaaacaaaaaaatattctatctttataggtactagtttaatttcaaaaataaataaaattttatcctctcaaaaattatcattttcaaaagttttagttgttatagataaaaatattccatcaaaatttaaatcaaaattaatcaaaaatttaaaatctgatataaaaaaaacttatatttttaaagctaatgaaagaaataaaaatcaaaaaaatgtagatttgatccaaaaaattttatttaaaaatagatttaatagagatgactgtttgattgcttttggaggtggtattactggagatgtggttggttattgtgcaagtactttcaaaagaggaattaaatatataaatattccaacaactttactttctcaagttgactcatctattggtggtaaaactggcataaacaattcttacggtaaaaatcttgtaggaagtttttatcaacccaatatagttatttcagatatagatgtacttaaatctttaaattttagagaaataatttgtggttatgcagaaattcttaaaagcagtttactagacagttttaaaaaatttaaatacttggacaaaaattttaatgacataattaatttaaaacaaccacaaataggtaatgcaattcttaacagttgtaatcttaaaaaaaaaattgttcaaaaagatgaaactgaaaaaaatttgagaaaagtccttaacttaggtcatacatttgcacatgcttatgagtctaaattaggttttgcaaataaattaaatcatggtgaagctgttttaattggaataaaaaatgccgttaaatttagttatcaatctaaaattctaaaaaataaaccttataatttaattataaaacaccttgataaaattcctttgaataaaaattttaatgaactctttaaggcaaaagatatgaacaaaattatatcttttatgaaatctgacaaaaaaaatatttcaaaaaaaataaatattattttaattcaagattttggaaaaataaaaaaaagttatcaaattagtgataattcattaaaaaaatttcttatttctgaattaaataaataat

SEQ ID NO: 286901 - DNA, 896 bp, Unknown
  Bacterial polypeptide expressing nucleotide sequence isolated from the Sargasso Sea
aatggagaggatcacagtcactctcggggaacgtagttaccctatcaccatcgcggctggtttgttcaatgagccagcttcattcttaccgctgaaatcgggcgatcaggttatgttggtgaccaacgaaaccctggcccccctttatctcgataaggttcgcggcgtacttgaacaggcgggtgttaacgttgatagcgttatccttcccgatggcgagcagcataaaagcctgacggttctggatacggttttcaccgcgttactgcaaaaaccgcacggtcgtgataccacgttagttgcccttggcggcggcgtgattggcgatctgaccggttttgcggcagccagctatcaacgtggtgttcgttttattcaagttccgacaaccctgttgtcgcaggtcgactcctccgttggcggcaaaaccgccgtaaaccatcccctcggtaaaaacatgattggcgcgttttaccaaccggcctccgtggtggtggatctcgattgtctgaaaacgcttcctgcgcgtgagctggcatcggggctggcggaagtgatcaaatacggcatcattcttgacggtgaatttttcagctggttggaagacaatctggatgcgttgttgcgtctggacggtccggcgatggcgtactgtattcgtcgttgttgtgagctgaaagcagaagttgtcgcagcagacgagcgtgaaatgggcttacgtgctttactgatctggggcacacgtttggccatgcgatcgaagctgaaatgggttatggcaattggttacatgggtgaagcggtggccgctggtatggtaatggctgcccgtacgtctgaaacgttgggtcagttcacctccgctgatacgcagcgcatcattacgctggtacagc

SEQ ID NO: 286902 - DNA, 1078 bp, Unknown
  Bacterial polypeptide expressing nucleotide sequence isolated from the Sargasso Sea
aatgaaaaaaatcaaggtagatatcaaatcaaactcttatgaagttatcgtaggctctgatcttgtaaatcaagaaaacctgaaaagattgaaaggcaaggaagtgttgctagttgcagatgaaaaggttccttcagaatacaaaaactcaataattgaagtactatctgatctatcttcaaatttacacatatgtgaaatacatgcttcagaagagaataaagacagaaacacattggataaaattcattcgaaactcataaatgaaaaattcagtagggattgttatcttgtagccttaggaggtggaataacatgtgatataactggtttcgctgctgccacttatcaaaggggcgtaagttttattctttttccaaccaccttactttctcaagtagatgcctctgttggaggcaagacagcaataaatcatcctttaggtaaaaacatgataggagcatttcatcaacctattggagtgtttgctgatattggttttttagactctttgcctaaaaaagaaataagcgatggtctttcagaggtaattaaacatgctcttattgctgacagcaaattctttgattggttagaaaagtatatagaagcaattattactctagagcctgaagctttaaagcataccattagtaggtccatagaaataaaatcagaaattgtctctaaagacgaaaaagagagcggtattaggaaggttttaaactttggtcatacttttggccacgcaatcgagctttatggagagtttaagcaattcagtcatggtcaatcagttgctttaggtatgcttatggcaatggaattatcaaaaataacaggatcttttaaagataaagacctccaaagagcgaaaagcctaataaataaaataaaccctcaattaaatttaaatatcgattttgaggaccaaaaactcatagagaacatgtctgttgataagaaaagaataggagataaacttgtctttattctgttagaagaaataggagtagcaaaaatcaaaaaggatattagtgttgctgacatagcgacagcaatcacatcattagcctag

SEQ ID NO: 286903 - DNA, 1111 bp, Unknown
  Bacterial polypeptide expressing nucleotide sequence isolated from the Sargasso Sea
atgaagatagataaaattatagttaaaactaaagaaacgacttaccctattatggttggaaatggggcaataagtttattgaaaagccaagttaataaactgtgtccaaatacaaaaaaaattgcgatcttatttgataaaaatgtccctaatatttttaaaacaaaaataaaaaaactgttaaagaaatacaaaatttttataaaagattatactccaagtgaagagttaaaaagcttttcgaatgtaaatattttaatagaatatcttattaaaaataaatttaacagaaacgacttggtaattgctgttggaggtggaataattggagatttttcaggttttgtagcaagtatttttaagagaggtataaactttattaatatacctacaacattgttggcacaagttgactctgcaataggcggcaaaactggtgttaattcaaaaactggaaaaaatttaattggttcattctatcaacctaaattagtattatctgatatatcttttttaaaaagtcttcctaaaagagaattcatttgtggttttggagaaatattaaagtactcacttataaaagatcaaaagttttttaattttataaaaaaaaattcaaaacaaattttaaaaggaagcgacttaaatattttaaaatacattgttttaagaagctcaaaaaataaagttcattttgtagttgcagatgaaaaagagtccaacaaaagaatggttttaaactttggtcatacatttgcacatggaatagaatcttcaaacaatttttctaaaaagataaaccatggagaagcagtgcttatcggaatgttattggctacaaaactttcttttaataaaaatatttgttccttaaagaccatggaagaaatagaaaaaatttatatttcaaataaattgccttcaaaactaaatatatatttgaaaaaaaaacaaattaataatatttctaaacttatgattaatgataaaaaaaatgacgatgaaaaaataaatttaattcttctaaaacgaataggcaaaacaactataccgggtaaaattaaaatgtctgttggtcaaataggtaatttcttaaaaaaagttaattaat

SEQ ID NO: 286904 - DNA, 1069 bp, Unknown
  Bacterial polypeptide expressing nucleotide sequence isolated from the Sargasso Sea
gatgagaacattaaaggtaaatctgggggacaggagctatccaatatacattggtagtgatgtcagtctcaataatgaactctactcaaagcatataagctcaaaaaaaattgctttgatcacaaatgaacaaatcgcagatttatacctctcagaaattagccaaacattaaactcatttgatctaaaaacactagtccttccagagggagaggctgaaaagaacttagagactgttggaaaagcggttgaattcctatctgacaacggaattgatagggattcgtcaatcattgcttttggtggaggggtgattggtgacatcacaggttttgtggcttcatcttatatgagaggcataaagttccttcaggtcccaacgacactattggcccaggttgattcttccgtaggtggaaagacaggtgtgaacataaatacaggaaaaaatttgattggttctttctatcaaccgagcgctgtgattgcagacacaagatatttaaatagccttgagcccaatcgtctctcagaaggtttagcggaggttataaaatacggactgattcgtgatgaggatttcttcatatggctatgcaagaacaccaatagaatatcggcattggaatctgaagtcatgacccatctgatcgagaggtgttgtcaaattaaagctgaaatagtctctgaagatgagagagaaggatcaataagagcaatattgaattatggccatacttttggtcatgcaattgagagccttactgattacagcgtttatactcatggggaggcagtttcaatcgggatggttatggcagcaagcatggcagaaagaatgggaatgctttcaaaagatgataagacagacataacgaacctccttgaatctgtaaatttaccgactaagaagcctgatctaaatagcaatgattttctcgaaagcatgaaacgtgacaaaaaagtccaagatggcgaaataaggttgatattattagagagcattgggagagccatcatcagcaatgattaccccaatgagattttgatggaaaccatatcggaataa

SEQ ID NO: 286905 - DNA, 990 bp, Unknown
  Bacterial polypeptide expressing nucleotide sequence isolated from the Sargasso Sea
ttcttaataaatacgtaaaaagaaataataaattattaattgttacagatactggaataccgaacgatcatattaaaaacttaaaatctattatcagtagcagaaattgtcatatttttaaattaccaaaaggcgagaaatcaaaatcattaaattcatataagaaaattattgatgagcttataaaattgaaatttgatcgttctgattcattgttggcctttggtgggggtgttgttggtgatattacaggctttgttgcatcaacttatttgaggggtattaattatattcaaataccaactactcttcttgcccaagttgactcgtcggtaggtggaaagactgccattaatattcctcagggtaagaatcttgttggagcttttaataatccttgctgtgtaatgatatcgaccaactatcttaaaactcttccagagaaagaatttaactcaggtcttggagaagttattaaatatgcgctaattggtaatagtaaattaaagaatataattgaaaaaaatcctaaacaaattaaggacaaaaaagaaccttttttgaaaattattattgaagaatctattaaaacaaaatcaaagattgttacgaaggatgaaaaagaagcaggagttagagcgatcttaaattttggacacacatttggacatgctattgaagcttacaataattataaaaatatttctcatggtgccgcaattacactcggaatgattattgcatcaaaattatcattttatgagggttatattaaagaatatcaacttgataatgtcataaatatagttgattcactagggctaaattctgatcatagtaaatataattattctaagctaaagaaatttatggctaatgataaaaaagtttctaaggggaaattaaatttcataatgattgataaaaattttaacggattcaaaacatcaaactatgatattaagaatgttaaaaaagctttgaattaag

SEQ ID NO: 286906 - DNA, 901 bp, Unknown
  Bacterial polypeptide expressing nucleotide sequence isolated from the Sargasso Sea
tgatggagaacagtataaaaatcttaatattctctcacaaatttttgattttctgatgaaggtcaatgcaaaccgccaaacattattaatcgcttttggtggaggagttatcggagatatggctggttttgctgctgcaacctttgttcgaggcataccatacatacaagtaccaactactttattggctaatgtagatagtagtgtgggaggaaaaacagcagttaaccatcctttaggaaaaaactctattggatcttttaaacagcctgaatatgtttgcatagaattgtcattccttaaaacactaccttcacgtgagttaagagcaggctacattgaacttttaaaacatggtttaattcatgatgaagaattgctagattttattcgaagcaattctcttgagccacttgattttgattttttagaagaagctatacttagatcatgcaccattaaaggccgtattgttgaaaaagatgaaaccgagacaggcatccgagctactctaaattttgggcacacacttggacatttgatagaaactcacgctggtttcggtaagtatcttcatggagaggctgtaggagcaggaatgttttttgcgtcgtttgtttcatggcgctccaatgagatgatggaagatgaatggatgagaatcaaaaattttctcagtcaaattttaactcctatacaacttcctccacttgaccaaaatctatttagagagatgattttacatgacaaaaagtcgcaaaatcactcagtgaatttcattatgctgaagaaattgggaaagagtttcataaagaaggaaacaccagttgaaatgctctggaatgagttaaaagaatttacaaaaaaattccctgagattattaaaattgaaggaagataa

SEQ ID NO: 286907 - DNA, 853 bp, Unknown
  Bacterial polypeptide expressing nucleotide sequence isolated from the Sargasso Sea
tggagaagctgcaaaaagtatgaacgagtataaacgggtaattagccaaatgatagaatatgaatgcgatagaaaaacctttattatttctctgggtggtggtgctgtaggcgatgtcgctgggttcatagcttcgacctacatgcggggagtagcttacattcaaataccaaccaccttactatctatggttgattcctctatcggcggtaaaacaggagttaatacttttgaaggaaaaaacttaattggatccatataccaaccaatagctgtttttattgatcaagacatactaaaaacacttccaaaacaagaaattgtctctggcctgggtgaaataataaaatatggtgcaatagcaaatcaaaacttctttaataaaatatcagattggttagatgatatacaaaacttcccatttaatcgggctatagaaatttgctgtaaaataaaggcagatattgtatccaaagatgaatacgatcttggaatgagaaaaatattaaattttggacatacaattggacatgcacttgaaacattctatggtttcaaaaatataaagcacggtgaagctgtggcattaggaatgatttgctctggatacatttctcacaagctaaataaactagataaaaatcaatattttcggttaagagataccataaataagcttccacttccagtattaaaaaagtttaacaatagacagatatttgatcacataaaaaaagataaaaaatatgaaaatggtaaattaaaatttatcatactaaatcaaattggtaatgcagaaataacaaaccaggtagatgaaaaacttctgcttaaatccttatcagagctttag

SEQ ID NO: 286908 - DNA, 739 bp, Unknown
  Bacterial polypeptide expressing nucleotide sequence isolated from the Sargasso Sea
agaggaattaaatttattaactttccaactactttattatcgcaagtggactcatcggttggtggaaaaacaggagtaaataacagatatggaaaaaatttaataggatctttcaatcaacctgatttggtcctatctgagattaattttttaaaatctttaccaaaaagagaattgatttgtggatatgctgaaattcttaaacatgcaataattgctgataaaaaaaaatttttatttcttgaaaaaaataaaaataaaatactaagcttaaatggtgatgtgattcaaaaaactattattgacagctgcactataaaaaaaaaggtaattgaaaaagacgaaaaagagaaaaatttaagaaaagtgttaaactttggccacacgtttgcccactcttttgaggcatctcttagatattcaaaaaaattaaatcatggtgaagcagtacttatgggaattaaatgtgcagttaaatttagtaaaaaaattaatcatattccagaaaatgatgcaaaaagaataattaatcatatagacagtttaaaaataaaaaaattaaatgatttttttaatttaaaatatttagaaacactaattaaatttattaagattgataaaaagaacaaatcaaataaaataaatctgattttattaaaaaaaataggtaaaccagatattaattctaattataatgtaaatactgttaagaaatttttatataatgaattaaattaat

SEQ ID NO: 286909 - DNA, 868 bp, Unknown
  Bacterial polypeptide expressing nucleotide sequence isolated from the Sargasso Sea
atgagaacattaaaagtaaatctagaagaaagaagctatccaatatacattggcaccgatgtcagtctggataacgagctctactcaaagcatataaaaacaaaaaaaattgctttgatcacaaatgaacaaattgcagatttatacctctcagaaatttcccaaacattaaatgcatttgatctaaaaacacttgttcttccagaaggagagaccgaaaagaacttggagactgttggaaaagcggttgaattcttatctgacaatggaatcgatagggaatcatcaatcattgctttcggcggaggtgtgataggtgacatcacaggctttgtggcctcgtcttatatgagaggcataaggttccttcaggtcccaactacacttttggcccaggttgactcttccgtagggggaaagacaggcgtgaatacaagcacaggaaaaaatctgattggcgctttctatcaaccgagtgcagtgattgcagatacaagatatttaaacacccttgaacccaatcgtttctcagaaggtttggcagaggttataaaatatggactgattcgtgatgcggatttcttcgcttggataggcaagaacaccagcaggatattgacattggagcctgaagtcatggctcatctcatcgagaggtgttgccaaattaaagctgaaatagtctctgaagatgagagagaaggatcagtaagagcaatattaaattatggccatacttttggtcatgcgattgagagccttaccgattacagcgtctatactcatggggaagcagtttcaatcggcatggttatggcagcaagcatggctaaaagaatgggaatgctgtctcaagctgataagaaag

SEQ ID NO: 286910 - DNA, 1054 bp, Unknown
  Bacterial polypeptide expressing nucleotide sequence isolated from the Sargasso Sea
aatgaataaaaaaatcaattttgcttcaaagggaataaaatgttctgttgaaattgaagttcactctataaagaaaaaaatagagagtattataaatacaaatagtaatgtcatttttttaatagacaaaaaagttttaaatgtttttaaaaaagtaaaaaattataaaaatttaaaatatattactttaaattgttctgagaaaataaagtcatttcaatattattctataatatgtaataaagtgcttagtttgggagttgatagaaaaagtgttttagttgtaatcggtggaggcacgttaggcgatttaggaggatttattgcaagcacattattaagaggtattgatcttgttttaatcccaacaacattgctctctcaggtagatagctctataggaggcaaaaatggaattaacactagctttggaaaaaaccttgttggaactttttatcaaccaaaattaatcataatagatccttactttttatcaagtttaccaaaaagagaaattctttcaggatacgctgaaattgtaaaacatgccataatttatgatcaaaaattttttgattggctaaatagaaattctaaagatatatttaaacttaagtatcatgttctttgtaaagccatacataaaagtattttgattaaaaaaacatatgtagaaaaagacgagaaagaaaaattaaaaaataaatactctagagctatattaaactttggtcacacttttggtcatgcccttgaaacctattataattataataaaagattaacacatggagaagcaatatctataggaatgatgattgctacaacactctcttacaaacttaattatctatcctttaaagatttaattaaaatcaagaatcattttatagctaacggtttaccaattgaggataaggaaatgtataataaaaaaatatttgaaattatttacaaagataaaaaaaatactgataataaaattaatttaatattactcaaaaatatcggaaaatctttttttaaaccaaatataaacttaaataaaaattaa

SEQ ID NO: 286911 - DNA, 1108 bp, Unknown
  Bacterial polypeptide expressing nucleotide sequence isolated from the Sargasso Sea
atgattaaaactctcaaggttacaactcctcttaagaaatataatataattattggcaataatattatagccagctctggaaaatattctaaaaaatatctaaagagtgatagggtattcattgttacaaataagcttcttaaatctttgtatttaaaaaaaataaagaactcatttgttaagcatggaataactgtcagcgaaataatcattaacgatagtgaaagtaagaaaaatcttgagtcagtaaaaatcttaactagccatttattaaaaaataaagttgatagaaatgatactctgattgctcttggaggaggtgtaataggtgatcttgttggatttgtagcaagtataacactaagaggtattaactttattcaaattcctacaactttactttcacaagtagactcatcagttggtgggaaaacaggagttaacacgccacttggaaaaaatttaatcggttctttttatcagcctgcccttgtcatttctgacgtaggcatattaaagagcttaaataaaagagagattttgtcaggatatgcagaagtaatcaagtatggcatcataatggacaaagcgttttttaattggctattaaagaatgataaacattttttgaatcaaaatgctaattacttaatagagatagtatataaatcatgcaaaaataaagcaaaaatagtaaatcaagatgagaaggaaaaaaatattagagccttattaaaccttggccatacttttggacacgctatcgaagcacttaataattataaaaaaacagttgtgcatggtgaagctgttgcgataggaataataatggcactagagctatctttcttagaaggaaaaatatcaaaagacattataaataaaatagaatcacattttgataaaataggtattaaaagaaagataccaaagcaattaaaacagcatttaaacacttcacagtttatagaagcaatgtcttctgataaaaaagtaaaaaacaaaaaaataaatttaatactatgtaaaagtattggtgaagcttatatcactgatactttcaaacataagaacatgaaaaaggtaataaaagattttttaaactaaa

SEQ ID NO: 286912 - DNA, 631 bp, Unknown
  Bacterial polypeptide expressing nucleotide sequence isolated from the Sargasso Sea
tatgaatacaaataaaatttcaattaaaacaagctctaagaactacccaattctaattggaagagatttaataagtaaaattgacaaaattttaaaagctaatcatttaaaatttgataaatgtttaatagttacagacaaaaatattcctcacaagtttaaaagacttttatacaaaaagttaaaaataaataaactttttaaaatagaaataacggcatcagaaaaaaacaaaaattaccgaacaattgaaaaaatccatacagttttatttgaaaacaggtttaatagggaggactgtgttatttcttttggtgggggaattattggagatatagttggtttcgcatctagtacatttaaaagaggcatgaaatatgtaaatattcctacaactttactgtctcaagtagactcatccataggtggcaaaacaggtgtaaataataaatttggaaaaaatttgattggaagtttttatcaacctgatttagttgtttctgacatgaatattttagcttctttaccggaaagagaaattatttgtggatatgctgaaatattaaaaagtagtattatagataattttaataattttctctatttagacaaaaatttaaaaaaaatttta

SEQ ID NO: 286913 - DNA, 1075 bp, Unknown
  Bacterial polypeptide expressing nucleotide sequence isolated from the Sargasso Sea
ttgtttgttggatacaattcaataaatttattatcaaaaaagataaaattaattaatgcaaaatcgaacaaaataggtgttgtattagataaaaaagttccaaaaaaatataagaataaaattaaaaaacttttaaaaaattatagagtttttttctttgaatattcagttagcgaaaacttgaaatctttttcaaacgttaatggactcctagaaaaatgtataagattaaacttcaatcgtaatgattttttaattgctgtaggtggaggtatagttggagatttttgtggttttgttgctagtatattaaagagaggagtgaactttataaatattccaacaactttactggcacaagtggactctgcagttggaggtaagactggagtaaattcaaaacaaggtaaaaacttaataggatcctactatcaacctaatttagttatttgcgatttgtcatttttaaacagtcttccaaaaaggcaattaacaaacggttacgctgaaattttaaaacatgctatcatttcagataaaagattttttaattggcttaaaaaaaattcacaaaaaattttaaaaaacaaagatgttaactgcttgacttacgcaattactaaaagcaataaaataaagttaagttttgcaaacaaagatgtaagagacaaaaatataaggatgactttaaattttggtcatacttttgcacatgcaattgaagcgaggcatagttattcgaaaaaaattaatcatggtgaggcagttctcgtaggtatgatgatggctgcaaagttatcttttattaaaaaagtttgtaataaagtaactttgttagaattaattaaaatatacaaaaaaaataatttggattataaattgaaacactttctcaaaaagaaggaatttaattccataacaaaattcatggtacaagataaaaaaaatgatgataataaaatcaacttaattcttttaagaaaaataggtaaaactacgagacctggtcagtataaattaactcttagtgagctaagaaaaaataatacaaaattaaataatcttaatttctaaa

SEQ ID NO: 286914 - DNA, 1108 bp, Unknown
  Bacterial polypeptide expressing nucleotide sequence isolated from the Sargasso Sea
atgaaaaaaactttagaggtaaagaccggaacagacgaatataagatattaattggtgataatattttattgagctcaggctcattaataaaaaagaaattaataaatccacgagtttttataattactaataaattaatctataagctttacggaaaaaaattagagaactcactaaaaaaaaataaaataagttttaacaagataataattaatgatggtgagaaatacaaaaatattaaaactattaatttaattacgtctaaacttctcaaatataaggttgataggaatgatactttaattgcttttggtggaggtgttattggcgatattgttggttttacagcaagtatcacattaagaggtattaattttattcagatacctacaacattattatcgcaagtcgactctgcagtaggaggcaaaacaggagtcaatactaaagaaggcaaaaatctgataggtactttttaccaacctaaattagtgatttcggatgtttcactattaaaatctcttccaaaaagggagattttatctggctatgctgaaataattaagtatggacttattatggataaaagattccttaattggcttttagataatgagtcgaagcttatgacatttaacaaaaaatatttaattgaggctgttttccactcttgcaaaaataaagcaataattgtaagaaaagatgaaaaagaaaaaaatataagagcaatacttaatttaggccatactttcggacatgctattgaagcaataaataattaccaaaaatcattaacacatggagaagctgtatctattggcatcttgatggctctagatatgtcttcacttcaagggaatagtttaaataaaaatattaataaaataaaagatcattttcaaaaattaaaaatgaaaaccaaaatacctaacaatattaaaagaaaaacatcacttaaaaaatttaaagagacaatgaattctgataaaaaagtaaaaaataatcgtataaatctgattcttttaaggaatttaggtaaagcttatttagccaatcgatattcaactagaaaattagacagcgtgataaataattatataaattaga

SEQ ID NO: 286915 - DNA, 987 bp, Unknown
  Bacterial polypeptide expressing nucleotide sequence isolated from the Sargasso Sea
aagatcaaaggtgctttttgattacagattctaaaattccaaaaaaacatataatcaaagtaaaaaagataattggtcagtatagtgtctcattgcatacatacttgatgaatgcaggtgaatcatctaaatcgcaaaaggtattttttgatatacaagattatttgctaaaaaatagatttgaaagaagtgatctaataattgcatttggtggaggtgttgtaggagatatgtctggctttgttgcaagcacctatttaagaggaatcgattacttacaggtacccacaacactcttgtcgcaagttgattcatcagttggtggcaaaacagctatcaacacaagacatggcaaaaatcttattggtagtttttataatcccttaaaagtcatcattgatctaagcttcctagagactctacctgaaagagaatataaagcgggccttgctgaaattattaaatatggacttatcaaaaataagaagcttcttgattatttgtttgcgaacgaaatcaagattaatgataaagctctcgatgctcttgagtatattatttatgaatctgtgaaaacaaaagcaaaaatagtttctatggatgaaaaagagagtggtgtaagagcaatcctaaattttggccatacttttggacatgccatcgaagctcatcacaactataaatcatttttgcatggtgaagcggtagcaattggtatgttaatggctgcaaagctgtctcaattcgagaatcatattagtgaaaaacaatttaatttcattgaaaaattgcttaatcaatataatttgaattacaaattaaaaaagatgacttacaaggatttcacaaaacatattaagcaagacaaaaaagtcaagagtggtaaagtgagaattgtattattaaaaagactttccaatgcttttgtgactgaaaaatttgggcaattaaatttttctagagcaattaagcagcacttgcagtagt

SEQ ID NO: 286916 - DNA, 766 bp, Unknown
  Bacterial polypeptide expressing nucleotide sequence isolated from the Sargasso Sea
tttgcggctagtcttttcaaaaggggccttaaagtttgcaaatattccaacaactcttttggctcaagttgattcatcaatcgggggaaaaactggagttaattctaaatatggtaaaaatttaataggaagcttttatcaaccatcactggttctctcagatattcaatttcttaaatctttatcaaaaagagaaataatttgtggatatggagaaatattgaagcattcattaattgataataaaaaattttttagtttcttaaataaaaatcttaaaaagattttaagtctttcttctccatttattgaaaaagcaatttatgaaagttgtaaaattaaaaaaaaaatagttgaaaaagacgaaaaagaaatagcattaagaaaagtattaaattttggccatacatttgcccatgcttatgaggcgggcttagggtacagccataaactaaatcatggtgaagccgtgatacttggaatgaaaacggcactgagttttagttttaaggaaaacatgcttagtaaaagtgaatacaatttaattataaatcatattgataattctggtctaccttcttctataaaaaaatatttttctatcagagatttaaataagattttatcttttatgatcaaagataaaaaaaataattctgaaaaaataaatttagttttattaaaaaacattggtaaaccaattttcaacaaacaatactcgaaaaaaaaagtaaatttatttttaagaaaatttttaactaattaa

SEQ ID NO: 286917 - DNA, 912 bp, Unknown
  Bacterial polypeptide expressing nucleotide sequence isolated from the Sargasso Sea
tatgaaaatatccaaactaataattaaatcaagttctggaaaatatcctatattaataggttctaatgtaatctctaatatatccaagttaatttttaataattcaataaattttgaaaaatgcttattagtggtagataaaaatgttccaaaaaaatttatttctgaaattagaaaatcattaaaaaataaaaaattatttatttttttaattacagccaatgaaaaaaataagaatcaaaaaacaactaatttaattcttcaaattttacttgataaaaatttttctagggaagattgtttaatagcagttggaggtggaattactggtgacgtaagtggttttgccgcaagtttatttaaaagaggtttaaagtttataaacataccaactactttactatctcaagtagactcatctataggaggcaaaactggaataaacacaaaccaagggaaaaatcttattggaagtttctaccagcccagactagtaattagtgatacaaattttttaaaaactcttagcaaaagagaagttatttgtggatatggtgagattttaaaacacgcaattatatcaaataaagttttttataattttttaaataaaaattttttcaatattataaaactcaaatcacccattatagataaggctatatatgaaagttgtaaaataaaaaaattagttgttgaaaaagatgagaaagagaatggtatgaggaaaatattaaactttggtcatacttttgctcacgcatatgaagcatcattaggtttctctaaaaaattaaatcatggtgaagctgtaattttaggtatgaatacagctttatcatttagttataaaaataaatttttaaatcttaaagaatataatttaataagagagcatatttataattcaaa

SEQ ID NO: 286918 - DNA, 877 bp, Unknown
  Bacterial polypeptide expressing nucleotide sequence isolated from the Sargasso Sea
aaaatcaaagaaacgtttgaattaatacaaaatattttattcaaaaatagatttaatagagatgactgtgtgattgcttttggaggaggtattaccggagatgttgttggatattgtgctagtaactataaaagaggaattaaatttataaatattccaacaactttgcttgctcaagttgattcttcaattggtggaaaaactggcatcaacaatccttatggtaaaaatcttgtaggaagtttttatcaacctgacttagttgtttcagatatagatgtacttaaatctttaaattcaagagaagtgatttgcggctatgctgaaattcttaaaagtagcttattagatagcttaaaaaaatttaaatacttggagaaaaacttcaaagaaataattaactttaaacaaccatttatagaaaatgcaattttaaatagctgtaagctaaaaaaaaaaattattcaaaaagatgaaactgaaaaaaatttaagaaaagttttaaatttaggtcatacttttgctcatgcttatgagtctagtttgggtttttctaacaaattaaatcatggtgaagctgttataattggaattaaaaatgctttggaacttagtagtcaatttaaaattataagttataaatcttataatttaataaaaaaacatattgataaaattccattaaataaaaactttaaacaactttttaaagttaaagatattaataaaattatatcatttatgaaatctgacaaaaaaaataattctaaagatataaacgttattttaatacaaaatttcggaaaaataaaaataaactatcaaatgaaacataatattttaagaaaatttcttagttctgaattaaaaaaataat

SEQ ID NO: 286919 - DNA, 1072 bp, Unknown
  Bacterial polypeptide expressing nucleotide sequence isolated from the Sargasso Sea
ctgaacgttgaactcggcaaccgaagctacccgatcatcgtcgggaacggtttgctgagagacgaggctttactcgcaccctatattgccggtgatgaggtcgttgtcctcaccaatgagacgatcgctcccctctaccttgatcaggtcaccacgtcactcaaagaccgccagctcatctgtcaggtgcttcctgacggagagcagttcaaaaatctcgacacgttgcagagtatcttcgataccctgctggagaatcgctgtagccgcaccaccaccctgatcgcgctcggcggcggagtgatcggcgatgtggtgggattcgcggcggcatgctatcagcgtggaattcccttcattcaactgccaacgacactgctggcacaagtggattcgtctgtcgggggcaagacggccgtcaatcacccccaagggaaaaacatgattggggcgtttcatcagcccgcttgcgtggtttccgataccgggacactggcgaccttggatccccggcaattagcagctgggatcgccgaggtcatcaagtacggcctcattcgcgatcagaaattcttcagttggcttgaggaaaatatcgagcgtctgctgcgctacgaggatgacgcgctggagttcgtgatcctggaatcctgtcggcacaaggcgcaggtggtggccaatgacgaaagggaagccggtgaaagagcgctccttaatcttgggcatacttttggccatgcgatcgaagctgcgacggactatgtcggttggctgcatggcgaagcagttgccgtgggtatggtgatggcagcgaccatgtctgagaagatgggttggctggacgtagctgaggtggagcgtattcgggagttggtgaaacgggcgggccttccggtgatgcctccggccgcgatgtcgcctcacgatttcatgaaacacatgaccgttgataagaaagtcagcggtgggcgaatccgtcttgtgttgttgagtgagctcggccaggcatcactcacttcagattatcctgacgaattgctggctgaagtgctcgacgcattcagcgtctaga

SEQ ID NO: 286920 - DNA, 881 bp, Unknown
  Bacterial polypeptide expressing nucleotide sequence isolated from the Sargasso Sea
taagtcttttcattttttagaaaatttatgggctcggaaatatttgaaaaaaaatattgaaagaaaagatattataatcgctcttgggggcggagttattggtgatttatctgggtttgctgcaggaataataagaagaggaattagatacatacaaatacctacaactttattagcacaagtagatagttctgtaggaggcaaaactgcaattgacactaagcacggtaaaaatctaataggtttatttaatcaaccttcgctagtaatatgcgacaccacgacgcttaacagtcttgatgaaagagaaataatatctggttatgcagaaatagttaaatatgcattaattaaagataaagagttttttgaatggctgctgataaatggtcaaaaaataattaaaaaagatagagatgctctagaatatgctatagttaaaagttgtaagcacaaagcacaaattgtttgttctgatgaatttgaaattaataattatagagcattattaaattttgggcacacttttgctcatgctattgaaaatgctcttaattataaagatactttaaagcacggagaagctgtagcaattggcataataatggcctttgagttatctattcttttaaatttgtgtaaaaaagatgatttaattatagtaaaaaaacactttacctctttaggactaccgactagtctaaactttttaaaaaatgaaatagatgtaaatatgatccttaaacctatgttacaggataaaaaaaatattaatggtaaagttatttttattttagctaaaagtattggctctgcttttgtagctgattttgtctcaatagaagatgcaaaacaaattatctctaaacacttaaaatgaa

SEQ ID NO: 286921 - DNA, 838 bp, Unknown
  Bacterial polypeptide expressing nucleotide sequence isolated from the Sargasso Sea
aatgtctaataaaatcaaagttgatttaggaaataatagttacaatgtcagtttgattgaaagtttcaaaaattcaattgtaaagtttgcttctacaacaaaatctcaatgtatgctaatcacccaacaagaaattttaaatctttttaaagatgaaataaatgagctttctaatttacccaatgtaaatatctttttgattgagcaaggtgaaaaagccaaatcatttgaatccatatctttaattgtcaatgagatgtctaaaaagcactttgatagatcttcattagtttttgcagttggtggcggtgtcgttggagatgttggagggtttgcatcatcaatttatatgagaggaattaaatatattcaatatccaactactttacttgcaatggttgactctgctattggtggaaagacaggaataaacttaaaagatggtaaaaatttggttggaagaatttatcaacctatagctgtagaaattgataccaattttttatcaactttaccagacagggaactgcaagctgctcttgcggaggttgtaaagtacggttttatttatgacagagaattttttgattttgtagttgctaattcaactgaaattcaaaataaagatatagatgttttacaaaaaataattatccaatgttgcgaaataaaaagtgatattgtaagtgaagatgaaaatgagaatgaacttagaatgattttaaattttggtcatactgttgggcatgcaattgaatcattcactgattacaaaaatttattacatggagaagcaattttttatggtatgaagtgtgcattatatcttttcaaacaa

SEQ ID NO: 286922 - DNA, 1096 bp, Unknown
  Bacterial polypeptide expressing nucleotide sequence isolated from the Sargasso Sea
atgagaacattaaatgtaaatttagaagacagaagctacccaatatacattggcaccgatgtcagtctggataacgagctctactcaaagcatataaaaacaaaaaaaattgctttgatcacaaatgaacaaattgcagatttatacctctcagaaatttcccaaacattaaatgcatttgaactaaaaatacttgtccttccagaaggagagaccgaaaagaacttagagactgttggaaaagcggttgaattcttatctgacaatggaatcgatagggattcatcaatcattgcttttggcggaggcgtgattggcgatatcacaggctttgtggcctcgtcttatatgagaggcataaagttccttcaagtcccaactacactcttggcccaggttgactcctccgtagggggaaagacaggcgtgaatataagcaccggaaaaaacctgattggcgctttctatcaaccgagtgcagtgattgcagatacaagatatttaaacacccttgaacccaatcgtttctcagaaggtttggcagaggttataaaatatggactgattcgtgatgcggatttcttcgcttggataggcaagaacaccagcaggatattgacattggagcctgaagtcatggctcatctcatcgagaggtgttgccaaattaaagctgaaatagtctctgaagatgagagagaaggatcagtaagagcaatattaaattatggccatacttttggtcatgcgattgagagccttaccgattacagcgtctatactcatggggaagcagtttcaatcggcatggttatggcagcaagcatggctgaaagaatgggaatgctgtctcaagctgataagaaagacataaccaatctccttgaatctgtaaatttaccgactaagaagcctgacttgaacagcaatgattttctcgaaagcatgaaacgtgataaaaaagtccaagatggtgaaataaggttgatattattagagagcattgggaaagccatcattagcaatgattaccccaatagagattttgatgaaaaccatatcggaataagagatgagcataaagaacagcgaccga

SEQ ID NO: 286923 - DNA, 814 bp, Unknown
  Bacterial polypeptide expressing nucleotide sequence isolated from the Sargasso Sea
actatagtagctgctggaggaggtattgttggtgactttgctggcttcgttgctagtattttgaaaagaggagtaaattttgtaaatataccaacaacattgttggctcaggttgactcatccattggagggaaaactggtgtaaattcaaaaaatggaaagaatttgattggctctttctaccaaccaaaattggtaatttcagaactgtcttttttagaaagcttaaaaaaaagagatttgatttgtgggtttggggaaattttaaaatattccttaataaatgataaattgttttttaaatggattaagaaaaactcatctattattttgcgaggaaaagacaaaaatattttaaaatatgcaataattaaaagttgtaaaaataaaatttattttgtaacagcagacgaaaaagaaaaaagtaaaagaatgttattaaattttggacatacatttgcacatggcatagaagcggcaaatgatttttctaaaaaaataaatcatggtgaagctgtactaataggaatgcttttagcaacgaaattatcagttaaaaaaaagttatgttcaaaaaaaacacttttagaaattgaaaaaatatatgaaaataataatttgccatctagtttacaaaaatattttagaaaaaaagattataaaaaaattgcggattttatggccaatgataaaaaaaataacgataatagaattaacctcattttattaaaaagtattggcaaaacaactaagccgggaagtttcaaaatgtctttgaagcaaatgagaaatattattaaaaaaattaattaat

SEQ ID NO: 286924 - DNA, 1066 bp, Unknown
  Bacterial polypeptide expressing nucleotide sequence isolated from the Sargasso Sea
tatgattgaattatcagcaggaaaggcaaatacaaaatatagaatatatatttcaaagactgctctaactaaaaaagtattaaatcaaaatattgataaagataaaaaaattttaattattaccgattctggtattcctaaaaaatatattaaagaacttaaaaaacaactaataaataagtcggtatatgttcattcaattgacagtggagaaaaatcaaaatcctttcgaacatatcaacaaattattaataagttaattgatttagaattttctaggtctgatttaataattgcttttggtggaggtgtggtaggtgatatatctggcttttgtgcctcttcttttttaagaggaattgattacatacagattccaacaacacttcttgcccaagttgactcttctgtaggagggaaaacagctatcaatgtacctcaaggaaaaaatttggtcggagcattttataatccacgtgttgtattgatctcaactgtttatcttaaaactctgagcgaaaaagaatataaatcaggattaggcgaagttgtaaaatattcattaattggaaataaaaggctcaaaaagttattagaagagaatgctgaaaaggttattaatcgtgatgacaaaattttaataaaaattattgaggaatcaattaaaacaaaatctaagattgttactaaagatgagaaagagagtggtattagagcaattctaaattttggacatacttttggacatgctattgaagcatttaataaatataaaaatctttcgcatggtgctgcaataactcttggaatgattatcgcctctaagatttcatactatgagggtcatataaaaaatcatcaattggataatattataaatatgattgactctcttaatctggatactgattattcaaaatataattactccgatctaataaagtatgtaaaatcagacaaaaaaatttctaaaggcaagttgaatctagttttaattaacaagcaacttaatgcttttaagacctcaaaatttgataaaaaaagtgtgctgcgggcatttagttaa

SEQ ID NO: 286925 - DNA, 1114 bp, Unknown
  Bacterial polypeptide expressing nucleotide sequence isolated from the Sargasso Sea
tatgaaggttcaagaaatcaaatttaaaaatctaaacaaaaattattctattttaataggtaacaatattttaaaaatattaccaaaaaaaattagattactttgtccacgaacaaaaaagatagcattaatttttgatagaaaagttccaaataagttcaaaaaaagtatatctaaaaacttaaaaaagtatgaattattgaattacaattttgaggctagtgaaaaaacaaaatctctaagaactgtagattttttattaaataaattactttcaaaaaattttaatagatctgatttggtgatagcaataggtggagggattacaggagatctagtgggatttgtagcaagtatctttaaaagaggtttaaactttataagtataccaacaactttattatctcaagtagatgctgccgtcggaggaaaaactggaattaattctagttatggtaaaaacttaataggatctttttctcaaccaaaattagtgatcagcgatacatcttttttaagaagtttaaaaaaaaaagaaatggtatgtggttatgcagaaatattaaaacatgctgttataaaagataaaaaattctttgactggttaaaaaaaaatacaaaatatattttttcacatgataaaaaaaaattaatttatgcaattaaaaaaagttgtaaaattaaattattatttgttaatagagatgttgatgaaaaaaacataagaatggtcctgaattttggtcacacttttgctcacgctatagaagtaaaaaataattattcaaaaaatattactcatggggaagctgtcctagcaggtatgattctagcaactaagctttcagtaattaaaaaagtttgtaatataaaagttttaaaagatcttatggaaatttactcaaaaaataatttgaattacactcttaagaaatataaagcacctaaagaaatcaataaattaattccttatttaaaaaatgataaaaaaaataacgatgaaaaaataaatttcatattattaaacaaaattggcaaaacaactatggctaataaatgcaaaatttccattaacgaattaaaaaaaaatataaggcgacttattcaatactaa

SEQ ID NO: 286926 - DNA, 1348 bp, Unknown
  Bacterial polypeptide expressing nucleotide sequence isolated from the Sargasso Sea
actgcctgaaaagccatggcatcgtcgtctacctgcgcgccaatccgcacgatctgtggctgcgcacgcgcaaggacaagaaccgcccgctgctgcagaccgaagatccgaaggggcgcctcgaagcgctgtacgaggtacgcgacccgctgtaccgcgaatgcgcggatttcgtcatcgagaccggccgtccgtcggtcaacggtctcgtcaacatggtgctgatgcaactcgaactggccggcgtcatcgccaaaccgctacaagcatgattactgtcaacgtcgacctgggcgaccgcgcctacccgattcacattggcgccggcctgatcggccgcgccgagctgttcgccccgcatatcaagggttcgtccgtcacgatcgtcacgaacacgacggtcgatccgctttacggcgatgccctgcgcgcggcgcttgcgccgctcggcaagcgcgtgtcgacggtcgtgctgccggacggcgaggcgtacaagaactgggaaacgctgaacctgatcttcgacggcctgctgaccgaccgcgcggaccgcaagacgacgctcgtcgcgctcggcggcggcgtgatcggcgacatgacgggctttgcggccgcgtgctacatgcgcggtgtgccgttcatccaggtgccgacgacgctgctgtcgcaggtcgactcgtcggtcggcggcaagacgggcatcaaccacccgctcggcaagaacatgatcggcgcgttctaccagccgcaggccgtgatcgcggacatcggcgcgctgacgacactgcccgaccgtgaactggcggccggcgtcgccgaagtcatcaagaccggcgcgatcgccgatgccgagttcttcgactggatcgaggcgaacgtcgacgcgctgaaccgtcgcgatccggctgcgctcgcgcatgcggtgaagcgctcgtgcgagatcaaggcgagcgtggtggcagccgacgaacgcgaaggcggcctgcgcgcgatcctgaacttcggccatacgttcggtcatgcgatcgaggccgggctcggctacggcgagtggctgcacggcgaggcggtcggctgcgggatggtgatggcgggcgacctgtcggtgcggctcggcctgctcgacgaagcttcgcggcagcgcctcgatgcggtgatcgcggccgcgcatctgccgacccgcgggcccgcgctcggcgacgcgcgctacatggacctgatgcgcgtcgacaagaaggccgaggccggtgcgatcaagttcatcctgctgaagcgattcggcgatacgctgatcactcaggcgccggacgaagccgtgtccgctacactggcgcagaccacccgctaa

SEQ ID NO: 286927 - DNA, 757 bp, Unknown
  Bacterial polypeptide expressing nucleotide sequence isolated from the Sargasso Sea
tcgataatttatagaggtataaattttatccaagtaccaacaactctattagcacaagttgattcttctgtaggaggtaaaacagcaataaatgtcagacaaggtaaaaatttaattgggtcattttatcaacctaaagcagtaataactgatgtgagttttttatcatctctttcagaaagagagataaaatgtggattatcagaaattgttaaatatggagtcattggtgatagagattttttttattggttaaaagaaaatgtcgacaacctaaccaaactaaatcaggattgtctaatctatgcaattgaaaaatcttgctcaatgaaggcaaatatagttcagaaagatgaaaaagagagaggagatagagccttactaaattttggtcatacatttggacatgctcttgaaaaacactttacaaaaaatgaggtacttctgcatggagaagctgtagctataggaatggcatatgcttcaaagttttctgcaaatactggcatccttaagaaagatgaatgtgatgagattataaatcttatatctgatataggtttacctatatcaataaatgacataaaaggtgagatcacaaaagaagaaatattaaatttaatgatgtttgacaaaaaaagagtaaaccaaaaaaatacactaattttattgaatagaattggtgaagcttttatcaataatgatatttctgataaagaaataatagatttctttaatatggagaacatccaataat

SEQ ID NO: 286928 - DNA, 456 bp, Unknown
  Bacterial polypeptide expressing nucleotide sequence isolated from the Sargasso Sea
aatgattaaaaaagttttagttggtgatgaaaaatataaggttcttattggtaagaataaaatctttaaggattatcttcccagcgcagtatcaaagaataataaaatatttattattacagataagaatatccctgctggatacattgaactcgtaagaaattcgattccatctaataaagtaattgacttgcttaaaattaagcctggagaggaatcaaaatcatttactaacttccaaatgattctcaataagcttgctaaaaagaaatatgatcgatcagattgtatagttgccattggaggtggcgttgttggagacttgagtggttttgttgctgcaagctttatgagaggtatagattatattcaaataccaacctcacttcttgctcaagttgattcatcagtaggaggtaaaactgccattaatattgagtcaggaaaaaatcttgt

SEQ ID NO: 286929 - DNA, 1141 bp, Unknown
  Bacterial polypeptide expressing nucleotide sequence isolated from the Sargasso Sea
atgaataatatatttttagttggtttttcaggtactggtaaatcggaaattggaccgattgtttctaatatactgtcatacaaatttatagaccttgataccgagatagttaaatatttcaataaatctattgataagatattttcagaagattcggaagaggtatttcgaaagaaagaaagtgaattattagaatattatggatcttcatcacaacttgttatagccactggtggtggggctataatttataatgataattatgaattaatgaaatctaatggtttcattgtttgcttagaagcaactccacaaactatatacaatagacttacaagtgaggatggaaaaaacgaaatacgaccagttctaaaagataatgtaaatatagattccatcacgaatataaaaaacaaaagacaaaaatattatgctaagtctgattggactatacatactgataatctaacaccttaccaatctgctgaagaggtatcaaaaatatacaaaacttttgttaatttagatacttcaaagttcattcagaaagatatgaaagccgatttagctggaatagttacttatactaatggagtttgccctatatattccggttgggatatatataaggatattccgaaaattttttcacgattagatattcaaggcaatttatttctaatttctgataccaatgtatatagcttatatggtcaagaagtagaaaaatatattgcttctacaggtaaacaagttttttctcatgagttagaacctggggaacataataaaacctttgatgcaatatctaatgtctatagttggctagcagaatcaaaggcacaaagacgagatactattgttgccttaggtggtggagtagttggagatatggccggttttgtagcagcaacatataaccgtgggttgggatttatacaaattccaactagcctagcagctatggttgatgcatcggttggtgggaaaacagcagttgatttaccagaagggaaaaatcttgtaggcgctttttatcaacctaaagtggtaattgctgatgtatctactttgaaatctctaccgcatcgtgaaaccatggagggttgggctgaggctattaaacatggattaatattag

SEQ ID NO: 286930 - DNA, 1066 bp, Unknown
  Bacterial polypeptide expressing nucleotide sequence isolated from the Sargasso Sea
atggctgtattaagtgctggaaaaggcgagtctaaatataatatccatatatctaataagaagattccaaaaaatgtccttaataaaattctttcgacaaagaataaagtattaattattactgatagtggagtacctagccaatatttaaaaagtcttaaaaaagatatcaatacaaaaaatcaatattctttgattttagctaaaggtgaaatatctaaatcatttaagtcctatcaaaaaattcttaataagcttgttgaattaaaatttgaccgttcagattatcttatagctttaggtggtggtgttattggtgatgtaacaggttttgcagcatctagttatcttaggggtataggttatattcaaattcccacaacactactgtcacaagtagattcctcagttggaggtaaaacagctgtaaatcttgctcaaggtaaaaaccttattggagctttttataatccaaggttggtattaatttctacatcttttttaaagacgttatcagataaagaatacaaatcaggtcttggtgaaatagtaaaatattctttaattggtaataaaaaattaaagaaaataattgaggaccgatcacaactaatagttgataaagatgagtcaactttaaaagttataatagaagaatctataaaaacaaaatcaaaaattgttacaaaggatgaaaaagagtcgggtataagagccatattaaattttggacacacatttggccacgcaattgaagcgtataataattataaaaatataacgcacggagcagcaattacactgggcatggtgattgcatcaaagttatcattttacgagggacatattaaagattatcagctagacaatatcataaacatgattgagtctcttagactaaatacagatcatagcaaatatagttactctaaattaaaaaaatatatggcatcagataaaaaagttaaggatggaaaacttaatttaattttaatagataaaaaatttaatgcctttaaaacttcaaaatataatatcaaaaatatcaaaagtgccctagattaag

SEQ ID NO: 286931 - DNA, 1111 bp, Unknown
  Bacterial polypeptide expressing nucleotide sequence isolated from the Sargasso Sea
atgaaaatctataaaacaaatgttaaaaatattaacagtagatattctattttaatcgggtttggggctatcaatcaactcaaaaaaaatattagatctgtatgtccaaatacaaaaaaaattgctttaatatttgataaaaaaataccaaataggatgcttaataaagttaaacgtcaaataagagattataaaatctttgtatataaatattctgtcaatgaaaacctaaagtcttttgaaaaggtgaattctttaaatgaaagtctgctcgccaaaaattttaatagaaatgatttgctaattgcagttggtggtggagtaataggtgattttgcaggttttgcagcaagtattttaaaaaggggagtaaactttataaacttaccttccacattgttggcgcaagttgactcatcaataggtggtaaaactggtgtaaattctaaaaaaggaaaaaatttaataggtactttttatcaaccaaaattggttattagtgagcttgaatttttaaaaagtttaccaagaagagaaattatttgtggttttgctgaaatactaaagcattcttttatatctgataaaaaattttttaaatggatagaaaaaaatacaaaaaaaattataaataataaagattataaaattataaattctgcaatatttaaaagttgtaaaattaaaatttcttttgttcaaaaggatgaaaaagaaaaaggagatagagctatcttaaattttggtcacacctttgctcacggaattgaagctgctagtaatttttcaaaaaaaattaatcatggagaagctgtgcttataggtatgtacttggcttcaaagttgtcaaaagataaaaatatatgttcaaaaaaaacattgggtaaaataattaatttttataaggagaataatctacctaatgatttaaaacaattttctttgaaaaataaattagataaaatcattgaacttatgaaaaacgataaaaaaaatgtagactctaaaattagtcttattttattgaagcgaattggtaaaactacaaaaccgggtagaataaaaatgaccccaagacaaattaagttgtcattaaaaaaatttacttaat

SEQ ID NO: 286932 - DNA, 436 bp, Unknown
  Bacterial polypeptide expressing nucleotide sequence isolated from the Sargasso Sea
tatggctgttatatctgcaggtaaaggaaaatctaaatacgatattcatattaatggaagttcccttccaaagaaaatattaaataaacatcttggaaacaaaaacaaaatcttaattgttactgataatggagttccaaaaggacatattaaaaaattaaaaagtagtataaataataaaaatataaatattcttacattaagtaatggtgagaattcaaaatcttttaactcataccaaaaaatattaaataaactttttgagcttaaatttgatcgatcagatatcttgattgcttttggaggtggtatggttggagatatatctggtttttctgcagcaacatatctaagaggaattaaatatattcaaattcctactaccctattagctcaagttgattcatcggttggaggaaaaactgcaataaatgta

SEQ ID NO: 286933 - DNA, 1069 bp, Unknown
  Bacterial polypeptide expressing nucleotide sequence isolated from the Sargasso Sea
aatgaaaaaaataattaaaattaatactaaaagtcataattatagaattattattgaaaaaaactcaatattaaaagagattttaaaagaagaaaaaaaacaaaaaaattttattataattgataaaaaacttttatccctaatacctacattaaaaaaaaataaaaattttaatttaataactattcaggggggagagaaaattaaatctttaaaatattttgaaaatatcactaataaattattaaaattaaaaatagatagaaaatcttgcatcattgcaattggtggaggtactataggtgatttatcaggatttattgcaagcacagttttgagaggtgtaaaatttattttagttccaactacacttctatctcaagttgatagttctataggaggaaaaaatggggttaacacatcatctggaaaaaatttagttggtacattttatcaaccaaataaagtcataattgatcactcaattttaaattttttatcaaaaaaacaaattatctcaggttatgctgaaattcttaaacatgcgataataaaaaataaaaacttttatttttggctaaccaaaaattataagaaaattataaaattagaatcaagatttatatctattgcaataatagaaagtataaaaattaaagcacattttgtccaaatagatgaaaatgaaatattaattaatgataattctagagccatgttaaattttggtcatacctttggacatgctttagagtcaatgaataattataaaagaaatctcagtcatggtgaagctatctctataggtatgtgtctagcaatgaaaatttcatgtaaaatgaatttaatatcaaataataaatacaatgattttattaaccatctaaaagatgtagggctgcctatttacgataaaaggatagaaaaaaatactatatataatgtgatgatgagtgataaaaaaaatactaaaaatctaattaatttaatactcttaaaaaagattggaaaagcattttataaaagaggattaacaaaagaaaaaataaaaagttatcttattaaataa

SEQ ID NO: 286934 - DNA, 583 bp, Unknown
  Bacterial polypeptide expressing nucleotide sequence isolated from the Sargasso Sea
aatgattaaaaaagttttagttggtgatgaaaaatataaggttttaattggcaagaataagatctttaaggattatcttcccagcgcagtatcaaagaataataaaatatttattattacagataaaaatatccccactgcatacattgaactcataaaaaaatcgattccttctaataaagtaattgacttgcttaaaattaagcctggagaggaatcaaaatcatttactaacttccaaatgattctcaataagcttgctaagaagaaatatgatcgatcggattgtatagttgccattggaggtggcgttgttggggacttaagtggttttgttgctgcaagctatatgagaggcatagattatattcaaataccaacctcacttcttgctcaagttgattcatcagtaggaggaaaaactgccattaatatcgagtccgggaaaaatcttgtcggagcctttaagaatccaaagttagtattgatatcttcagccttattaaaatcactcccggagagagaattcaaatctggaatagcagaaataattaagtatgggctaatttataacaagaaaata

SEQ ID NO: 286935 - DNA, 994 bp, Unknown
  Bacterial polypeptide expressing nucleotide sequence isolated from the Sargasso Sea
tctcgctacctgctgaaaaaacgtatccttatcgtcaccaatgaaactgtcgcgcccttgtatcttaagcagatccaagacacgatggcttcgtttggtgaggtaaccagcgtcatccttcccgatggcgaacaattcaaagatttaacgcatttagattccatttttacggctttgctgcaacgcaattatggccgtgattcagtgctggtggcgctcggtggtggagtcattggtgatatgactgggtttgccgcagcctgttaccaacgtggtgtcgattttattcaaattcctaccacgctattatcgcaagtagattcctccgttggcgggaaaaccgctgttaatcatccgcttggcaaaaatatgatcggggctttttatcagccacagatcgtcattatcgatactgaatgcttacagaccttgcccgcgcgtgaattcgctgcggggatggcagaagtcattaagtatggcatcatgtgggatgctgaattttttcaatggcttgagaacaatgttcaaacattgaaaggcttagatactcaagctttggtctatgcgatttctcgctgttgtgagattaaagccgatgtcgtgagccaggatgagaccgagcagggcgtccgcgcgctattaaaccttgggcatacctttggtcatgcgatcgaagccgagatgggctatggtaattggctgcatggtgaagcggttgcggctggcacagtccttgctgcacaaacggctaagtccatgggattgattgatgagtcaattgttcgtcgtattgtgcaattgttccacgctttcgatctgccagtaacagcgccggaatcgatggatttcgacagttttattaaacatatgcgtcgcgataagaaagtcttaggtggtcagatccggctggtactcccgacggccattggtcgagctgatgtctttagccaagttccggaatctaccctagaacaggttatctgctgcgcataaa

SEQ ID NO: 286936 - DNA, 1108 bp, Unknown
  Bacterial polypeptide expressing nucleotide sequence isolated from the Sargasso Sea
atgaaacaatttaaattaaatataaataccaaaagtcaaaaataccccataattattggcaaaggattgtataataatttacataagataattgttaataactctatattttttaataagtgtttaattataattgatagtaaaataaaaaaaaaaattgtattaaaaattttaagtaactttaaaagtaaaaacagaattgtttatttttttaatgcaaatgaaaaaaataaaaatcaaaacaatgtgaataaaatactaaacctactattaaaaaataattttcaaagaaacgactgtttaatatcaataggtggaggtattactggagatgtgtcgggctttgcatcgagtatttacaaaagaggaatgaaatttgttaatgtgccgactacattattggctcaagttgactcgtcaataggaggaaaaactggtgtaaacactgcgcatggaaaaaatttgataggatctttttatcaaccaaatttagttgtgtctgatactaattttttaaagacacttccaaaaagagaaataatttgtggatacgctgaaatgttaaaacactctttaattctaaaaagtaaaaattttacatttttagataaaaatgcttcaaaaatattaaaaatgaaaagtccgtttattgagaaatcaataattgaaagctgtaaaattaaaaaaaaaattgttgaacttgatgaaaatgaaagaaatttaagaaaaattttaaattttggccacacattcgctcatgcatacgaaaccactttaaattactcaaaaaaactaaatcatggggaagctgtacttttaggaataacaagtgcaattaattttagtctgaaaattaaactgctatcaaaaaaagattattttatgataaaaaatcattttactaaaaataatttaccgaataatttaagtaattatttttctaaaaaagatttgcaaaaattagtattatttatgaaaaatgataaaaaaaatacgagtgatcttataaatttgattttacttaaaaaaattggaaatattaaattaaatttaaattttacaaatagaaaaatatacgattttttgaaattacagttaatgaattaat

SEQ ID NO: 286937 - DNA, 1069 bp, Unknown
  Bacterial polypeptide expressing nucleotide sequence isolated from the Sargasso Sea
aatgaaaactagaaatcatatatataaagaagaatataaaattgagtttgataaagatttaggaaaatatctatcaagtctaaacaaaaagtattataaaatttctgtgataaccgatgaaaatatttatagaatttacaagaatttattaaacaaaagatatcttaatgtaatcaaaataaaaccaggagaaaaatcaaaatcgatagaaaataaagtaatgattgaaagaaaattgctaaaactgaagtttaatagaaaatctgcaataattgctttaggaggaggtgtagttggagatttagttggatttgttgcatctactttcttacgaggaatagatttgattcaaataccaacatctttagtagcaatggttgatagctctattggtgggaaaaccgggataaataatgatttgggtaaaaacttaattggaactttttataatcctaagagtattatagttaattcctcattcctaaaaactttacctaaatctgaactaagacaaggccttgcggaaataataaaatacggaatcatctatgatggaaagctttttaaattattagagaaaattaatactaattttatggaaaatagtgagcaaataatcaataagataataaaaaattgcatatgtataaaagttaaagttgtagaagaagattttaaagaaacagataaaagaagtatattaaatttcggccatacagtagggcatggattagaaaaattatattcatacaaaaagtctcatggagattgtattgggttaggaatggcaatcgaggcatcaattgcaaacaaatattttagtttaagtgataataatctaaacaaaatatatacaatactgaataggttttctttaagatgtataaaatatagctcagcacaaattaaaactattatcaaacatatggaactagataaaaaaaataagaccaataaaattactttctcattgcctgacaagattggttcaattatggtaaataataaaaaacacacaattgaagtatctaaagaaaaaattaatagcgttttaaaagaattttcatga

SEQ ID NO: 286938 - DNA, 478 bp, Unknown
  Bacterial polypeptide expressing nucleotide sequence isolated from the Sargasso Sea
tatgacaaaaacaaaaaccataacaattaatttagataaaaattcatatgatatccatataggtgaaaatttagctaatgaaatacctaaaattatttcaccctttgtgaaaaggaataaaatcttcataatttccgatgaaagtcttggatcaataatactaccagaaattaaaaattcatttatcgaggcggggttcgaagtatttgtatcttttgtgcaatccggtgagaaaagtaaaagttttgaaagtttggaatttacaatatcagagcttttagataatggaattgaaagaaacgacacagtaattgctataggtggaggagtaattggtgatttaacaggatttataagttcgataatttatagaggtataaattttatccaagtaccaacaactctattagcgcaagttgactcttctgtaggaggtaaaacagcaataaatgttaaacaaggtaaaaatttaaattgg

SEQ ID NO: 286939 - DNA, 1066 bp, Unknown
  Bacterial polypeptide expressing nucleotide sequence isolated from the Sargasso Sea
atgatcgaaagatatgctggaaaaggaatttcaagatataagatagttatcacagacaaatcaataccatctttagagcttaataaaaacataagtaaaaattctaaggttttaattattactgattcaggtatacctaaaaattatattaaagctttaaaggataaaataaaaaaatcagaagtttatatccacatcataaaaaaaggagaaacatcaaagtctttttcagcttatatagaaatcttagctgaattagttaaactcagaatttctcgaactgacatgattatagcttttggtggaggtgttgtaggagacatagctggatttgttgcatcgtcatatttaagaggtatcaattatattcaaattccaactacacttctttcacaagtagattcttcagtaggtggaaaaacggcaataaatattccagaaggtaaaaatttagttggagcattctataatccaaaacttgttttaatctcaactaaatttcttcaaaccttaaccgataaagaatataaatctggtttgggtgaggttataaagtatgcattaattgataatagaaaactaaaaattattcttgaagaaaatactcaaaaaatactagaccgtgatagcaaaatacttttgagaatcattgaagaatcgattaaaactaaatcaaaaatagttaccaaggatgaaaaagaaaacaatttaagagctatattaaattttggtcatacttttggacatgcaattgaatctaaaacagattataaaaaattaagccatggtgccgctataactcttggaatgataattgcttcaaaaatatctctttatgagggctatataaaagtccatcaacttgacaatattattaatcttattgattcgctgggtctgaaaacagactattcagaatttaaatataacgatctaaaaaaatatattcttagcgataagaaagttgctgatggtaaattaaacttagtcttaataaataataagtttaaagctttcaagacaaataagttttctgaagatagtttaaaaaaagcttttaagtaaa

SEQ ID NO: 286940 - DNA, 1114 bp, Unknown
  Bacterial polypeptide expressing nucleotide sequence isolated from the Sargasso Sea
gatgcgaacccttccggttgaattgccggggagagaatacaagatcgaaatcggtgccggaaatctgcaggactccctgctttccgccatccgtcagtttgatccggaacgggtggtgaccgtgacgaactccactctggaacaattctacccagtccaaatcaacaagattcttgaaccggaaggttatcagaatgacacctgtatcctgcccgacggtgaggcatacaagaacctggaaacactccaacggatttacgatttcctgatggagaaaaaggccaatcggggaaccgttatggtggctttcggaggaggagtgatcggggacatggccggttttgctgcggcgaccttcatgcggggaatcaaaatgatccaggtgccgaccaccctcttggcccaggtggacagcagtgtcggcggtaaaacggcagtgaatcatcccttggggaaaaacaccatcggtgccttcaagcaaccgaatcatgtcagtatcgatcttgagttcctgaaaaccctgccctcccgtgaactccaggcaggctacttcgaattggcaaagcatgggttgacgcatgaccgggaactgctcgattttcttcaagaaggcaaactggaacccttggatttggattttctggaagaagcggttttccggtcctgccgggtgaaggcaagaatcgtggagcaggacgaaaccgaggccggactcagagcaaccctgaattttggtcacaccctcggtcacctgatcgaaacccattgcggttacggaacgtatcttcatggagaagccgtcggaaccggaatgctgtttgcggcgtttctctcaaaacaggaacaacttctggatccgtcttcctgggaaaccatccgggagtttctggaacccaaacttcgatccgtaactcttcccaaactggattatgatctcttcagcagcctcctgcttcatgacaaaaaagccagcagggaagcggtgaacttcatccttcttcgagagattgggagttgtttcatccagaaagaaatgcccctggatttgatttggaaacacttcaccggattctgtaaagagtttcccaatctgtgtcagttgacgactgactga

SEQ ID NO: 286941 - DNA, 408 bp, Unknown
  Bacterial polypeptide expressing nucleotide sequence isolated from the Sargasso Sea
ttaaagctgatgtggtcagccaagatgaaacagagcagggcgtgcgcgcgcttttgaatcttgggcatacctttggtcatgctattgaagctgagatgggctatggtaactggttgcacggtgaggccgttgcggctggcacagtccttgctgctcaaaccgctaagtctttaggattggttgatgagtcaattgtccgtcgtattgtgcaattgtttcaagccttcgatcttcctgtaaaagcgccggaatcaatggatttcgacagttttattcaacatatgcgtcgcgataagaaagtgttaggcggtcagatccggctggtacttccaacggccattggtcgagcagaagtatttagtcaagtctctgaatctaccctagaacaggttatctgctgcgcataaa

SEQ ID NO: 286942 - DNA, 883 bp, Unknown
  Bacterial polypeptide expressing nucleotide sequence isolated from the Sargasso Sea
gaaagaaacaaaaattaccgaacaattgaaaaaattcatacagttttatttgaaaataggtttaatagggaagactgtgttatttcttttggtggaggaattattggagatatagttggtttcgcatccagtacatttaaaagaggcatgaaatacgtaaatattcctacaactttactatcacaagtagactcatccataggaggcaaaacaggagtaaataataaatttggtaaaaatttgattggaagtttttatcaacctgatttagttgtttctgacatgaatattttagcttcattaccagaaagagaaattatttgtggatatgctgaaatattaaaaagtagtattatagataatttttataattttctttatttagacaaaaatttaaataaaatcttaaaattagaatcacctttcattgaaagatctataattaaaagctgtaatttaaaaaaaagagttgtagaaaaagatgagaatgaaaagaactacagaaaggtattaaatttaggtcatacctttgctcattcttatgagtctactttgggcttttctaaaaaattaaatcatggagaagctgtaattttaggtattaaaaatgcagtagaatttagttttaaaagaagatttttatcaaaacaaaaatttaatattattataaatcatattaataaaattgagatgaaaccaaaaattgaaaaattgtttaaaaaaaaacatatatttaaaattatgtattatatgagaagcgataagaaaaataattcaaataaaattaaccttattttaataaaagattttggaaagataatagttaactttcagatcagtccttcagatttaaaaaaatatatttctaacactttaaagtaat

SEQ ID NO: 286943 - DNA, 397 bp, Unknown
  Bacterial polypeptide expressing nucleotide sequence isolated from the Sargasso Sea
actgcaagacggccgaggctcggaagtgcacgatccgattcattacaacgaaagcgcacgaactgaaccgacgcttgggtttattcgtcctacgaataatgcgggggggcttgaggccgggattaccaatggccagcctctggtcattcgcgcagcaatgaaaccgattagtacgctgcgcaagcctcttgagtctgtaaatcttaggacaaagcagcctgagtctgcagcatatgaacgaagtgatgtatgtgcggttagtgcctgtagtgtcattgttgaaaacgttgtggcgttctcaatggcagctgcactaattgataagttcgggggcgacagtatcgaagagatgcgtgcccgctggaagctttaccagcaactcgtggcgagtcgatag

SEQ ID NO: 286944 - DNA, 343 bp, Unknown
  Bacterial polypeptide expressing nucleotide sequence isolated from the Sargasso Sea
ccttggtggttttgaaggaggaatgacaaatggtgaaaatatagaattgacagcttatttgaaaccaataagtactacattgtctccgataaaaagtgtgaatcttgctgaaaaagaagaaacagaaacagtttatgaaagatcagatacatgcgcagttccaagagcagtaccaatttttgaaagtgcaatggccttagaaatattaaatgccgttttaaataagactggtggagacaataagaaagaaataattaagaattttgaaaatattccaaatttgaatattgatgaatttgatttagataacaaagtttggaaatttggatatgaatcggaataa

SEQ ID NO: 286945 - DNA, 171 bp, Unknown
  Bacterial polypeptide expressing nucleotide sequence isolated from the Sargasso Sea
catgtcaggcaatacgtttggaaaaatatttaaaattacgacttttggtgagagtcatggcactgctatgggctgtattttagatggttgtccgcctcaaattgatctaaaaaaagaggatattcagtatgaattagatagaagaaagcctggtcaatcagatgtaactac

SEQ ID NO: 286946 - DNA, 119 bp, Unknown
  Bacterial polypeptide expressing nucleotide sequence isolated from the Sargasso Sea
aggggttagggcaacaccaatagccgaggctatgactgcgttagttataatggaccactttttgaggaacagagctcaaaatgctgacgtcgtaactgaaatccctgatatctcataat

SEQ ID NO: 286947 - DNA, 208 bp, Unknown
  Bacterial polypeptide expressing nucleotide sequence isolated from the Sargasso Sea
taaataccaagcagtcggggcagttatacaattaggaattttagggggtgatataaacaaatggaaagacaaaactatatcctcaaatccatttttttgtcctgacaaatctgtaattaagctctgggaaaaatatttactcggcataagaaaagctggttcatcttgtggagcaataattgagaaaagagcaagaggagtaccttga

SEQ ID NO: 286948 - DNA, 131 bp, Unknown
  Bacterial polypeptide expressing nucleotide sequence isolated from the Sargasso Sea
tatgtttagatttttaacagctggagaatctcacggaccaggcctaactattttggtagaaggcttacctgcagggttacctgtatcagaagatgatataaaaatagatttacaacgaaggcagaaagggt

SEQ ID NO: 286949 - DNA, 304 bp, Unknown
  Bacterial polypeptide expressing nucleotide sequence isolated from the Sargasso Sea
gttgaacgggaattcaattggtagaagactagttcttactagttttggagaaagtcatgggaagtgtattggtgcagttttggacggatgtcctgcaggattagaattagaagagaatgatattcaaaaaatgctagatttgaggaaaccaggacaatcactcgtatccactcaaagaaaagagggagatattgttgaaatcctaactggcacgtatagaggatatacaactggggcgccaattacaatgatcatttggaataaggatcaaaaatctatcgcatatgaaaaattaagaactgaa

SEQ ID NO: 286950 - DNA, 100 bp, Unknown
  Bacterial polypeptide expressing nucleotide sequence isolated from the Sargasso Sea
aatgtcttttaatacatttggaaaaatatttcgattcaccacatggggcgagtctcatggtccagctattggatgtgtagttgacggatgcccaccaaat

SEQ ID NO: 286951 - DNA, 127 bp, Unknown
  Bacterial polypeptide expressing nucleotide sequence isolated from the Sargasso Sea
aaaatggaatgatgaaactataagaaaaaatccatttttttgtccagataaatcaattgtaaaactgtggggagaaatatctattaagtgtaagaaaatctggctcatcatgtggagcaattattga

SEQ ID NO: 286952 - DNA, 145 bp, Unknown
  Bacterial polypeptide expressing nucleotide sequence isolated from the Sargasso Sea
tttgggttgtgatactagcaaatgggatgaaaagtttatttctaaaaatccttttttctgtcctgataaatcaatgataaaactttggggaaaaatatttactgggtataagaaaatcgggctcttcatgcggggcaattattga

SEQ ID NO: 286953 - DNA, 235 bp, Unknown
  Bacterial polypeptide expressing nucleotide sequence isolated from the Sargasso Sea
atgtcatttaatacttttggaaagatatttcgttttactacttggggtgaatctcacgggccagctataggatgtgtggtagatggctgtcctccaaatataaaaataactgaaaaagacatacaaattgaacttaataagagaaaaccgggtcaatcaaaatttacaactcaaagaaaagaagatgataaagtaaatattttatcaggcgtgttgaaggaaaaacaactggtac

SEQ ID NO: 286954 - DNA, 322 bp, Unknown
  Bacterial polypeptide expressing nucleotide sequence isolated from the Sargasso Sea
tatgtctcataatacatttggaagtatttttaagtttactacatggggtgagtctcatggtaaggctattggatgtgtggttgacggaactcctccaatgattgagttgctagaaaaagatattcaattatggctagataaaagaagaccgggacaaaatcaatacacaagcccaagaaatgaacctgaccaagttgaaatactctccggagtttatgagaaggaaggaatccaatatacaactggaacacctatttctatggtgatttataataaagatcaaaaatctagtgattatgatgatacaaaagaaaaatttaga

SEQ ID NO: 286955 - DNA, 199 bp, Unknown
  Bacterial polypeptide expressing nucleotide sequence isolated from the Sargasso Sea
agaagttagagctaaaggtattccaattggtttgggagctccaatttattctaaattagatatggatttagctgcagctatgatgagtatcaatgcagtcaaaggtgtaaatattggatcaggaatgaactctgctcaacttactggtgaacaaaattctgatgagattatacaaaagcggaaaaaaaaccaattttaa

SEQ ID NO: 286956 - DNA, 181 bp, Unknown
  Bacterial polypeptide expressing nucleotide sequence isolated from the Sargasso Sea
gtagcggctggagcaatagggaaaaaagttttagaaaaaaaaattggaaaaaaatataatgttaaaggtgcagtcactcaattaggaattattggttgtgacataaaaaaatgggacgatagatttatatcaaaaaatccttttttctgcccagataagtcaattttaaaactttgggaaa

SEQ ID NO: 286957 - DNA, 202 bp, Unknown
  Bacterial polypeptide expressing nucleotide sequence isolated from the Sargasso Sea
tcttggatgtaacaaaaataattggaatgaaaaagaaataagaaaaaatccatttttttgtcctgataaaaaagcagttaaactctgggaaaaatatcttctggcaataaggaaaaatggttcttcatgtggagcagtaattgaattaaaagcttctggtgtacctgctggtttaggtgctccaatttattctaaattagat

SEQ ID NO: 286958 - DNA, 123 bp, Unknown
  Bacterial polypeptide expressing nucleotide sequence isolated from the Sargasso Sea
tttcagttaagagaagacatgatccatgcgttggaataagagcagtacctattggagaagcaatgatgcattgtgtacttttagatcattacttgatgaatattgcccaatgtaaaaattaat

SEQ ID NO: 286959 - DNA, 190 bp, Unknown
  Bacterial polypeptide expressing nucleotide sequence isolated from the Sargasso Sea
atgtcttttaatacttttggaaaaatatttagatttactacatggggtgagtcacatggtcctgctattggctgtattatagatggatgtcctccgaatatcactttatctgaaaaagatatacaaaaagacatgaatcgaagaagaccgggtaattccaaatttgtatcccaaaggaaagagtcggata

SEQ ID NO: 286960 - DNA, 454 bp, Unknown
  Bacterial polypeptide expressing nucleotide sequence isolated from the Sargasso Sea
tatgtcgatacaggccgttaagggtgtcgatttgggaatgggatttgaggctgcaagtcgaccgggatccgaagtacatgacccaatcgttctggctgaagatcagacccgatcgggtggcattggccgagcatcgaatcgtgctggagggctagaaggaggtgtcacaacaggtcaaccgatcctagtccgaggtgccatgaagccgatctctacgctgcgtaagcgacttcccagcgtggacttgcgagatgggtcggagggtgatgcagcagtcgagcgcagcgatgtatgtgccgttcccgccgctggagtggttggagaggcgatggtagcgcttgtcatcgcggatgcagttctcgaaaagtttggcggtgattctgtaggagaactgcgaagaaacttcgatggttatgtcactcacttgaaggaacgagggttcggcgagcgttga

SEQ ID NO: 286961 - DNA, 97 bp, Unknown
  Bacterial polypeptide expressing nucleotide sequence isolated from the Sargasso Sea
gaggaagacaatcaggctagagaaactgcagctagagttgctgctggagctgttgcaaaaaaaattttggaaaacaaacttgagaaaaaaatataag

SEQ ID NO: 286962 - DNA, 122 bp, Unknown
  Bacterial polypeptide expressing nucleotide sequence isolated from the Sargasso Sea
tatgtctggcaactcatttggaaaactattctccgttacaacttttggtgaaagtcatggaaaggcaattggctgtattgtcgatggatgcccacctggatacaaagtaagcgaaaaagata

SEQ ID NO: 286963 - DNA, 214 bp, Unknown
  Bacterial polypeptide expressing nucleotide sequence isolated from the Sargasso Sea
aatgtcttttaatacatttggaaaattttttcgatttactacttggggtgagtctcacggtccagcaataggatgtgttgttgatggttgtcctccaaatattaagcttaatgtcagagacattcagttagaattaaataaaagaaagcctggtcagtcaaaattcacaacccaaagaaaagaggatgataaagtagaaattttatcaggaaca

SEQ ID NO: 286964 - DNA, 547 bp, Unknown
  Bacterial polypeptide expressing nucleotide sequence isolated from the Sargasso Sea
ttgaacggcaattcaattggcaggagactagttcttactagttttggagagagtcatggaaaatgtattggtgctgttttagatggatgtcctgcaggattagaattagaagaaaatgatattcagaaaatgctagatttgcgaaagccaggtcaatcacttgtatccacccaaagaaaagagggagatgttgtagaaattctaacgggggtatttagaggatatacaacaggtgcaccaattacaatgattatttggaataaagatcagaaatcggttgcatatgaaaaattgagaactgaaatgcgaccaggtcattcagactatccagcatatatgaaatataaaaaattcaatgatcacagaggaggaggaagattttcaggtagactaactgccacacatgtaatgggaggagcaattgcaaggaagttacttaaagatacaataggagttgaaacgaattcctatacatcacaagttggcaaagtgaaaatgaagagagaagctacaaaaaaagaatttaagtcaatttatacaaatgatg

SEQ ID NO: 286965 - DNA, 826 bp, Unknown
  Bacterial polypeptide expressing nucleotide sequence isolated from the Sargasso Sea
agatttagcaggtatgatgaaatatgattttgatgatattagaaatgtttttgaacgatcttcagcaagagaaactgcaatgagagttgctattggtgctatttgcagaaaactattagatgaagtaggaataaccattggtagcagagtatatcaaattcatgatgttgttgatactgaagaagttgaccattctttaacgatgtctcaattaaatgatttagccgataaatcttcagtaagatgtttaaatgaagatgcggaagaaagaatgattaacgttattgatgaagcgaaaagcaatggagattcagttggaggttcttttgaggttattgccaaaggaatgccttatggtttaggaagctatatcaacgctgatggaaagcttcaagcaagaatttcccaagcaatgatgtctgtaaatgcttttaaaggtgtggaggttggagctggttttgcttcatctgcagcatttggaagtgagcttcatgatgaaatattatttgaaaatgacaaaatcactcgttcaagaaataatgctggaggtattgaaggtggaatgagcaatgcacaaccaatacatgtaaaggtgagtatgaaacctatttcaacgctcataaagcctttaagatcgatagatttgaatactatggagcccaagcttgcgcataaagaaagaacagattcttgtgcagttcctgcagcatcaatcattggggaaagtatgttggccattgttcttgcggatgcattgcttgaaaagtttggtggagatagtattaagcagttaaaaaaacacattgaaagcagtggaaaatactaa

SEQ ID NO: 286966 - DNA, 130 bp, Unknown
  Bacterial polypeptide expressing nucleotide sequence isolated from the Sargasso Sea
aatgtcattcaatacttttggaaaattttttaggtttactacatggggagagtctcatggtccagcactaggttgtgtcgttgacggttgtcctcctaatattcctttaaaagaaagtgatattcaaggt

SEQ ID NO: 286967 - DNA, 133 bp, Unknown
  Bacterial polypeptide expressing nucleotide sequence isolated from the Sargasso Sea
atggctagtacttttggaaaaatatttaaaattacatcctttggtgaatcccatggaaaagcaattggtggagttattgatggatgtcctagtaacttcgacactataatctccgtgtacatcctaatatgac

SEQ ID NO: 286968 - DNA, 109 bp, Unknown
  Bacterial polypeptide expressing nucleotide sequence isolated from the Sargasso Sea
tatgtctggaaatacgtttggtaaaatttttaaattgaccacatttggtgaaagtcatggtattgctttgggaggtgtaatagatggttgtcctccaatattgagataa

SEQ ID NO: 286969 - DNA, 631 bp, Unknown
  Bacterial polypeptide expressing nucleotide sequence isolated from the Sargasso Sea
atgagggatttaagaaaagactaccggggtggaggtgagatcactataaatgatccgcacaatcctctgggactgttggctgactgggttcaagaggctaaggaagacgacgtgactgagcccaatgccatgtgcctggcaactgtggatgatgcaggtaaaccccacaaccggatggttcttttaaagtatcttgagggagaagatattggattctttaccaatctggaaagtgacaagtctctggagattcaagtatgccaatcggttgccgcgaccttgtggtggcctgaaatggaaaggcaggttcggatcgaaggaaacgcctcgcccatggatagaagtttagtggaggattattattcatcaaggccccgcaaaagcaggatagcagcatgggcctcggatcagagtcgaccattggaatccagagagcagctactccaaaagtatgaggaacatgaggcaaagtatccgggggatgagatccctttgccccctttctggggaggctacacaatccgagctgatcgagtcgaatactgggccggcaggccaagccggctgcatgacagggttgttttgagtcgtaaagacgcatcatggacacaacagaagctttgcccttaag

SEQ ID NO: 286970 - DNA, 108 bp, Unknown
  Bacterial polypeptide expressing nucleotide sequence isolated from the Sargasso Sea
aatgtcatttaatacttttggaaagttttttcgtttcactacgtggggagagtcccatggaccagctattggctgtataattgacggttgtcctccattattcagcta

SEQ ID NO: 286971 - DNA, 115 bp, Unknown
  Bacterial polypeptide expressing nucleotide sequence isolated from the Sargasso Sea
aatgtcatttaatacttttggaaagatgtttcgttttaccacatggggagaatctcatgggcccgctattggctgtgtggtggatggttgtcctcctaatattgctttatctgaa

SEQ ID NO: 286972 - DNA, 195 bp, Unknown
  Bacterial polypeptide expressing nucleotide sequence isolated from the Sargasso Sea
catgactgctggtgaatcgcatggaaaaggtttgataggtattattgaaggaatacctgccggtcttcagctaactgaagaatacattgcaattgaccttttaagaagaatgccaggtcatggtagaggaaaaagaatgaaaatagaaaaagattttgcagaaattttttcaggagttcgtcatgaacatactct

SEQ ID NO: 286973 - DNA, 94 bp, Unknown
  Bacterial polypeptide expressing nucleotide sequence isolated from the Sargasso Sea
atgtcatttaatacttttggaaagatatttcgttttactaaatggggtgaatcccatggcccagctattggctgtgtagttgacggatgccctc

SEQ ID NO: 286974 - DNA, 170 bp, Unknown
  Bacterial polypeptide expressing nucleotide sequence isolated from the Sargasso Sea
acaaaaagggaataaaacagttttcaaatctaacaatgcgggtggaattcttggtggtatttcaagtggtcaacaaataaaagtatcttttgcagtaaaacctacatcttcaattcttaactcaagaaaaactattgataaatttgaaaactgttttattccctttttgt

SEQ ID NO: 286975 - DNA, 190 bp, Unknown
  Bacterial polypeptide expressing nucleotide sequence isolated from the Sargasso Sea
ggtgttaatattggatctggaattaactcagctcttttaacgggtgaacaaaattccgatgaaatttctcaaaaaggtaaaaaaataaattttaaatctaataatgctggtggtattcttggtggtatatctagtggtcaagatattattgtttcatttgctgttaaacctacttcttcaattttaactt

SEQ ID NO: 286976 - DNA, 157 bp, Unknown
  Bacterial polypeptide expressing nucleotide sequence isolated from the Sargasso Sea
atgagtaatacttttggaaatctttttacattaaccacatttggtgaatctcatggagatagtattggaggaataattgatggctgcccatctggtaaagaaattgatgttgatcttgtacaaaatgatcttaatagaagaaaacctggacaatcaa

SEQ ID NO: 286977 - DNA, 79 bp, Unknown
  Bacterial polypeptide expressing nucleotide sequence isolated from the Sargasso Sea
tagagaaactgctgcaagagttgctgcaggagctatagcaaaaaaagtattagaaaaaaaaatttggaaaaaaatataa

SEQ ID NO: 286978 - DNA, 119 bp, Unknown
  Bacterial polypeptide expressing nucleotide sequence isolated from the Sargasso Sea
gagacatgatccatgcgttctaccaagagcagttcctatggttgatgctatggtcgctttagtacttgctgatcattgctttcttaatcatgctcaatgtggcttaatgaataattagt

SEQ ID NO: 286979 - DNA, 262 bp, Unknown
  Bacterial polypeptide expressing nucleotide sequence isolated from the Sargasso Sea
atgcctggaaatagttttggtgaaatatttaaatttagtacttggggtgaaagtcatggtccggctataggttgtacgcttgacggtgttccttcaaaaattcttataaaagaaaaggaaattcagttttttttaaaccaaagaaaacctggcagtagtaagtttgtaacgcagagaaaagaaagtgataaagtaaaaattttatctggggtttttaataattatacaactggagctcccattgtcttttattattataacg

SEQ ID NO: 286980 - DNA, 922 bp, Unknown
  Bacterial polypeptide expressing nucleotide sequence isolated from the Sargasso Sea
cgaatggcgattgcgattggcttcggaggagtcctgctattgggaagctattgggttctggaggacaaaggagttctgacagtcggtgaactggtgctgttttcgatgctgattcagcggatgctctggcccctgactcggatgggtatcactctagatgagttggaacgcgccaaagccagtgcccgccgaacctttggactgctcgaaacgccgagcaggattgttaatccttcaaatccgctttccctgcccagacccgtcaagggggaaatccgcttcaaccaggtccacttcacctaccgccgagggaaaccggtgttcaacggacttaatttttccgtctcttcaggggaaacccttggcatcgcaggatcaaccggcgcgggcaagtccacccttatcaagatgctactccggttttatgatccgggcagcggatggatctcaatcgacggtattgaccttacaaaaatcagattcagggaaatcagacggaacgtagccctggtcagccaggatgtctacctcttccatggaagtattgccgagaacatcgcgtatgccaatccgcaggctgagatggaacagatccaggctgtgtcccgctcggcccaattccatgaattcgtggaaggccttcctgcagggtatgaaacggtaatcggagagaggggaattcgactatccggaggtcagcgtcaaaggctgagcatcgccagggctgttctgaaagatgctccggtgatggtttttgacgaagcgaccagttcggtcgattccgaaacggaacgggctatccaggaaagtctaatacctatcacccaaggaaaaaccgccctcatcattgcacatcgtctctctactatccgccatgctgaccgtatcctcgtcctcgaccagggtctggtggcggaagaag

SEQ ID NO: 286981 - DNA, 157 bp, Unknown
  Bacterial polypeptide expressing nucleotide sequence isolated from the Sargasso Sea
cagcttgggtattcttggatgcgataccacaaaatggaatgataaaataatttacaaaaatccatttttttgcccagataaatcaatgttaaaaatcttgggaaaagtatttattaagtattcgaaaagcaggatcttcctgtggagcggtaattga

SEQ ID NO: 286982 - DNA, 739 bp, Unknown
  Bacterial polypeptide expressing nucleotide sequence isolated from the Sargasso Sea
ctgcttggatctgatatcgatggggaagcggcagacgatgattctggttattccgtatacctaaacgctgtaggtgatcgggttgcagttggagcaccatttaattctggaacaggatctagtgctggtcatactcgtgtatatgagtatgtaaataactcgtggtcgcagctacaaaatgatatggacggggaagctgcagacgatagttttggacgttcggtagctcttaatagcgatggtgatcgggtcgcagttggcgctacaagtaatgatggcaatggtattaactcgggccatgctcgcgtctacgatttaaaagaagcagctgatggcacggcaccgctaatgaatattgttttagtgaatagcgctggtaatgttatcaacaatggctcaacaactcaagacactgcgcttactgtaatcttcacatcaggggagccaactacaaactttgctgcaaccgacgttacggtttccggtggtgcgatcagtaatttttctgcaactagctcaactgtgtatactgcaacctttactccaactggaggaacaacaacaaattttggcgacgttcctggattttatgaatccggcgataggcagtatgttgctatagctaataatgaaggtgtttcgcaggtcaatttttctgatcttataaacgccgcagcctacctaagcgacgttacagactgttcgtatgctgctggggtgtatggtctgcgtttaacgg

SEQ ID NO: 286983 - DNA, 130 bp, Unknown
  Bacterial polypeptide expressing nucleotide sequence isolated from the Sargasso Sea
atgtcatttaatacttttggaaagatatttcgtttcactacatggggagaatctcatggtcccgcaattggatgtgttgttgatgggtgtcctcctaatataccattatctgaaaaagaaattcaggttg

SEQ ID NO: 286984 - DNA, 177 bp, Unknown
  Bacterial polypeptide expressing nucleotide sequence isolated from the Sargasso Sea
aagaaaagctggatcatcttgtggagcaataattgaagttagagcaagaggagttcctttgggacttggagcaccaatatactcaaaattagatatggatcttgcggcagcaatgatgagcattaatgctgtaaagggtgtaaatattggatcaggaatgaactctgcaatgttaac

SEQ ID NO: 286985 - DNA, 874 bp, Unknown
  Bacterial polypeptide expressing nucleotide sequence isolated from the Sargasso Sea
tggtaataaatataaaggtaaagttactaatatggccgactatggtgcgtttgttgaagttgatggtggtcttgaaggtttagtacatgtatcagaaatgagctgggtttctaaaatacaaaaaccagaaaattatgtttctataggtgatgaagtagatgtgatggtcttagaaatagatactttcaagaaaagattatcattaggtatcaaacaatgcgttgataatccttgggaaaactttgctcaaaaaaatccaattggtactgttttgaagggtaatattcaaaatattactgactttggtatatttgttcaagttgatgaaggccttgatggtcttgttcatttatcggatatcgactggaaggttcctggtgatatagcaataaaagattatagtgtaggtcaagagattgaagcccaaatattagattttgaaattgataaagaaagaatttcattaggtattaagcaactaaatgatgatccgataggtgatgttgaactcaaaaagggttcagttgttacatgtacagtaataaacactgataagggtggtgttgatgttgagattggtgacggttttcctgcttttattaaaagaaatgacttatcgatggataaaacggaacaagatccatcaagatttgaagttggacaaaaagttgatgctaaaattatgagttttgataagagatcgcgaagagtgaccctatcaattaaatcgcttcagatttcagatgaaaaagaagcaattaagcaatatggttcaaaagactctggtgcttcattaggtgatattttaggagaagcctttgacaaaagttcagaaaaacaggatgatgaatccgttgaaaagaatgaagagtaa

SEQ ID NO: 286986 - DNA, 1750 bp, Unknown
  Bacterial polypeptide expressing nucleotide sequence isolated from the Sargasso Sea
tttgtctaatataacggaaacacaacaagatagctcagcgcaagacagtgcaacaaaagaatttgccaagcttttagaggaaagttttgaaattaatcaattgaatgaaggtaagattgtaaaaggaacagtagtttctattgaatctgatttagtaattgttgatgttggtttaaagacagaaggaagaatttcattaagtgaattttcttcacatgatggttcgcataatcttgaaattggtggtcaagtcgatgtttatcttgaaaggattgagaatgcgttaggtgacgcggttttatctagagataaggcaaagcgagaagaaaactgggtgaagttagaagaagaccaaaagaataatgttattgttgagggggtaattaatggaaaagttcgaggaggttttacagttgatattgatggaactcaagcttttcttcctggcagtcaggttgatgtaagacctattaaagatattaggccatttatgaataaacctcagtcatttcatatactaaagatggataaaaagagaggcaatattgttgtttcaagaaaatctgttttatctgataataattctatcgataaatctgagcttcttaataacctaaatgaaggtcaagagattgaaggtattgttaagaatataactgattatggtgcattcgttgatttgggcggcgttgatggcttacttcatgtgacagacatatcatggaagagaatcaataaaccttctgaagcaattagtattggcgataaagtaaaggttaagataattaaaatttctaaagaagatatgaaaatatctcttggtatgaagcaattattagaagatccatgggtaaactcagaaagtaaatatattattggtaataaatataaaggcaaagttactaatatggcagattatggagcttttgtagaagtcgatggtggccttgaaggtttagtgcatgtttcagaaatgagttgggtttctaaaatacaaaaacctgaaaattatgtttctataggcgatgaagtagatgtgatggtcttagaaatagatactgataaaaaaagattgtcattaggtattaaacaatgcgtcgataacccctgggaaaactttgcccagagaaatcctgttggtactgttttgaagggtaatattcaaaatataactgaatttggtatatttgttcaagttgatgaaggtcttgacggattagtccatctatcagatttagattggaaggtgcctggagatatagcaataaaagagtatagcgtaggtcaagagattgaagcccagatactagattttgaaattgataaagaaagaatttctttgggtattaaacaactaaatgatgatccaataggtgacatagatcttaaaaagggctctgtggtcacttgtactgttataaataccgataaaggtggtatcgatgttgaaattggtgatggcttcccagcatttattaagagaaatgatttatccatggataaaacagaacaagacccatcgagatttgaagttggacaaaaagtcgatgccaaaattatgagttttgataaaaaatcacgtaaagttaatttatcaattaaatcactccaaatttctgacgaaaaagaggccattaaacaatatggctcaaaagattctggcgcctcactaggtgatattttaggagaagcctttgacaaaaattcagaaacacaggatgatgaaatcattgaagagaataaagagtaa

SEQ ID NO: 286987 - DNA, 457 bp, Unknown
  Bacterial polypeptide expressing nucleotide sequence isolated from the Sargasso Sea
agtgttaaagctatagaagttggagatggcattgaatcatcaaaaaattatggcacatcagttcaagatcaatatgttttaaatgagaaagaaattaaaaaagaatcaaataatcttggaggttttgaaggaggtatgacaaatggtgaaaatatagaattaacagcttatttgaaaccaataagtactacattgtctccaataaaaagtgtgaatcttgctgaaaaagaagaaacagaaacagtttatgaaagatcagatacatgcgcagtcccgagagcagtaccaatttttgagagcgcaatggccttagaaatattaaatgctgttttaaacaagagtggtggagacaataagaaagaaataattaaaaattttgaaaatatcccaaatttaaatattgatgaatttgatttagataataaagtttggaaatttggttatgaatcggaataat

SEQ ID NO: 286988 - DNA, 106 bp, Unknown
  Bacterial polypeptide expressing nucleotide sequence isolated from the Sargasso Sea
aatgtcttttaatacatttggaaaattttttcgatttactacttggggtgagtctcacggtccagcaataggatgtgttgttgatggttgtcctcctgaatattaa

SEQ ID NO: 286989 - DNA, 286 bp, Unknown
  Bacterial polypeptide expressing nucleotide sequence isolated from the Sargasso Sea
gttgaacggtaattcaattggtagacggctagttttgactagctttggtgaaagtcatggtaaatgtattggagccgttttagatggctgtccagcaggattagagttagaagaaaaagatattcaaaaaatgttagacttgagaaaaccaggacaatctcttgtatctacacaaagaaaagaaggagacatagtagaaattctaacaggtacattcagaggatatacaacaggagctccaattacaatggtgatttggaataaagatcaaaaatcaatagcgtag

SEQ ID NO: 286990 - DNA, 210 bp, Unknown
  Bacterial polypeptide expressing nucleotide sequence isolated from the Sargasso Sea
aatgattagattcttaactgccggtgaaagccatgggcctgagttaacaggtatcattgaaggcttacctgccggatttaacgtaacaaaagactatattgatagttttcttaaaagaagacaaaaaagccaaggttcaggtggaagaatgaatattgagagtgatgaagttgagataacctcgggaataataaacaatttaactactgg

SEQ ID NO: 286991 - DNA, 150 bp, Unknown
  Bacterial polypeptide expressing nucleotide sequence isolated from the Sargasso Sea
aatgtcatttaatacttttggaaagttatttagatttaccacttggggagagtcacatggtccagctattggatgtgttgttgatggctgccctccaaatattccaataaaagatagcgatatacaaaaagaacttaataagagaaaacc

SEQ ID NO: 286992 - DNA, 784 bp, Unknown
  Bacterial polypeptide expressing nucleotide sequence isolated from the Sargasso Sea
ggagcaatagcgatccagatactagagtcaatggggatatcagtatatggttatgtttcatctatagggaaggttgattatagatattcaaatgatttctcattagatgagatgagaaaattaacagatgattcaccggtctcttgtccagatgctgataaatctcagcaaatggaaaaagaaatttcaaatgcaagaaaaaagaaggatacacttggagggtctataactaccattgctacaggtgttcctccaacattaggaagttatgtacattgggacaaaaaattagatgctaaattagcaagaattcttatgtctatacaaagtgttaaagctatagaagttggagatggaattgaatcatcaaaaaattatggcacatcagttcaagatcaatatgttttaaataagaaagaaataaaaaaggaatcaaacaaccttggaggttttgaaggaggaatgacaaatggtgaaaatatagaattgacagcttatttgaaaccaataagtactacattgtctccgataaaaagtgtgaatcttgctgaaaaagaagaaacagaaacagtttatgaaagatcagatacatgcgcagtcccgagagcagtaccaatttttgagagcgcaatggccttagaaatattaaatgctgttttaaacaagagtggtggagataataagaaagaaataattaaaaattttgaaaatatcccaaatttaaatattgatgaatttgatttagataataaagtttggaaatttggttatgaatcggaataat

SEQ ID NO: 286993 - DNA, 209 bp, Unknown
  Bacterial polypeptide expressing nucleotide sequence isolated from the Sargasso Sea
aattattttatcttttgcagtaaaaccaacttcatctattcttacaaacagaaaaacaatagacaaatttggaaagaatacttcgatatctgttaaaggcagacatgatccttgtgttggaattagagcggtacctatcggcgaggcgatgatgaattgtgttttgttagatcactttttaatgcataatgcacagtgcaaaaattaat

SEQ ID NO: 286994 - DNA, 133 bp, Unknown
  Bacterial polypeptide expressing nucleotide sequence isolated from the Sargasso Sea
atgaaagcaaaagggaggcacgatccatgcgttctaccaagagcagttcccatggttgatgctatggtagctttagtacttgctgatcatttgcttctaaatcatgctcaatgtgacttaataaataagtagt

SEQ ID NO: 286995 - DNA, 529 bp, Unknown
  Bacterial polypeptide expressing nucleotide sequence isolated from the Sargasso Sea
atttcaagtaatagcattcaatgttcctttagggcttggaagtcatactcagtgggataataaactagatggtaaaattgctcaatctatggtttcaataaacgcagtaaaaggagttgagattggaaatggttttgaaaatactgaaagatggggcagagaagtccaagatgttattgaaccaaatagttccgatgtaagaaatttttctcaaatttcgaataactctggaggaatagagggtgggatgtctaatggaaatgacattattgtaaatgttgctataaaaccaatagctactatgactagccccttaccttcagtagatataatgactggagaagttgtagaagctgcttataatagatcagacatctgccaagttagcagagcttgtcctgtaggagaagcaatgctcgcattaactttaactgaagctgttcttgaaaaatttggaggagatagtctccaggaaataaaaagaaattatacgtcatacataaagacatttaaagaatatggcaaataa

SEQ ID NO: 286996 - DNA, 577 bp, Unknown
  Bacterial polypeptide expressing nucleotide sequence isolated from the Sargasso Sea
caatcgtgatgccaaaattgagcagatggatgatatcgaacggccacggcctgggcatgccgacttacccggtgcgataaagcacctcggaggcgtgaggcctgtacttgagcgagcaagtgctcgtgaaacagcagctcgtgtcgcagcgggtgcgcttgcacggcaattactctcattgtttggtattgaggtagcaggctgggtgactgagttgggcggtgttgttcttggtggccgagagggtactcttcctgagctacgcgaaattcggaactccagtgagatttattcacttcatccagagcaagatgatcacgttaaggaccttattgatcgtgttgggaaagacggtgatacgctcggaggaatagttgaagttcgtgtagacggactaccaatcggtcttggtacccacactcagtgggaccgaaaactcgacggtcaattagcacacgctgttatggcggtacaagctataaaaggtgttgaaattggcatgggctttgagactgcaagacggccgaggctcggaagtgcacgatccgattcattacaacgaaagcgcacgaactga

SEQ ID NO: 286997 - DNA, 521 bp, Unknown
  Bacterial polypeptide expressing nucleotide sequence isolated from the Sargasso Sea
tatgcttacaagaataaattttttaactgcaggagaatcacatggaagaggccttttgggcattgttgaaggcataccttcaggcttagaaataagtaaagaatacatcgatgtacaattaaaaagacgccagatgggccatggtagaggtggaagaatgaaaatagaaaatgatgcggtcgaaatatggtcgggggttagagatggaaaaactattgcatcacccatcggcttaatcgtaagaaataaagactgggaaaattggaaaaataaaatgtccattgaaaaaatgaaaaaaacaccaaggaaggtaaccctcccccgtcccggtcatgctgatcttgctggagtagaaaaatatggatttgatgatataagaaatgttctagaaaggtctagtgctagagaaaccactatgcgagtagctctcgcctcaatttgtagaaaattactaggagacattggaatacatgttgcaagcagagtcgtgcaaattcataatattgtagatttctcgccaa

SEQ ID NO: 286998 - DNA, 317 bp, Unknown
  Bacterial polypeptide expressing nucleotide sequence isolated from the Sargasso Sea
aatgtcatttaatacttttggaaagctatttcgtttcacaacttggggagagtctcatgggcctgcaattggttgtattgttgatggttgccctccaaacataaatcttaaagagcaagatattcaaatagaattagataaaagaaaaccaggacaatctaaatttacaactcagcgaaaagaggatgacaaagttcaaatattgtcaggagtatttgagggaaaaactacaggaacacccatttcacttataatctacaataaagatatgaggtccaaagattatagtaatattaaagataagttcaggccaggtc

SEQ ID NO: 286999 - DNA, 160 bp, Unknown
  Bacterial polypeptide expressing nucleotide sequence isolated from the Sargasso Sea
gatgtcttttaatacttttggaaaaatatttagatttacaacttggggcgaatcccatggtccagctataggttgtgttgttgatgggtgcccaccaaatatttcaatatccgaaaaagagatacaaaaagatatgaatatgcgtaggccaggacaatca

SEQ ID NO: 287000 - DNA, 193 bp, Unknown
  Bacterial polypeptide expressing nucleotide sequence isolated from the Sargasso Sea
gctgttaagccaacttcttcaattctaacttcaagaaaaacaatagataaatttggaaaaaatacatctatttctgttaaaggaagacatgatccttgtgtcggtattagagctgtgccaattggagaagcaatgatgcattgtgtgcttttagatcactacctgatgaacaaagctcaatgcaaaagttaat

SEQ ID NO: 287001 - DNA, 565 bp, Unknown
  Bacterial polypeptide expressing nucleotide sequence isolated from the Sargasso Sea
aatctatacaaacgaggtaagatgtcctgaaaaatatacagcacaaaaaatgaagagtgttatactagatgcaagaaagaagggagattcattaggaggtataatagaatccattaccactaatttacctgtaggtttaggtgaaccaatttttggttcattagaatcagacatcagtaaagcaattttttcaattccagcagtaaaaggaatagaatttggttcaggttttgcaggttctgaaaagtttggttcagagaacaatgatgcatacgtaatgaaaggaggaaaagtttcaacaaaaaccaacaactcaggagggattttaggaggtatttctaatggcatgccaattacaattagaattgcattcaaacctgcatcgtcaatttctcaaattcaacaaagtgtggacataaaaaagaaaaaatcaataaaactacaagtaggaggaagacatgatccatgtgtagttccacgtgcaccaccagtagttgattcgttagttgcattaacaatagctgatcacgcattacttagtggtactataaaaccaacattgtga

SEQ ID NO: 287002 - DNA, 206 bp, Unknown
  Bacterial polypeptide expressing nucleotide sequence isolated from the Sargasso Sea
ttcaagtatcaacaaagaaggccagaccatagattcggagggtcaatccaaaaagattcaagtcaaaggaagacatgacccctgtgtaggggttagagcaacaccaatagccgaggctatgactgcgttagttataatggaccactttttgaggaacagggctcaaaatgctgacgtcgtaactgaaatccctgatatctcataat

SEQ ID NO: 287003 - DNA, 137 bp, Unknown
  Bacterial polypeptide expressing nucleotide sequence isolated from the Sargasso Sea
tatgtctggcaatacctttggaaaaatttttacagtaaccacttttggcgaaagtcatggtgttgctcttggttgtattgttgatggttgtcctccaggtatgactttgtctgagaaggatatacaagttgatcttg

SEQ ID NO: 287004 - DNA, 228 bp, Unknown
  Bacterial polypeptide expressing nucleotide sequence isolated from the Sargasso Sea
gcggaatatctagtggacaagatgtaattatttcttttgcagtaaaacccacttcatcaattttaaatcaaagaaaaactatcgataaatttggaaaaaatacttctatttcagttaaaggtaggcatgatccatgtgtgggaataagagctgttccaataggagaagcaatgatgcattgcgttatattagatcactatctaatgaataaagctcagtgtagttaaa

SEQ ID NO: 287005 - DNA, 778 bp, Unknown
  Bacterial polypeptide expressing nucleotide sequence isolated from the Sargasso Sea
tatgctaacaaaaattaaatttcttacagcaggcgaatctcatgggcgaggattgcttgggatattagatggcattccatctggccttaaaatagataaagatttcattgacacacaacttacaagacgacaaatgggatacggtagaggaggaagaatgaaaatcgagaaagaccaggttgaaatatggtcaggtgtaagattcggagagactatagcttctccaataggactaatagtaaaaaataaagactgggataattggaaagaaaaaatggctgtagagacgaaagaaaaaatgcctaaaaaagtcactctcccaagaccgggtcatgctgatcttgcaggagtggagaaatatggttttgatgatatcagaaacgtcctagaaagatcaagtgctagagagacaacaatgagagttgcgcttgcctctgtttgtagaaagttattgaaagatattggaataaatgtatcaagtagagttacacaaatccataatattatcgatgattcaaatgtccctgataatatgagtgcagaagagctcaatgaaattgttgataaatcaccactaagatgtttaaataatgaaaaagaacaagaaatgattagtgttattgataaagcaaaagcaaatggtgattcagttggaggagtatttgaagttttcgccacaggattgccttatggcttagggtcatatacccaatgggaccgaaaattacaatctaagataacctctctattaatgagtgtgaatgcatttaaatcaata

SEQ ID NO: 287006 - DNA, 230 bp, Unknown
  Bacterial polypeptide expressing nucleotide sequence isolated from the Sargasso Sea
gcggaaggcggcggtcgtgctggagctcgaggcgtacatggatgcgctgcgcatgggtggcgatccgatcggcgcgcgcatcgacgtcgtcgcgtcgggcgggctggtcggctggggcgagctggtgtacgactgtctcgatgcggacatcgctatggggaggaggagcatcaacgcggtgaagggcgtcgagatgggcgcgggcttcgacagcgtcgggcagcgtggct

SEQ ID NO: 287007 - DNA, 244 bp, Unknown
  Bacterial polypeptide expressing nucleotide sequence isolated from the Sargasso Sea
tctggtggaatacagggaggtatttctaatggaatggatatatattttgatgttgcattcaaaccagttgcaacgataatgaaaaatcaagatacaatcaataaagatggtgataaagtgacaatgaaaggtaaaggaagacacgatccatgtgttcttccgagagcagttccaatagttgaagctatggctgctttaacaatagcagattttgttttattaaacagaacaattaagttttaat

SEQ ID NO: 287008 - DNA, 340 bp, Unknown
  Bacterial polypeptide expressing nucleotide sequence isolated from the Sargasso Sea
atgtcatttaatacttttggaaagctatttcgtttcacaacttggggagagtctcatgggcctgcaattggttgtattgttgatggttgtcctccaaacataaatcttaaagagcaagatattcagaaagaattagataagagaaaaccaggacaatctaaatttacaactcaacgaaaagaagatgataaagttcaaatattgtcaggattatttgaagggaaaactactggaacacctatttctctcataatctataacaaagatatgagatcaaaagattatagtaatatcaaagacaaattcagaccaggtcacgcagattttacttattttaaaa

SEQ ID NO: 287009 - DNA, 97 bp, Unknown
  Bacterial polypeptide expressing nucleotide sequence isolated from the Sargasso Sea
ggacgtcatgatccatgtgtaggtatcagagctgttccagtaggtgaagctatggtagcaacaactattgccgatcattgtttaagatttctctaaa

SEQ ID NO: 287010 - DNA, 283 bp, Unknown
  Bacterial polypeptide expressing nucleotide sequence isolated from the Sargasso Sea
aaacagaataactctggcggcacattaggcggtatctcaagcgggcaggatatttttgcaagcattgctttgaagcctacatccagcattatcaagccggctgagacaattgataaaacaggtgaaaagactgaaattgtaaccaaaggaaggcatgatccctgtgtaggccttagggcaacacccataggcgaagccatgctggcaattgttttaatggatcattttttgagaaatcgagcccaaaatgctgatgtctcaatagaagaaaaaggcgaataaa

SEQ ID NO: 287011 - DNA, 244 bp, Unknown
  Bacterial polypeptide expressing nucleotide sequence isolated from the Sargasso Sea
atgagtagtagttttgggaaaatttttcgtgttagtacttttggagaatcacatggtggtgcagtaggagttatccttgatggatgtccacctaagttaaaaattgatataaatctgatacaaaatgaattagataggcgcagacctggccaaagtgacattacaacacccagaaatgaagaagataaaattgaaatattaagtgggataaaggaagggttaacacttggaactcctaatagca

SEQ ID NO: 287012 - DNA, 130 bp, Unknown
  Bacterial polypeptide expressing nucleotide sequence isolated from the Sargasso Sea
tgttgttaaaccaacctcttcaattttaaatacaagacagacagtgaataaaaaaggaaagaataccaaaatatctgtaagaggtaggcatgatccttgtgtaggaattcttgcaattccaattggggaa

SEQ ID NO: 287013 - DNA, 273 bp, Unknown
  Bacterial polypeptide expressing nucleotide sequence isolated from the Sargasso Sea
aatgtcttttaatacatttggaaaattttttcgatttactacatggggtgaatctcatggtccagccataggatgtgttgttgatggttgtcctccgaatattaagcttaatatcagagacattcagttagaattaaataaaagaaagcctggtcagtctaaattcacaacccaaagaaaagaggatgataaagtagaaattttatcaggaacatttgagggcaaaacaactggtacacctatctcaatgattatcttcaataaagatatgcg

SEQ ID NO: 287014 - DNA, 210 bp, Unknown
  Bacterial polypeptide expressing nucleotide sequence isolated from the Sargasso Sea
atataattgtttcatttgcagttaaaccaacatcatccatattaaagtcaagaaagacaattgataaatttggaaaaaatacatctatatcggttaaaggtaggcacgatccttgtgtaggaattagagctgtgcctataggagaagcaatgatgcattgtgtgcttttagatcactacttgatgaatatagctcagtgtaaaagttaat

SEQ ID NO: 287015 - DNA, 898 bp, Unknown
  Bacterial polypeptide expressing nucleotide sequence isolated from the Sargasso Sea
ttctaactgggaacatttagaggatatacaacagggtgcaccaattacaatgattatttggaataaggatcaaaaatctgttgcatatgaaaaattaagaactgaaatgaggccagggcattcagattatccagcatatatgaaatacaaaaaatataatgatcatagaggaggagggagattttcaggtagattaactgcaacacatgtaatgggaggagcaattgcaagaaagctccttaaagatacaattggtgttgaaacaaattcttacacatctcaaattggtaaagtgaaaatgaaaaaagaggccaccaaaaaagaattcaaatcaatttatacaaatgatgtcagatgtccggataatagtacagccaaaaaaatgaagagtgttatcttagatgcaagaaaaaaaggtgattcattagggggaataattgaatcaattacaaccaatttaccggtgggattaggagaaccaatttttggttcattagaatcagacataagtaaagcaattttttcaatacctgctgttaaaggaatagaatttggttcaggatttgcaggttcagagaaatttggttcagaaaataatgatgcatatgttatgaaaggaggaaaggtttcaacaaagaccaataattcaggaggaattttaggaggaatttcaaatggtatgccaattacacttagaattgcattcaaaccagcatcttcaatttctaaaattcagcaaagtgtggacattaagaaaaagaagccaatcaaactacaagtgggaggaagacatgatccatgcgttgttccacgtgcaccaccagtagtagattcattgattgcgctaacaatagctgatcacgcattactcagtggtttcataagaccaacactgtaa

SEQ ID NO: 287016 - DNA, 220 bp, Unknown
  Bacterial polypeptide expressing nucleotide sequence isolated from the Sargasso Sea
atatctaatggcatggatatatatttcaatgtggcatttaagcctgttgctactataatgaaagatcaaaaaagccttgataaagaaggtaatgagattattgtcaaaggaaagggtagacatgacccttgtgttgtgccaagagcagtgccaattgtagaagcgatgacagcattggttatggcagaccatttgcttaggtcaaaggctttgcattagg

SEQ ID NO: 287017 - DNA, 181 bp, Unknown
  Bacterial polypeptide expressing nucleotide sequence isolated from the Sargasso Sea
atgagtagtagttttggaaaaatttttcgtgttagtacttttggagaatcacatggtggtgcagtgggagttatccttgatggatgtccacctaagttaaaaatagatataaatctgatacaaaatgaattagataggcgcagacctggccaaagtgacattacaacgcccagaaagaaga

SEQ ID NO: 287018 - DNA, 816 bp, Unknown
  Bacterial polypeptide expressing nucleotide sequence isolated from the Sargasso Sea
taaatatcttactgctggtgagagtcatggaccagaattaacagcaattatagaaggcattccatcaaattttgaagtaagtaaaaattacattgacgagtttctagcaagaaggcaaaaatctttaggttctggcggaagaatgaatattgaaaaagatgaggttttaattacttctggtgtcattaataatttatcaactggtggtccgatagcaataaagataatcaataaagactggaaaaattggaaggataaagaaatagaacctttcgtagttcctcgtccaggacatgctgacttagttgggacatttaagtatcaacatgatgatataaggctttcacttgaaagagcaagtgctcgtgaaactgcaattagatgtgcaattggagctatctgtcatcaaatattaaatcaacttggagttgaagttgttggttatgtttcatctattggtgagcaaaagttagaaaatattaatttagaagacataggtcaaattaaaaaacttgttgatgaatctgaagtgtcctgtccagataaggaaacaagtgaattaatgataaatgaaattttaaaggcaagaaagaaaaaagacactttaggtggctctataacattaattgcaaaaaattttcctgcaggttgcggtagctatgttcattttgatagaaagctagatgcaaaacttgcctcatcaatgatgtctgtacagagcgttaaagcggttgaggttggcagtggtatagaggcgtcaaaaaattttggtactgccgtacaagaccaaatagttttaaacgaacaaaatgttga

SEQ ID NO: 287019 - DNA, 346 bp, Unknown
  Bacterial polypeptide expressing nucleotide sequence isolated from the Sargasso Sea
tatgtcagctaatacttttgggaaaatatttcaactaacctcttttggggaatctcatggtccagctattggtggagttattactggttgcccttctggaataaatttaaatttagaggaaatccagagtgaattagatagaagaaaacctggtcaatcaaatatagttactcagagaaaggaagaagatatagtaatttttcattcaggaatttttgaaaataaaactactggatcacctattggatttttaattaaaaacaaagatcaaaagtctcaggactatagtcacattaaagataactataggccttctcatgctgatatggtatatgataaaaaatat

SEQ ID NO: 287020 - DNA, 298 bp, Unknown
  Bacterial polypeptide expressing nucleotide sequence isolated from the Sargasso Sea
aatgtcaaataataagtttggaaaaatatttaattttactacatggggagaaagtcacggtgaagcaataggatgtgttgttgatggtgtgccttctaaaatacctataaatgaagatgatattcaaatatggttaaataaaagaaaacctggtcaatcaaaatttacaactcagagaaaagaagatgataaaataaaaattctatctggtgtttttgatggatttaccacaggtgcgccaatttctctaattatttttaataaagatcaacgttcaaaagattacaaaaaaataaag

SEQ ID NO: 287021 - DNA, 325 bp, Unknown
  Bacterial polypeptide expressing nucleotide sequence isolated from the Sargasso Sea
atggccggaaattcgtttggaaacttatttaaaattaccacatggggagaatcgcacggaaaagccttaggtgttgtcatagacggatgtccagcgggattatctctaagtgaaaaagatatccagcttgaattaaatagaaggaaaccaggacagagccgtctaactacacaaagaaaagaagatgataaaatagaaattttgtccggcgtattcaaaaacaaaacaactggaactccaatttcaatgattgttcgcaatgtagatgcaatctcaaaatcatatgaagattttaaagatatttatagacccaggtcatgctgat

SEQ ID NO: 287022 - DNA, 190 bp, Unknown
  Bacterial polypeptide expressing nucleotide sequence isolated from the Sargasso Sea
agtttgtcgatttgtagtaaaaccaacaagctcaatatctgctgaaagaaaaacaattgatattaatttgcaagaaacaacaatttcaacaaaaggacgtcatgatccatgcgtaggcataagagcagttcccgttggtgaagcaatgcttgctacaactattgcagatcattgtcttcgttatttttga

SEQ ID NO: 287023 - DNA, 507 bp, Unknown
  Bacterial polypeptide expressing nucleotide sequence isolated from the Sargasso Sea
tatgcttacaaaaataaaatttcttactgcaggagaatctcatggtagaggcctacttggcattcttgatggaataccctcaggtttgaaaatagaaaaagaattcattgatatacaacttgcaagaaggcaaatgggatatggaagaggtggaagaatgaagattgaaaaagaccaagttgaaatttggtctggaataaggctaggagaaacaattgcatcaccaataggattgattgttaaaaataaggattgggaaaattggaaagataaaatggctattgaaaaaagagggaaaatgccaaaaaaagttacgcttcctcgtcctggacatgctgatcttgcgggtgttgaaaagtttgattttgatgacataagaaatgttttagaaagatcaagtgctagagagacaacgatgagagttgctattgcatcaatttgcaggaaactacttaaagatattggtataagtgtcgctagtagagtaacacagatacacaatattat

SEQ ID NO: 287024 - DNA, 360 bp, Unknown
  Bacterial polypeptide expressing nucleotide sequence isolated from the Sargasso Sea
aatggctactaattcatttggaaatatatttagatttactagttatggtgaaagtcatggaaaatctataggttgtgtggttgatggggtgccaccgaacattcttttgaaagagagtgatatacagattgatctagataaaagaagaccaggtcaatcaaaatatgttagtcagagaaaagaaacagatagtgttgaaattttgtcaggaatttttgaaaacaaaacaaccggtcatccaattgctttaaatattaaaaatgtagatcaaagaagtaaagattattctgacatttcaaaaaaattcagaccaggtcatgccgatattacttatcaagaaaaatataaaattagagattt

SEQ ID NO: 287025 - DNA, 99 bp, Unknown
  Bacterial polypeptide expressing nucleotide sequence isolated from the Sargasso Sea
tatgtcattcaatacttttggaagattgtttcgagttactacctggggtgaaagccatggttctgcaataggagctacgattgatggatgtcctccagg

SEQ ID NO: 287026 - DNA, 307 bp, Unknown
  Bacterial polypeptide expressing nucleotide sequence isolated from the Sargasso Sea
aatgtcatttaatacttttggaaagttttttcggtttacaacatggggagaatctcatggtcctgctataggttgtgttgtggacggttgtcctccaaacataaagatcagtgaaaaagagatacaggcggagctaaataaaagaaagcctggtcaatctaagtttacaacccagagaaaagaagatgataaggtaaatattttatcaggtgtctttgaggggaaaaccacaggaactccaatttcaatgatcatattcaataaagatatgagatctagagattatgaaactattaaaaataagttt

SEQ ID NO: 287027 - DNA, 166 bp, Unknown
  Bacterial polypeptide expressing nucleotide sequence isolated from the Sargasso Sea
ttgaccagcagacaaactattgataaaaaaggtaagaataccaaaatttcagtcaaaggaagacatgatccttgtgtggggatcagagcggtcccaataggggaagctatgttaagttgtgtgattcttgaccatttactaatgcatagagctcaatgcggttagt

SEQ ID NO: 287028 - DNA, 228 bp, Unknown
  Bacterial polypeptide expressing nucleotide sequence isolated from the Sargasso Sea
ggggtatttcatcaggtcaagaaataattgtttcttttgctgtaaaaccaacatcctctatcttaaaaagtagaaagacaattaataagtttggtaaaaatactactatctctgttaaaggaagacatgatccttgtgttggtataagagcagttccagtaggtgaggcaatgctatcttgcgttttattggatcattacctaatgaataaagctcagtgtgagtaaa

SEQ ID NO: 287029 - DNA, 202 bp, Unknown
  Bacterial polypeptide expressing nucleotide sequence isolated from the Sargasso Sea
tatcaaaacaaaagggcaagacagttaacaaggaaggcaaaagaagtagacatagaagtttctggaagacatgatccatgcgttggcattagagctgttccaattgctgaggccatggtaagtcttgtattggtagatcatttattaattaataaagcacaatgtgccgacgttaaacaggaattaccatttagtgaataaa

SEQ ID NO: 287030 - DNA, 193 bp, Unknown
  Bacterial polypeptide expressing nucleotide sequence isolated from the Sargasso Sea
ttgcataaaattgcaatagtggctggaaacaaatttggtaatcttttttctcttacaacttttggggaatcacatggattagccataggcggaataattgatggttgcccatcgggagtgaaaattgaccaaaaattaattcaactagatcttgataggagaaaacctggacagtcaaaaatagttcgcaaag

SEQ ID NO: 287031 - DNA, 265 bp, Unknown
  Bacterial polypeptide expressing nucleotide sequence isolated from the Sargasso Sea
aatgtcatttaatacatttggaaagatatttcgattcacaacttggggagaatcccatggtccagcaataggctgcgttgttgatggttgtccacccaatatcaaaattagtgaaaaagatatacagtctgaactaaacaaaagaagaccaggtcaatctaaatttacaactcagagaaaagaggatgataaagtaaatattttatcaggtatttttgaaggcaaaactacaggaactcctatatcaatgattatttataataaa

SEQ ID NO: 287032 - DNA, 102 bp, Unknown
  Bacterial polypeptide expressing nucleotide sequence isolated from the Sargasso Sea
tatgtcagggaatacatttggaaaattatttcaagttacaacttatggggagagccatgggaaggcactcggctgcattatagatgggtgtccaccctcatt

SEQ ID NO: 287033 - DNA, 166 bp, Unknown
  Bacterial polypeptide expressing nucleotide sequence isolated from the Sargasso Sea
catgaacagaaaacggtaccccgagacggagaatcgaccaccctcagcgccaaaggtcggcatgacccctgcgtgcttccaagggctgttcccatggtcgaagccatgattaaccttgtattggctgaccattacctgcgccaacagtccagccagctccactgaa

SEQ ID NO: 287034 - DNA, 679 bp, Unknown
  Bacterial polypeptide expressing nucleotide sequence isolated from the Sargasso Sea
tgaaggtcttcctgcaaatttagatattaatgaaaattacatagagaatgacatgtctagacgacaaaaagggtatggctctggaggtcgcatgaagattgaaaaagatagagcagaaatcaaatctggagtaagacatggtaaaactttaggctctccaatatctctatggatagaaaataaagactggaaaaattggacggttccaatgtcagttgaagaggtcaatccttccgaagacattaaagtacaaacaagagtagttccaggtcatgctgattttgcaggctcgttaaaatataatcataaagattcaagaaatgtcttagagagagcgagtgcgagagaaactgctgcgagagtagctgctgcatcaatttgtaggaaatttttatctgaattaggaatagaaataaaatcgagagtaaaatctgttggttgggaaagttctgaaataaatgatattgaatcaatagaatggggatttgttgaaaaatccgaagttagagcatcaaatcaagaagaggacctaaaattcaaaaaagttatcgataaagtaaaaaaggaacgcactacaataggtggagtatttcaggttatagcttttggagtacctttagggctaggtagccatacacaatgggataaaaaaatagatggtaaaattgctcaatcaatg

SEQ ID NO: 287035 - DNA, 903 bp, Unknown
  Bacterial polypeptide expressing nucleotide sequence isolated from the Sargasso Sea
acgtagttcctagacctggacatgcagacttaattggtacggcaaaatatggtttaaatgacataaggttagttttagagagatcaagcgctagagagacagctatgaggtgtgcgataggagcaatagcgttacagatactagagtcaatgggaatatccatttatggttatgtttcatcgatagggaaggttgactatagatatttaaatgatttctcattagatgagatgagaaagttaacagatgattcaccggtctcttgtccagatgctgaaaaatctaagcaaatggtgaaagaaatttcagatgcaagaaaaaagaaggacacattaggagggtctataactaccattgctacaggcgttccaccaacattaggaagttatgtacattgggacaaaaaactagatgctaaattagcaagaattcttatgtctatacaaagtgttaaagctgtagaagttggagatggcattgaatcatcaaaaaattatggcacatcagttcaagatcaatatgttttagatgagaaagaaataaaaaaagaatcaaataatcttggaggttttgaaggaggcatgacaaatggtgaaaatatagaattaacagcttatttgaaaccaataagcactacattgtctccaataaaaagtgtgaatcttgccgaaaaagaagaaacagaaacagtttatgaaagatcagatacatgtgcagtccctagagcagttccaatttttgagagtgcaatggccttagaaatattaaatgccgttttacacaaggctggtggagacaataagaaagaaataattaaaaattttgaaaatatcccaaatttaaatattgatgaatttgatttagataataaagtttggaaatttggctatgaatcggaataat

SEQ ID NO: 287036 - DNA, 211 bp, Unknown
  Bacterial polypeptide expressing nucleotide sequence isolated from the Sargasso Sea
tatgtcttttaatacttttggaaaaatttttaggttcacaacttggggagagtctcatggtccagctattggctgtgtaattgatggttgcccgcctaatatacccatatctgaaaaggatattcaaaaagatatggacaaaagaagacctgggcaatccaaatttaccactcagaggaaagagtctgataaggttataattttatctgga

SEQ ID NO: 287037 - DNA, 800 bp, Unknown
  Bacterial polypeptide expressing nucleotide sequence isolated from the Sargasso Sea
attgctttacgaattaaaaataaagattgggaaaattggaaagataaagatatagaaccgtacgtagttcctagacctgggcatgcagatttaattggtactgcaaaatatgatttaaatgacataaggttagttttagaaagatcaagtgctagagagacagctatgaggtgtgcaataggagcaatagcgatccagatactagagtcaatggggatatcagtatatggttatgtttcatctatagggaaggttgattatagatattcaaatgatttctcattagatgagatgagaaaattaacagatgattcaccggtctcttgtccagatgctgataaatctcagcaaatggaaaaagaaatttcaaatgcaagaaaaaagaaggatacacttggagggtctataactaccattgctacaggtgttcctccaacattaggaagttatgtacattgggacaaaaaattagatgctaaattagcaagaattcttatgtctatacaaagtgttaaagctatagaagttggagatggaattgaatcatcaaaaaattatggcacatcagttcaagatcaatatgttttaaataagaaagaaataaaaaaggaatcaaacaaccttggaggttttgaaggaggaatgacaaatggtgaaaatatagaattgacagcttatttgaaaccaataagtactacattgtctccgataaaaagtgtgaatcttgctgaaaaagaagaaacagagacagtttatgaaagatcagatacatgcgcagtcccgagagcagtaccaatttt

SEQ ID NO: 287038 - DNA, 463 bp, Unknown
  Bacterial polypeptide expressing nucleotide sequence isolated from the Sargasso Sea
cgtacacacaatgggaataataaacttcaagcacgaatatctacaatgatgatgagtataaatgcatttaaaggtatagaaataggtagtggatttaaaagcgcatcccaatttggcagtaaggttcatgatgaaattggataccatgatggaaaatttactcggtacacaaataatgctggaggtgttgaaggtggcatgagtaatgcgcagccaattgttctttggatgtcaatgaaaccaatttctacacttattaaaccgttaagatcggttgatataataactcatgaggaaaaaaatgctcataaagaaagaacggattcatgtgcagttccagcagcatcagttgtttctgaaagtatgctctgcataactcttgtagatgcactccttgaaaaatttggtggagatagtgtcaaccaattaaaatcccatatgaaaagttcggcaaaatattgaa

SEQ ID NO: 287039 - DNA, 285 bp, Unknown
  Bacterial polypeptide expressing nucleotide sequence isolated from the Sargasso Sea
aatgtcatttaatacttttggaaagttatttcgttttacaacatggggagaatctcatggaccagctataggttgtgtgattgatggttgtcctccaaatatcaaaattacagaaaaagatatccaatcagaattaaacaaaagaaaacctggtcaatcaaaatttacaacccaaagaaaagaggatgatagagtaacaatattatctggaatgtttgatggaaaaacaacaggaactccaatttcaatgattatttataataaggatatgagatctagagacta

SEQ ID NO: 287040 - DNA, 573 bp, Unknown
  Bacterial polypeptide expressing nucleotide sequence isolated from the Sargasso Sea
cttttgacgctaatgaaatagagcagaacccagttcgatgtgcagatcctaatgcggctaaagacatggtgcaattaattgaatcgttggccaatgatggtgactctattggtggcgctgtgtcactgttaattcaagggcttccagttggtttgggtgatcctgtatttgataagtttgatgccgttttatctcatgccttgatgtctattggtaccatcaaaggcattgagtttggtgaaggatttggtgcaattaccatgaaagggtctgaacacaatgacgcatttgttcattcaggtggccagatatccactgaaacaaataatgccggtggtattttgggtggaattacgaatggtcaggatttgcgatgtcggctggccattaaaccgccatcatcgattacgaaaactcaatcaacggttaccaaagatggcgatgcaacagaagtgtctgtgactggccgtcatgatccctgtatttgtccacgagtggttcccgttgttgaatcaatggcagctattgcggtgttggatcgtttgttgattcaaaaaacaatttccaattaat

SEQ ID NO: 287041 - DNA, 310 bp, Unknown
  Bacterial polypeptide expressing nucleotide sequence isolated from the Sargasso Sea
tatgtcaggtaacacatttggaaaaatcttttctgtaacgacttttggtgaaagtcatggcgaagctatgggctgcataattgacggatgtccacctaattttgaaataaataatgaagatattcaggtagagcttgatagaagaaagcctggccagtcagatgttactacccagaggaaagaagacgacaaagttgaaattatgtcaggagtttttgaaggaaaaacccttggaacccccatagcattgttaatcagaaatgaagatcagatttcaaaagattattcaaatattaaagatacatttagg

SEQ ID NO: 287042 - DNA, 637 bp, Unknown
  Bacterial polypeptide expressing nucleotide sequence isolated from the Sargasso Sea
tttggggtctggtggaagaatgaatattgaatccgatcaggtagagatttcttcggggataattaataatctcacaactggtggaccaattacattaaaaataaagaacaacgattggaaaaattggaaagataaagatattgatccatatgtagttcctagacctggtcatgctgacctagttggaactgcaaagtatgatgcaaaggatattcgcctaattcttgaaagatcaagtgccagggaaactgcaatgagatgtgcaattggagcaatagctgcacaaatacttgaaaattttgacatacatatttgtggatatgtttcaggaattggatcactggagtatttatataaaggaacagatggcattaaaaatctgcaaaataaagttacagaatcttcagtgtcgtgttcagatgacaaaatttccaaagaaatggaaaatgaaataaaacttgcaagaaaaaagaaggatactcttggaggttctattaccacaattgcaacaggcgtatgtccaacactgggtagtttcgttcattgggatagaaaattagatgcaaatatggcgcgaatttttatgtctatacaaagtgtaaaagcagtacaaattggttccgtgatagaagtatct

SEQ ID NO: 287043 - DNA, 276 bp, Unknown
  Bacterial polypeptide expressing nucleotide sequence isolated from the Sargasso Sea
aatgtcatttaatacttttggaaagatatttcgtttcaccacatggggtgaatctcatggaccagctataggatgcattattgatggttgtccaccaaatatagagattaaagctgatgatattcaaaaagaattaaataaaagaaaaccaggtcaaagtaaatttgtgactcaaagaaaagaaaaagatctagtgcaaattatgtctggagtatttgagggaaaaacaacaggaactccaatatcattaataatttataacgaagatcaaagatc

SEQ ID NO: 287044 - DNA, 139 bp, Unknown
  Bacterial polypeptide expressing nucleotide sequence isolated from the Sargasso Sea
aaaaggtaagaatacaaaaatttctgttaaaggaagacatgatccttgtgtaggtatccgagcagttcctataggggaggcaatgataaattgtgtactacttgatcactacttaatgcacagagcgcagtgcggttaa

SEQ ID NO: 287045 - DNA, 232 bp, Unknown
  Bacterial polypeptide expressing nucleotide sequence isolated from the Sargasso Sea
tttaggtggtatttcctctggtcaagaaatcattgtatcatttgctgttaagcctacctcatctataattaacagtcgtgaaacaattaataaaaaaggaaaaaatactaaaatatcagttagaggtcgtcatgatccatgcgttgggattagagctgttccgataggtgaggcaatgctttcttgtgtactattagatcactacttaatgaatagagctcaatgtggttaa

SEQ ID NO: 287046 - DNA, 228 bp, Unknown
  Bacterial polypeptide expressing nucleotide sequence isolated from the Sargasso Sea
aatgagcctaaattcttttggacatatgtataaggtgacaacctggggcgagagccacggtccaagtcttggcgcaactatagacggatgtcctccgggcatagatatcaatcagaacaaattgcaagtttggatggataaaagaaaaccgggtcaaagcaaatatacaacccaaagaaatgaaccagatagtgttgaaatattgtctggtgtttttgagggtgtttc

SEQ ID NO: 287047 - DNA, 811 bp, Unknown
  Bacterial polypeptide expressing nucleotide sequence isolated from the Sargasso Sea
aatgatcatttggaataaggatcaaaaatcaattgcatatgaaaaattaagaacggaaatgaggccaggacattcagattatccagcatatgtgaaatacaaaaaatataatgatcacagaggaggaggcaggttttcaggtagattaactgcgacacatgtgatgggaggagcaattgcaagaaagctccttaaagatacaattggcgttgaaacaaattcttacacatctcaaattggcaaagtgaaaatgaaaaaagaggccactaaaaaagaattcaaatcaatttatacaaatgacgtcagatgtccggacaataatacagccaaaaaaatgaagaatgttatcttagatgcaagaaaaaaaggtgattcgctaggagggataattgaatcaattacaactaatttaccggcagggttaggagaaccaatttttggctcactagaatcagacataagtaaagcaattttttcaatacctgcagttaaaggaatagaatttggttcaggatttgcaggttcagagaaatttggttcacaaaataatgatgcatatgttatgaaaggaggaaaggtatcaacaaagacgaataattcaggaggaattttaggaggaatttcaaatggaatgccaattacacttagaattgcattcaaaccagcatcttcaatttctaaaattcagcaaagtgtggatattaagaaaaagaaaccaatcaaactacaagtgggaggaagacatgatccatgtgttgttccacgtgcaccaccagtagtagattcattgattgcactaacaatagctgat

SEQ ID NO: 287048 - DNA, 120 bp, Unknown
  Bacterial polypeptide expressing nucleotide sequence isolated from the Sargasso Sea
tatggctggaaacagtttcggtcaagtattcaggataaccacttttggtgaaagccatggagtcgcccttggcgcgattattgacggctgtccgcccggattaagtttgagcgaggcgga

SEQ ID NO: 287049 - DNA, 251 bp, Unknown
  Bacterial polypeptide expressing nucleotide sequence isolated from the Sargasso Sea
aactattcaggcggggtacaagggtggcatatcaaatggtatggatatctactttaatattgcatttaagcctgtttctacaataatgagagatcaggattctatagatagtaaaggaaacaaagtaaaagtgcaaggaaaaggtaggcatgacccatgtgttgtacctagagcagttcctatagttgaggcaatggctgcactagtacttgctgattatttattattaagtaagctctcaaaaatataat

SEQ ID NO: 287050 - DNA, 190 bp, Unknown
  Bacterial polypeptide expressing nucleotide sequence isolated from the Sargasso Sea
attgcccgatttgtagttaaacctacaagttcaataatttctaaaagaagaacaatcgatataaattttaaagaaacatcaatttcaactaaaggtcgtcatgatccatgcgtgggtataagagcagtcccagtcggagaagcaatgttagccactaccattgcagatcactgtcttcgttatttttgat

SEQ ID NO: 287051 - DNA, 211 bp, Unknown
  Bacterial polypeptide expressing nucleotide sequence isolated from the Sargasso Sea
atgtcaggaaacacattcggtaaaatttttaaagttactacttttggtgagagccatgggaaggcgctcggctgcattatagatggttgtcctccaaatcttaaaattgatgagagcgatattcaaagagatcttgatcgaagaaagcctgggcaatcaaaatatactacacaacgaaaagaggatgataagattgagattttatcaggag

SEQ ID NO: 287052 - DNA, 205 bp, Unknown
  Bacterial polypeptide expressing nucleotide sequence isolated from the Sargasso Sea
tattatttgttctttcgcagttaaacctacatcttctattttaagtaatagagaaactatcgatagaaaaggtaaaaatacaaaaatctctgttaaaggtagacatgatccttgcgtaggaatcagagcagttccaattggtgaagcaatgatttcttgtgtgcttttggatcactacttaatgaacagaggtcaatgtggttaa

SEQ ID NO: 287053 - DNA, 209 bp, Unknown
  Bacterial polypeptide expressing nucleotide sequence isolated from the Sargasso Sea
tggcatacaattggaaaattattcactgtgacaacatctggggagagtcatggccccggattatcagctattattgatggatgtcctccagggcttgccatcagtgagactgatattcagaaagaattgaataaaagaaggcccggtcaatccagattcacctcccaaagaaaagagacagatgaagtaagcattatgtctggtgtttt

SEQ ID NO: 287054 - DNA, 151 bp, Unknown
  Bacterial polypeptide expressing nucleotide sequence isolated from the Sargasso Sea
tgaaggaaaagaagtattgatgaaggcaaaagggaggcatgatccatgtgttctacctagggcagttccaatggttgatgctatggtagctctagtactggctgatcatttgcttcttaatcatgctcaatgtggattaactaataattaa

SEQ ID NO: 287055 - DNA, 879 bp, Unknown
  Bacterial polypeptide expressing nucleotide sequence isolated from the Sargasso Sea
aaacctaaaaaagaacataagaaggttactatgcctcgtcctggacatgctgatttagctggtatgatgaaatacgactttgatgatattagaaatgtattagaaagatcttcagcgagagaaaccgctatgagagttgcaataggtgcaatatgcagaaaattacttgaagaggtcggaatatctattggaagcagggtttatcaaattcatgatgtagtggattctgatgaagtcgatttatctttgaccatgtcgaaattaaatgatttagccgacaagtcatcagtgagatgccttaataaggatgctgaaaatagaatgattaatgtaatcgatgaagcaaaaagtaatggtgattctgttggtggttcatttgaagttattgccaagggaatgccatatggcctaggaagttatataaatgctgatgggaagcttcaagcaaggattactcaagcaatgatgtctgtcaatgctttcaaaggtgtagaagtaggagctggatttgcttcatctgcagtatttggtagtgagcttcacgacgaaattttatttgaaaatgaaaagattactcgttcaagaaataatgctggaggaattgaaggcggaatgagtaatgctcaacctattcatgttaaagtaagcatgaaacctatctcaactcttataaaaccgcttagatcaatagatcttaacacgatggaacctaagcttgcgcataaagaaagaactgactcttgtgccgttccagctgcatctattattggggaaagcatgcttgcaattgttcttgcagatgcattgcttgaaaaatttggtggagatagcattaaacagttaaaaaaacatattaaaagcagtgaaaatattaatcaa

SEQ ID NO: 287056 - DNA, 151 bp, Unknown
  Bacterial polypeptide expressing nucleotide sequence isolated from the Sargasso Sea
acaattaataaattttggaaaaaatacaacgatatctgtaacaggaagacatgatccatgtgttggtataagagctgtacctgttggtgaggcaatgatgaattgtgttttattggatcactatctgatgaacaaagcacaatgtcattaa

SEQ ID NO: 287057 - DNA, 235 bp, Unknown
  Bacterial polypeptide expressing nucleotide sequence isolated from the Sargasso Sea
tcttggtggtatttcaagtggtcaacaaataaaagtatcttttgcggtaaaaccgacatcttctatacttaactcaagaaaaactattgataaatttggaaaaaatacaaatatatcagttcgaggtcgccatgatccttgtgttggaattagagcagttccaataggtgaagcgatgatgcattgtgttttattggatcattttttgatgcacaaagcccagtgcgagtcttaa

SEQ ID NO: 287058 - DNA, 481 bp, Unknown
  Bacterial polypeptide expressing nucleotide sequence isolated from the Sargasso Sea
caagattccaattggagcaaaaattcttgtaagagtagaaggccttatgcctggaatcggttcgcctgtattttctaaactcgatgctgagttagctaaatctatgatgggtgtaaatgctgttaaagccgtggagctagggtctggtactagagttgtagaaatgaaaggttccgagaacagagatctattaaagaaagatggttttgagactaataattcaggaggaattctgggtggaatatcaaatggagatgatattgatatattcgtatcattgaaaccaacttcaagtatctcacagaacacaaagacaattgatacaaaaaataatgaagttgatttacaagttaaaggtagacatgatccatgcgttgggctcagagcaacaccaattctagaagcaatggcagcaatgtgcattctagatcagatactgctagatagaggacaatgctccaatgttgatagagacctttga

SEQ ID NO: 287059 - DNA, 224 bp, Unknown
  Bacterial polypeptide expressing nucleotide sequence isolated from the Sargasso Sea
tatttcatcaggacaagatattcaattatctgttgccattaagcctacatcatcaattttaaaatcacaaaaaacaataaatgataaatataaaaatactactatatctactcgaggtagacatgatccatgcgttgggattagagctgttccaatagttgaagcaatgacagcatgtgtattggctgatcatttgatgagaaataaagctcaatgcggctaga

SEQ ID NO: 287060 - DNA, 310 bp, Unknown
  Bacterial polypeptide expressing nucleotide sequence isolated from the Sargasso Sea
aatgtcatttaatacttttggaaagatatttcgtttcacaacatggggagaatcacatggtcctgctataggatgtatagttgatggttgcccaccaaatatcaatgtaaaagaacaagatatccaatcagaattaaataaaaggaggcctggccaatcaaaatttaccagtcaacgtaaagaggatgatagagtaaaaattctatctggaatatttgaaggaaaaacaactggaactcctatttctttaataatttacaataaagatatgagatcaagagattacgaaacaattaaaaataaatttaga

SEQ ID NO: 287061 - DNA, 211 bp, Unknown
  Bacterial polypeptide expressing nucleotide sequence isolated from the Sargasso Sea
ggaatatctactggacaagaaataaatgtatcatttgcagtaaaaccaacatcatctattttgtcatctaggaaaacaatcgatagatttgggaagaatacgacaatatctgtaaaaggaagacacgacccatgtgttggaattagagcggttcccttgggcgaggcggtgatgccttgtgtaattcttgatcactatttgatggatgcag

SEQ ID NO: 287062 - DNA, 160 bp, Unknown
  Bacterial polypeptide expressing nucleotide sequence isolated from the Sargasso Sea
aatgtcaggaaattcgtttggaaaatcttttgttgtgaccacttttggtgagagtcacggggttgcgcttggctgtatagtagatggttgccctccaggacttgagctgactgccgaagatatacaaatggatttaaataaaagaaaacctggaagttcc

SEQ ID NO: 287063 - DNA, 181 bp, Unknown
  Bacterial polypeptide expressing nucleotide sequence isolated from the Sargasso Sea
accaacttcgtcaataattaataatagggaaacggtagacaaaaaaggaaagaatacaaaaatctcagttaggggacgtcatgatccatgcgttggtatcagggccgttcctataggagaggcaatgctttcttgtatattgctagaccacttccttatgcatagagcacagtgtggttaa

SEQ ID NO: 287064 - DNA, 265 bp, Unknown
  Bacterial polypeptide expressing nucleotide sequence isolated from the Sargasso Sea
tatgagtagtagttttggaaaaatttttcgtgttagtacttttggagaatcacatggtggtgcagtaggagttatccttgatggatgcccaccaaagttaaaaatagatataaagctgatacaaaatgaattagataggcgtagacctggacaaagtgacattacaacaccccgaaatgaagaagataaaattgaaatattaagtggaataaaggaaggtttaacacttggaactccaatagcgatgttggtaagaaacaaggat

SEQ ID NO: 287065 - DNA, 394 bp, Unknown
  Bacterial polypeptide expressing nucleotide sequence isolated from the Sargasso Sea
gagttagctaaagcgctaatgagtgtaaatgctgtcaaagcaattgaagttggaacaggtgtggatagtgtcacaatgagaggttcagaaaatagagatatcatttcagtagatggctttgaaacaaataattcaggaggaattttaggaggtatttcaaatggagatgatataaatatatttgcttcacttaaaccaacatcaagcatttcccaaaaaaccacaactaccaatatagacaatcaaaaagtagatcttgaagtcaagggaagacatgacccttgtgtaggtttaagagcagctccaattcttgaagcaatggtagcgcttacaatcattgaccacatgttaattgataaagcacaatgttttgatgtggagcgtaaaacgtaat

SEQ ID NO: 287066 - DNA, 281 bp, Unknown
  Bacterial polypeptide expressing nucleotide sequence isolated from the Sargasso Sea
tgtttctggaaagccagaattcactagtaataactctgggggtattttgggaggattatccagcggacaagatataatcgctcgatttgctgtgaagccgaccagctcaattttgaacaccttgcaaacggtaaccgtcaaaggtgaagaaactgaggtctcaacaaagggtcggcatgatccttgtgttggcataagggcagttcccgtaggggaagcgatggtagcatgttctctagccgaccattttcttcgagctaaggcaatacaggaaagttaaa

SEQ ID NO: 287067 - DNA, 221 bp, Unknown
  Bacterial polypeptide expressing nucleotide sequence isolated from the Sargasso Sea
ttcttctggccaagatattattgcgtctttcgccgtaaaaccgacttcatcaattttgaataccagagaaactataaataaagcaggaaaaaatacaaaaatctcagttaagggcagacatgacccatgcgttggaattagagccgtgcctataggggaggcaatgatgtgttgcgtgatattagatcactttttaatgaatagagcgcagtgcggttaaa

SEQ ID NO: 287068 - DNA, 271 bp, Unknown
  Bacterial polypeptide expressing nucleotide sequence isolated from the Sargasso Sea
atgtctggtaattcttttggacatttatttaaatttacgacgtttggtgagagccatggagtagcaattggctgcattatagatggttctcctccaaatattccccttcaagtcgaagatattcagtactggcttgataggcgtaaacctggaaatagtaagtacacatctcaacgaaaagaaacagaccaagtagagatattatcagggatctttgatggtaaaacgaccggggcacctatagcactattgataagaaatgttgatgcaa

SEQ ID NO: 287069 - DNA, 253 bp, Unknown
  Bacterial polypeptide expressing nucleotide sequence isolated from the Sargasso Sea
tatggcaggaaatacatttggttctttatttaaattaaccacttttggtgaatcacacggtaaagggattgggggaataattgatggttgtccttcgggtcttacaatagatatcagtaaaattcaaaatgatctagatagacgtaaacctggtcaatccaaaattgtaactcaaaggaaagaacctgatcaagttgaagttttatctggtatttttaatggaataactactggtaccccattagcatttgta

SEQ ID NO: 287070 - DNA, 229 bp, Unknown
  Bacterial polypeptide expressing nucleotide sequence isolated from the Sargasso Sea
atttctagcaacccatttttttgtcctgataaaactgtaattaaactttgggaaaaatatttacttgggataagaaaagctggatcatcttgtggagcaataattgaagttagagcaagaggagttcctttgggacttggagcaccaatatactcaaaattagatatggatcttgcggcagcaatgatgagcattaatgctgtaaagggtgtaaatatggatcaggaag

SEQ ID NO: 287071 - DNA, 346 bp, Unknown
  Bacterial polypeptide expressing nucleotide sequence isolated from the Sargasso Sea
atgatctgtttacgttttcacacagccggagaatcgcacggtaaagcgctgacagcgctattggagggtgttccttctggcctaggtctcgatgtagcgcgcgacgtagatccggaactcgcgcggcgccaaagagggtacggccgaggccgccgtatgcagattgaaaaagatcatgtggaacttctaagtggagtccgactcggtgaaacgttgggctcaccgatctcgatggttattcgaaatcgggactgggaaaactggaccacggcgatggcccacgaagcgccacccaaagacgtgaatctgaaatcgctcaaacctcactatctgccacgacctggcc

SEQ ID NO: 287072 - DNA, 588 bp, Unknown
  Bacterial polypeptide expressing nucleotide sequence isolated from the Sargasso Sea
ttagatgtttggatactagagctgaaaaagaaatgatagacataattgataaagcaaaaaaggcgggtgattctgttggaggtgtatttgaggttattgctacaggagttccgtatggccttgggtcttacactcaatggaataataaacttcaagcacgaataacaacaatgatgatgagcataaatgcttttaaaggaatagaaataggcagtggatttaaaagtgcatcccaatttggtagtaaggttcatgatgaaattggatatcatgaaggaaagtttactaggtatacaaataatgctggagggattgagggtggtatgagcaatgcgcagccgattgttctatggatgtcaatgaagccaatttctacacttattaaaccattaagatcagttgatataataactcatgaggaaaaaaatgctcataaagaaagaacggattcctgtgcagttccagcagcatcagttgtttctgaaagcatgctctgcataactcttgtagatgcgcttcttgaaaaatttggtggagatagtgttaaccagttgaaatcgcatatggaaagttcggcaaaatattgaa

SEQ ID NO: 287073 - DNA, 298 bp, Unknown
  Bacterial polypeptide expressing nucleotide sequence isolated from the Sargasso Sea
tatgtcatttaatacttttggaaaaaattttcgatttacaacatggggggaatctcatggggaagctattggatgtgtaattgatggatgtccacctctaataccgcttaacgaaaaggatattcagaaatatttagatatgagaaagccaggaaaaaaccgctttgttactcaaagaagagaggatgacaaagttactattttgtctggtgtctttgaaggaaaaactactgggactccaataatgttgttaatttggaacaaggatcagaaatctaaagactataatgatataaaa

SEQ ID NO: 287074 - DNA, 178 bp, Unknown
  Bacterial polypeptide expressing nucleotide sequence isolated from the Sargasso Sea
ccccaggacaccgtcgacgagcaaggacaagacgccgagttgatcgggcgaggccgtcatgatccctgcgtactgccccgggcggttccaatcgtcgaggcaatgactgcgctcgtcttgctcgaacaccgcatgcggcatcatgcccagtgcaggtcctttccctttcagcaataga

SEQ ID NO: 287075 - DNA, 223 bp, Unknown
  Bacterial polypeptide expressing nucleotide sequence isolated from the Sargasso Sea
catgtcttttaacagctttggtcatatgtttagaatttccacttggggcgagagccatggaccggcgataggagtttttattgacggctgcccatcgaacataagacttgaagaggaaagtatacagaccttcctagaccggcgcaaacccggcattaacaagttcacttctcaaagaaaagaacccgacaaagtaaaaatattatcaggagttttcgagggg

SEQ ID NO: 287076 - DNA, 484 bp, Unknown
  Bacterial polypeptide expressing nucleotide sequence isolated from the Sargasso Sea
tatgagtagcagttttggtaagatctttcgtgtaagtacttttggagaatctcatggcggtgcagttggagttattcttgatgggtgtcccccacaattaaaaattgatgttgatctaatacaacatgaattaaataggcgtaggccgggtcagagtaaaattacaactccaaggaatgaagatgataaattagagatattaagtgggttaaaagaaggaaaaactcttggtacgccaattgcaatgttagttagaaataatgatcaaagaccaggagactataataatttggagcaagtatttaggccatctcatgctgatggaacctatcatttaaagtatgggattcaagcaggatcagggggtggcagggcatctgctagagaaactataggaagagttgcttctggtgcgattgcaaaacaaatattaaaaaccttttgtaatactgaaatcctttcttgggtcaaacgcatacatgat

SEQ ID NO: 287077 - DNA, 238 bp, Unknown
  Bacterial polypeptide expressing nucleotide sequence isolated from the Sargasso Sea
tggtattttgggcgggatatcttctggtcaagatattattgcttcgttcgcagttaaacctacatcctcaattttaaatagcagagaaacaattaataaaaagggtaaaaatacaaaaatttctgttggtggtaggcatgatccctgcgttggaatacgagctgttcctataggtgaagcaatgatggcatgtgtactactagaccattacttgctaaatagagctcaatgcggataa

SEQ ID NO: 287078 - DNA, 151 bp, Unknown
  Bacterial polypeptide expressing nucleotide sequence isolated from the Sargasso Sea
tactgttaatcgcgatggtaaagcaataaaacttaaagccaaaggtcgacatgacccctgtgttttaccaagagcagtcccaatggtagaggctatgattaatcttgtattagctgatcattatttgcgccaacaaaaaaactgcctttaa

SEQ ID NO: 287079 - DNA, 895 bp, Unknown
  Bacterial polypeptide expressing nucleotide sequence isolated from the Sargasso Sea
acctaaaaaagaacataagaaggttactatgcctcgtcctggacatgctgatttagctggtatgatgaaatacgactttgatgatattagaaatgtattagaaagatcttcagcgagagaaactgctatgagagttgcaataggtgcaatatgcagaaaattacttgaagaggtcggaatatctattggaagtagagtttatcaaattcatgatgtagtggattctgatgaagtcgatttatctttggacatgtcgaaattaaatgatttagctgacaagtcatctgtgagatgccttaataaggatgctgaaaaaagaatgattaatgtgattgacgaagcaaaaagtaatggtgattctgttggtggttcatttgaagttattgctaagggaatgccgtatggcttaggaagttatatcaatgctgatgggaagcttcaagcaagaatcactcaagcgatgatgtctgtcaatgctttcaaaggtgtagaagtaggagctggatttgcttcatctgcagtatttggtagtgagcttcacgatgaaattttatttgaaaatgaaaagattactcgttcaagaaataatgctggaggaatcgaagggggtatgagtaacgctcaacctattcatgttaaagtaagtatgaaacctatctcaactcttataaaaccgcttagatcaatagatcttaacacgatggaacctaagcttgcgcataaagaaagaactgactcatgtgccgttccagctgcatctattattggggaaagcatgcttgcaattgttcttgcagatgcattgcttgaaaaatttggtggagatagtattaaacagttaaaaaaacatattaaaagccagtggaaaaatattaatcaactataccttatagga

SEQ ID NO: 287080 - DNA, 208 bp, Unknown
  Bacterial polypeptide expressing nucleotide sequence isolated from the Sargasso Sea
atgtcttttaatacttttggaaaattttttaggttcacaacttggggggagtctcatggtcctgctattggttgtgtggtggatggatgccctccaaatataccacttaacgaaaatgacattcaaaaagatatgaataaaaggagacctgggcaatctaagtttacaactcagagaaaggagtcagacaaagtttctatcttatcag

SEQ ID NO: 287081 - DNA, 207 bp, Unknown
  Bacterial polypeptide expressing nucleotide sequence isolated from the Sargasso Sea
aatgggcgacagtttcggacaccttttccgcatcacaacttggggagaatcccatggcggcggagttggagtggtaattgatggctgccctgcaggattggaaatcagtgaatcggaaattcaatatgaactggaccgtcgtcgtccaggccaaagtaaaatcaccactcagcgtaaggaaagcgattctgcacggattcttttcgg

SEQ ID NO: 287082 - DNA, 162 bp, Unknown
  Bacterial polypeptide expressing nucleotide sequence isolated from the Sargasso Sea
aaattttgaaggggaaagaagtattgatgaaagcaaaagggaggcatgatccatgcgtactaccaagagcagttcctatggttgatgcaatggtcgctttagtacttgccgatcatttgctcctaaatcatgctcaatgtggcttaatgaataatttgtaat

SEQ ID NO: 287083 - DNA, 729 bp, Unknown
  Bacterial polypeptide expressing nucleotide sequence isolated from the Sargasso Sea
tagggaaacagcagcaagagtcgctgcagctgcagtttgtaagaaatttctaaatgaaattggtataaaaataaaatctagggctaaatctgttggctgggaaaaatctgaaattgaaaatatagatgaaatagattgggattttgtagaaaattcagaggttagggcttcaaatgctaatgaagatattagcttcaaaaaagttatagataaagtaaaaaaagaaagaacaacaattggaggtatatttcaagtaatagcattcaatgttcccttagggcttggaagtcatactcattgggataataaactagatggtaaaattgctcaatctatggtttcaataaacgcagtaaaaggagttgagataggaaatgggtttgaaaacactgaaagatggggcagagaagtccaagatgttattgaaccaaatagttccgatataagaaatttttctcaaatttctaataactctggaggaatagaggggggaatgtctaatggaaatgacattattgtaaatgttgctataaaaccaatagcaactatgactagtcctttaccatcagtagatattatgactggagaagtagtagaagctgcttataatagatcagacatctgccaagttagcagagcttgtcctgtaggagaagcaatgcttgcattaaccttaactgaatctgttcttgaaaaatttgggggagatagtattcaggaaataaaaag

SEQ ID NO: 287084 - DNA, 174 bp, Unknown
  Bacterial polypeptide expressing nucleotide sequence isolated from the Sargasso Sea
caattcttacctctagaaaaactatagataaatttggaaaaaatacttcaatatctgttaaaggcagacatgatccttgtgtgggtatacgagctgttccaataggcgaagctatgatgcattgtgttttgttagatcactatttgttaaatagcgcacaatgtaaaagttaat

SEQ ID NO: 287085 - DNA, 176 bp, Unknown
  Bacterial polypeptide expressing nucleotide sequence isolated from the Sargasso Sea
ttcaattttgaattcaagaaaaacaatagacaggtttggaaaaaatacaaatatatcagtaaaaggaagacacgacccatgtgtaggtattagagcggtaccaataggcgaagcaatgatgcattgcgttattttagatcattacttaatgaacaaagctcaatgccaaagctaat

SEQ ID NO: 287086 - DNA, 575 bp, Unknown
  Bacterial polypeptide expressing nucleotide sequence isolated from the Sargasso Sea
tatgaaccgattgggaaatcatttaacctatacaacttggggggaatcccacggatctgctattggagtggttattgatggcttcccttctgggatcactctgaatgaagatgcaattgctgcagacatgcaaaggcgcgcacctgggaaagcacaaaccagtccaagagttgagagcgatcgagtggagattctctctggagtgtaccaagggaaaaccaccggcgcgcctatacatctgatgatcgctaacaaaaatgcccacaaaaatgactatgagaccatcaaaaacgtttttcgacctggacatgctcaatacacctatgcacaaaaatacggccacttcgacccgtatggagggggaagagcatcggctcgggagactgcctgtcgagtggctgctgcagccatagctcgtcaatggattgaacccatgggcgttcaagtacgatcttatttacaacaagtaggtccgatatccatacctatgattactcaagcccatccattgccatcactggcattagagcatggtcgtttcccatgcccggagccaattgttgccaaatcaatgc

SEQ ID NO: 287087 - DNA, 213 bp, Unknown
  Bacterial polypeptide expressing nucleotide sequence isolated from the Sargasso Sea
gaggtttttctgttgaatttaactggagaaactaatgccgacgaaatgagaataaataattcaggcaaagtaaagttcctttcaaatcatgcaggaggaatactaggaggaatctcaagcgggcaagatattatttgcagatttgttgtcaaaccaacaagttcaatactaaagtccagaaaaactattgatataaatcatactgaaacaaat

SEQ ID NO: 287088 - DNA, 141 bp, Unknown
  Bacterial polypeptide expressing nucleotide sequence isolated from the Sargasso Sea
ctggaagacatgatccatgcgttggcattagagctgttccaattgctgaggccatggtaagtttagtattggtagatcatttattaattaataaagcacagtgtgctgatgttaaacaggaattaccatttagtgaataaa

SEQ ID NO: 287089 - DNA, 847 bp, Unknown
  Bacterial polypeptide expressing nucleotide sequence isolated from the Sargasso Sea
tatgcctcgtcctggacatgctgatttagctggtatgatgaaatatgattttgatgatattagaaatgttttagaaagatcttctgcaagagaaactgcaatgagagttgcaattggtgctgtttgcagaaaactattagatgaggtaggaataaccattggtagtagggtatatcaaattcatgatgttgttgatactaaagaagctgaccactctttaactatgtctcaattaaatgatttagctgataaatcctcagtacgatgtttaaataaagatgctgaagaaagaatgattaaggttatagatgaagcgaaaagcaatggagattcagttggaggttcttttgaggttattgccaagggaatgccttatggcttaggaagttatattaacgccgatggaaagcttcaagcaagaatttcacaagcaatgatgtctgtgaatgcttttaaaggcgtagaggttggagctggttttgcttcatctgcggcatttggaagtgagctccatgatgaaatattatttgaaaatgataaaatcacacgttcaaggaataatgctggaggtatcgaaggaggaatgactaatgctcaaccaatacatgtgaaggtgagcatgaagcctatttcaacgctcataaagcctttaagatcgatagatttgaatactatggagcccaagcttgcgcataaagaaagaacagattcttgtgcagttcctgcggcatcaatcattggggaaagtatgctggccattgtccttgcagatgcattgcttgaaaagttcggtggagatagtataaaccaactaaaaaaacacattgaaagcagtggaaaatactaa

SEQ ID NO: 287090 - DNA, 962 bp, Unknown
  Bacterial polypeptide expressing nucleotide sequence isolated from the Sargasso Sea
gttgagcggtaattcaattggtagaagactagttctgactagttttggtgaaagtcatggcaaatgtattggagcagttttagatggctgccctgccgggttggaattagaagaaaaagacattcaaaaaatgttagatttaagaaaaccaggacaatctcttgtatccacacagagaaaagaaggagatgttgtagaaattctcacaggtacattcagaggatatacgacaggagcaccaattacaatggtgatttggaataaagatcagaaatcaattgcatatgaaaaattaagaactgaaatgcgcccagggcattcagattatcctgcatatatgaaatataaaaaattcaatgatcatagaggtggaggtagattttcaggtagattaactgcaacgcacgtcatgggcggtgcaattgctagaaaattattaaaagatacaattggagttgaaacaaattcatacacaacacaaattggaaaaataaaaatgaaaaaagcagctgcaaagaaagaattcagatctatctatacaaacgaggtaagatgtcctgaaaaaaatacggcacaaaaaatgaagagtgttatactagatgcaagaaagaagggagattcgttaggaggaataatagaatccattaccactaatttacctgtaggtttaggtgaaccaatttttggttcattagaatcagacatcagtaaagcaattttttcaattccagcagtaaaaggaatagagtttggttcaggttttgcaggttctgaaaagtttggttcagagaacaatgatgcatatgtaatgaaaggaggaaaagtttcaacaaaaaccaacaactcaggaggaattttaggaggtatttctaatggcatgccaattacaattagaattgcattcaaacctgcatcatcaatttctcaaattcaacagagtgtggatatcaaaaagaaaaaat

SEQ ID NO: 287091 - DNA, 212 bp, Unknown
  Bacterial polypeptide expressing nucleotide sequence isolated from the Sargasso Sea
accaacatccagcataagatcaaaaggccaaactattaatgctgctggtgacgaagtcgaggttgaagtaaccggtcggcatgatccatgtgtagggattcgagcagttcctatcgcagaggctatggtaaatttggttctcatggatcatttccttagaaaccaagctcaatgcggagcaattaatcaatcaacgccgtttaagaaataac

SEQ ID NO: 287092 - DNA, 427 bp, Unknown
  Bacterial polypeptide expressing nucleotide sequence isolated from the Sargasso Sea
ggagaaaccaatttttggctcactagaatcagacataagtaaagcaattttttcaatacctgcagttaaaggaatagaatttggttcaggatttgcaggttcagagaaatttggctcacaaaataatgatgcatatgttatgaaaggaggaaaggtatcaacaaagacgaataattcaggaggaattttaggaggaatttcaaatggaatgccaattacactcagaattgcattcaaaccagcatcttcaatttctaaaattcagcaaagtgtagatattaagaaaaagaaaccaatcaaactacaagtgggaggaagacatgatccatgtgtcgttccacgtgcaccgccagtagtagattcattgattgcgctaacaatagctgatcacgcattactcagtggtttcataaaaccaacactgtga

SEQ ID NO: 287093 - DNA, 781 bp, Unknown
  Bacterial polypeptide expressing nucleotide sequence isolated from the Sargasso Sea
catgattagatttttaacagctggagaaagccatggccctgaattaacaggaatagttgaaggcgttcctgcaggatttacaatcagtaaagagtttatagattcttatttaaaaagaaggcagaaagatactggctctggcggtcgaatgaatattgaaagcgatgaagtatttatatcttctggagtagttaataatatttcaacaggagctcctattgctttacgaattaaaaataaagattgggaaaattggaaagataaagatatagaaccgtacgtagttcctagacctgggcatgcagatttaattggtaccgcaaaatatgatttaaatgacataaggttagttttagaaagatcaagtgctagagagacagctatgaggtgtgcaataggagcaatagcgatccagatactagagtcaatggggatatcaatatatggttatgtttcatccatagggaaggttgattatagatattcaaatgatttctcattagatgagatgagaaaattaacagatgattcaccggtttcttgtccagatgctgataaatctgagcaaatggaaaaagaaatttcaaatgcaagaaaaaagaaggacacacttggagggtctataactaccattgctacaggtgttcctccaacattaggaagttatgtacattgggacaaaaaattagatgctaaattagcaagaattcttatgtctatacaaagtgttaaagctatagaagttggagatggaattgaatcatcaaaaaattatggcaca

SEQ ID NO: 287094 - DNA, 286 bp, Unknown
  Bacterial polypeptide expressing nucleotide sequence isolated from the Sargasso Sea
aatgattcatttaatgaagatggatcaacaaagactaactattcaggtggtgttcaaggtggtatatcaaatggtatggatatatattttaatattgcatttaagcctgtttctacaataatgagagatcaggactctatagatagtgagggtaataaagtaaaagtacaaggtaaaggtaggcatgacccatgtgttgtgccaagagcagtaccaattgttgaagcaatggctgcattagttcttgcagactattttttactaaacaaactttctaaaatttagt

SEQ ID NO: 287095 - DNA, 316 bp, Unknown
  Bacterial polypeptide expressing nucleotide sequence isolated from the Sargasso Sea
atgtcatttaatacttttggaaagatatttcgtttcactacttggggagagtctcatggacctgcaattgggtgtgttgttgatggttgtcccccaaatataagcattaaggaagacgatattcaaaaagaattaaataagagaaaacctggtcagtcaaaatttacaacccaaagaaaagaggatgataaaataaatattttatctggaatttttgaaggtaaaacaactggtacacctatttctatgattatttataataaagatatgagatctagagattatgaaactataaaaaataaatttagacctggtc

SEQ ID NO: 287096 - DNA, 912 bp, Unknown
  Bacterial polypeptide expressing nucleotide sequence isolated from the Sargasso Sea
tagaacctttcgtagttcctcgtcccggacacgctgacttaatagggacatttaagtatcaacatgatgacataaggctttcacttgaaagagcaagcgctcgtgaaactgcaattagatgtgcaattggagctatctgtcatcaaattttaaatcaacttggagttgaagttgttggctatgtttcatctattggtgaacaaaggatagaaaatattaatttagaagacataggtcaaataaaaaaacttgttgatgaatctgaagtatcctgtccagatagagaagcaagtgaattaatggtaaatgaaatattaaatgcaagaaagaaaaaagacacattaggtggctctataacactagttgcaaaaaattttcctgcagggtgcggcagctatgttcattttgatagaaagctagatgcaaaacttgcttcatcaatgatgtctgtacagagcgttaaagcagttgaagttggcaatggtatagaggcatctaaagattttggtactgctgtacaagatcaaatagttttaaatgaaagaaatgttgaacgaattacaaataatttaggaggatttgagggaggcatgtcaaccggagagcaaattatgataacttcttatttaaaaccaataagtacaactttgactcctataaagagtattgaccttgcatcacagaaagagacggaaactacatatgaaaggtctgacacctgtgctgtgcctagagctgttcctatttttgaaagtgtaatatccatagaacttttaaattccctgattgaaaatacaggtggagataataaagaggtaattttaaaaagagtcagtgaaataaaagacataaatcttgatagctttaatttggcaaataagacatggtctatgaaatatgaaaatgaataat

SEQ ID NO: 287097 - DNA, 1090 bp, Unknown
  Bacterial polypeptide expressing nucleotide sequence isolated from the Sargasso Sea
atggggcttggtgatcatctgaaagtcacgctatttggggaaagccacggcaagtgtgtaggtgcgctattcgagggaattcctccaggaacagaaattgacttggatgctcttgtgaacgacttatctctcagaaaacctggaagaagaggaatgtcagccagattggagactgacgaatgcgagattctgtcaggagtgcatgagggaaaggcaacaggttggccgttgctaatgatttctagaaactcagatgcgcggtcatctgactatagtttccttcccgaccatccacgcccaggccatgctgacatggttgaggaaataagatccagtggatccaacgatccccgaggaggggggtcgcagtctgctaggctcactcttggattagtggcagctggaagtcaggtcaggaagatgctggacgaagcaggttggtcctgtcatgcccatctaagcagagtgggggaaatctccgcgaggccattgattcatctcgatacttccaaggcactcgaagagggaacggagatgttcaggctaaactgcagagatcccgaagcagcagtaagaatgggagaatcgataagaaaaatccgaagagagaaggactcaattggttcggtggtagagttattgattctcggacttcccattggtgtaggagaaccatggttcgacggactggagccgtctcttgccagagcactcatggcaattcctggagctagggcaatagagttctctaatggcaccgaggcatcaaggatgagaggttcagagaataatgacatgtgggtaccaggtgatgatatgcccgagttggagggggccaagactggagatgcggacggagccctaggaggcagatcgactggggctccgttacgggtgttggtacatttcaaaccaccaagcagcctaccgagggagcaattcacgttacatcttccgagtaacaagaaacagtcactgaaggtcggcggaaggcacgatccagtgattggcccgagagcagcacctgttgtcgaggcggtggcaatgctggtggtcgcggatctgggaattgccggcggattcctctagc

SEQ ID NO: 287098 - DNA, 160 bp, Unknown
  Bacterial polypeptide expressing nucleotide sequence isolated from the Sargasso Sea
agcagaaaaacaattgataaatttggtaaaaacacaaccatatctgtaaaaggaagacatgatccttgcgtaggaataagagctgttcctgttggagaagctatgttaaattgtgtgttactagatcactacttaatgaataaagcacagtgtggataaa

SEQ ID NO: 287099 - DNA, 118 bp, Unknown
  Bacterial polypeptide expressing nucleotide sequence isolated from the Sargasso Sea
tcagtaaaaggtagacatgatccatgtgtgggtataagagctgtacctgtgggtgaagcaatgttatcttgtgttttattagatcattatcttctacacaaagctcagtgtagttaat

SEQ ID NO: 287100 - DNA, 156 bp, Unknown
  Bacterial polypeptide expressing nucleotide sequence isolated from the Sargasso Sea
ttaatgcttatggtaaagaagtactaatgaagctaaagggccgacatgatccttgtgttttaccgagagcagttccaatggttgattcaatggtagctctcgtactggcagaccatttgcttctccatcaagcacaatgttcaattattaaatagg

SEQ ID NO: 287101 - DNA, 355 bp, Unknown
  Bacterial polypeptide expressing nucleotide sequence isolated from the Sargasso Sea
aatgtcatttaatacttttggaaagctatttcgtttcacaacttggggagagtctcatggacctgcaattggttgtattgttgatggttgtcctccaaacataaatcttaaagagcaagatattcaaatagaattagacaaaagaaaaccaggacaatctaaatttacaactcagagaaaagaggatgataaagttcaaatattgtcaggaatatttgagggtaaaactacaggaacacctatttctctcataatctacaacaaagatatgagatccaaagattatagcaatattaaagataagttcagaccaggtcatgcagattttacttattttaaaaaatatgggaattag

SEQ ID NO: 287102 - DNA, 301 bp, Unknown
  Bacterial polypeptide expressing nucleotide sequence isolated from the Sargasso Sea
atggcaggaaattcattcggtaatatctttaaaatttcatcctttggtgagtcccatggaaaagctctgggtggagttatagatgggtgtccagcaggcgtaaatattgatttagattttattaattctgagttgaatagaagaagacctggacagtctgaaattgttactcaaagaaaagaagatgactctgttgaatttttatctggaatatttgaaggcaaatcaacaggtactcctataggattcataattgttaatcaggatcaaaaatcaaaagattactcacatataaaggata

SEQ ID NO: 287103 - DNA, 233 bp, Unknown
  Bacterial polypeptide expressing nucleotide sequence isolated from the Sargasso Sea
ggcatttcaaatgagagatgatataagcctaagttttataatcaagccaacctcaagcatcaaatcaaaaggtaaaacagtaaataaagacggagaggaagttgacattgaagtaactggaagacatgacccttgtgtaggcataagagcagtttctattgctgaagccatggtgagtcttgtgctcggtcgatcatttattgataaatcgagcacagtgtgcagaagttaag

SEQ ID NO: 287104 - DNA, 706 bp, Unknown
  Bacterial polypeptide expressing nucleotide sequence isolated from the Sargasso Sea
tatgtgcaagaaaaaataattgatttacaagatctacaatcaaaagtcaccaattcacctgtatcttgtcccgatgaaaaagccgggaaagatatggagaatgagatacttgaagcaagaaaaaagaaagatacacttggtggatcaataacaacaatagcatcaggagtacctcctacattaggaagttttgtacattgggatagaaagttagatgctaatcttgccagaatatttatgtcaatacaaagtgtaaaagctgttgaaataggtaatggaatagaagcttcaaaaaactttggaacaaatgttcaagatcaatatgttttacaagatggatctatcaaaaaagaatccaataatcttggaggttttgaaggtggtatgactaacggagaagaaattatagttaaagcatatttaaaaccaattagtacgacattaactccgataaagagcgtaaatttatcgtcaaaggaggaaacaaagacagtttatgagcgttctgatacatgtgcggtaccaagggctgtcccaattttcgaaagcgcaatggcatttgaaattttacgaaatttattacttaaaactggaggggacagcaaaaaagaaattgtaaaaaactttaatagtatttcaaaattgaatgttgatgattttgacatggacaatcagacttggaaaatgaactatgaaacagaataat

SEQ ID NO: 287105 - DNA, 182 bp, Unknown
  Bacterial polypeptide expressing nucleotide sequence isolated from the Sargasso Sea
acctacatcatcaattttaacaagtaggaaaacaattgataaaaaaggtaaaaacacaaatatttccgtaaaaggaagacatgatccttgtgttggtataagagctgtgccgataggtgaagcaatgattaattgtgttctattagatcattttttaatgaatagagcccaatgcggttaat

SEQ ID NO: 287106 - DNA, 142 bp, Unknown
  Bacterial polypeptide expressing nucleotide sequence isolated from the Sargasso Sea
tcatgatccctgtgtgggtatcagggctactcctattgctgaagcaatgatggctttagtgttgatggatcacttcttaagaaacagagcacaaaatgctgatgtagtatctgaaactccagacatcccatctaaaaaataa

SEQ ID NO: 287107 - DNA, 178 bp, Unknown
  Bacterial polypeptide expressing nucleotide sequence isolated from the Sargasso Sea
tatgtcttttaatacttttggaaaaatatttagatttaccacctggggggaatcccatggtccagcaattgggtgtgtaattgatggttgtcctcctaatatccctatatctgaaaaagatatccaaaaagacatggatagacgaagacctgggcagtctaagtttactacacaccga

SEQ ID NO: 287108 - DNA, 817 bp, Unknown
  Bacterial polypeptide expressing nucleotide sequence isolated from the Sargasso Sea
agcgtatgaaaaattaagaactgaaatgcgtccaggacattcagattatccagcatatatgaaatacaaaaaattcaatgaccatagaggaggaggtagattttcaggcagattgactgcaacacacgttatgggaggagctattgctagaaaattactaaaagatacaatcggagttgaaacaaattcttacacaacccaaattggaaaaataaaaatgaaaaaaatagcaacaaaaaaagaattcaaatccatttatacaaatgacgtaagatgtcctgaaaaaaatacagcacaaaaaatgaagagtattattttagatgctagaaaaaaaggagattcgctaggaggaattatagaatcaattaccactaatttacctgtaggtttaggtgaaccaatttttggttcattagaatcagacatcagtaaagcgattttctcaattccagcagtaaaaggaattgaatttggttcaggttttgcaggttctgaaaagtttggatcagaaaataatgatgcatacgtgatgaaaggaggaaaagtttcaacaaaaaccaataactcaggaggaattttaggaggtatttctaatggtatgccaattacaatcagagttgcattcaaacctgcatcatcaatttctcaaattcaacagagtgtagacataaaaaagaaaaaatcaattaaactacaggtaggaggaagacatgatccttgtgtagttccacgcgcacccccagtagttgattcattggttgcattaaccatagctgatcatgcattacttagtggttctataaaaccaacattgtga

SEQ ID NO: 287109 - DNA, 289 bp, Unknown
  Bacterial polypeptide expressing nucleotide sequence isolated from the Sargasso Sea
aatgtcatttaatacttttggaaagatatttcgttttactacttggggagaatctcacgggcccgctataggatgcgtggtagatggatgccctccaaatataaaaataactgaaaaagacatacaaattgaacttaataagagaaaacctggtcaatcaaaatttacaactcaaagaaaagaggatgataaagtaaatattttatctggagtgttcgaaggaaaaacaactggtactccgatctcaatgataatttataataaagatatgagatccaagagattatga

SEQ ID NO: 287110 - DNA, 217 bp, Unknown
  Bacterial polypeptide expressing nucleotide sequence isolated from the Sargasso Sea
tatggcaggaaatacatttggttctttatttaaattaaccacttttggtgaatcacacggtaaagggattgggggaataattgatggttgtccttcgggtcttacaatagatatcagcaaaattcaaaatgatctagatagacgcaaacctggtcaatccaagattgtaactcaaaggaaagaacctgatcaagttgaagttttatctggtattttt

SEQ ID NO: 287111 - DNA, 213 bp, Unknown
  Bacterial polypeptide expressing nucleotide sequence isolated from the Sargasso Sea
ttatattaaaagctgctttcaaacctacaggtactatcattaaacaacaaaatacagttacaaatacaggaaaagaaattgaatttggaggcagaggacgacatgatccctgtgtacttccaagagctgttcctatggtagaatcaatggtggcgatagtactaatagaccatgcactaaggcataatgctcaaaataattttacgggctaaa

SEQ ID NO: 287112 - DNA, 1029 bp, Unknown
  Bacterial polypeptide expressing nucleotide sequence isolated from the Sargasso Sea
ttgagcaagactgggcccatatagagacgggtgtgcgccatgggaagaccatggaaagtcctatagctttgacaataaagaataaagactgggtgaattggttagaggcaatgtcagtagaaaaggttgagcattataaagaagaaggaagaaatcagagagttacgagaattcgagctgggcatgctgatttaccaggggttatgaaatataactttgatgatgtgagacctgtcttagagcggtcaagtgcacgtgagactgcttctagggtggcggcgggcgcactagctagaagatttctggaagagtttgggatttctattaaaagccatgtgatatctgtagggaaaattaaaattccttcaacatccgatatagattgggacaaagtggaacaatcagatgtaaggtgcactgatgaaaatgccgcggaattgatgagaagagagattgatgaagctaaagaagcaggtgacacagtaggtggaacggttgaagtaatagctgaaaatgttccgattggactcggttcccatactcaatgggatcttaagattgatgctcttgtggctcaagctttcatgtcaattaatgctgttaaatctgtgtcaatagggcctggcgaagaaataatggataaatggggttctgaagtacaggatgtgatactacctgtaagtaatccagatgatccatggaaacgaaacacaaataatgctggaggtacagaaggcgggatgagtaacggcatgccattagtagcaaggtttgctatcaaaccaattgcaacaatgaggaatcctttgccctctgttgatttggatacaggagaagaggtattggcacattttgagaggtctgatgtttgtcaggtgccccctgcaggtgttataggtgaagctatgatggccttggtaatagctaaatgcatgctggataaatttggtggggattctctatcggaaacgtatagaaattatttgggctatttagatactgtaaagccaagaaacacctataaataaa

SEQ ID NO: 287113 - DNA, 628 bp, Unknown
  Bacterial polypeptide expressing nucleotide sequence isolated from the Sargasso Sea
ggctttgttccaaatcggaagtatttctgctgacacagttgatcttgaatttgtaaatgaaaataaattcttctttcctgatagatcaaaaattagctcacttgaagagttttttgaagaactcatcaaagaaggcgattcaataggcgccaagctaaatattaaagttcaaaactgtccggttggccttggagaacctgtttttgataaattaaatgctgatttagcaaaagccataatgagtatcaatgctgtaaaatcggtttctattggcaactctgacaagattccattttataaaggatctgagctaagagatgaaattaccaagaccggattcgattcaaataattctggtggaatccttggtggaatttcaaatggtgatgatattgatataagttttttaattaaacccacatctagcataagtaaagctaccacatccatagataaagatggaaatgagattgagcttgaaattaaaggaagacatgatccttgtgttggaattcgagcagtaccaattgcagaggcaatggtgaaccttgttttaattgaccattttctaagaaaccaggcacagtgcggtgatgttgatcaaaaacttccatttgtaacggaataa

SEQ ID NO: 287114 - DNA, 818 bp, Unknown
  Bacterial polypeptide expressing nucleotide sequence isolated from the Sargasso Sea
gatgtctggaaataccttcggcaaattattctcggtgacgacctttggcgaaagccacgggacggcgctgggctgcattattgacgggtgtcctcccgggctggagttatcctcatctgacctgcagcaagatctgaacaggcgtaaacccggccaatcccggtataccacccaacggaaagaggacgacgaggtcgagatcttgtcgggggtatttgagggtgttaccaccggcaccccgatcggcctgatggtgcggaatcaggatcaaaagtcaaaagactacagtaaaatcagggacctgtatcgaccagctcacgctgactatgcctatgaccgcaagtatggcatccgcgattaccgcggtggcgggcgctcgtcggcgcgcgagaccaccatgcgggtcgccgcgggtgcggtggccaagaaatggctagccgagcgctatggcatgcagattagaggctacctcagtcagttggggccgcattctgcgcgtgcccatgattggggcctggtggagcagaaccccttcttttgcggcgacgccgcactggtgcctcagctcgaggcctacatgcaggatttgattaaacagggcaattccgtcggcgcgcggatcaatgtcgaggcggagcgcgttcccgcgggatggggagagccggtttttgatcgcctcgatgcggatatcgcgcacgcgatgatgggcatcaacgcggtcaagggcgtagaagtgggtgacggttttgcctcggtcgcgcaactcggcagcgagcaccgggatctcatgagtccagagggctttttgagtaatcact

SEQ ID NO: 287115 - DNA, 568 bp, Unknown
  Bacterial polypeptide expressing nucleotide sequence isolated from the Sargasso Sea
tatgtcgggtaacacatttggtaaaaatttttgcgtcactacctttggtgaaagccatggaagtgctttgggttgtattattgatggttgtcctccacaagttgaaataactgaaggtgaaattcaatctgaactggataaaagacgaccaggtcaatcgaatgtgaccacccaacgaaacgaaaaggataaagttgagattttgtctggtgttttcgaagggaaaactctaggaaccccgattgggctaattattaaaaatgaagatcaaatttccagtgactattctaatttaaaaaatacttttaggcctaatcatgctgatctcacatattttgctaaatatggtcatcgtgattatagaggtggagggaggtcaagcgctcgtgaaacagcaatgcgagttgctgctggagctattgcaaagaaatttttaaaatctagaggcattgatgtcacttgtttcgtatctcagatcgaaactattattgctgaggaaataaatatagattacataaacaaaaacaaattcttttttccagatgcaagtaaaataaattttacttga

SEQ ID NO: 287116 - DNA, 480 bp, Unknown
  Bacterial polypeptide expressing nucleotide sequence isolated from the Sargasso Sea
gcggcggtgttattgaatgtctagtaagaaatgttccctctggtcttggaatgcctgtttttgataaattagaagctgatttagcaaaggctttgatgtctttgcctgccacgaaaggctttgaaataggttcaggtttctctggaacttatttaaaaggaagcgaacataatgatgccttcatcaagtctgatgatattagtaagttaagaacaacatcaaacaattcaggaggtatacaggggggaataagtaatggtgaaaatatcgagatgaagatagcttttaaacctacagcaaccatagggaaagaacagaaaacagtaaatgctgaaggtaaagaagtacttatgaaagcaaaagggagacacgatccatgcgttctaccaagagcagttcccatggttgatgctatggtagctttagtacttgctgatcatttgcttctaaatcatgctcaatgtgacttaattacttaat

SEQ ID NO: 287117 - DNA, 697 bp, Unknown
  Bacterial polypeptide expressing nucleotide sequence isolated from the Sargasso Sea
atgtcatttaatacttttggaaagttttttcgttttactacgtggggagagtcacatgggccagctataggatgtgttgttgatggttgtccacccaatgtagctttgaaacaggaagatattcaaagagaactaaataaaagaaaaccaggacaatcaaagtttacaacgcaaagaaaagaagatgacaaagttgagatattgtctggtgtttttgagggaaaaacaacagggacccctatatcactgattatttataataaggatatgaggtcaagagactacgaaactataaaaaataaatttagacctggacatgcagattttacatattttaaaaagtatggcattagagattaccgaggaggtggcagacagtcagcgcgggaaactgcatctagagtggccgcaggagccgtagcaaaaaaagttttagaaaaaaaaatagggaaaaaatataaagttgtaggtgcagttacacaacttggaatattaggttgtgacgtaactaggtggaatgataaagaaataggaaaaaatccgtttttttgtccagataaaaaaattataaagttatgggaaaaatatttgttggccatcagaaaatcaggttcatcttgtggtgcgattatagaagtcagagctagaggtgtgccagtaggactgggagcgcctatctattcaaagcttgatatgg

SEQ ID NO: 287118 - DNA, 955 bp, Unknown
  Bacterial polypeptide expressing nucleotide sequence isolated from the Sargasso Sea
ggtcttgccatcagtgagactgatattcagaaagaattaaataaaagaagacccggtcaatccagattcacctctcaaagaaaagagacagatgaagtaagtattatgtctggcgttttcgagggggttacaacaggtacgccaatcaatctggttgttcaaaatgtagaccaaaaatcaaaagattacactgccattaaggataaattcagacccggtcatgctgattttacttattaccataaatacggaatcagggattacagaggaggaggcagatcttctgctcgtgaaactgttatgcgggttgcagcaggcgcaatcgcaagaaaatatttatttgaaaaaacgggaatagagatattcggttttctaggtcagttgggaccgattcatcttgaaatgaaggacagatcatttattgaaacaaacccttttttctgtggcgatcctgaaaagatttcagaattggagtcgtatatggatcaattgagaaaagagggcgattccattggcgccagaattaacttggtagcgacgaatgtcccagttggattgggcgaaccagtttttgacaaactggaagcagatatcgctcatggattgatgagtatcaatgcggtcaaaggagttgagattggcgctggattctctgtagtgaatcaaaaaggcagcgagcatagagatgagattgatagtgatggctttaaacagaataactctggcggcacattaggcggtatctcaagcgggcaggatatttttgcaagcattgctttgaagcctacatccagcattatcaagccggctgagacaatcgataaaacaggtgaaaagactgaaattgtaaccaaaggaaggcatgacccctgtgtaggccttagggcaacacccataggtgaagccatgctggcaattgttttaatggatcattttatgagaaatcgagcccaaa

SEQ ID NO: 287119 - DNA, 592 bp, Unknown
  Bacterial polypeptide expressing nucleotide sequence isolated from the Sargasso Sea
gactcaattaatcataaagatataaataataaatactttttttgtgatgagtcaaaactagctgacttagattcaatgtttaaggatttaattgaagagggtaactcagtcggtgcaaagttaggtgttgttgttaaaaattgtcctgtaggacttggtgatccagtttttgagaagttagatgctaatcttgccaaagcaattatgacagttaatgctgttaaatctgtatcgattgggaatgcagatgatcttttgaacttaaaaggttctgaggcaagggatgaaatgacttcatcaggatatgcttcaaataattcaggtggaattttgggaggcatttcaaatggagatgatataagcctaagttttattatcaagccaacctcaagcattaaatcaaaaggtaaaacagtaaataaagacggtgaggaagttgacattgaagtaactggaagacatgacccttgtgtaggcataagagcagttcctattgctgaagccatggtgagtcttgtgttggtcgatcatttattgattaatcgagcacagtgtgccgaagttaaacaggaattaccatttagtgaataaa

SEQ ID NO: 287120 - DNA, 739 bp, Unknown
  Bacterial polypeptide expressing nucleotide sequence isolated from the Sargasso Sea
atatggaattagagattatagaggaggaggaaggcaatcagctagagaaacagcaactagagtagctgctggcgcaatagcaaaaaaagttttacaaacaaaaattggagttaaatataaagttataggtgctgttactcaattaggtattttaggttgcgatacgaacaattggagtgataattttattttaaaaaattcattattttgtcctgacaaatcaattcttaggatatgggaaaaatatttacttagcattagaaaagctgggtcttcttgtggagcaataatcgagttaagagctagaggcttgcctgtaggattaggtgctccaatatattcaaaacttgatatggatttagcatcagcaatgatgagcattaatgccgtaaaaggtgtaaatataggttcgggaatgaattctgctcaattaactggtgaacaaaattctgacgaaatatttagaaaaggaaaaaaaattaattttaaaacaaataatgctggtgggattcttggagggatatctacgggacaagatataatagtttcttttgcagttaaaccaacttcttctatattaacttcaagaaaaacaattgacaaatttggcaaaaatacttctatatctgttaaaggtagacatgatccttgcgttggtattagggcagtaccaataggagaagcaatgatgcactgtgtacttttggatcacttatttgatgaatattgctcagtgtaa

SEQ ID NO: 287121 - DNA, 640 bp, Unknown
  Bacterial polypeptide expressing nucleotide sequence isolated from the Sargasso Sea
aatgtcatttaatacttttggaaagctatttcgtttcacaacttggggagaatctcatgggcctgcaattggttgtattgttgatggttgtcctccaaacattcatcttaaagagcaagatattcaaatagaattagacaaaaggaaaccaggacaatctaaatttacaacgcagagaaaagaggatgacaaagttcaaatattgtcaggagtatttgagggaaaaactacaggaacacctatttctctcataatatacaataaagatatgagatccaaagattatagtaatattaaagataagttcagaccaggtcatgcagattttacttattttaaaaaatatggaattagagactatagaggtggtggcagatcttctgctagagaaaccgcagcacgagttgcggctggtgcaatagcaaaagtagtacttcaaaaaaaattaggtaaaaaatttaaagtaattggtgcagtaactcagctaggaattcttggatgtgatacaaatcaatggaacgataaagttatttcaaaaaatccatttttttgtccagataaatcaatgattaaattatgggaaaaatatttgcttggtgtaagaaaagcaggatcctcatgtggagcagtgattgaataa

SEQ ID NO: 287122 - DNA, 439 bp, Unknown
  Bacterial polypeptide expressing nucleotide sequence isolated from the Sargasso Sea
atgagtagtagttttggaaaaatttttcgtgttagtacttttggagaatcgcatggtggtgcagtaggagtcatccttgatggatgtccaccaaagttagaaatagatataaagctaatacaaaatgaattagataggcgtagacctggacaaagtgatattacaacgcctcgaaatgaagaagataaaattgaaatactaagtggaataaaggaaggcttaacacttggaactcctatagcgatgttggttagaaacaaggatcaaagaccaggagattataataatttggagcaagtatttagaccatctcatgcggatggtacatatcatcttaaatatggaattcaggcaagttccggcggtggaagagcctctgcaagagaaacaatagggagagtagcagctggtgctgtagcaaaacaattattaaaaaacg

SEQ ID NO: 287123 - DNA, 411 bp, Unknown
  Bacterial polypeptide expressing nucleotide sequence isolated from the Sargasso Sea
gactgggagaacctgtatatgaaaaatttgattctgatattgccaaggctatgatgacaattaatgcagtaaaaggtgttgaaattgggaatggatttaatagtgtttatgaaactggaatttctaatgttgacgagatgggggttaaaaacaataaaccttttttttattctaataataatggtggagtactaggaggaataacaactggtcaagaagtcatatgcagatttgttgtaaaaccaactagctcaattataactaaaaggaaaacaattactactaatctaaaaaaaacaactatttcaacaaaaggtcgtcacgatccctgtgtaggaattagagccgtgcctgttggtgaagctatgatggcaacaacaattgcagatcattgtttacgttatttatagt

SEQ ID NO: 287124 - DNA, 879 bp, Unknown
  Bacterial polypeptide expressing nucleotide sequence isolated from the Sargasso Sea
tgtctttcaaggtaaaacaactgggaacgcctatatctatgattatctataatacagatatgagatcaagagattatgaaactattaaaaacaaatttagaccgggtcacgcagattttacatatcttaaaaaatatggaattagagattataggggtggtggacgacaatcagccagggaaactgcttcaagagtagctgcaggtgctatcgcaaaaaaagttctagaaaaaaaaattggtaaaaagtacaaagtgattggtgcagttacacaactaggtatactcggttgtgataccaataattggaacgataagtttatttcaaaaaatccttttttctgcccagacaaaaatattttaaatctatgggaaaaatatcttttaaatattagaaaagcaggttcttcttgtggtgctattattgaagtaagagctcgtggaattcctgtaggacttggtgctccaatatattcaaaattagatatggatcttgcgtcagcaatgatgagtataaacgctgtgaagggtgttaacattggatcaggtatgaattcagctcaattaagtggtgaacaaaattctgatgagatgtatcaaaagggtgataaaataaaattcgaatctaataatgctggaggtattttgggaggaatatcatctgggcaagaaattatagtttcttttgctgtcaaacctacttcctcaattgttacatctcgtaaaacaataaataagtttggaaaaaatacctcaatatcagttagaggaagacacgatccttgtgtaggaataagagcagttccaataggtgaagctatgatgcattgtgttgttctagatcattttttaatgaacacagctcaatgtaaaagttaat

SEQ ID NO: 287125 - DNA, 196 bp, Unknown
  Bacterial polypeptide expressing nucleotide sequence isolated from the Sargasso Sea
tgtcaaaccaacaagctccattttaaaagagaaaaaaaccattgatattgaaggaaaaaaccaaaccttaatcactaaaggtcgccacgatccttgtgttggaattcgcgcagttccaattggtcaagcgatgatggcttgcgtgttagcagatcatctattgttaagtggaaaatactattcaaacataagttaa

SEQ ID NO: 287126 - DNA, 819 bp, Unknown
  Bacterial polypeptide expressing nucleotide sequence isolated from the Sargasso Sea
aatgtcatttaatacatttggaaagctatttcgtttctctacctggggtgaatctcatggtcctgcaattggttgtatcgttgatggatgtcccccaaatattaatttaagtgaaaaagatatacaaaaagaactggataaaagaaaaccaggtcaatcaaaatttacaactcaaagaaaagaagacgataaagttcaaatattatctggagtttttgatggaagaaccaccggtacaccaatatctttaattatttataataaagatatgagatcaaaggattatggaaatattaaggataaatttagacctgggcacgctgactttacttatttcaaaaaatatggaattagagactatagaggtggtggaagatcttcagcaagagaaactgcatcaagagttgcagctggtgcaatagcaaagttggtcttacagaaaaaattaggtaaaaaatttaaagttattggtgctgtcacccaattaggtatattaggatgtgatactgacaaatggaatgacaaaataatttctaaaaatccatttttttgtcccgacaaatcgatgattaaactttgggaaaaatttttgttaggagtaagaaaatctggatcatcatgtggtgcagtgattgaaataagagcgagaggaattccggtaggattgggcgcacccatttactcaaaactagactctgatatagcatctagtttcatgagtattaatgccgttaaaggagttaatattggtgcaggaatgaactctgcacaactaagtggtgaacaaaactcagatgaaatttcacaaaaggtaaaaaa

SEQ ID NO: 287127 - DNA, 280 bp, Unknown
  Bacterial polypeptide expressing nucleotide sequence isolated from the Sargasso Sea
ttgggaattaaatataaagttgtaggagctgtaactcaactaggaattttaggatgtgatactggaaaatgggatgaaaaagtaaatatattatcaggagtctttgaaggaagaacaactggcactccaatttcaatgataatttataacaaagatatgagatcgagagattatgaaacaattaaaaataaatttagacctggtcatgctgattatacgtattttaaaaaatacggaataagagattatagaggtggtggaagacaatctgctagagaaa

SEQ ID NO: 287128 - DNA, 415 bp, Unknown
  Bacterial polypeptide expressing nucleotide sequence isolated from the Sargasso Sea
cctggtcatgctgattatacgtattttaaaaaatacggaataagagattatagaggtggtggaagacaatctgctagagaaactgcttcaagagttgcagctggtgcaatagcaaaaaaaatcttacaaaataaattgggaattaaatataaagttgtaggagctgtaactcaactaggaattttaggatgtgatactggaaaatgggatgaaaaagtaaatatattatcaggagtctttgaaggaagaacaactggcactccaatttcaatgataatttataacaaagatatgagatcgagagattatgaaacaattaaaaataaatttagacctggtcatgctgattatacgtattttaaaaaatacggaataagagattatagaggtggtggaagacaatctgctagagaaa

SEQ ID NO: 287129 - DNA, 394 bp, Unknown
  Bacterial polypeptide expressing nucleotide sequence isolated from the Sargasso Sea
atgtcagggaatacatttggaaaattatttcaagttacaacttatggggagagccatgggaaggcactcgggtgcgttatagatggctgcccacctcaaatagagatatctgttgatgatattcaatctgagcttaatcgcagaaagcctggccaatccgatataacatctcaaagaaaggaagctgatattgttgaaattttgtctggagtatttgaaggcaagacacttggaacaccaattagtttaatcatctataatcaagatcaaagatcaaaggactactctaatattaaagatgtttttcgtccaaaccatgctgatataacttatcaagctaaatatggtcatcgagactatagaggaggaggcagatcaagtgcgagagaaactg

SEQ ID NO: 287130 - DNA, 356 bp, Unknown
  Bacterial polypeptide expressing nucleotide sequence isolated from the Sargasso Sea
cgttaaaggagttaatattggtgcaggaatgaactctgcacaactaagtggtgaacaaaactcagatgaaatttcacaaaaaggtaaaaaattaaagtttgatacaaataatgccggtggaatattgggtggcatttcaactggacaagaaattattgcctcatttgctgtaaaaccaacatcttcaatcttaacaacaagaaaaacaataaataaatttggaaaaaatacaacgatatctgttacaggaagacatgatccatgtgttggtataagagctgtacctgttggtgaggcaatgatgaattgtgttttattggatcactatctgatgaacaaagctcaatgtcattaaa

SEQ ID NO: 287131 - DNA, 400 bp, Unknown
  Bacterial polypeptide expressing nucleotide sequence isolated from the Sargasso Sea
ctggacatggatttagcatctgcaatgatgagtattaatgctgttaaaggagtaaatattggttcaggaatgaattctgctcaactaactggagaacaaaactctgatgaaattattaaaaaaggtaaaaaaataaaatttatatcaaataatgcgggtggaatacttggtggcatttctagtggacaagaaattataatatctttcgcagtaaaaccaacttcttcaattttgaattcaagaaaaacaatagataagtttggaaaaaatacaaatatatcagtaaaaggaaggcatgacccatgtgttggtattagggcggtgcctataggcgaagcaatgatgcattgtgttattttggatcattacttaatgaacaaagctcaatgccaaagctaat

SEQ ID NO: 287132 - DNA, 931 bp, Unknown
  Bacterial polypeptide expressing nucleotide sequence isolated from the Sargasso Sea
cccagaaaatgaagaagataaaattgaaatattaagtgggataaaggaagggttaacacttggaactccgatagcaatgttggtaagaaataaggatcaaagaccaggagattataataatttggagcaggtatttagaccttctcatgcagatggtacatatcatctgaaatatggaattcaagcaagttctggtggtggaagagcttctgctagagaaacaattgggagagtagccgctggtgctgtagcaaaacaattattaaaaaccttctgtgacaccgaaatactatcttgggtaaagcgtatacatgatattgattctgatataaataaagagaagatttctctcaaaaaaatagattctaatattgttagatgtcctgatgaaaaggtatcaatagaaatgatcgagagaattaaggaattaaagcgtctaggagactcttgtggcggtgttattgaatgtctagtaagaaatgttccttctggtcttggaatgcctgtttttgataaattagaagctgatttagcaaaggctttgatgtctttgcctgccacgaaaggctttgaaataggttcaggtttctctggaacttatttaaaaggaagcgaacataatgatgccttcatcaagtctgatgatattagtaagttaagaacaacatcaaacaattcaggaggtatacagggcggaataagtaatggtgaaaatatcgagatgaaaatagcttttaaacccacagcaaccatcgggaaagaacagaaaacagtaaatgctgaaggtaaagaagtacttatgaaagcaaaagggagacacgatccatgcgttctaccaagagcagttcccatggttgatgctatggtagctttagtacttgctgatcatttgcttttaaatcatgctcaatgtgacttaataaataagtag

SEQ ID NO: 287133 - DNA, 565 bp, Unknown
  Bacterial polypeptide expressing nucleotide sequence isolated from the Sargasso Sea
tatgtcttttaatacttttggaaaaatatttagatttacaacttggggtgagtcacatgggccagccattggatgtgtaattgatggatgccctccaaatattcctatgtctgagaaggatattcaaatagatatggatagaagaagacctggacaatctaaatttactactcaaagaaaagagtcagataaagtcgtaattttatcaggagtttttgagggtaaaacaacaggaactccaatttcaattataatttataatgaggataagagatcgagagattacgaaacgataaaaaataaattcagacctggccatgcagattatacgtattttaaaaaatatggaattagagactacagaggtggtggaagacaatcagcaagagagacagcatgtagagtagcagcaggagcagtggcaaaaattgtactaaaaaaaatgattggtgcaaaatttaatgtaattggtgcagtcactcaattaggtttaatgtcttgtgataaatcaaattggaacgataatgaaataagaaaaaatccttttttctgcccagataagaaa

SEQ ID NO: 287134 - DNA, 562 bp, Unknown
  Bacterial polypeptide expressing nucleotide sequence isolated from the Sargasso Sea
atgtcatttaatacttttggaaagctatttcgtttcacaacttggggagagtctcatggacctgcaattggttgtattgttgatggttgtcctccaaacataaatcttaaagagcaagatattcaaatagaattagacaaaagaaaaccaggacaatctaaatttacaacacagagaaaagaggatgacaaagttcaaatattgtcaggagtatttgagggtaaaactacaggaacacctatttctcttataatctacaacaaagatatgagatccaaagattatagtaatattaaagataagttcagaccaggtcatgcagattttacttattttaaaaaatatggaattagagactatagaggtggtggcagatcttctgctagagaaactgcagcaagagttgcggctggtgcaatagcaaaagttgtacttcaaaaaaaattaggtaaaaaatttagagtaattggtgcagtaactcagctaggaattcttggatgtgatacaaatgaatggaacgataaagtaatttcaaaaaatccatttttttgtccagaataaa

SEQ ID NO: 287135 - DNA, 682 bp, Unknown
  Bacterial polypeptide expressing nucleotide sequence isolated from the Sargasso Sea
aaaacaattattaaaaaccttctgtgacactgaaatactatcttgggtaaagcgtatacatgatattgattctgatataaataaagagaagatttctctcaaaaaaatagattctaatattgttagatgtcctgatgaaaaggtatcaatagaaatgatcgagagaattaaggaattaaagcgtcaaggagactcttgtggcggtgttattgaatgtctagtaagaaatgttccctctggtcttggaatgcctgtttttgataaattagaagctgatttagcaaaggctttgatgtctttgcctgccacgaaaggctttgaaataggttcaggtttctctggaacttatttaaaaggaagcgaacataatgatgccttcatcaagtctgatgatattagtaagttaagaacaacatcaaacaattcaggaggtatacagggcggaataagtaatggtgaaaatatcgagatgaagatagcttttaaacccacagcaaccatcggtaaagaacagaaaacagtaaatgctgaaggtaaagaagtacttatgaaagcaaaagggagacacgatccatgtgttctaccaagagcagttcccatggttgatgctatggtagctttagtacttgctgatcatttgcttttaaatcatgctcaatgtgacttaataaataagcagtag

SEQ ID NO: 287136 - DNA, 382 bp, Unknown
  Bacterial polypeptide expressing nucleotide sequence isolated from the Sargasso Sea
gggtatcggtggtgttagaggttttgagattggacttggatttaagatagcatcaatgaagggatcacaagtaaatgatattatggttggaaagtcaaagggaaaagtaaagttcagaacaaataatgctggaggtatattagggggtattagcaatggtaatgatttaattttaagatttgcactaaaacctacttcatctatttcacaaaagcaagattctattgataataaaggtaaacaaaggaaacttcaggttaaaggtagacatgatccatgcctatgcccaagggcggtacccattgcggaagctatggtgaacttagtactcttggattgcatattagaaaacaacttatcaacggtaaaaaagattacttaa

SEQ ID NO: 287137 - DNA, 476 bp, Unknown
  Bacterial polypeptide expressing nucleotide sequence isolated from the Sargasso Sea
gatgagcaactctttcggaaatttatttacactaacaacatttggcgaatcgcatggggaatgtattggtggtataattgatggatgtcctgcaggaaagaaaatagatattaaatccgttcaaactgatcttgacagaagaaaaccaggtcaatctaaaatagtcacacaaagaaaggaagatgatcaattagaaatattatctggaatatttgaaggaaaaaccactggcaccccaattgggttcattattaaaaacaaagaccataagtcaaaagactataaccatataaaagaatcttttagaccttcacatgctgattatgtttatgagaaaaaatatggaaatagagactacagaggaggaggtaggagttctgcaagagaaaccgcatgtagagtagttgctggttcaattgctaaacaaatattggataatgttaaaatcaatgcatacgtatcttcagttggaaata

SEQ ID NO: 287138 - DNA, 407 bp, Unknown
  Bacterial polypeptide expressing nucleotide sequence isolated from the Sargasso Sea
aatgtcatttaatacttttggaaagctatttcgtttcacaacttggggagagtctcatggacctgcaattggttgtattgttgatggttgtcctccaaacataaatcttaaagagcaagatattcaaatagaattagacaaaagaaaaccaggacaatctaaatttacaactcagagaaaagaggatgataaagttcaaatattgtcaggagtatttgagggcaaaactacaggaacacctatttctctcataatctacaacaaagatatgagatccaaagattatagtaatattaaagataagttcagaccaggtcatgcagattttacttattttaaaaaatatggaattagagactatagaggtggtggtagatcttctgctagagaactgcggcaagagttgc

SEQ ID NO: 287139 - DNA, 568 bp, Unknown
  Bacterial polypeptide expressing nucleotide sequence isolated from the Sargasso Sea
atgtcttttaatacttttggaaaaatatttagatttactacatggggagaatcccatggtccggctattggctgtgtaattgacgggtgtcctccaaatatccctatatctgaaaaagatatccaaaaagacatggatagacgaagaccaggacaatcaaaattcaccactcagagaaaagagtcggacaaagtgattattctctcaggaatctttgaaggaaagactacgggaacaccaatcagtattataattcataacgaagataaaaaatctagagattacgagtctatcaaaaataaatttagacctggacatgctgattacacatattttaaaaaatatggtattagagattttagaggtggaggaagacaatctgcaagagaaacagcttgtagggtagcagctggagcggtggccaaaatagttttaaaaaaaattataggaaaaaaatttaaagtaattggagcggtaactcagctgggattaatgtcttgtgacaaacaaaattggaaagactctgaaataagaaaaaatccttttttctgcccagataagcagtcgg

SEQ ID NO: 287140 - DNA, 706 bp, Unknown
  Bacterial polypeptide expressing nucleotide sequence isolated from the Sargasso Sea
gaaacagctatgagagtgactgctggcgctattgctgacattattttaaaaagttacttcaaagattttcaaatacaaggatgcgttaagcaaattggaccatacaaaatagaaaaaaatcaaatcaactgggaatttagcaaaactaatcctttgttttgtccgaataaaaaagttttaaaagtttgggaagactttttagacaaggtaagaaaaaaaggctcttcagcaggcgctattatccagctaaaagcttcaggaataccacctggaataggttctcctgtttattcaaaactggatagcgaaatagcgtctggtttaatgtctataaatgctgttaaaggagtagaaataggttcaggatttaacttggttgatattgatggaacaaaagccagcgatgaaattaatattgatgaaaataacaatgttacttttaagtctaatcattcaggaggaatattaggaggcatttcatcagggcaagatattgaagttagttttgtagtaaaaccaacaagcagtattttaacacccaaagaatcagttgatatagatgggaataatattaaagtacaaactaaaggcaggcatgatccatgcgtaggaattagagctgttcctgttggtgaagcaatgttgtcttttacattagctgatttatatttagctcataaggctcaagtaggaacgattaactaat

SEQ ID NO: 287141 - DNA, 842 bp, Unknown
  Bacterial polypeptide expressing nucleotide sequence isolated from the Sargasso Sea
atcactgataatttacaatgaagatatgcgttcaaaggattataatgatattaaagataaatttagaccaggacatgctgatttcacatattttaaaaagtatggaataagagactacagaggtggtggtagatcatctgcacgagaaacagctgcaagagttgcagcaggtgctgtggcaaaaaaagttttagaaaataaattaggaaaaaaatttaaaatcactggagctgtaacccaacttggaatattaggatgtgataccaataaatgggatgataaaataatttctaaaaatccatttttttgcccagataaatcaatgttaaaaatttgggaaaaatacttattaagtattagaaaagctggatcgtcatgtggagcgataatcgaagtaagagcgaacggtatacctgctggattaggagcacccatatactctaaattagactctgacatagcatcagctatgatgagtataaatgctgttaaaggagttaatattggctcaggtatgaactcagcacaattgtcaggtgaggaaaattcagatgaaatttctcaaaatagaaaaaaaacaaaatttaaatctaataacgctggggggattctgggaggcatttcttcaggtcaagagataattgtctcttttgctgtaaagccaacgtcttcaattttaaaaagtagaaaaacaatcaataaatttggaaagaatacaagtatatcagtaaaaggtagacatgatccatgtgtaggtataagagctgtacctgtgggtgaagcaatgttatcttgtgttttattagatcattatcttctacacaaagctcagtgtagttaat

SEQ ID NO: 287142 - DNA, 613 bp, Unknown
  Bacterial polypeptide expressing nucleotide sequence isolated from the Sargasso Sea
gcagtaactcagctaggaattcttggatgtgatacaaatcaatggaacgataaagtaatttcaaaaaatccatttttttgtccagacaaatcaatgattaaattatgggaaaaatatttgcttggtgttagaaaatcaggatcctcatgtggagcagtaattgaaataagagcaagaggtgttccggttggtttaggtgctccaatttattcaaaattggatactgacataacttcaggtctaatgagtattaatgcagtaaaaggtgtaaatattggtgcaggaatgaactcagcacaattaagtggagaacaaaattcagatgaaatttactcaaaaggaaataaattaaaattcaattcaaataaagcgggaggaattcttggtggaatttctacgggccaagaaattattgcatcttttgctgtcaaacctacatcgtcaattttgactagtagaaaaactataaataaatttggaaaaaatacttcaatatctgttaaaggtagacacgatccttgtgtaggaattagagctgtaccaattggtgaagctatgatgaactgtgttttacttgaccactatttaatgaataaagcccaatgtagttagc

SEQ ID NO: 287143 - DNA, 216 bp, Unknown
  Bacterial polypeptide expressing nucleotide sequence isolated from the Sargasso Sea
taaaaccaacttcaagcattaaaacagaaggaaatacgataaataaaaaaggcgaggagattaaaatcgaggttacaggaagacatgatccctgtgttggcattagagcagtgcctattgctgaggcaatggtaagtcttgttttagtcgatcatttattaattaacaaagcacaatgcgcaaatgttgaacaaaatttaccatttacggaataga

SEQ ID NO: 287144 - DNA, 520 bp, Unknown
  Bacterial polypeptide expressing nucleotide sequence isolated from the Sargasso Sea
aatgttaaaaatttgggaaaaatacttattaaatattagaaaagctggatcgtcatgtggggcgataatcgaagtaagagcaaatggtattcctgctggattaggtgcacctatatactcaaaattagactctgatattgcatcggctatgatgagtataaatgctgtaaagggagtaaatattggttcaggtatgaattcagcacaattgtcgggtgaggaaaattcagatgaaatttctcaagataaaaaaaaaacaaagtttagatcaaataatgctggaggtattctaggaggcatttcctctggtcaagaaataattgtttcttttgctgtaaaaccaacctcctcaattttaaaaattagaaaaacaattaataaattcggaaagaacacgaatatatcagtaaaaggtagacatgatccatgtgtgggtattagagctgtgcctgtaggtgaggcgatgttatcgtgtgttttgttagatcattatcttcttcataaagctcagtgtggttaa

SEQ ID NO: 287145 - DNA, 344 bp, Unknown
  Bacterial polypeptide expressing nucleotide sequence isolated from the Sargasso Sea
aatgtcatttaatacttttggaaagtcttttcgttttacaacttggggggaatcccatggtccagctattgggtgtattatagatgggtgtccaccattaataccgttaaaagaagctgatattcaaaaagaattaaacaaacgaaaacctgggcaatcaaagtttactactcaaaggaaggaaagtgacaaggttcaaattctttcaggagtttttgagggaaaaacgactgggacaccaatatcattaataatttacaatgaggatatgcgttcaaaggattataatgatattaaagataaattcagaccaggacatgctgatttcacatattttaaaaaat

SEQ ID NO: 287146 - DNA, 861 bp, Unknown
  Bacterial polypeptide expressing nucleotide sequence isolated from the Sargasso Sea
ttggaacccccatagcattgttaatcagaaatgaagatcagatttcaaaagattattcaaatattaaagatacatttaggccaaatcatgctgacctagcatatcaaggaaagtatggtattagagattacagaggtggtggcagatcaagtgcaagagagacagcaatgcgagttgccgggggagcagttgctaagaagtatttaaatacacatgggattataactaagggctttgtatcacaaattggaagtatttctgctgatacagttgatcttgaatttgtaaatgaaaataaattcttctttcctgatagatcaaaaattagctcacttgaagagttttttgaagaacttatcaaagaaggagactcaataggtgccaagctaaatattaaagtccaaaactgcccagttggccttggagaacctgttttcgataaattaaatgctgatttggcaaaagctataatgagtatcaatgccgtaaaatcagtttctattggcaactctgacatgattccattttctaaaggatctgagctaagagatgaaattaccaagactggattcgattcaaataattctggtggaatccttggtgggatttcaaatggtgatgatattgatataagttttttaattaaacccacatctagcataagtaaagccacaacatccatagataaagatggaaatgaggttgagcttgaaattaaaggaagacatgatccttgtgttggaattagagcagtaccaattgctgaggcaatggtgaaccttgttttaattgaccatcttctaagaaacaaggcacagtgcggtgatgttgatcaaaaactcccatttgtaacggaataat

SEQ ID NO: 287147 - DNA, 424 bp, Unknown
  Bacterial polypeptide expressing nucleotide sequence isolated from the Sargasso Sea
atttgataagttggacgcagatttagctaaagcaataatgagcataaatgctgtcaaatctgtttcgattggtaacagtcaaaatattgctaaattgaggggttcggaacttcgagatgaaataagttcaaaaggtttttcatccaataactctggtgggattctcgggggaatctcaaatggagatgatatcaatattgattttatgattaaaccaacctccagtattagcaagccaactaaatcaattgatgagcaaggcaatgaggttgatttagagattaaaggtagacacgatccatgtgttggaattcgtgcagtacccattgctgaggcaatggtaaatttagttttaattgatcactttttgaggaatcaagctcaatgcggacatattgagcaaaatctgccgttcggtgaataa

SEQ ID NO: 287148 - DNA, 547 bp, Unknown
  Bacterial polypeptide expressing nucleotide sequence isolated from the Sargasso Sea
gatgtcttttaatacttttggaaaaatatttaggtttactacatggggtgagtcacatggtcctgctataggctgtatagttgatggttgtcctccaaacatagctttatctgaaaaagacctacaaaaagatatgaatcgtaggagaccaggtaactctaaatttgtctcgcagagaaaagagtctgataaaatcgaaattttgtcaggagtatttaatggcaaaacaacaggaactccaatttctatcttgattaggaatgaagacaaaagatcaagggactatgagtctattaaaaacaaatttagacctggacatgcagatttcacttattttaaaaaatatggaataagagattacagaggtgggggtcgacagtctgcaagagaaactgcctctagagtagctgcgggtgcaatcgcaaagacagtattaaaaaatattattggaaaaaaattcaacattattggtggagttatccagctaggtttaatgggttgtaatagaaataactggaataataaagaaataagaaaaaatcccttt

SEQ ID NO: 287149 - DNA, 516 bp, Unknown
  Bacterial polypeptide expressing nucleotide sequence isolated from the Sargasso Sea
aatgtcatttaatacttttggaaagatatttcgtttcacaacttggggcgaatctcatggacctgcaatagggtgtgtagttgatggttgtcctccaaatataagcattaaggaaaaggatattcaagttgaactaaataagagaaaaccgggtcaatcaaagtttacaacgcaaagaaaagaagatgataatgtaaacatcctttcaggggtgtttgaaggaaaaactacaggaactcccatttcgatgattatttataacaaggatatgagatcaagggactatgaaacaattaaaaataaatttagaccaggtcatgcagattttacatattttaaaaaatacgggattagagactatagaggaggcggcaggcaatctgctagagaaactgcatcaagagtggcggctggcgcaatagcaaaaaaagttttagaaaataaaattggaaaaaaatataaagttgttggagcagttactcagttagggatacttggttgtgatacaaaaaaatg

SEQ ID NO: 287150 - DNA, 367 bp, Unknown
  Bacterial polypeptide expressing nucleotide sequence isolated from the Sargasso Sea
atgagtaattcatttggcaaaatatttaaaatatcaacttacggagagtcacacggtaaagcgattggagtaattattgatggttgcccttctggaataaaaatagaagaactagatattcaaaaagaattagacaggaggaaacctggccaatctaaaataacaacccaaagaaaagaaagtgattcggtccaaattctatctggtgtttttaatggtaaaacaacaggttctccaattagcttatttatcaaaaacaaggatcaaaaaagtagtgattatgatcatatttctaaagcttttagaccttctcatgctgattatacatatcacaaaaaatataaaaatagagatcatagaggggagg

SEQ ID NO: 287151 - DNA, 685 bp, Unknown
  Bacterial polypeptide expressing nucleotide sequence isolated from the Sargasso Sea
atgtcttttaatacttttggaaaaatttttagatttactacctggggagagtctcatgggccagctattggttgtgttattgatggttgtcctccaaatatacccatatctgagagagatattcaaaaagatatggatatgagaaaacctggaaaatctaaatttacctctcaaagaaaagagtctgataaagcaataatattatcgggggtcttcaaagggaaaactactggaaccccaatatcaataattataaataatgaagataaaagatctagagattatgaatctataaaaaataaatttaggccagggcatgcagattttacttattttaaaaaatacggaataagagatttcaggggtggtggaaggcagtcagcaagagaaactgcatcaagagttgctgctggagctgttgctaaaattgtcttaaaaaaattattaggaaaaaaatttcacctagtaggtgctgttacacaattgggcttaatgtcgtgcaataaaaataattggaacaattccgaaataagaaaaaatccatttttttgtcctgataaaaaatcagtaaaattatgggaaaaatatttagatgcagtaagaaaaaatggttcctcttgtggagctattattgagttaagagctgaaggtgttcctgttggtttaggtgctccaaatatattca

SEQ ID NO: 287152 - DNA, 734 bp, Unknown
  Bacterial polypeptide expressing nucleotide sequence isolated from the Sargasso Sea
ttcaaattagtgaaaaacaaattcaaatagaattaaataaaagaaaaccaggccaatccaaatttacaactcaaagaaaagaggatgataaagtacatattttatcaggtatctttgaaggaaaaactacaggcactccaatttcaatgattatatacaataaagatatgagatctagagattatgaaacaattaaaaataaatttagaccaggtcatgcagattatacatattttaaaaagtacggaattagagattatagaggtggaggaagacaatctgctagagaaacggcttcaagagttgcggcaggagcaattgcaaaaaaagttttgcaaacaaaattaggaaaaaaatttaaagtcattggtgcagttactcaaatgggaatcttgggttgtgatacaaataattggaatgataaatttatacaatcaaataccttattctgtcctgataagtcgattttaaaactttgggaaaagtatttacttggtataagaaaagcaggatcctcttgtggtgcaataattgaggtaagagctagaggtttgcctgctggtttaggagctccaatatattcgaaacttgatatggatttagcttcagccatgatgagtattaatgctgtaaaaggtgtaagcattggatcgggaatgaattctgcaactttaactggagaacaaaattcagatgaaatatctcaaaaaggaaaaaaaattatttttgaataa

SEQ ID NO: 287153 - DNA, 511 bp, Unknown
  Bacterial polypeptide expressing nucleotide sequence isolated from the Sargasso Sea
aatgtcatttaacacatttggaaagatatttcgattcaccacttggggagagtcacatggtccagcaataggctgtattgtggatggttgtcctcccaatgtaagtataaatgaggcagacattcaaaaagaattaaacaaaagaaaacctggacagtctaaatttacgacccaaagaaaggaagacgacaaagtcaatattttatctggagtttttgagggaaaaacaacaggtacaccgatatcattaattatctataacaaagatatgagatctagagattacgaaactataaaaaataaatttcgtccaggtcatgctgattacacgtattttaaaaaatacggaattagggactatagaggcggaggaagacagtcggcaagagaaactgcttcaagagttgcagcaggagccattgcaaaaaaagtgttggaagtaaaaattggaaaaaaatataatgttaaaggtgcagttactcaattaggtatacttgggtgtgatataaaa

SEQ ID NO: 287154 - DNA, 575 bp, Unknown
  Bacterial polypeptide expressing nucleotide sequence isolated from the Sargasso Sea
aggtatagaaataaatgaaaatgatatacaattagaattagataggagaaaacctggacaatcaaaaataactacacaaaggaaagaaagtgattcagttgaagtactttctggagttttcaatggtaaaacaaccgggtcacctataagtttatatattaaaaataaagatcagaaaagcagtgattacgatcatatttcaactgtattcagaccttctcatgctgattatacgtaccataaaaaatacaaaaacagagaccatagaggaggaggaagaagctctgctagagaaacagctaactgggtagctgctggagcgctggcaaaaaaaatattaaataagattggagttgaaataaatgcttatgtttcaaaggttggaaaaatggaaatggatataaattataaagatcttaattttaaaaatacagaatcaaatattgtgagatgtccagataaaaactttgcaaataaatttattacaataattgatgaagcaagaaaaaatagagatacagttggtggtgttatttcatgtattatctccggttgtccagttgggatttggagaa

SEQ ID NO: 287155 - DNA, 760 bp, Unknown
  Bacterial polypeptide expressing nucleotide sequence isolated from the Sargasso Sea
gatgtcttttaatacttttggaaaaatatttagatttaccacatggggagagtcacatggccctgctattggctgtattgtggatggttgccctccaaatataccattatcagaaaaagacatacaaaatgacatgaaccgtagaagaccgggtagctctaaatttgtctcccaaagaaaagagtcagataaaattgaaattttatcaggagtatttaatggaaaaactacaggaactccaatctcaattttaattcgtaatgaagacaaaagatctagagattatgagtcaattaaaaataaatttagacctggacatgctgattttacttatttccaaaaatatggaattagagattatcgaggtggtggtcgacaatcggctagagaaactgcttcaagagttgcggcaggtgctattgcaaaaactgttttaaaaaacattctaggaaagaaatttaatattattggggctgttattcaattaggtttaatgagttgtgataaaaataattggaatgacaacgaaacaaaaaagaatccttttttctgtcctgataaaaaatctgtcaaactgtgggaaaaatatctcttagcagtaagaaaatctggttcatcatgtggagctattattgagctacgtgctagaggtattcccgctggtcttggtgcaccaatttattcaaaattagattctgatatatccgcagcattgatgagtatcaatgctgttaaaggagtaaaaatcggggctggcatg

SEQ ID NO: 287156 - DNA, 871 bp, Unknown
  Bacterial polypeptide expressing nucleotide sequence isolated from the Sargasso Sea
tggggagaatcccacggtccagcaattggctgtatagttgatggttgccctccaaatattcagattaaattagaagaaatacagaaagaacttaataaaagaaaaccaggtcaatctagatttacaactcaaagaaaagaagatgataaagttgaaatattgtcaggcatgtttgagggcaaaactactggaacacctatctctatgattatttacaataaagatatgagatcgaaagactacggaaatataaaaaacaaatttagacctgggcatgcagatttcacatattttcaaaaatatggaataagagattacagaggcggtggaagacaatcagcaagagaaactgcttcaagagtagctgctggagctatagcaaaaaaagttttacaaacaaaattgggtaaaaaatataatgtgataggagctgtaactaggttaggaattttaggatgtgacctaaataattggagagataaagaaatttcaaaaaaccctcttttttgtccagataagtcagcaattaaattatgggaaaaatatttattgggtatcagaaaagcaggatcttcatgcggagctgtgatagaagtaagagctagaggtgttcctgttggtctaggtgctccaatatattcaaaacttgatatggatttagcgtcagctatgatgagtattaatgctgttaaaggagttaatattggatctggtatgaattcagctcaattatctggtgagcaaaattcagatgaaatgtctaaaaaaggtaaaaaaacaaaattttattcaaataatgcaggaggaattttgggtggaatttctagtggccaagaaattgtagtctcgtttgctgttaaaccaactctca

SEQ ID NO: 287157 - DNA, 902 bp, Unknown
  Bacterial polypeptide expressing nucleotide sequence isolated from the Sargasso Sea
agtgataaagccgaaattctttcaggtgtttttgaaagtaaaacaactggtcatcctattgcattaaatataaaaaatgaagatcaaagaagtaaagattataacgaaattgccaataaatttagaccaagtcatgctgatataacataccacgaaaaatacaaaattcgggattatagaggtggtggaagatcaagtgcaagagaaacagcagtaagagttgcagctggagcgattgcttttaaaatactagaagaacgttttccaaaactattcattaaagctagtgtaattcaaataggagaacataaaattgacaaagaaaatttttcatggaatgaagtagataataacccatttttttgtgcagataaagagactgtaccaatttgggaaaaaagtttacattcattgagaaaaagtggaaatagtactggtgcaattatagaaattatagctgaaaatgttccaaaaggtattgggagtcctatttataaaaaacttgattctcaaattgcagaaggattaatgtctataaatgctgtaaaaggggtagaaattggatcaggctttaaatcagcgtcatctactggaagtcaaaataatgatgaaatatttccagataatgatggtggatatatatttaattcaaataacgcaggcggtattttaggtggaatttcaacaggtcaaccaatagttgcaaacttcgctgtaaagccaacaagctctatattaatagaaaaaaattcgattgatgttgaaaatcaaaaaacaaaaattattacaaaaggtagacatgatccttgtgtcggaattagggctgtaccaattgctgaagctatgatggctattatattagtagatcaaattatgatgcatgaagcacaaattggttcttt

SEQ ID NO: 287158 - DNA, 898 bp, Unknown
  Bacterial polypeptide expressing nucleotide sequence isolated from the Sargasso Sea
ggaaagatatttcgtttcacaacttggggagagtcccacggacccgctataggatgtgttattgatggatgtcctccaaatataagtataaaagaaaaagatatacagaatgaattaaataaaagaagacctggtcaatcaaaatttacaactcagagaaaagaagacgataaaataaatattttatctggtatatttgagggtaaaactactggcacacctatatcgttgctaatttataataaagatatgagatcaagagattatgaaacaataaaaaataaatttagacctggtcatgctgattttacatattttaaaaaatatggaataagagattacaggggtggaggtcgacagtcagctagagaaacagctactagagtagccgcgggtgctgtagcaaaaaaggttttggaaaaaaaaataggaaaaaaatataaagtcacaggaggagttacacaactgggaattcttggttgtaatttaaaaaattggaacgacaattttatttctaaaaatccttttttctgccctgacaagtcaattgtaaaaatatgggaaaagtatttgttaagcataagaaaggcaggttcatcttgtggagcaataattgagataagagctaaaggagtccccttaggattgggagctccaatttactcaaaattagacatggatttagctgctgcaatgatgagcattaatgcagtaaaaggtgtaaatattggctcagggatgaactcggcccaactcactggtgaacaaaattctgatgagatttctcaaaagggaaaaaaaactagttttaaatcaaataacgcaggtggcattcttggagggatatcaactggacaaaatatagttctttcatttgcagtaaaaccaacttcttcaa

SEQ ID NO: 287159 - DNA, 447 bp, Unknown
  Bacterial polypeptide expressing nucleotide sequence isolated from the Sargasso Sea
taagagcgaatgggatacctgcaggattgggtgcaccaatttattctaaattagattctgacattgcttctgcaatgatgagtattaatgctgttaagggtgtaaatattggttcaggcatgaattctgctcaattatctggtgaagaaaattctgatgaaattttacaaaaaaatagtaaacttaaatttaaatcaaataacgcgggaggaatactcggtggtatctcttctggccaagaaataattgtttcttttgctgtaaaaccaacatcatcaatcttaaaaagtagaaaaacaattaacaaatttggaaagaatacaaccatttcagtgaaaggaaggcatgatccttgtgtcgggataagagctgttccagttggtgaagcaatgctatcgtgtgttttattggatcatttactaatgcataaagctcaatgtcaatgat

SEQ ID NO: 287160 - DNA, 546 bp, Unknown
  Bacterial polypeptide expressing nucleotide sequence isolated from the Sargasso Sea
atttagttttactacatggggagaaagtcatggcaaagccataggttgtgttgttgatggagttccatcaaatataaatttgactgaaaaggatattcaaccctatttggataagagaaaaccgggtcagtcgaaatttacaactcaaagaaaagaagaggataaagttcaaatactatctggaacttttgaaggaaaaacaacaggccatcctatttctctaattatttacaatcaagatcagagatcaaaagattatggtgacattaaaagtaagtttagaccaggtcatgcagattatacatactggaaaaaatatggcatcagagattatagaggtggtggtagatcaagtgctagagaaactgcgatgagagtagcagcaggggcaatagcaagaaaaatcataaaaaataaaattaaaaatcaagttataattacaggtgcattgattcaaataggtaatcataaaattaattatgataattggaataataattttattcaaaaaaataatttttggagtcctgataaagaaattattaa

SEQ ID NO: 287161 - DNA, 331 bp, Unknown
  Bacterial polypeptide expressing nucleotide sequence isolated from the Sargasso Sea
atgaattcagctactctcactggagatgaaaatgctgatgaaattaggtcaaataaaacaaatttacctatctatgaatctaacaattctggaggaattttaggaggaatttctactgggcaggatttgatcactagatttgcagtaaaaccaacttcatcaattctgaaaacaaaaaacactgtaaatgaaaattacgataatgttcaaattcaaacaactggaaggcatgacccatgtgttggaataagagcagtacctgtaggtgaagccatgatggcatgtgttctgttagatcaatatttaataaatagagggcaaattggttaaa

SEQ ID NO: 287162 - DNA, 532 bp, Unknown
  Bacterial polypeptide expressing nucleotide sequence isolated from the Sargasso Sea
aatgtcatttaacacttttggaaagatatttcgtttcaccacttggggagaatctcatggacccgctattgggtgtgttgtagacggctgtcctcctaatattcatatatctgagaaggacattcaaaaagatttggatagaaggcgacctggtaaatcaaaatttacatctcaaagaaaagaatctgataaagtaaaaattttatctggtgtttttcaaggaaaaactacgggaactcctatttctatgattatttacaatgatgatgctagatcaagagattatgaaacaattaaaaataaattcagacctggtcatgcagattacacatattttttgaaatatggaattagagactatcgtggcggtggcagacagtctgcaagagaaactgcgtcgcgtgtcgcagctggggctatagctaaaatagccttaagtgaaatattaggaaaaaaatttaaagtagttggaggagttgttcaattaggaattcttggttgtaacaaaaataattggaatgaaaaagaaatt

SEQ ID NO: 287163 - DNA, 699 bp, Unknown
  Bacterial polypeptide expressing nucleotide sequence isolated from the Sargasso Sea
gagtagcggctggttctgtagctagaaaatatctaagagagagtgcaggagtagaaattactgtttatctgagtcaaataggaagcattaaagtaaataaaatagacatcaaagagatagaaaaaaacccttttttctgtcctgataaagaacttataccgaagatagaagatttaattaatgaattaagtgatgaaggtgactcaataggagccaaaattacagttatagttagaaatttaccctctggtttaggtgagcctgtttttgataaacttgatggagagatagctaaagccttaatgggcattaatgctgttaagggagttgaaattggagcagggttttcagttatagaaagtaaagggtctgaaagtagagatgaaatgtctccagagggttttaaatcaaatacatcaggagggacttcaggtggaatttcaactgggcaagatttaattgtaagcatagccttaaaaccaacttctagcatagcaaaagaaggggatactattgataaagaaggaagagctactaagataaaagtaacaggtcgtcatgacccttgtgtaggaattagagcaacaccaattgcagagtcaatggttgctcttgtattaatagatcatttacttcgcaatagaggacaaaatttagatgtaagttctggagttcctgaaataccaccgaatcaataaa

SEQ ID NO: 287164 - DNA, 882 bp, Unknown
  Bacterial polypeptide expressing nucleotide sequence isolated from the Sargasso Sea
ctggacagtctaagttcactacccaaagaaaagaagatgataaagtaaatattttgtcaggagtttttgaaggtaaaacaacaggtactccaatatcgatgattatttataataaggatatgagatctagagattatgaaacaataaaaaataaatttcgtcctggtcatgctgatttcacatatttcaaaaaatatggaataagagattatagaggtggtggcagacaatcagctagagaaacagcttctagagtagcagctggggctatcgcaaaaaaagttttagaaaataaaataggaaaaaaatataatgttaaaggtgcagtcactcaattagggattcttggttgcgatataaaaaaatgggatgataaatttatatcaaaaaatccttttttctgccctgataaatcaattttaaaactttgggaaaaatacttgttaagtataagaaaagccgggtcctcttgtggagcaataattgaagttagggcaagaggtgttccggtgggcttgggagctcctatatactcaaaattagatatggatcttgcatcagcaatgatgagtattaatgcagttaaaggagttaatattggatctggaatgaattcggcacaattaactggagaacaaaattcagatgagatatctcagacaggtaataaaactaaatttgactcaaacaatgctggtggaatactcgggggaatttcctctggtcaagaaattaccgtgtcttttgctgtgaaaccgacttcatcaattttaacaagtagaaaaacaattgatcgatttggaaaaaatacctcgatctctgtaaaaggtagacatgatccttgtgtaggtatcagggcagttccaatggagaagccatgat

SEQ ID NO: 287165 - DNA, 1012 bp, Unknown
  Bacterial polypeptide expressing nucleotide sequence isolated from the Sargasso Sea
ctgtataattgatggttgccctccattgattcaactgaaagaacaagatattcaaaaagaattagataaaaggaagcccggtcaatcgaagttcacgactcaaagaaaagaaagtgataaagttcagattctatctggcgtctttgaaggtaagacaactggtacaccaatatccttaataatttacaatgaagatatgcggtcaaaggattacaaaaatattaaggataaatttagacccggtcatgctgattttacttattttaaaaaatatggaattagagattatagaggtggaggaagatcttctgcgagagaaacagccgcaagagttgcagcaggtgctatcgctaaaaaagttttagaaaaaaagctaggtaaaagattttcaatttcagctgcagttactcaacttggtattcttggttgtgacacaacaaaatggaatgataaaataatttataaaaatccatttttttgtcctgataaatcaatgttaaaaatttgggaaaaatatttattaagtattagaaaagcaggatcttcatgtggggcagtaattgaagttagagctaatggaattcctgcaggattaggtgcgcctatctattcaaaattagactcagacattgcatctgcaatgatgagtattaatgctgttaaaggagtgaatattggatcaggtatgaattctgctcaattatctggggaagaaaattctgatgaaatttctcaaaataataaaagaatgaaatttagttcaaataatgcaggtggaatacttggtggtatctcctctggacaagaaatcgttgtttcttttgctgtaaaacctacatcttcaattttaaaaagtagaaaaacaataaataaatttggaaaaaatactactatatctgtaactggtagacatgatccttgtgtaggtattagagctgttccagtaggtgaagctatgctttcatgcgttttattagatcattatctaatgaataaagcacagtgtaattaa

SEQ ID NO: 287166 - DNA, 553 bp, Unknown
  Bacterial polypeptide expressing nucleotide sequence isolated from the Sargasso Sea
aatgtcatttaatacttttggaaagctatttcgtttcacaacttggggagagtctcatgggcctgcaattggttgtattgttgatggttgtcctccaaacataaatcttaaagagcaagatattcagatagaattagacaaaagaaaaccaggacaatcgaaatttacaactcagcgaaaagaggatgataaagttaaaatattgtcaggagtatttgagggtaaaactactggaacacctatttctctcataatctacaataaagatatgagatccaaagattatagtaatattaaagataagttcagaccaggtcatgcagattttacttattttaaaaaatatggaattagagattacagaggtggtggtagatcttctgccagggaaaccgcagcacgtgttgcagcaggtgcgatagcaaaagttgtgctgcagaaaaaattaggtaaaaaatttaaagttattggcgcagtaacacagctaggaattcttggatgtgacacaaaccaatggaacgataaagtaatttcaaaaaatccatttttttgt

SEQ ID NO: 287167 - DNA, 721 bp, Unknown
  Bacterial polypeptide expressing nucleotide sequence isolated from the Sargasso Sea
cctctatcggccgagccacgctgattatacctacgaagccaaatatggattccgtaattggatgggtggaggcagagccagtgcccgtgaaaccatcggccgggttgctgccggagccctcgccaagaaactgctgaaacaatggaatggaacccaaaccctcgcatgggttgaacagatccatgacctcaaagcaaatgtcgatcactcacaggtcacggaacaacagatcgagcaaagcatcgtgcgctgtcctgatactgcagcctcaaatgagatggaacaacggattcttgaagttcgcaaaaaaggcgacagtgtgggcggtatcattcgtgcggtcagtagaaatgttcctgtcgggctgggtgagccggtttttgacaaactgactgctgatttagcaaaagcgctgatgtccctgcctgctacaagaggagttgagttcggtctaggctttcaatcggtttccctgatgggatcagagcacaatgacgaatatgtgattgaagatggtaatgttaagacccgttccaaccgatcggccggaatccagggagggatctccaatggagaagagatcgaccttcggattgccttcaaacccaccgcgaccatcaaccatgaacagaaaacggtcacccgagacggagaatcgaccactctcagcgccaaaggcaggcatgacccctgtgtgcttccaagggctgttcccatggtc

SEQ ID NO: 287168 - DNA, 473 bp, Unknown
  Bacterial polypeptide expressing nucleotide sequence isolated from the Sargasso Sea
tatgggtaattcttttggaaaaattttcaaactaacatcctttggggaatcccatggaaaaggtattggtggcgtaattgatggtgttccaccaaacattccaattgacgtagaagtcattcaaaatgacttacaaagaagaaaaccaggccagtctaatattgtaactcaaagaaaagaagatgattctgcagaattttactctgggatatttgagggaaagacaacaggtactccaataggtttttttattaagaataaagatcaaaaaacaaaagattataatcatataaaggattcttttagaccttctcacgctgactttgtgtatgaaaagaagtatggaaatagagattacagaggaggaggtaggagctctgccagagaaacagcatcaagagtggtagctggatctattgcgaagcaaattctcaatactgtcacaattaaagcctttgtatctcaggtaggtg

SEQ ID NO: 287169 - DNA, 727 bp, Unknown
  Bacterial polypeptide expressing nucleotide sequence isolated from the Sargasso Sea
aaatatggtattcgcgattataggggtggaggtagaagctcggcacgcgaaacaactagcagagtagtggctggagctattgctaaacaatttctgtctcccataaaaattactgcttatgtatctaaagtagggagcttggggctagaaaagccttacagtgatttacattttgatgaaatagaaaaaaacccagtgcgttgtccagatgcagagatggcccaaaaaatggaaaactatatcaaagaagttcgcaaagctggagatacagtagggggcattgttagtgcagtaattcaaaaagtaccagtagggctaggagaacctgcttttgacaaactacatgctttacttggtcatgccatgctttctatcaatgcagtgaaggggtttgagtatggcagtggttttgtcggagcctcactaaggggtagcgcacacaatgatttatttaacccagatggaacaacaaaaaccaaccattctggtggaatacagggaggtatttctaatggaatggatatttatttcaatgtagcctttaaaccggtagctaccatcatgcaatctcaagaaactatagataaagagggtaacaaagttgccatgcagggtaagggacgacacgacccttgcgtagtaccacgtgcagtgcctattgtggaagctatggcagcactcgttttagctgatttctccctgctcaatagaacgattcgaaaatagc

SEQ ID NO: 287170 - DNA, 541 bp, Unknown
  Bacterial polypeptide expressing nucleotide sequence isolated from the Sargasso Sea
gatgagcctaaattcttttggacatatttataaagtgacaacttggggcgaaagccatggtccaagccttggtgctactatagatggatgtccgccaggaattgaaatcaatcaaagccaattacaaagctggctagataaaagaaaaccaggtcaaaataaatacacaacccaaagaaatgaaccagatagcgttgaaatattatctggcgtttttgagggggtctcaacaggaacacccattcaactgctaataaaaaatacagatcaaagatcaaaagattatagtgaaatagcccaaacttttcgacctggtcacgcagacataacctactggcagaagtatggtattcgcgattaccgtggaggcggtagatcttccgctagagaaaccgctgctcgagttgcagcaggcggaatagctcggcttgcattaaatcattttgctcccgatatagaaatatatggttatatgacacagatgggtgatcagaaaattgacagatcccaaatcgatttaaataaaattaacaataatcct

SEQ ID NO: 287171 - DNA, 951 bp, Unknown
  Bacterial polypeptide expressing nucleotide sequence isolated from the Sargasso Sea
acaaaagaaagcctgtccagtctaaattcacaactcaaagaaaagaggatgataaagtagaaattttatcaggaacatttgagggcaaaacaactggtacgcctatctcaatgattatcttcaataaagatatgcgttctaaggattataaaaatattaaagataaatttagacctggtcatgctgattacacatattttaaaaaatatggaattagagattatagaggtgggggcagacagtcagcaagagagactgcctcaagagtggcagcaggggcaatagcaaaacaagttttagaaaaaattattggaaaaaaatacagtgtaattggagcagtaacacaattaggaatactaggatgtgatatagaaaaatggaatgacaaattcatttcaaaaaatcctttattttgccctgataaaacagttttaaaattatgggaaaaatatttacttggaataagaaaagctggctcatcatgcggagctattattgaagtaagagcaagaggtgtgcctgtcggattgggagctccaatttattccaaattagatatggatttggcatcagctatgatgagtattaacgctgtaaaaggagtaaacatagggtcaggaatgaactctgctcaactctctggtgaacaaaattctgatgaaatgtctcaaaagggaaagaaaacaaaatttaaatcaaataatgctggaggaattcttggaggaatttctagtggacaagaaataatggtttcatttgcagtaaaaccgacttcatcaattctttctcaaagaaaaacaattaataaattcggaaaaaatacttcaatttcagtcacaggtagacatgatccctgcgtaggtattagggcagtacctataggtgaagcaatgatgcattgcgtaatccttgatcactacttaatgaataaagctcaatgtggtaattaat

SEQ ID NO: 287172 - DNA, 771 bp, Unknown
  Bacterial polypeptide expressing nucleotide sequence isolated from the Sargasso Sea
aatgtcatttaacacatttggaaagctatttcgattcacaacttggggtgaatctcatggtcctgctatcggctgtatagttgatggttgtcctccaaacataaatctaaatgaaaaagacattcaattagaattggataaaagaaaacctgggcaatcaaaatttacaacccaaagaaaagaagacgataaagtccaaatactttcaggtgtatttgaaggaaaaactactggcacaccaatttctctaattatttataataaagacatgagatctaaagattatggaaatataaaagataaatttagaccaggtcatgcagactttacctatttcaaaaaatatggaattagagattacagaggtggaggaagatcttcagctagagagacagcttcaagagttgcggctggtgctatagctaaactagtacttcaaaaaaaattgggaaaaaaatttaaagttataggtgctgtcactcaattaggaatcttaggatgtgatacgtcacaatggaatgataaaattatttcaaaaaatccattcttttgtccagataagtccatgatcaaattatgggaaaaatatttacttggtgtaagaaaatcagggtcatcatgtggagctgtaatagaagtgagagcaagaggtatcccagcgggccttggagcgccaatttactcaaaattagattcggatattgcatcagcttttatgagtattaatgcagttaaaggagtaaatgttggtgctgggatgaattctgcaca

SEQ ID NO: 287173 - DNA, 865 bp, Unknown
  Bacterial polypeptide expressing nucleotide sequence isolated from the Sargasso Sea
aaagttatttcgattcactacctggggggaatcccatggtcttgctattggttgtataattgatggttgtcctcctttaattgatctaaaagaacacgatattcaaaaagaattgaataaaagaaagccagggcaatctaaatttactactcaaagaaaagaaagtgataaaattcaaattctttctggagtgtttgagggtaaaacaaccggaactcctatatcactaataatttacaatgaagatatgcgatccaaggattacaaaaatataaaagacaaatttagaccaggtcatgctgattttacttattttaagaaatatggaattagagattatagagggggaggaagatcttctgcaagagaaactgcagcaagagttgcggcaggagctatagcaaaaaaagttttagaaaaaaagttaggtaaaaaatttaaaatttctggtgcagttacacaacttggtatactgggatgtgacactacaaaatggaatgacaaaattatttacaaaaatccatttttttgccccgataaatcaatgttaaagatatgggaaaaatatctattaagcataagaaaggcgggatcttcatgtggtgctataattgaagtaagagcaaaaggaattcctccaggtttaggtgctccaatatattcaaaattagacgctgacattacatcagccatgatgagtatcaacgcagttaaaggtgtaaatattggctctggaatgaattcagctcaattatctggtgaagaaaattcagatgaaatttctcaaaataaaaaaaaattgaaatttaattcaaataatgcaggtggaattcttggaggcatttcttctggacaagaaataatt

SEQ ID NO: 287174 - DNA, 810 bp, Unknown
  Bacterial polypeptide expressing nucleotide sequence isolated from the Sargasso Sea
ctgaaattgcaaagcaatttagacctggacacgctgacataacttatcaaactaaatatggaattagggattatagaggcggtggcagatcaagtgcaagagaaactgccgttagagttgcagctggtgcaatagcttttaaagtattagagcataagctagaaaagcctctagtaattaaagctagcgtaattcaaatgggtcctcacaaaattaataaaaaaaactttgattggaatgaagttgataaaaacccatttttttgtggagatgcaatagctgcaaaagaatgggaatcatggttggataacttaagaaaaaacggtaatagtgcaggtgctatcatagaagtaatagctgaaaatgttccaaaaggtttaggaagtcctgtatacaaaaagttagacagtcaaattgcagaagcactaatgagtataaatgccgtcaaaggagttgaaataggtagtggctttaatttagcatccataacaggtgatgaagccaatgatgaaatatttccagacaataaggggagttattacttcgggtcaaaccattctggaggaatattaggaggaatttcctcaggacaaccaattatagctaggttcattgttaaaccaacaagttcaattcttaaagaaaagaactctataaactcagaaaatgaagcaattcaaattaaaactaaaggaaggcacgacccttgtgttggtataagagcagttccagttgctgaagctatgatggccataactttacttgaccagttactggagcatgaaagccagataggaataattaagtaaa

SEQ ID NO: 287175 - DNA, 757 bp, Unknown
  Bacterial polypeptide expressing nucleotide sequence isolated from the Sargasso Sea
tattttaaaaaatatggaataagagattatagaggtggaggaaggcaatctgctagagaaactgcatcaagagtagcggctggtgcgatagcaaaaaaagttttacaaacaaaaatagggaaaaaatataaagtcattggcgctgttactcaattaggtattttaggatgtgataaaaataaatggaatgataattttatactatcaaattcattattttgtcccgataaatcagttctaaagctgtgggaaaaatatttactaagtattagaaaagctggatcttcatgtggagcaataattgaagtcaaagcaagaggtttacccgctggattaggagcgccaatatattcgaaacttgatatggatttagcttctgcaatgatgagtattaatgctgtaaaaggtgttaacatcggttctggaatgaactcagctctattaacaggtgaagaaaattctgatgaaatatctcaaaaaggaaaaaaaataaattttaaatctaataatgccgggggtattctgggtggtatatctagtggtcaagatattaccgtttcatttgctgttaagccaacttcttcaattttaacttcaagaaaaacgatagataaatttggaaaaaatacatctatttcagttaaaggaaggcacgatccttgtgtcggtattagagctgtgccaattggagaagcaatgatgcactgcgttcttttagatcattacatgatgaatattgctcattgtaaaagttagt

SEQ ID NO: 287176 - DNA, 844 bp, Unknown
  Bacterial polypeptide expressing nucleotide sequence isolated from the Sargasso Sea
tttaatacttttggaaaaatttttagatttaccacttggggagagtcccatgggccgtctattggctgtatagtagatggttgtcctccaaatatagcaatttctgagaaagaaattcaaaaagatatggacaaaagaaggcctggacaatctaaatttacaacacaaagaaaagaaagtgataaagtttctattttatctggagtctttcaaggaaaaacaacgggaacacctatttcaatgattatttataatgaagataaaagatcaagggattatgagtctataaaaaataagtttcgtccaggtcacgctgactttacctattttaaaaagtatggaataagagattacagaggtggtggtcgtcagtctgcgagagaaacagcaagccgagtagctgctggggcaatagctaaaatagtattaaaaaaattaattgggaaaaaaattagtattactggtgcagtcactcagttgggtataatgggttgtaacacttccaaatggaatgataaagaaattagaagaaatgcatttttttgtccagataaatcatcagtaaaattatgggaaaaatatttaatggaaataagaaaatcaggttcctcttgcggagctgtaattgagttgagagcaagaggaattccgataggattgggagcgccaatttattctaaacttgatgcagatttggctgcagccttaatgagtattaacgctgtaaaaggggtaaatataggtgctggcatgagttctgcattattaactggagaagaaaattctgatgaaatacgtggaagctcaggcaaaattaaatttaaaagcaacaaggcaggaggaa

SEQ ID NO: 287177 - DNA, 800 bp, Unknown
  Bacterial polypeptide expressing nucleotide sequence isolated from the Sargasso Sea
tcctatatctctcataatttacaatgaagatatgcgatctaaagattacaaatatataaaagataaatttagacctggtcatgctgattttacttattttaaaaaatatggaataagagattatagaggaggaggaagatcttctgcaagagaaacagctgcaagagttgcggcaggagctattgcaaaaaaagttttacaaaaaaaattaggtaaaaaatttagaatttctgctgcagttacacaacttggtattcttggttgcgatacaacaaaatggaatgataaggtaatttataaaaatccatttttttgccctgataattcaatgttaaagacatgggaaaaatatctattaagtataagaaaagcaggatcttcatgtggtgctataattgaagtaagagccaaaggaattcccacaggtttaggtgcaccaatttattcaaaattagacgctgacatcgcctcagctatgatgagtattaatgctgttaaaggtgtaaatattggctctggaatgaattctgctcaattgtctggagaagaaaattcagatgaaatttctctaaataaaaaaaaactaaagtttaattcaaataatgcgggaggaattttgggtggtatttcctctggacaagaaataattgtatcatttgctgtaaaacctacatcttcaattttaaaaagtagaaaaacaattaataaatttgggaaaaataccagtatatctgtaagaggtagacatgatccttgtgttggtataagagctgtaccaattggtgaagctatgctttcat

SEQ ID NO: 287178 - DNA, 502 bp, Unknown
  Bacterial polypeptide expressing nucleotide sequence isolated from the Sargasso Sea
atgtctggcaactcatttggaaaactattctccgttacaacttttggtgaaagtcatggaaaggcaattggctgtattgtcgatggttgcccgcctggatataaagtaagcgaaaaagatattcaacctgatttaaatagaagaaagccagggcagtcaaaatatacaactcaaaggaaagaggacgataaggttgaaattctatctggaacatttgaaggtataacaacgggtactcctataatgctcattatccacaatattgatcagagaagcagagactatagtgaaatcaaaaataaatttcgaccaggtcatgctgattttacgtatcaacaaaaatatggtttgagagattatagaggcgcagggagatcatctgcacgtgagactgttgctagggttgcggcaggcgcaattgcaaaaaaaattttaaaagaagtttgtaaaactaatatttatggctacgtttctcaacttggtaatatcatcccccagtaaa

SEQ ID NO: 287179 - DNA, 868 bp, Unknown
  Bacterial polypeptide expressing nucleotide sequence isolated from the Sargasso Sea
attgagataaaaaaagaagatattcagtatgaattaaatagaagaaagcccggccaatcagatgtaactactcaaagaaaagaagatgatgctgttgagattttatctggtgtttttgaaggaaaaacccttggaacaccaattggaatgattatttacaacaaagatcaaaaatctaaagattactcgaatataaaagatgtttttagaccaaatcatgcagatattacttatcaagcaaaatatggtcatagagattacagaggtggtggaagagcaagtgctagagaaactgcaaattgggtagctgctggagcaattgctaaaaagattcttaaaaaggaaggtgtttcagtaaatggttttgtatcagaaataggaaaagtaaaagctgatacaattaatcataaaaacataagtaataaatatttttttagtgatgaatcaaaattgtctgaactagattcaatgtttaaagacttaatcaaagagggtaattctgtaggtgcaaagttaggagttattgttgagaactgtccagttggattgggagatccagttttcgagaagttagatgctaatttagcaaaagcaataatgactattaacgcagtaaagtcagtatcaattggcaatgcagatgatctattaagccttaaaggttcagaagcaagggatgaaataacagcagcaggtttcatttcaaataattcaggaggaatattaggcggtatatctaacggagatgatataaccttaagctttatcataaagccaacatcaagtattagaacaacaggaaaaactgtaaacaaagaaggtaatgaggttgaaatagaggttactggaagacatgatccatgtgtcg

SEQ ID NO: 287180 - DNA, 457 bp, Unknown
  Bacterial polypeptide expressing nucleotide sequence isolated from the Sargasso Sea
atggcaggtaactcattcggacaaatgttcaggatttcgacctttggtgagagtcatggcccggcgttggggtgcgtgattgacgggtgtccgccaggtcttccgattactgaagaagacattcagagagacctggatcgtcgcaaacccggcacatcccgttatgccacacagcggaaagaacctgatgccgtgagtattctttccggggtcttcgaaggtcggacgacgggtaccagtatcggtctcgtgattcacaacaccgaccatcgctctcgggattattcggatgtcaaggatatctttcgtccggctcatgctgactacagctatctcaagaaatacggaacccgggactatcgaggtggtggaagggcgtctgcgcgggaaaccgccatgcgcgttgccgctggcgcgatcgcccgtcgcttcttggaagaagcttacgggatttccg

SEQ ID NO: 287181 - DNA, 306 bp, Unknown
  Bacterial polypeptide expressing nucleotide sequence isolated from the Sargasso Sea
aatgtcatttaacacttttggaaagctatttcgttttactacgtggggtgagtcacatggtcctgctattggatgtgtagtggatggatgtcctcccggtattaatttgaccgaaaaagaaatacaggtagaccttgatagaagaaaacctggtaaatcaaagtttacttctcaaagaaaagaagctgataaagttgaaattttgtctggtatctttcaaggaaaaacaacgggtactcccatatcaatgatcatctacaataaagatgcaaaatctagagattatgaaacaattaaaaataaatt

SEQ ID NO: 287182 - DNA, 493 bp, Unknown
  Bacterial polypeptide expressing nucleotide sequence isolated from the Sargasso Sea
gggtgttcgtaaagcaggatcctcttgtggagcagtaattgaaattagaggaaagggcattccaataggtctaggagctccaatttattccaaacttgacatggatcttgcttctgcaatgatgagtataaatgcggttaaaggagtaaatattggttcaggtatgaattcagctcaacttactggagaacaaaactcagatgaaatatttcaaactaaaacaaaaactaagtttaaatcaaataatgctggcggaatacttgggggcatatctacaggacaaaatataataatttcttttgccgttaaacctacatcttctatattaaataccagaaaaactattgataaatttggaaaaaatacttcgatatctgtaaaaggtagacacgatccatgtgttggcatcagagctgttccaatcggagaggccatgatgcattgcgttatacttgatcactatttaatgaattttgctcagtgcaaaagttaa

SEQ ID NO: 287183 - DNA, 331 bp, Unknown
  Bacterial polypeptide expressing nucleotide sequence isolated from the Sargasso Sea
cggaataagctctgcatatttatctggagaagaaatctcagatgaaatgagatctaagtcaggaaaaataaaatttaaaagtaacaatgctgggggcatacttggcggtatatcttctggtcaacaaattattgcctctttcgcggtaaaaccaacttcatcaattatcaatagtagagagactgtaaataaaaagggaatcaatacaaaaatatcagttagaggacgacatgatccttgtgttggaattagagcagttcccattggggaagcaatgatgtcttgtgtattattagaccatttgcttatgaaccgtgcccaatgtggctaa

SEQ ID NO: 287184 - DNA, 363 bp, Unknown
  Bacterial polypeptide expressing nucleotide sequence isolated from the Sargasso Sea
aatgagtatcaacgcagttaaaggagttaatattggagctggtatgaatgcagcttttttaagtggtgaggaaaactcagatgaaatgagtaaaggatctggaaaggtgaaatttaaaactaatcaggccggagggattttaggtggaatttcatctggtcaaaacattgtagcttcattcgcggtgaaacctacttcctcaattttaactagtcgaaacacgatagataaaaaaggtaaaaatacaaaaatttctgtcaaggggagacatgatccgtgtgttggtattagagccgtgccaattggtgaagcaatgcttaattgtgtgctattagatcactatcttttgaatagagcacagtg

SEQ ID NO: 287185 - DNA, 292 bp, Unknown
  Bacterial polypeptide expressing nucleotide sequence isolated from the Sargasso Sea
tgaactcagagtgaataaaaataaaaagattattttttcctcaaataattctggagggatactaggtggtatttcatcaggacaagatattcaattatctgttgccattaagcctacatcatcaattttaaaatcacaaaaaacaataaatgataaatataaaaatactactatatctactcgaggtagacatgatccatgcgttggaattagagctgttccaatagttgaagcaatgacagcatgtgtattggctgatcatttgatgagaaataaagctcagtgtggctag

SEQ ID NO: 287186 - DNA, 859 bp, Unknown
  Bacterial polypeptide expressing nucleotide sequence isolated from the Sargasso Sea
aggtttagagatatcagagtctgatatacaaaaggaattagataaaagaaaacctggatcttctaagtacacgacccaaagaaaagaagaagataaagttgagattctttctggagtttttgaaggaaaaacaacaggaactcctataggtatgatcgtcaagaataaagatcagaaatctaaagattacgataagttaaaagatatttttagaccttctcatgctgattattcttatactcaaaagtatggaataagagatcatagaggaggaggcagggcttcagctagagaaactgtaatgagagttgctgccggtgccatcgctaagaagtttttaaagaaagagctaaatctagaaatagttggatatttatctcaaattggtaaattgaagattagcgaagttaattttaatgagatccctaataacccttttttctgtccggataaaagtcttgtaaaagaaattgagcttttaatagatgatctcagaaaagaaggagattctgtaggcgccaagatcagtatttctgttaagaatatgccattaggtctaggcgagccggtttttgataaattagatgcagatattgctaaagcaatgatgagtattaatgcagtaaaaggagttgaattggggggtggttttgatttggttgaatcaaaaggttctgaagtaagagatgagatgacctctgatggatttaaaaagaataactctggaggttcagctggaggaatttcaacaggtcaagatttaatagtaaatattgctttgaaacctacctctagtattaataaagaaggtgagactatagataaagaaggaaaaaatactaagatacaagtaaaagga

SEQ ID NO: 287187 - DNA, 482 bp, Unknown
  Bacterial polypeptide expressing nucleotide sequence isolated from the Sargasso Sea
aaaatcaggatcctcgtgtggagctgttattgagataagagcaagaggtgtccctgttggtttaggtgctccaatttattcaaaattggatactgacatagcttcaggtctgatgagtattaatgcagttaaaggtgtaaatattggtgcaggcatgaactctgcccaattaagtggagaacaaaattcagatgaaattttctcaaaaagaaaaaaattaaaattcaattcaaataacgcgggtggaatccttggtggaatttctacgggccaagaaattgttgcatcttttgctgtcaaaccaacatcatcgattttaactaatagaaaaacaattaataaatttggtaaaaatacttcaatatctgtcaaaggtagacatgatccttgtgtaggaataagagctgttccaattggtgaagcaatgatgaactgtgttttacttgaccactacctaatgaataaagcccagtgtaattaat

SEQ ID NO: 287188 - DNA, 358 bp, Unknown
  Bacterial polypeptide expressing nucleotide sequence isolated from the Sargasso Sea
gatgtctataaatgcagtaaaaggagtttctataggttctggatttgaagtagttgatatgaaaggttctgaatgtagagatgaaataacaccaaaaggatttttatctaatcactctggaggtactttaggaggaataacaacaggtcaagatatttgtattcacctagctttgaaacctacttcaagtattttaaaagaaggaaaaacagttaatctaaaaaataaagcaaccactatcaaaacaaaaggtcgtcatgacccatgcgtaggtataagagctgttcctatagcagaagcaatgatggctcttgtgttgttagatttgtatttatgtgacaaagcgcaaaacaaatga

SEQ ID NO: 287189 - DNA, 565 bp, Unknown
  Bacterial polypeptide expressing nucleotide sequence isolated from the Sargasso Sea
atgtcatttaatacatttggaaagttatttcgtttcactacttggggtgaatctcatggaccagctattggatgtgtagttgatggatgtcctccgagaataaaaatatctgaaaaagacatacaaaaagaactaaataagagaaaacctggtcaatctaaatttactactcaaagaaaagaggatgataaagttgaaatcttgtcaggaatatttaatggtgagacaactggtacaccaatattaatgattatttacaataaggatatgaaatcaagagactatgagactatcaaaaataaatttcgtcctggacacgctgatctaacttattttaaaaaatatggtattagagacttcagaggaggtggtaggcaatcagcgagagagactgcagctagagtagctgcgggtgcaattgcaaaaaaagttttagaaaaaaaaattgggaaaaaatattacgttaaaggtgcggttatccagcttggaattttgggttgtgatgtatctgcatggaacaataaatttatagaaaaaaatccatttttctgtcctgacaaaaaag

SEQ ID NO: 287190 - DNA, 477 bp, Unknown
  Bacterial polypeptide expressing nucleotide sequence isolated from the Sargasso Sea
gatcttcatgtggagcaattatagaagttagagctaaaggtgttccaattggattgggagctcctatttattctaaattagatatggatttggctgcagctatgatgagtatcaacgcggtcaaaggtgtaaatattggatcaggaatgaactctgcccagcttactggtgaacaaaattctgatgagattattcaaaagggaaaaaaaaccaattttaaatcaaataatgcaggaggaattcttggtggtatttcttcaggtcaagatatagttatttcatttgcagttaaaccaacctcatctattctttcatcaagaaaaacaatcgataaatttggaaagaatacatctatttctgttagaggtagacacgatccatgtgtaggcattagagcagtgcctattggagaagcaatgatgcactgtgtattattggatcactacttaatgaacgccgctcaatgtaatagttaat

SEQ ID NO: 287191 - DNA, 267 bp, Unknown
  Bacterial polypeptide expressing nucleotide sequence isolated from the Sargasso Sea
aaataaaatttaaaactaatcatgctggtggaatactcggaggaatttcatctggtcaagatatagttgcatcttttgcagtaaaaccaacttcctctattttaactaaaagagagactattgataaaaaaggtaaaaacaccaacatctctgtcaaaggacgtcatgatccatgcgtaggaattagagcagtgcctattggggaagcaatgataaattgtgttttgcttgaccatttcttaatgcacaaagcacagtgtggttaat

SEQ ID NO: 287192 - DNA, 381 bp, Unknown
  Bacterial polypeptide expressing nucleotide sequence isolated from the Sargasso Sea
aatgtcatttaatacttttggaaagctatttcgtttcacaacttggggggaatctcatggaccagcaattggttgtattgttgatggttgtcctcctaacataaatcttaaagaacaggatattcagtcagaattagataaaagaaaaccaggacaatcaaaatttactactcagagaaaagaagacgataaagttcaaatattatccggtatatttgaaggcaaaactacaggaacacctatttctttaataattcaaaataaagacatgagatctaaagattatggaaatattaaagataaatttagaccaggtcatgcagattttacttatttcaaaaaatatggaattagagattacagaggaggaggaagatcttc

SEQ ID NO: 287193 - DNA, 955 bp, Unknown
  Bacterial polypeptide expressing nucleotide sequence isolated from the Sargasso Sea
tcgcatggtccagctattggatgcgtcgttgatggttgccctccaaatattccaataaaagacagcgatatacaaaaagaacttaataaaagaaaaccaggacaatctaaatttacaactcaaagaaaagaagatgataaaattaatattttatctggtgtttttgagggtagaacgactggaactccaatttctctagttatttataataaagatatgagatctagagattacgagacaataaagaataaatttaggccaggacatgcagattatacttattttaaaaaatatggaattcgggattacagaggtggtggaagacaatctgctcgcgagactgctgccagagttgcggcgggtgctattgcaaaaatagttttgaaaaataaaattggtaagaattatcaagctatcggtgctgttacacaattaggaatattaggatgtgacttaaagaaatggaaagacaaaacaatctctagtaacccatttttttgtcctgataaaactgtgattaaactttgggaaaaatatttacttggaataagaaaagctggatcgtcatgtggagcaattattgaggttagagcaaaaggagttcctttggggcttggagcaccaatatactcaaaattagatatggatcttgcagcagcaatgatgagcattaatgctgttaaaggtgtaaatattggatcaggtatgaactcggcaatgttaactggtgaggaaaattctgatgaaattttgaaaaaaaaaggtaaaactagttttagatcaaataatgcaggaggaattcttggaggaatatctactggacaagaaataaatgtttcatttgcagtaaaaccaacatcatctattttgtcatcgaggaaaacaatcgatagatttggcaagaatacaacaatatctgtaaaagggaagacacgattcatgcgttggaattaga

SEQ ID NO: 287194 - DNA, 374 bp, Unknown
  Bacterial polypeptide expressing nucleotide sequence isolated from the Sargasso Sea
aatgtcatttaatagttttggaaagttatttcgttttactacttggggggagtctcatggccctgcgattggatgtattgtggatggttgtcctccaaatataaagttaaaagaggaggatattcaaaaagaattaaacaaaagaagaccgggccaatcaaaatttacaactcaaagaaaagaagacgataaagtaaacattctctcaggaatatttgaaggaaaaactactggcactcctatatcaatgatcatttacaataaagatatgagatctagagattacgaaacaataaaaaacaaatttagacctggtcacgctgatttcacctattttaagaaatatggcattagagattatagaggagggggaa

SEQ ID NO: 287195 - DNA, 760 bp, Unknown
  Bacterial polypeptide expressing nucleotide sequence isolated from the Sargasso Sea
ttttagaccttcacatgctgattatgtttatgagaaaaaatatggaaatagagactacagaggaggaggtaggagttctgcaagagaaaccgcatgtagagtagttgctggttcaattgctaaacaaatattggataatgttaaaatcaatgcatacgtatcttcagttggaaatatctcagttaacaaacctcactcagaacttgactttgataatacagaaaaaaataatgttagatgtccagatttagatgttgccaaagaaatggaagaattaatattaaaagtccgaaaagatggtgatactgttggaggtattgtgacttgtgtaataaaaaacacacctgttggtcttggagaaccggttttcaaaaaattacattcagagctaggagctgctatgttatcaataaatgctgtaaaaggttttgaatatggaagtgggtttgatggggtaaaaatgagaggtagtgatcacaatgatattataaattcagatggctctacaaaaactaataactcaggaggaattcaaggtggaataagtaatggtatggatatttattttaatgttgcatttaagccagttgcaactattatgaaagatcaagaaagtattgattccaagggtaaaaaaactactgttaaaggtaagggaagacatgacccatgtgtagttccaagagcagtgccaattgttgaagctatggctgctttagttatattagattacacattgattaataattcaagaaaataa

SEQ ID NO: 287196 - DNA, 295 bp, Unknown
  Bacterial polypeptide expressing nucleotide sequence isolated from the Sargasso Sea
gatgagattatacaaaagcggaaaaaaaaccaattttaaatcaaataatgcaggaggaattcttggtggtatttcttcaggtcaagatgtagttatttcatttgcggttaaaccaacctcatctattctttcatcaagaaaaacaattgataaatttggaaagaatacatctatttctgttagaggtagacatgatccatgtgtaggcattagagcagttcctattggagaagcgatgatgcactgtgtattattggatcattacttaatgaacgctgctcaatgtaatagttaa

SEQ ID NO: 287197 - DNA, 736 bp, Unknown
  Bacterial polypeptide expressing nucleotide sequence isolated from the Sargasso Sea
agagattatagaggtggaggcagacagtcagcaagagagactgcatcaagagtagcagcaggggctatagcaaaacaagttttagaaaaaattattggaaaaaaatacggtgtaattggagcagtaacacaattaggaatactaggatgtgatatagaaaaatggaatgacaagtttattacaaaaaatcctttattttgtcctgataaaacagttttaaaattatgggaaaaatatttacttggaataagaaaagctggctcatcatgcggagctattattgaagtaagagcaagaggtgtgcctgtcggattgggagctccaatttattctaaattagatatggatttggcatcagctatgatgagtattaacgctgtaaaaggtgtaaacataggatcaggaatgaactctgctcaactttctggtgaacaaaattctgatgaaatgtctcaaacaggaaagaaaacaaaatttaaatcaaataatgcaggaggaattcttggaggaatttctagtggtcaagaaataatggtttcatttgcagtaaaaccgacttcatcaattctttctcaaagaaaaacaattaataaatttggaaaaaatacttcaatttcagtcacgggcagacatgatccatgtgtaggtattagagcagtgcctataggtgaagcaatgatgcattgtgtaatccttgatcactacttaatgaataaagctcaatgtggtaattaat

SEQ ID NO: 287198 - DNA, 721 bp, Unknown
  Bacterial polypeptide expressing nucleotide sequence isolated from the Sargasso Sea
aatgtcttttaatacatttggaaaattttttcgatttactacatggggtgagtctcatggtccagcaataggatgtgttattgatggatgtcctccaaatattaagcttaatatcaaagacattcagttagaattaaacaaaagaaagcctggtcagtctaaattcacaacccaaagaaaagaggatgataaagtggaaattttatcaggaacatttgagggcaaaacaactggtacacctatctcaatgattatctttaataaagatatgcgtagcaaggattataaaaatattaaagataaatttaggcctggtcatgctgattacacatattttaaaaaatatggaattagagatcatagaggtggaggcagacagtcagcaagagagactgcatcaagagtggcggcaggggcaatagcaaaacaagttttgaaaaaaattatcggaaaaaaatacaatgtaattggagcagtaacacaattaggaatactaggatgtgatatagaaaaatggaatgacaaattcattgcaaaaaaccctttattttgtcctgataaaacagttttaaaattatgggaaaaatatttacttggaataagaaaagctggctcatcatgcggagctattattgaagtaagagcaagaggtgtgcctgtaggattgggagctccaatttattcaaaattagatatggatctggcatcagctatgatgagt

SEQ ID NO: 287199 - DNA, 526 bp, Unknown
  Bacterial polypeptide expressing nucleotide sequence isolated from the Sargasso Sea
cttggattcaatgtttgatgatttaattaaagagggtaattctgttggtgcaaagttaggagttattgttaagaattgtcctgtaggtttaggtgatccagtttttgaaaagttggatgcaaatttagcaaaagcaataatgacaattaatgctgtaaagtcagtatctgttggcaatgttgatgatctacttaatctaaaaggctcagaagcaagagatgaaataacaacgtcaggttttttatcaaataattcaggcgggatattaggtgggatatctaatggtgacgatataagcctcagttttattattaagccaacatcaagcataaaaacaaagggtaaaagtatcgataaagatggtaaagaagttgatatagaagttactggaagacatgatccatgtgtgggcataagggcggtaccaattgctgaggctatggttagcttggttttagtggatcatttcttaattaataaagcacaatgtgcagatgttaagcaaaatcttccatttagtgaataa

SEQ ID NO: 287200 - DNA, 862 bp, Unknown
  Bacterial polypeptide expressing nucleotide sequence isolated from the Sargasso Sea
tcattcggcgagagccacgggcctgcgctggggtgcatcattgatggctgccctccgggacttgagctttcggaagcggacatgcagcgggacctggatcgccgaaagccaggcacatcccggcacacaacccagcgtcgtgaagccgacgaggtgagaatcctctcaggcgttttcgagggtaagaccaccggaacgccgattggcctgctgattgaaaacaccgatcagcggtccaaggattactcaaagatctccgaacagtttcggccggctcacgctgattacacctacatgcacaagtatggtgttcgcgactatcgcggcggtggtcgttcgtctgcccgtgagaccgccatgcgggttgctgcgggtgctgttgcgagaaagttcctagaacagcgcctgggtatcaggattcgcggctatctgtcgcaactggggcccatcaaggccgagaaactggattgggatcaggttcaccagaacccgttcttctgcccggatgcggacaaggttcccgaaatggaagcttatatggatgccctgcgcaaggagggtgattccatcggtgcccggatcaacgtggttgccgaaggcgtgccaccgggtctcggcgagccgatctttgaccgcttggatgcggatctggctcatgcactgatgagcatcaatgcggtgaagggcgtcgagattggcgccggttttgactgcgtcgaccagaagggcaccgagcatcgtgacgagatgacgccggaagggttcctttcgaataatgccggtggtgtgcttggaggtatttcctcagggcaaccgatcgtgggcagtatcgcattgaagcccacgtcgagtttgcgcttgt

SEQ ID NO: 287201 - DNA, 822 bp, Unknown
  Bacterial polypeptide expressing nucleotide sequence isolated from the Sargasso Sea
taatttacaatgaagatcatagatcaaaagattataaaaatataaaaaatttatttaggcctggtcatgcagactatacttattgggctaagtatggaatacgtgattatagagggggtggaagatcaagtgcaagagaaacggctatgagagtggcagctggtgcaatagcaagaaaaataataaaacataaattaaaaaaagatattaaaattaaaggtgctttagttcaaattggtaatagtaaaatagattacaataattggagtgataatttcataaataaaaatcaatttttttgtccggataaaaatattataaaaaaatgggaactaatgattaacaaagctaggaaatcagggtcatctttaggagctattatagaaatccattgtaaaaaaatgcctactggacttggcgagccagtttatgacaaactagatgcagatttggcaaaagcaataatgagtattaatgctgtaaaaggtgtagaaataggtaatgggtttgcaagcgttcttgagtcaggaatatcaaatgttgatgaaatgagaattagaaacaaaaaacctatttttttatcaaataacaatggtggaattttaggaggcatatctactggtcaagacctagtgttaagattttgtgttaaaccaactagctccatacttgaaacaaaaaagacaattaatactaatttaaaagaagtgaatatcaaaactaaaggaaggcatgatccatgtgttggaattagagccgtacccgttggagaagcgatggttgctaatactcttgctgatcattgtttaagatttttttaga

SEQ ID NO: 287202 - DNA, 292 bp, Unknown
  Bacterial polypeptide expressing nucleotide sequence isolated from the Sargasso Sea
agatgaaatttctcaaaataaaaaaaaaacaaagtttaaatctaataatgctggaggtattctaggaggcatttcttcaggtcaagaaataattgtttcttttgccgtaaaaccaacctcttcaattttaaaaagtaggaaaacaattaataagttcggaaagaatacaagtatatcagtcaaaggtaggcatgatccatgcgtgggtattagagctgtgcctgtaggtgaagctatgctatcgtgtgttttacttgatcattacctcctacataaagctcagtgtggttaa

SEQ ID NO: 287203 - DNA, 751 bp, Unknown
  Bacterial polypeptide expressing nucleotide sequence isolated from the Sargasso Sea
ttttcttaaatacggaataagagattaccgtggtggcggaagacaatcggcaagagaaacagcttctagagtagcagcaggagccattgcaaaaaaagttttgaaaaaattaattggtaaaaaatttaaagttgtaggaggtgttatccaattaggacttctaggctgtaataaaaataattggaatgataaagaaatacaaaaaaatccatttttttgcccagataaaaaggcaattaaactttgggaaaaatatcttcttgcgataagaaaatccggatcttcttgcggtgcagtaattgaattaagagcatctggtatacctgctggtcttggtgctccaatttattctaaattagacacggatttagctggagcattaatgagtataaatgctgttaaaggtgtaaatattggcgctggtatgaacgcagcctttttaggtggggaagaaaattctgatgaaattagaaatgttaaaggtaaaacaaaatttaaatcgaataatgctggaggaatactaggcggaatatcttctggtcaagaaatagttgcttcttttgctgtaaaaccaacatcttcaattttaaatacaagagaaactattagcaaaaaaggtaaaaatactaaaatttctgttagaggaagacatgatccttgtgttggcattagagctgtaccaattggtgaagcaatgatgtcttgtgttttgctagatcattacttgttgaaccggggacaatgtggataa

SEQ ID NO: 287204 - DNA, 687 bp, Unknown
  Bacterial polypeptide expressing nucleotide sequence isolated from the Sargasso Sea
aatgtcatttaatacttttggaaagctatttcgtttcacaacttggggagagtctcatggacctgcaattggttgtattgttgacggttgtcctccaaacataaatcttaaagagcaagatattcaaatagaattagacaaaagaaaaccaggacaatctaaattcacaactcagagaaaggaggatgataaagttcaaatattatcaggaatatttgagggtaaaactacaggaacaccaatttctctaataatctataacaaagatatgagatccaaagattatagtaatattaaagataagttcagaccaggtcatgcagattttacttattttaaaaaatatggaattagagactatagaggtggtggcagatcttctgctagagaaactgcagcacgagttgcggccggtgcagtagcaaaagttgtacttcaaaaaaaattaggtaaaaaatttaaagtaattggtgcagtaactcagctaggaattcttggttgtgatacaaatcaatggaacgataaaataatttcaaaaaatccatttttttgtccagataaatcaatgattaaattatgggaaaaatatttgcttggtgtaagaaaatcaggatcctcatgtggagcagtgattgaaataagagcaagaggtataccagttggtttaggtgctccaatttattcaaa

SEQ ID NO: 287205 - DNA, 860 bp, Unknown
  Bacterial polypeptide expressing nucleotide sequence isolated from the Sargasso Sea
aaccactggcacgcctatttctataattatttataacgaagacaaaaaatctagagattatgagtctataaaaaacaaatttagaccaggacatgcggattatacatattttaaaaaatatggtatcagggattttagaggaggtggaagacagtctgccagagaaactgcatgtagggtagcagcaggtgcgatagcaaaaattgtgcttaaaaaaattcttggtaagaaatttaatgttattggagcagtcacacagttaggattgatgtcttgtgacaaacaaaattggaaagatacagaaataagaaaaaatccatttttctgtcctgataaaaaatcagtcaagctatgggaaaaatatcttttagctgtaagaaaatcaggatcatcatgtggagcaattatagaactaagagcctctggaattccggttggattgggagctccgatatattctaaattagataccgacattgctgcagctctaatgagcataaatgcagtgaaaggagttaatattggatcgggaatgagctctgcatttctaagtggtgaagaaaattctgatgaaattagaagaagtggaggaaaacttaaatttaaaactaatcatgctggtggaattttgggaggaatttcctcaggtcaagatattattgcctcttttgcagttaaaccaacctcctcgattttaaatagtcgtgagacaatagatacaaaagggaaaaatacaaaaatttctgtaaaaggaaggcatgacccttgtgttggaattagagctgttcctattggagaagcgatgataagttgtgttatactcgatcatttattaatgaaccgagctcagtgtggttaat

SEQ ID NO: 287206 - DNA, 784 bp, Unknown
  Bacterial polypeptide expressing nucleotide sequence isolated from the Sargasso Sea
catgacgagcaacactttcggaaatttatttacactaacaacatttggcgaatcgcatggagaatgtattggtggtataattgatggatgtcctgcaggaaaaaaaatagacataaaatccgttcaaactgatcttgacagaagaaaaccaggtcaatctaaaatagtcacacaaagaaaggaagatgatcaattagaaatattatccggaatatttgaaggaaaaaccactggcaccccaattgggttcattattaaaaacaaagaccataagtcaaaagactataaccatataaaagaatcttttagaccttcacatgctgattatgtttatgagaaaaaatatggaaatagagactacagaggaggaggtaggagttctgcaagagaaaccgcatgtagagtagttgctggttcaattgctaaacaaatattggataatgttaaaatcaatgcatacgtatcttcagttggaaatatttcggtcaacaaacctcactcagaacttgactttgataatacagaaaaaaataatgttagatgtccagatttagatgttgccaaagaaatggaagaattaatattaaaagtccgaaaagatggtgatactgttggaggtgttgtgacttgtgtaataaaaaatacgcctgttggtcttggagaaccggttttcaaaaaattacattcagagttaggtgctgcgatgttatcaataaatgcagtaaaaggttttgaaaatggaagtggctttaatggggtaaaaatgagaggaagtgatcataat

SEQ ID NO: 287207 - DNA, 343 bp, Unknown
  Bacterial polypeptide expressing nucleotide sequence isolated from the Sargasso Sea
tgaaattggctctgggtttcacgcagcaaatatgcaggccagtgaacacaatgacgcctttattaatgaaggcgctctaattaaaaccaaaacaaatcaatcgggcggcacacaagggggaatttctaatggagaaatcatttattttaatgtcgcctttaaacctacagcaaccatccataaaacccagcaaactgtcactgatacaggaaaccctgttaatttaaacgccacaggtcgacatgatccctgcgtactgcccagagcggttcccattgtagattcaatggctgcattggtattagccgatcatagtcttcgtaaccgtagtgctaaattataa

SEQ ID NO: 287208 - DNA, 748 bp, Unknown
  Bacterial polypeptide expressing nucleotide sequence isolated from the Sargasso Sea
tctgaacaagatattcaagttgaactagataaaagaaggccaggctcgaatgcttttacaactcaaagaagtgaaaaagataaggttcaaatactctcaggtatttttgaagggaaaactacaggcaccccgattggaatgattattttcaatgaggatcaaaaaagtgaagactacgataatttgaaagatgtttttcgcccgtctcatgctgactacacttatttaaaaaaatatggatcgagggatcaccgaggaagcggaagagcttctgcaagggaaaccgtgatgagagttgctgctggagccattgcaaaaaaatatttgaaagattatctatcagttgaaataactggttatgttgaacaagtaggagaaataattgcagatcaaattgattttaaagagatcaataacaatgctttcttttttcctgacaaaacaaaattgaaatctctagaagatcttattgcctctttgagagaagcaggagattctgtcggtgcaaaaataaaaattaatgtgaataacgttccagcaggtttaggagaaccagtatttgataagttggatgcagatttggctcacgggttaatgagtattaatgcagttaaaggagttgaattagggctaggatttgatgtcgtttcaaaaaaaggaagcgaacatagagatgagatagatcgagatggatttgcttctaacaacgcaggcggaattttgggcggtattcttcaggccagccaat

SEQ ID NO: 287209 - DNA, 565 bp, Unknown
  Bacterial polypeptide expressing nucleotide sequence isolated from the Sargasso Sea
gataattggaatgaaaactacatttatgaaaatgattttttctgcccagatgaaaaaattatacctgaatggcaaaatcttattactacagctcgaaaagatggatcctcattaggggcaataattgaattaagagcatctggcgtacctgctggacttggtgaaccaatatacgataaattggactctgatattgcaaaagcattaatgactataaacgcagtcaaaggtgtagaaataggtaatggctttgctagcgttaatgaagatggaaaaacgaatgtagacgaaatgagaattaaagatggaaagcctctatttcttagcaataacaatggaggcatacttggaggtattagctctgggcaagatataatatgtcgctttgttgtaaaaccaacaagttcaatttcaactgaaagaaaaacgatagatattaatttacgagaaacatcaatttcaaccaaaggtcgtcacgatccctgcgttggtataagagcagttcctgttggtgaggcaatgattgcaactacaattgctgatcatagtcttcgttacttataag

SEQ ID NO: 287210 - DNA, 238 bp, Unknown
  Bacterial polypeptide expressing nucleotide sequence isolated from the Sargasso Sea
ttcatcaagtctgatgatattagtaagttaagaacaacatcaaacaattcaggaggtatacagggcggaataagtaatggtgaaaatatcgagatgaagatagcttttaaacctacagcaaccatcgggaaagaacagaaaacagtaaatgctgaaggtaaagaagtacttatgaaagcaaaagggagacacgatccatgcgttctaccaagagcagtccccatggttgatgctatgg

SEQ ID NO: 287211 - DNA, 849 bp, Unknown
  Bacterial polypeptide expressing nucleotide sequence isolated from the Sargasso Sea
atttgaaggtaaaacaacaggtcatcctatatctttaatgattcataaccacgatcaaagatctaaagattattcagaaattaaagatatttttagacctggtcatgcagattatacttattggtcaaaatatggaataagagattatagaggtggtggacgttctagtgcaagagaaactgcaatgagagttgcagctggtgctgttgctagaaaaattattgaattaaaattaaaaaagtttgaaatcaaaggttatcttgttcaaataggaaatagtaagataaattacaataattgggattctaattttattgataaaaatgattttttctgtcctgacaaagatataattcctacttgggaaaaaataataaatgatgcaagaaaaaatggatcttctgtaggggcaatcattgaaattgttgcaaaaggaatacctccaggtttaggtgagccaatttatgaaaaacttgattctgatcttgctaaagctatgatgagtattaatgccgtcaaaggagtagaaattggaaatggttttaatagtgtaaatgaatcaggagtttctaatgttgatgaaatgagaataaaaaacaatactcctctattcacttcaaacaacaatggtggaattctaggaggaatatctacaggacaagatattattgtacgtttttgtgttaaaccaaccagctctataattagtgcaaaaaaaactataaatactgatttaaaagaaacaaatgtgacaactaaaggcagacatgatccttgtgtgggaattagagcagttccggttggagaagcaatgatggctaccactcttgctgatcattgtttgagatt

SEQ ID NO: 287212 - DNA, 505 bp, Unknown
  Bacterial polypeptide expressing nucleotide sequence isolated from the Sargasso Sea
aaagtatcttttagctgttagaaagtctggctcattttgtggtgcggttatagaagtaagagcaaaaggagtaccccttggtttaggggcccccgtttactcaaaattagatatggatatagcatctgcgatgatgagcattaatgctgttaaaggtgttaatataggttctggaatgaattctgcaaaattaactggtgaagaaaattcagatgaaatgtttaaaaaaggaaaaaaaacaattttcaaaagtaacaatgcgggtggaattttaggaggtatatcaactggacaagatataattgtgtcttttgctgtaaagccaacttcctcaatattaaatgaaagaaaaactatcgataaaaaaggtaaaaatacttctatctctgtaaagggaagacatgacccttgtgttggtatacgagctgtcccaattggtgaagcaatgatgcactgcgtattacttgatcactatttaatgaataaagctcagtgtagtaattaa

SEQ ID NO: 287213 - DNA, 817 bp, Unknown
  Bacterial polypeptide expressing nucleotide sequence isolated from the Sargasso Sea
atgttatcaaaactaaaatttcttacagctggtgaatctcatggaaaaggtttattaggcattttagatggtatcccagcaggactaaacatttctgaagattatatagatatacagttatctaggaggcaaatgggtcacggtagaggaggacgcatgaaaattgaaaaagaccatggtgagatctggagcggtgtccgccatgggaaaacactcggttctcctgttggcatattagttgaaaataaagactggaagaattgggaaaataaaatgtcaatcacccctatcaaagaaaaattaaaaagagtaactctacctaggccagggcatgctgatcttgctggaatacagaaatatggctccgacgatataagaaatatattggaacgatcaagtgcaagagaaacaactatgcgtgttgcacttggctcagtatgtcgaaaactgattgaagagtttgggatagaagttggcagcagagtaatacagatacacaatgcggtagacaaagacccattccctaataatatgaaccccaatcaattaagtaatgtagcagacctatctccggtccgttgtttgaataaaaatatagaatcattaatgatggctaatatagacaatgcaaaaaagaatggggattcggttggtggaatatttgaagtaattgcgactggtgtaccctatggattgggctccccaatgcaatgggatagcaaattacaagctaaaatatctggaatgatgatgagcgttaatgcatttgctggtattgaaataggcgcaggatttaataaagctgaaaagttaggaa

SEQ ID NO: 287214 - DNA, 267 bp, Unknown
  Bacterial polypeptide expressing nucleotide sequence isolated from the Sargasso Sea
ccaaaacaaatcgatctggaggtattcaaggcgggatttcaaacggagatcccattatatttgaaaccgtgttcaagccaacagcaacagtctttaaaaagcaacgtaccgttgatattaataaaaaagaaatagaccttgaagcaaaagggcggcatgatccttgtgtattgcctagagccgtacccattgttgagtcaatggccgcaattgtaattttagatcattatttaaggcaaatagcaatttcaaagacgttaaaataac

SEQ ID NO: 287215 - DNA, 658 bp, Unknown
  Bacterial polypeptide expressing nucleotide sequence isolated from the Sargasso Sea
atgtcatttaacacttttggaaagatatttcgtttcacaacttggggagaatctcatggtccagcaatagggtgcatagtagacggatgcccacctaatatcagtataaaagaacaagatatacaattcgaattaaacagaagaaaacctggtcaatcaaaatttactagtcaacgtaaagaagatgataaagttcaaattctttcaggaatattcgaaggtaaaacaactggaactcctatttctttaataatttataacaaagatatgagatcaagagactatgagacaattaaaaataaatttagacctgggcacgcagattttacatatcttaaaaaatatggaattagagattatcgtggtggtggcagacaatcagctagagaaacagcaagtagagttgccgcaggcgttatagcaaaaaaagttctagaaaataaaattgggaaaaaatttaaagttattggtgctgtaactcaattagggattcttggatgtgatacaaataaatggaatgacaaggaaatcaaaaaaaatttattcttttgtccagataaatcaatagtaaaactatgggaaaaatatttattaaatataagaaaatcaggttcgtcttgtggagcaataattgaggtaagagctagaggaataccag

SEQ ID NO: 287216 - DNA, 301 bp, Unknown
  Bacterial polypeptide expressing nucleotide sequence isolated from the Sargasso Sea
aatgtcgattaattcatttggccacttgtttagagtaactacatggggggaaagccatgggagtgcaattggagcaacagttgatgggtgcccgcctggcgtaggacttagtgaagccgatatacaaccttggttagacagaagaaggccgggccaaagcaaatatacgacccaaagaaaagaattggataaggttaagatactctcaggaacatttgaaggagtaaccacaggcactccaattcaactattaattgaaaatcaagatcaaagatcaaaggactatagtgaaattgcaaat

SEQ ID NO: 287217 - DNA, 512 bp, Unknown
  Bacterial polypeptide expressing nucleotide sequence isolated from the Sargasso Sea
ttgggaaaaatatttacttagtataagaaaagccggatcatcttgtggagcgataattgaaataagagcaagaggtgtccctttaggacttggtgcaccaatatattcaaaattagatatggatctagcagctgcaatgatgagcattaatgcagtaaagggtgtaaatattggatctggaatgaattcagcaatgctaactggagaagaaaactctgatgagatattacaaagaaaaggtaaaactagttttaaatcaaacaatgctggtggaatattgggtggaatttcaacaggtcaagaaataaaagtttcatttgctgttaaaccaacttcatcgattttatcgtcaagaaaaacaattgataagtttggcaagaataccacaatatctgttaaaggaagacatgacccgtgtgtaggaattagagcagtaccaataggagaagctatgatgcattgtgtaattcttgaccactatttaatgaacaatgcacaaaataaattttaat

SEQ ID NO: 287218 - DNA, 836 bp, Unknown
  Bacterial polypeptide expressing nucleotide sequence isolated from the Sargasso Sea
tattttcaataaagatatgcgttctaaggattataaaaatattaaagataaatttagacctggacatgcagattacacatatttaaaaaaatatggaattagagattatagaggtggaggcagacagtcagcaagagagactgcatcaagagtagcagctggagcaatagcaaaacaagttttgcaaaatattattgggaaaaaatacagtgcaattggagcagtaacacaattaggaatactaggatgtgacacagaaaaatggaatgacaaattcattgcaaaaaaccccctattttgtcctgataaaacagttttaaaattatgggaaaaatatttacttgggataagaaaagctggctcatcttgtggagctattattgaaataagagcaagaggtgtaccagttggattaggagctccgatttattctaagttagatatggatttggcatcagctatgatgagtattaatgctgtaaaaggagttaacattggatctggaatgaactctgctcaactttctggtgaacaaaattctgatgaaatgtctcaaacaggaaagaaaacaaaatttaaatcaaataatgctgggggaattcttggaggaatttctagtggtcaagaaataatagtttcatttgcagtaaaaccaacttcatcaattctttctcaaagaaaaacaattaataaatttggaaaaaatacttcaatttctgtcacaggtagacatgatccttgtgtaggtataagagcagttcctataggtgaagcaatgatgcattgtgtaattcttgatcattacttaatgaataaagctcaatgtggtaattaat

SEQ ID NO: 287219 - DNA, 892 bp, Unknown
  Bacterial polypeptide expressing nucleotide sequence isolated from the Sargasso Sea
attggtggcatagtggatggtttgccgcccggcttaaagctcgatctggaacaaattcagcttgagctggacagacgcaaacccggcacttcacgctacaccacagcacgtcgcgaagacgatatcgtcaaaattttatctggtgtgtttgaaggctatagcacaggcgcgtctattggtttactgattgaaaataccgatcagcgctcacaagattattccgctattaaagacttgttccggcctggtcatgcggattacacctactggcataaatttggtattcgtgattaccgtgggggtggacgttcatccgcacgtgaaactgcggttcgtgtggccgctggggctattgccaagcagtacttaaaagccaagtttggtatcgaaatccgtggttatctggcgcagcttggcccaatcaaagcgcaaaagctggattgggatcaggtcgagcaaaacgcctttttctgccctgatgttgatgtgcttgagcagttagatgagtacatgcgtcaactgaaaaaagacggtgactcagtcggtgcccgcattaatgtcgtggcgtccggtgtgcctgtggggtggggagagcctgtgtttgaccggattgatgcagatatagcccacgccatgatgagtatcaatgcagttaaagccgtcgaaattggtgatggttttgctgtggtcgagcaacgtggttctacccatcgcgatgaactgcgcttagctggctttagtgctaaccatgcaggtggcactttaggtggtattagctccggtcaggatattaatgtcagcattgcgttaaaaccaacgtccagtatcagcattcctggtaaaactattacaaccagcggtgaagaaacagaaatgatcaccaaaggccgcc

SEQ ID NO: 287220 - DNA, 688 bp, Unknown
  Bacterial polypeptide expressing nucleotide sequence isolated from the Sargasso Sea
gatgtcttttaatacttttggaaaaatatttaggtttactacatggggtgagtcacatggtccagctataggctgtattgtggatggatgtcctccaaatataaccctgtctgagaaagacatacaaaaagacatgaatcgaagaagaccaggaaatacaaaatttgtctcacaaagaaaagagtctgataaaattgaaatattatcaggaatatttaatgggaggacaacaggtacacctatttctattttaattcgaaatgaggacaaaaggtcaagagattatgaatcaattaaaaataaatttagacctgggcatgcagattttacttacttcaagaaatatggaattagagattatagaggcggcggtagacaatcagcaagagaaacagcttctagagttgcggccggtgcaattgcaaaagcagttttaaaaaatatgataggaaaaaaatttagtatttttggagcagtaactcagctaggtttaatgggttgtgatgtaactaaatgggacaacaacgaaattagaaagaatccttttttctgccctgacaggaaatcagtaaaactttgggagaaataccttctcgctgtaagaaaatcaggttcttcttgtggtgcaattattgagttaagagctgatggaatacccgctggtctcggtgcgccaatctattcaaaa

SEQ ID NO: 287221 - DNA, 919 bp, Unknown
  Bacterial polypeptide expressing nucleotide sequence isolated from the Sargasso Sea
atgagtggaaatagtataggtaaatctttcaccgtaactacttttggtgaaagtcatgaaaaagcactggggtgtatcatagatggatgccctccagggattattatttctgaacaagatattcaagttgaactagataaaagaaggccaggctcgaatgcatttacaactcaaagaagtgaaaaagataaggttcaaatactctcaggtatttttgaagggaaaactacaggcaccccgattggcatgattattttcaatgaggatcaaaaaagtgaagactacgataatttgaaagatgtttttcgtccatctcatgctgactacacttatttaaaaaaatatggattgagagatcaccgaggcagcggtagagcttctgcaagagaaaccgtgatgagagttgcggcaggagccattgcaaaaaaatatttgaaagatcatctagcagttgaaataactggttatgttgaacaagtaggagaaataattgcagatcaaattgatcttaaagagatcaataacaatgctttcttttttcctgataaaagaaaattgaaatctttagaagatcttattgcctctttgagagaagcaggagattctgtcggtgcaaaaataaaaattaatgtgaagaacgttccagcaggtttgggagaaccagtatttgataagttggatgctgatttggctcacgggttaatgagtattaatgcagtaaaaggagttgaattagggctaggatttgacgtcgtctcaaaaaaaggaagcgaacatagagatgagatagatcgagatggatttgcttctaacaacgcaggcggaattttgggcggtatttcttcaggccagccaatagatattgcaattgctttaaaacctacatcgagtatcagcaccgagggtaaaactgtcgata

SEQ ID NO: 287222 - DNA, 863 bp, Unknown
  Bacterial polypeptide expressing nucleotide sequence isolated from the Sargasso Sea
ttttttgaagggaagacaactgggaacgcccataggtcttttaattaggaataaagaccagaaatcaaaagattatgatgatttaaaagatgtatttaggccttctcatgcagattatacctatacgaagaagtatggttttagggatcatagaggaggagggagatcttctgccagagaaactaccatgcgagtagcagctggtgcaattgcaaaaaaatatttaaaagattcgctaggagtaaacatcaagggttatttatctcagattggtaacattaaaattaagcagattgatctatcggaagtagatcagaatccgttcttttgtccagaccctcaaatggttgaaagcatagaaattttaattgacgatctaaggtctgaaggcgattctgtaggagcaaggatagagataatggcttccaatttacctgttgggctcggtgaacctgttttcgacaaactagatgctgatatagctaaaggacttatgagtattaatgcagtaaaaggtgttgaaatagggaatggatttgatttggttagcgctaaagggtcagatagtagagatgaaattacacctgaaggctttaaaactaattcctctggaggcatagccggcggaataagtactggccaagaaataatagctggaatagctctaaaacccacttccagtatagtaaaacaaggtgacacagtagatacttcaggtaaggcaacaaaggttacagtcaaaggacgtcatgatccatgtgtgggtattagagctactcctatcgcagaggcgatgatggcccttgtattaatggatcatttcttaaggaatagagctcaaaatgctgatgtagaatctgata

SEQ ID NO: 287223 - DNA, 756 bp, Unknown
  Bacterial polypeptide expressing nucleotide sequence isolated from the Sargasso Sea
atttaggcctggacatgctgattttacgtatttcaaaaaatacggaataagagactatagaggtggaggtagacagtctgcaagagaaactgccgcaagagttgctgcgggcgcaatagcaaagaaggttttagaaaaaaaaattggaaaaaaatataaagttgttggagcagttactcaattaggaatacttggttgcgacgtaagtaaatggaatgataaatttatttcaaaaaatccatttttttgtccagataaagatattttaaaattatgggaaaaatatttgttgagtgttagaaaagcaggttcttcatgtggtgcaattattgaggttagagctcgaggtattccattaggcttaggggcacctatttactcaaaactagatatggatttagccgccgctatgatgagtataaatgctgttaaaggagtaaatataggatctggaatgaattcagctcagttgtctggtgaacaaaattctgatgaaatatttcaaaggggaaaatcaacaaaattcaaatcaaataatgccggtggaatacttggtggaatatctactggtcaagaaattgtaatatcttttgccgttaaaccaacatcttcaatattaacgtctagaaagacaatagataaatttggaaaaaatacgtctatttcagtacgaggtagacatgatccttgtgtcggaataagagctgtgccaattggggaagcaatgatgcactgtgtattattagatcactattt

SEQ ID NO: 287224 - DNA, 829 bp, Unknown
  Bacterial polypeptide expressing nucleotide sequence isolated from the Sargasso Sea
agaggaagaaagtgacaaaattcatatattgtctggagtatttaatggaaggacaactggtacaccaatttcaattataatccataatgaggataaaagatcaagagattacgagtcgattaaagaaaaatttagacctggacatgctgattttacttatttcaaaaaatacggtattcgagactttaggggtggcggaagacaatctgccagagagactgctagtagagttgccgctggagcagttgcaaggattgttttgaaaaatcttattggttcaaaatttaacgtaatcggagcagttactcaactaggattaatgtcttgcaataaaaataattggaataataaagaaattagaaaaaatccttttttctgcccggacaaaaaatcagtaaaactttgggaaaaatatttactagcggtaagaaaggctggttcttcttgtggtgccattatagaattaagagcatcaggagtaccggtaggattaggcgctccaatatattccaagctagatacagatatagctgcagcgcttatgagtattaacgcagttaaaggtgtaaacattggagcaggtatgtcagccgcttacttaagtggagaagagaattccgatgaaataagaaaattatcaggaaaaataaaatttaaatcaaataatgctggtggaattttaggcggaatttcaactggtcaaggaatagtagcctcatttgcggtaaaacctacctcttccattttaagtaaaagagaaacaattgacaaaaaggggaaaaatacttctatttcggtcaaggtcgtcatgacccttgcgtgggaatag

SEQ ID NO: 287225 - DNA, 461 bp, Unknown
  Bacterial polypeptide expressing nucleotide sequence isolated from the Sargasso Sea
tatgtcttttaatacttttggaaaaatttttaggttcactacttggggagagtctcatgggccagctataggctgtatagttgacggttgtccgccaaatatccctatttcagagaaagagattcaaaaagatatggacaagagaaggccaggacagtcaaaatttacaacacaaagaaaagagagcgataaggtttccattttatcaggtgtatttcaagggaagactacaggaactcctatctcaatgattatttataatgaggataaaagatctagagattatgagtctattaaagacaagtttaggccgggtcatgctgacttcacttattttaaaaaatatggaataagagactatagaggtggcggtcgtcagtctgcgagagaaactgcaagcagagtggctgcgggcgcgatagctaaaattgttcttaaaaaaatcattggaaaaaaattta

SEQ ID NO: 287226 - DNA, 664 bp, Unknown
  Bacterial polypeptide expressing nucleotide sequence isolated from the Sargasso Sea
aatgtcgattaattcttttggccatttgtttagagtaaccacctggggagagagccatggtagcgcgattggagcaactgttgacgggtgcccacctggggtagaacttagcgagaaagatatacagccttggttagacagaagaaggccgggtcaaagcaagtatacgactcaaagaaaagaattggatcaagtaaagattctatcagggacatttcaaggtgtaaccacaggtactccaattcaactattaattgaaaaccaagatcaaaaacccaaagattacagtgaaattgcgaatacatttagaccaggtcacgctgaccttacataccatcttaaatatggaataagagactatagaggaggtggaagatcttcagcgagagaaacagcatcaagagtagcagcaggaggggtggctagaaagattttagcaaatttggctcctgatatagagattacaggctatctaatacgtattggaaaaatggagattgatagaaaaaatttttctgaaactacaattgaagaaaatgacttttggtgtcctgataaggctatagtccccaattgggagaaatatataaaagatctacggaaaagcggtaactctgttggtgcaaatgatgaaatattgctaaaggcgtacctgcaggactag

SEQ ID NO: 287227 - DNA, 256 bp, Unknown
  Bacterial polypeptide expressing nucleotide sequence isolated from the Sargasso Sea
tcaaataaagcaggaggaatacttggaggtatatctagtggacaagaaataatagtatcttttgccgtaaaaccaacttcatcaattctgtccactagaaaaactattgataaattcggaaaaaatacttctatatcagtcaaagggcgtcacgacccatgtgttggaataagagcagtccctattggcgaagcaatgatgcactgtgtattactcgatcattatttaatgaatgaggctcagtgcagtaactaat

SEQ ID NO: 287228 - DNA, 262 bp, Unknown
  Bacterial polypeptide expressing nucleotide sequence isolated from the Sargasso Sea
aaaatttaaatctaatcaagctggaggtattctaggtggaatttcctcaggtcaaaatattgtagcttcatttgcagtcaaaccaacatcctcaattttgactagcagaagcaccattgataaaaaagggaaaaatactaaaatttctgttaaaggaagacatgatccttgtgtcggtatcagagcagttcctataggtgaagcaatggttaattgtgtattattggatcattttttaatgaatagagcacagtgtagctaa

SEQ ID NO: 287229 - DNA, 430 bp, Unknown
  Bacterial polypeptide expressing nucleotide sequence isolated from the Sargasso Sea
atgcttcgatattggactgctggtgaatcccatgggccggccctgactgctttggtagacggttttccagcggggctcactattgataccgatagtatcgacagtgagttgcaacgacgccaaggggggtatggccgtggcggacggcaacgaatagagacagatacagtcacttttttgtctggcctttggaaaggtaagactcttggcagtccactcacgttacaggtcatcaatcgtgatgccaaaattgagcagatggatgatattgagcggcctcggcctgggcatgccgacttgcctggtgcgatcaagcaccttggaggcgtgcgtcctgttctggagcgggcaagcgctcgtgaaacagcagctcgtgttgctgcgggtgctcttgcgaggcagttactgtcattgtttggcattgaggtag

SEQ ID NO: 287230 - DNA, 547 bp, Unknown
  Bacterial polypeptide expressing nucleotide sequence isolated from the Sargasso Sea
aatgtcatttaatacttttggaaaggtttttcgtttcactacatggggagaatctcatggtcctgcaattggttgtataatagatggttgtccaccactaataaacctcaatgaacgagatattcagatagaactcaacaaaagaaaacctggtcaatctaaatttactactcaaagaaaagagagtgataaagtagagattctttcaggagtctttgagggtaaaacaactggaactccaatctctttaataatttataacgaggatatgcgctcaaaagattatagtgatattaaggataaattcagaccaggtcatgctgattttacttactttaaaaagtatggcattagagattatagaggtggtggaaggtcttcagcgcgagagactgcttctagagttgcagcaggagcggtagcaaaaaaagttttggaaaaaaaattaggtaaaaaatttaaaatttctggtgcagttacacaacttggaattcttggatgcgatacaaacaagtgggatgataagataatttataaaaatccgttt

SEQ ID NO: 287231 - DNA, 805 bp, Unknown
  Bacterial polypeptide expressing nucleotide sequence isolated from the Sargasso Sea
tacagaaatataaaaaacaaatttagaccagggcatgcagatttcacatattttcaaaaatatggaataagagattatagaggtggaggaagacaatcagcaagagaaactgcttcaagagtagcagctggagctatagcaaaaaaagttttacaaactaaattgggcaaaaaatataatgtgataggaggtgtaactaggttaggaattttaggatgtgacctaaataattggagagataaagaaatttcaaaaaactctcttttttgtccagataagtcagtagtaaaattatgggaaaagtatttattgggtatcagaaaagcaggatcttcatgtggagctgtaatagaggtaagagctagaggtgttcctgttggtctaggtgctccaatatattcaaaactcgatatggatttagcgtcagctatgatgagtattaatgctgttaaaggagttaatattggatctggtatgaattcagctcaattatctggtgagcaaaattcagatgaaatgtctaaaaaaggtaaaaaaacaaaattttattcaaataatgcaggaggaattttgggtggaatttctagtggccaagaaattgtagtctcgtttgctgttaaaccaacttcttcaattttgagccaaagaaaaactatagacaaatttggaaaaaacacttcaatatctgttaaaggtagacatgatccttgtgttggtattagagcagtaccaataggtgaagcaatgatgcattgtgtaattttagatcattatcttttaaataaagctcagtgtggaaattaat

SEQ ID NO: 287232 - DNA, 608 bp, Unknown
  Bacterial polypeptide expressing nucleotide sequence isolated from the Sargasso Sea
catgtctggcaatacgtttggaaaaatatttaaattaacgacttttggtgaaagtcatggcactgctatgggttgtattttagatggttgtccgcctcaaattgagctaacaaaagaagatattcagaacgaattagataaaagaaagcctggtcaatcagatgtaactacacaaagaaaagaagatgacgcagtagagattttgtctggagtttttgaaggaaaaactcttggaacacctataggaatgataatttataacaaagatcaaaaatctaaggattattcgaacatcaaagatgtttttaggccaaatcatgcagacattacttatcaagcaaaatatggtcatagagactatagaggtggtggaagagcaagtgctagagaaactgcaaactgggtagctgctggagcgattgctaaaaagattcttaaaaaccaaggtgtttcagtaaatggttttgtattagaaataggaaaagtgaaggctgaattcattaatcataaaaatataaataataaatacttttttagtgatgaatcaaaattgtctgaactagattcaatgttcaaagacttaattgaggagggtaattctgtaggtg

SEQ ID NO: 287233 - DNA, 517 bp, Unknown
  Bacterial polypeptide expressing nucleotide sequence isolated from the Sargasso Sea
aatggctggcaacgctttcggaaaacttttctcagttacaacgtacggagagagtcatggagaggctattggttgcattgtggatggatgcccacccaatatcgaacttaatgaaaatgatattcaaactgatttaaatcgcaggaaaccaggacaatctcgttacacaacgcaaaggagagaggatgacgaggttgtgattctgtctggaacatttgaaggaaaaactactggaactccaattggtcttttggttaaaaatgaagatcaaaaaacaaaagactacagtaaaatcaaagatatatataggccatctcatgcagattatacatatgaaaagaaatacggtattagagattatcgaggtggtggtagaagttcggctagagaaacaacgatgagagttgctgcgggagcaatagcaaaaaaggtcttgcgcgatacccttggtgtttcagtttatggatttgtgagtcaaattggggatattagatattcaaaatttgatcgaaaagtg

SEQ ID NO: 287234 - DNA, 763 bp, Unknown
  Bacterial polypeptide expressing nucleotide sequence isolated from the Sargasso Sea
atgggagatagtttcggaaaaatatttcgcattaccacatggggagagtcacatggagcaggagtgggagtggtaattgacggctgcccatcaggattaccactcaatgtggaagattttcagtatgagctagatagaagaaaaccaggtcaaagtaaaattactactcagcgtaaggaaagtgatattgctaaaattctttccggagtctttgaggggagaactacaggagcatcaatttcagttatggtgtctaatcaagacgcaaaacctcatgcttatgaccacctgaaggaattatatcggccaagccatgcagatttcacctatgaaaaaaaatatggtttgcgagactggaggggtggtggtcgagcaagtgctcgtgaaactgttggaagagttgcagctggtacaatagcaaaaaaacttttacaccactggagaaaaattcagacaattgcttgggtagaacaaatccatgatattaaatcttcaattgacaaaaaaactgtcaaaactaaacagattgaagctagtatcgtacgctgtccagatttagaagcttctgaagcaatggtagagcgcattcatcaagctcgaaaatcaggcgacagcgtaggaggcattatccgggcggtcgtaagaaatgtgccttcaggattaggtgaaccagtatttgacaaacttactgctgatcttgcaaagggactgatgtcactacctgcaactagaggagtggagttcggtcttgggtttaattcag

SEQ ID NO: 287235 - DNA, 773 bp, Unknown
  Bacterial polypeptide expressing nucleotide sequence isolated from the Sargasso Sea
gtagagattttgtctggagtttttgaaggaaaaaccctcggcacaccgataggaatgataatttacaataaagatcaaaaatctaaagattactcgaatataaaagatgtttttagaccaaatcatgcagacatttcttatcaagcaaaatatggtcatagagattacagaggtggtggaagagcaagtgctagagaaactgcaaactgggtagctgctggtgcaattgctaaaaagattcttaaaaatgagggtgtctcagtaaatggttttgtatcagaaataggaaaagtgaaggccgattcaattaatcataaaaatataaataataaatacttttttagtgatgaatcaaaattgtctgaactagattcaatgttcaaagacttaattgaagagggtaattctgtaggtgcaaagttaggagttatagttgagaactgtccagttggattgggagatccagttttcgagaagttagatgctaatttagcaaaagcaataatgactattaacgcagtaaagtcagtatcaattggcaatgcagatgatctattaagtcttaaaggttcagaagcaagggatgagataacagcatcaggttttacttcaaataattcaggaggaatattaggcggcatatctaacggggatgatataagcctaagttttatcattaagccaacatcaagtattaaaacaaaaggaaagactgtaaataaagaaggtaatgaggttgatatagaggttactggaagacatgatccatgtgt

SEQ ID NO: 287236 - DNA, 424 bp, Unknown
  Bacterial polypeptide expressing nucleotide sequence isolated from the Sargasso Sea
tatggcaggaaattcatttggtaatatttttaaaatttcatcctttggagagtcacatggaaaagctcttggaggtgtaatagatggatgcccagcaggtttagaaattgatttagaatttattaactcagagttaaatagaagaagaccaggacagtctgaaattgttacccaaaggaaagaagatgactctgttgaatttttgtcaggaatttttgaaggcaaatcaactggaactccaatagggtttataattgtaaataaagatcaaaaatcaaaagattattctcacataaaggaaagctacagaccttcacatgcagattttgtttacgataagaaatatggttttagagactatagaggtggtggtaggagttctgcaagagaaactgtcataagagtcgttgcaggtgcaatagct

SEQ ID NO: 287237 - DNA, 614 bp, Unknown
  Bacterial polypeptide expressing nucleotide sequence isolated from the Sargasso Sea
tatgtcatttaatacatttggaaaagtatttcgtttcacaacttggggtgaatcccatggtcctgctataggatgtgtagtagatggatgccccccaaatataaaaataagtgaaaaagatattcaaattgaactaaataaaagaaagcctggtcaatcaaaatttacaactcaaagaaaagaagacgataaagttaatattttgtcaggtgtatttgagggaaaaactacaggcacgccaatatctatgataatttacaataaagatatgagatcaagagattatgaaactataaaaaataaatttagacctggacacgcagatttaacatatttcaaaaaatatggaattagagactatagaggtggaggaagacagtcggctagagaaactgcttctagggtagctgctggagctattgcaaaaaaagttttagaaaacaagtttgggaaaaaatttaaaacaattggagctgtcactcaactgggaattctaggttgtaatataaataaatggaatgataatgaaataagaaaaaatccttttttttgtccagataaatcaatagttcagctttggaaaaagtatttgttaagcgtaagaaaatctgggt

SEQ ID NO: 287238 - DNA, 880 bp, Unknown
  Bacterial polypeptide expressing nucleotide sequence isolated from the Sargasso Sea
accagcaataggatgtattgttgatggttgcccacctaatatcaaaattagcgaaaaagatatacaggctgaactagataaaagaagacctggacaatcaaaatttacaactcaaagaaaagaggacgacaaagtaaatattttatcaggtatttttgaaggaaaaacaacaggtactccaatatcaatgattatttataatagagatatgagatcaagagattacgaaacaataaaaaataaatttagacctggtcatgctgattatacatacttcaaaaaatatggaataagagactaccgtgggggaggaagacagtcagctagagaaacagcatctagggtagcagctggagcaatagcaaaaaaagttctagagaaaaaattgggaaaaaagtacaaaacaattggagctgtgatacaacttggtattcttggttgtgataccaaaaaatggaatgacaaagttataagtaaaaatccatttttttgtcctgataaatcaatattaaaattgtgggaaaaatatttacttggtattagaaaatctggttcttcttgtggagcaattattgaaataagagctaaaggtatccctgttggacttggcgctccaatttattctaaattagatatggacttagcttctgcgatcatgagtattaatgcagtaaaaggggttaacattggatctggaatgaattctgcatttttaactggagaagaaaattctgatgaaataattcaaaaaggaaagtcgccaatttttaaatctaataatgctggaggaatacttggtggaatttcaagtggacaagatattgttatttcatttgcagttaaaccgacttcttctattttaagttcaagaaaaacaata

SEQ ID NO: 287239 - DNA, 736 bp, Unknown
  Bacterial polypeptide expressing nucleotide sequence isolated from the Sargasso Sea
gaaaaaatatggcataagagattatagaggtggtggtagatctagtgctcgagaaacttcgatgagagtagcagcaggggcaatagcaagaaaaatcataaataataaaataaaaaatcaagttgtaataacaggtgcattaattcaaataggtaatcataaaattaattatgataattggaataataattttattccaaaaaataaattttggagtcctgataaagaaattattaaaatatgggaaaacgaaatacaaactgcaagaaaatctggctcctctttaggtgccatcattgaaattagagtaaaaggtttgccagttggattaggagagcctatttatgaaaaaatagactctgatatagctaaggcattgatgtctattaatgctgttaaaggtgtagaaatgggtaatggatttagcagtgtttatgaaactggaatttctaatgttgatgaaatgagaattaaaaataaaaaacctatatttctttctaataataatggcggggttcttggaggaattacaactggtcaagaattaattactagatttgtagtaaaaccaacaagctcaatattatcaacaaaaaaaacaattaatacaaaattaaaagaaacgacaatatcaactaaaggtcgtcatgatccttgtgtagggataagagctgttcctgttggtgaagcaatggttgcaacaactctagctgatcactgtttaagatttctctaa

SEQ ID NO: 287240 - DNA, 718 bp, Unknown
  Bacterial polypeptide expressing nucleotide sequence isolated from the Sargasso Sea
aatgtcttttaatacatttggaaaattttttcgatttactacatggggtgagtctcatggtccagcaataggatgtgttgttgatggatgtcctccaaatatcgagcttaatattaaagacattcagttagaattaaataaaaggaagcctggtcagtctaaattcacaacccaaagaaaagaggatgataaagtggaaattttatcaggaacatttgagggcaaaacaactggaacacctatctcaatgatcatattcaacaaagatatgcgttctaaagactataaaaatatcaaagataaatttagacctggtcatgctgattatacatattttaaaaagtatggaattagagattatagaggtggaggcagacaatcagcgagagagactgcttcaagagtggcagcaggggcaatagcaaaacaagttttacaaaatattattgggaaaaagtacagtgtaattggagccgtaacacaattaggaatactaggatgtgacacagaaaaatggaatgacagtttcatcacaaaaaaccctttattttgtcctgataaaacagttttaaaattatgggaaaaatatttacttgggataagaaaagctggctcatcatgtggggctattattgaagtaagagcaagaagtgttcctgtcggattaggagctccaattttatcaaaattagatatggatttagcatcagcaatgatg

SEQ ID NO: 287241 - DNA, 784 bp, Unknown
  Bacterial polypeptide expressing nucleotide sequence isolated from the Sargasso Sea
aaatttagaccaggtcatgctgattacacttactttaaaaaatatggaattagagactttagaggaggtggaagacaatcagcaagagagacagcaagtagagttgcagcaggagctgttgcaagagtagttttaaaaagaattttaggaaaaaaatttaaagtgattggtgcagttacgcagctaggattaatgtcctgcgataaatcaaactggaaagactctgagataagaaaaaatccatttttctgccctgataaaaaatctgtaaaactttgggaaaaatatttattggctgtaagaaaagcaggatcatcatgtggtgcgatcattgaacttagagctagtggaattccagttggcttaggtgctccaatctactcaaagcttgatactgatattgcagcagcgttgatgagtattaacgcagtcaagggagtaaatattggttctggtatgaacgcagcttttctcagtggcgaagaaaattcagatgaaatgagtaaaaactcaggaaaactaaaatttaaaactaatcatgctggggggatacttggcggtatatcttcaggacaagatataattgcctcatttgcagtaaaaccaacatcatcaattttaacgagtagagatacgattgataaaaaagaaaaaaacacaaaaatttctgtaaagggccgtcatgatccttgcgtaggtataagagcagttccaatcggggaagcaatgattaattgtgttctacttgatcacctattaatgaacagagctcagtgtggttaat

SEQ ID NO: 287242 - DNA, 277 bp, Unknown
  Bacterial polypeptide expressing nucleotide sequence isolated from the Sargasso Sea
ggaaaaaaaacaaaatttagttcaaataacgcgggtggaattcttggtgggatttcatctggtcaagagataagggtttcttttgctgtaaaacccacatcgtctattttaactagaagaaaaactatagatcgatttggtaaaaatacatctatatctgtaaagggccgacatgatccttgtgtaggtataagagctgtaccaattggtgaagctatgatgcactgtgtattgttagatcattaccttatgaacagtgctcaatgtaaaatttaat

SEQ ID NO: 287243 - DNA, 610 bp, Unknown
  Bacterial polypeptide expressing nucleotide sequence isolated from the Sargasso Sea
atgtcatttaatacttttggaaagttatttaggtttactacttggggtgaatctcacggaccggctatagggtgtatcattgatggttgtccaccaaatatacaaattagagctgaagatattcaaaaagaattaaataaaagaaagcctggacaaagtaaatttgtcacccaaagaaaagaaaaagatttagttcatataatgtcaggtgtgtttgaaggaaaaactactggtacgccaatatcattaataatttataatgaggaccaaaaatcaagagattatgaaactataaaatctaaatttagaccaggacatgctgattacacttactttatgaaatatggaataagagactatagaggtggaggaaggcaatcagccagagagacagctgcaagggttgcggctggtgcggtagcaaaaaaagtcttggaaaataaaattggtaaaaaatataaagttattggtgccgttacacaaattggaattttaggcattaatccaaataattgggacgagaaatttataggaaaaaatttgtttttttgtcctgataagaaaattttaaaactttgggaaaaatatcttttagcaattagaaaggcag

SEQ ID NO: 287244 - DNA, 374 bp, Unknown
  Bacterial polypeptide expressing nucleotide sequence isolated from the Sargasso Sea
gatgagtattaatgcagttaaaggagtaaatattggatctggtatgaattcagctcaattaactggtgaagaaaattctgatgagattatttcaaaaggaaaaaatataaaatttagatcaaataaagctgggggtatacttggaggtatatctagtggacaagaaataatagtgtcttttgctgtaaaaccaacttcatcaattctgtccacaagaaaaacaattgataaattcgggaaaaatacatctatatcagttaaaggtcgtcacgacccatgtgttggaataagagcggtccctataggtgaagcaatgatgcattgcgtattactcgatcattatttaatgaataaagctcagtgcggtaactaat

SEQ ID NO: 287245 - DNA, 709 bp, Unknown
  Bacterial polypeptide expressing nucleotide sequence isolated from the Sargasso Sea
atgtctggcaacagcttcggtcaccttttcaaattcacgacattcggcgagagtcatggccccgccattggtgttgtggtggatggtgtgcccccgaacattgacctgatcgaagaggatattcaactctatctggacaagcgtaaacccggccgatctcgatttaccactcagcgccgggaagccgatgaggtggagattctctcaggtgtgtttgaggggacaacgactggggcgccggtaggtctcctgattcgtaactcggatgcgcgctccaaggactatgacgacatcaaggacctattccgcccaggccatgcggactggacctattttatcaaatacggcaaccgtgattaccgaggaggtggccgggcaagtgcgcgcgaaaccgcctgccgggttgcggcgggcgccatagcccgcaaaatacttggtcctaatattgaggtgcggggcgcgctcattcaaataggcccccatgaaatcaatcgagataattgggattgggaccaagtcagtaaaaatccattttggtcgcccgatgccgagattattacctcatgggaaacctatatggaccaactccgaaaagatggttcgtccgcaggtgcgaagatcgaaatcgtggcccatggagtgccggttggactaggggcccccctatatgacaagctagattccgagatcgcagcgggcctcatgagca

SEQ ID NO: 287246 - DNA, 772 bp, Unknown
  Bacterial polypeptide expressing nucleotide sequence isolated from the Sargasso Sea
atggcaggaaatagttttggcaaggtatttagagtaaccacatacggagaatcgcatggagagagtatagggggaatcattgatggttgtccagcaggattggaaatgaatctcgattttgtccaacaacaattggattatcgtaaacctggtcaatctgcgattaccactgctcgaaaagaagaggataaggtgcgctttctttctggcatttttaaaggacggactacaggaacacccattgctttccaaattcaaaacaaagatcaacagagtaaggattacagtgaaatcaaaacagccttccgcccatctcacgcagactatgtttatcaagaaaaatacgggcatcgtgattatcgtggaggaggaaggtcttcagcaagagaaacggcctgtagggttgttgcaggtgccattgcagagttaatattaaagcaacacggcattgaaatcaatgcttatgtgcagcaggttggaacaatcgctatgctcaaacattttgatgagttggactatggcctgatttataaaaacaatgtgcgctgtccagatgaggaattggcgcacaagatgcaggcatacataactgacattaaagagaaaggagatacagtgggaggtgctgtgcagacgattgtaaagaattgtccagtaggattgggagaaccggtatttgataaattgcacgctgaccttgcgaaggcattgatgagcatcaatgccacaaaaggcatagagtttggatcgggattttgcgctgcagaaatgt

SEQ ID NO: 287247 - DNA, 463 bp, Unknown
  Bacterial polypeptide expressing nucleotide sequence isolated from the Sargasso Sea
ggagcgataatcgaagtaagagccaatggtattcctgctggattaggagcacctatatactcaaaattagactctgacatagcatcagcaatgatgagtataaatgctgttaaaggagttaatattggctcaggtatgaactcagcacaattgtcaggtgaggaaaattcagatgaaatttctcaaaatagaaaaaaaacaaaatttaaatctaataacgctggagggattctgggaggcatttcctcaggtcaagagataattgtctcttttgctgtaaagccaacttcttcaattttaaaaagtagaaaaacaatcaataaatttggaaagaacacaagtatatcagtgaaaggtagacatgatccatgtgtgggtataagagctgtacctgtgggtgaagcaatgttatcttgtgttttattggatcattatcttctagacaaagctcagtgtagttaat

SEQ ID NO: 287248 - DNA, 256 bp, Unknown
  Bacterial polypeptide expressing nucleotide sequence isolated from the Sargasso Sea
aaaactaatcatgctggtggaatacttggcggtatatcttcaggtcaagatataattgcttcatttgcagttaaaccaacatcttcaattttaacaagtagagatacaattgataaaaaaggaaaaaatacaaaaatttctgttaaagggcgtcacgatccttgtgtaggtataagagctgttccaatcggagaagcaatgattaattgcgttctacttgatcacttgctgatgcacagagctcagtgtggttaat

SEQ ID NO: 287249 - DNA, 611 bp, Unknown
  Bacterial polypeptide expressing nucleotide sequence isolated from the Sargasso Sea
tttagtccaaataggtgaaaaaaaaataaattttaataattggaactggaaagaaatagaaaaaaacagcttcttttgcccagataagaatattttaaaaacatgggaagattatgttttaaaaataaggaaagaaggatcctcaataggagctgtcattcaaataactgcatctggtgtcccggcaggtttaggagaaccagttttttcaaaaattgatgctcttctagcacaaggcataatgagtattccagctgtgaaaggtgtcgaaatcggaaatggttttaaaagtgcagcattaaggggagaacaaaatgctgatgaaatgagatatcaaaacaataaagttacatttgaatctaacaactctggtggaacacttggaggaatttcttctggtcaggacattgtcgtcaaatttgccgtaaaaccaacaagttcaattctaaaagaaagaaaaacagtaaatcttgttaataaaaatacaattattagaactaaaggaagacatgatccatgtgttggtataagggcagttcctgttggtgaagctatggtagcaattgtattagcagatttatttctattgaatcaaaaaaacaaaatttaat

SEQ ID NO: 287250 - DNA, 817 bp, Unknown
  Bacterial polypeptide expressing nucleotide sequence isolated from the Sargasso Sea
atgtcaggcaatacgtttggaaaaatatttaaaattacgacttttggtgagagtcatggtactgctatgggctgtattttagatggttgtccgccccaaattgagctaaaaaaagaggatattcagtatgaattagatagaagaaagcctggtcaatcagatgtaactacacaaagaaaagaagacgacgctgtagagattttgtctggagtttttgaaggaaaaaccctcggcacaccgataggaatgataatttacaataaagatcaaaaatctaaagattactcgaatataaaagatgtttttagaccaaatcatgcagacatcacttatcaagcaaaatatggtcatagagattacagaggtggtggaagagctagtgctagagaaactgcaaactgggtagctgctggagcaattgctaaaaagattcttaaaaaggagggtgtctcagtaaatggttttgtatcagaaataggaaaagtgaaggccgattcaattaatcataaaaatataaataataaatacttttttagtgatgaatcaaaattgtctgaactagattcaatgttcaaagacttaattgaagagggtaattctgtaggtgcaaagctaggagttattgttgagaactgtccagttggattgggagatccagttttcgagaagttagatgctaatttagcaaaagcaataatgactattaacgcagtaaagtcagtatcaattggcaatgcagatgatctattgagccttaaaggttcagaagcaagggatgaaattacgacatcaggctttacttcaaataattcaggag

SEQ ID NO: 287251 - DNA, 561 bp, Unknown
  Bacterial polypeptide expressing nucleotide sequence isolated from the Sargasso Sea
tatgtcaggtaataaatacggtaaactttttgaattaactacttttggtgagtctcatggggaggcgataggcggtattatagagggctgtcctgccgggactccattagatttagaatttattcaatcagaactggacagaagaaaaccaggtcaatcttccattgtaactcaaagaaaagaatcagataaagtcaattttttttctggtatttttgaaggtaaaaccactggaactccgatagggttttcaattagtaatgatgatcaaaaacctaaagattacaagcacataattgataattacagaccatcacatgctgatcgagtttatgatcaaaagtatggatttagagattatagaggaggaggtaggagttctgccagagaaactgcttgtagggtagttgctggttcaatagcaaagcagtttttaaaaaaagttaaaattacagcctatgtttcttcagttggtgaaatatcgcttgacaaggattatagcagacttgattttaaaaacattgaaactaacccggttcgatgtccagacaatgaaacagc

SEQ ID NO: 287252 - DNA, 750 bp, Unknown
  Bacterial polypeptide expressing nucleotide sequence isolated from the Sargasso Sea
atttttgaagggaaaacaacaggaactcctatttgtttattaattgcgaatgaagaccaacgaccaaaagattataaagaaattaaagaaaaatttagaccaggccatgctgacttcacctatacaaaaaagtatggatttagagattatagaggcgctggtcgatcatcggctagagagacagttgcaagagtagctggaggagctattgctaaaaaatatttaaagcagagttctaagattaatatatttggatatgtttctaagattggcgaacatcgggcaaataaagttaattataatgatattgaaaaaaactcttttttctttcctgacaagaaaatggtcccaatacttgaagactacattagtaaaataagaaaaagtggtgattctattggtgcggaagttactgtaatagcacaaaatgttcctgctggattgggaaaccctgtatttgataaacttgatgcattacttgcgtcatcaatgatgtcaattaatgcggttaaaggagttgagataggtagtggttttgatgtggtatcaaaaaaaggttcagaatgtagagatgaaattacaccgaaaggttttaaatcaaaccatgctggaggtactttgggaggtatttctacaggacaagatattgtagttaagattgcacttaagccaacatcaagtattttaattcctggacaaacaataacaataaaaaataaaaaaacaaccatagttacaaaaggaagacac

SEQ ID NO: 287253 - DNA, 966 bp, Unknown
  Bacterial polypeptide expressing nucleotide sequence isolated from the Sargasso Sea
acttaaagaacaagatattcaaaaagaattagacaagagaaaaccgggccaatctaagtttactactcaaagaaaagaaagtgataaagttcaaattttatctggcgtctttgagggtaaaaccactggaacaccaatttcactaataatctataacgaagacatgcgatcgaaggattacaacgatattaaagataagtttagaccaggacacgcagattatacatactttaaaaaatatggaataagagattacagaggtggaggaagatcttctgctagagaaacagcagcaagagttgcagctggggctgtagctaaaaaagttttagaaagaaaattaggaaaaaaatttagaatttctggagcggttacacaaattggaattcttggttgtgacacttccaaatgggatgaaaaaataatatataaaaatcctcttttctgcccagataagtctatgttaaaaatttgggaaaaatatttactaagtatcagaaaagctgggacgtcatgtggtgctgttattgaagtaagagcaaatggtatacctccgggcttaggtgctcctatatattcaaaattagattcggatattgcttcagctatgatgagtataaatgcagtaaagggtgtaaatattggctctggaatgaattctgctcaattatctggtgaagaaaattctgatgaaatatccaataacaaaaaaaaacttaagtttgattcaaataatgcaggtggaattctcggaggtatttcctcaggtcaagagataattgtctcttttgcagttaaacctacatcatcaattctaaaaaaaagaaaaacgatcaataaatttggtaaaaatacaactatatctgtcagaggtagacatgatccctgtgtaggtatcagagctgtgccaataggtgaagctatgctttcttgtgtattattagatcattatttaatgaacaaagc

SEQ ID NO: 287254 - DNA, 780 bp, Unknown
  Bacterial polypeptide expressing nucleotide sequence isolated from the Sargasso Sea
actattctgagattaaggataaatttagaccaggacatgctgattttgcatatcagcgtaaatatggcttgagagactacagaggtgcaggaaggtcttctgctagagaaactgtagctagagtagctgctggagctattgcaaaaaagattcttaagaaattttgtaaaactaatatttatggatatgtttctcaattaggtgagattgtgcctgataaattcagaaaaaatgatattgaaaaaaatcctttcttttttccaaatctatcgcaaataaaaacactagaagattatttaacgagcattaggaaagaaggcgactctattggagctaaagttagtgtaatagcacaaaaagccccaattggcttgggtgatccagtatttgataaagtagatgcattgcttgctcaagcaatgatgtccattaatgccgtaaaaggtgttgctattggctctggtttcgatgtaatagataagaagggttcagaatgtagagatgaaatcagtccaagtggttttctttctaatcattcaggtggaacgcttgggggaattactactggtcaagatgtatgcgtacatttagctttaaaacctacatcaagcattttaaaaaaagcaaaaactataaataataataataaatcaactactataagaactaaaggtagacacgacccttgtgttggaataagagcagttccaatagcagaagcaatgatggcactcgttcttttagatttatatttaagtaataaagctcagaataagtaaa

SEQ ID NO: 287255 - DNA, 373 bp, Unknown
  Bacterial polypeptide expressing nucleotide sequence isolated from the Sargasso Sea
gatgagtattaatgctgttaagggggtaaatataggatctggaatgaactcatctactttaactggtgaagaaaattcagatgaaatatttcaaaaaaaaggaaaaattaaatttaaatcaaataatgccggaggcattttaggaggcatatcaactgggcaagaaatagttgtttcgtttgctgttaaaccaacttcttcaattttaacttcaagaaaaactattgatagatttggaaaaaatacatctatatccgttaaaggaagacatgacccttgtgttggtattagagcggtaccgattggagaagcgatgatgcactgtgtgattttggaccattacatgatgaataatggccaatgtaaaatttaa

SEQ ID NO: 287256 - DNA, 943 bp, Unknown
  Bacterial polypeptide expressing nucleotide sequence isolated from the Sargasso Sea
tgcccccctggaattcgactggacgaatctgatctacaggtcgatttagacagacgcaagccaggaacgtctcgatatacaacgcaaaggagggaggcggaccaggtcaaaataatgtctggagttttcgaaggggagaccacggggactccgatagggctggtaatagaaaacaccgaccacaaatctaaagactacactagtattaaaaataagttcaggccaggtcacgccgattacacttacgctcacaaatacggcatccgtgactatagaggcggcgggagagcatcagcccgagaaacctgcattagagtagctgccggcgcgatcgctaagcgatgtttagagatcgaagcggggatcgaaatatgcggttatgtttctcaaattggtattttagaactaggtctagttgacgaggaatttatatctttgaacccctttttctcaggtgacccggataagatctcagagttagaagcatatatagatgagacacgaaaacaaggagattcggtcggggccaggataaacttgatcgcaagaggtcttcctccaggttggggtgaacctgtctttgatcgtcttgatgctgacattggtgcgtcgatgatgggaataaacgcggttaagggagttgagattggtgatggcttcgacgtagttcaacaaaggggttctgaaaatcgagatcagttacgctcgtcaggtttcgcaagcaatcattctggagggattctaggagggatttcgaccggacaagagctactggttgctattgccctcaagccgacttccagtatcagattagagggagagaccgtagatcaggagggcaaagatacagttatctctactcttggaagacatgatccctgcgtgggaataagggcagttccgatcgcggaagccatgcttgccctggttttggtggacattt

SEQ ID NO: 287257 - DNA, 480 bp, Unknown
  Bacterial polypeptide expressing nucleotide sequence isolated from the Sargasso Sea
aatcaggatcctcatgtggagcagtgattgaaataagagtaagaggtataccagttggtttaggtgctccaatttattcaaaattggatactgacatagcttcaggtctaatgagtattaatgcagttaaaggtgtaaatattggtgcaggaatggactcagcacaattaagtggagaacaaaattcagatgaaatttcttcaaaaggaaataaattaaaatttaattcaaataaagcgggtggaattcttggtggaatttctacgggccaagaaattattgcatcttttgctgtcaaaccaacatcatcaattttaactagtagaaaaactataaataaatttgggaaaaatacttcaatatctgttaaaggtagacatgatccttgtgtaggaattagagctgtaccaattggtgaagctatgatgaattgtgttttacttgaccactacttaatgaataaagcccaatgtagttaac

SEQ ID NO: 287258 - DNA, 423 bp, Unknown
  Bacterial polypeptide expressing nucleotide sequence isolated from the Sargasso Sea
gatgactgacaatagttttggcaagctgttcagctttaccagctttggcgaaagccatggcaccgcaattggctgtgtggttgatggtgtgccgcctaacctaccgctgaacgagaaattgatccagacttatcttgaccgccgccgcccagggacaagcaaatttgtgacccagcggcaagaagatgataagattgaaattttatcaggtgtgtttgagggcaaaaccactggcacccctattggcgtattgatccgtaacaaagatcaaaggtcaaaagattatggtgaaatctccagacaattcagacctggccacgccgattatacgtatcaggcaaaatatggcatccgtgactatcgtggaggtggccggtcatcagcacgtgaaacagctgtccgtgtggccgctggtgcgattgc

SEQ ID NO: 287259 - DNA, 325 bp, Unknown
  Bacterial polypeptide expressing nucleotide sequence isolated from the Sargasso Sea
atttactacacaaagaaaagagagtgacaaagttcaaattctctcaggaatatttgatggaaaaactactggaaccccaatttcactaataatatacaatgaagacatgcgctcaaaggattacaaagatataaaagataaatttaggcctggtcacgcagattttacatattttaaaaaatatggaatcagagattatagaggtggtggtagatcatctgctagagaaactgctgctagagttgctgcgggggcaattgcaaaaaaagttttagaaaaaaaattaggaaaaaaatttagaatttctggggctgtaacacaactt

SEQ ID NO: 287260 - DNA, 544 bp, Unknown
  Bacterial polypeptide expressing nucleotide sequence isolated from the Sargasso Sea
aatgtcatttaacacatttggaaagctatttcgtttcacaacttggggtgaatctcacggtcctgctattggctgcatagttgacggatgtcctccaaacataaatctagatgaaaaagatatccaattagaattaaacaaaagaaaaccgggacaatcaaaatttactacacaaagaaaagaagacgataaagcccaaattctttcaggtgtatttgaaggaaaaactactggcacaccaatttctcttattatttataataaagacatgagatctaaagattatggaaatataaaagataaatttagaccaggtcatgcagactttacctatttcaaaaaatatgggattagagattatagaggtggaggaagatcttctgctagagagacagcttcaagagttgcggctggtgccatagctaaaatagtactgcaaaaaaaattaggaaaaaaatttaacgttataggtgctgtcactcaattaggaattttgggatgtgatacttcacaatggaatgataaaattatttcgaataaccca

SEQ ID NO: 287261 - DNA, 298 bp, Unknown
  Bacterial polypeptide expressing nucleotide sequence isolated from the Sargasso Sea
aaactcagatgaaatttcacaaaaaggtaaaaaattagagtttaattcaaataatgccggtggaatattaggtggtatttcaactggacaagaaattattgcttcatttgctgtaaaaccaacatcttcaatcttaacaacaagaaatactgtcgataaatttggaaaaaatacaacaatatctgttacaggaaggcatgatccatgtgttggaataagagctgtccctgttggtgaggcaatgatgaattgtgttttattagatcactatctaatgaacaaagctcagtgtcagtag

SEQ ID NO: 287262 - DNA, 811 bp, Unknown
  Bacterial polypeptide expressing nucleotide sequence isolated from the Sargasso Sea
aactactctggcggcatccagggcggcatctcaaacggcgagacgatctatttcgacgtggcgttcaagccgccggccacgattggtgtcgaccagatgtccgtgaacaaattaggcgaagagactctgctcaaatgcaagggccggcacgatccatgcatcgtgaaccgggccgtgcccatcgtcgaggccatggcggcgctggtgctcatggaccaatttctcatacagacagcccgaaaggcggcgcaaagcgccatgcaggccaacatggtgctggccaccgaggttgctgccgccagcgtggcgcaggcgcaggcaaaggcgcaggtggtcccggccaccgcagcagcggcaccgccgccggcggacatcgctagcgtcaagcgtgaggatatcgtccgccccgttctggggggcaacctcgctgttccaccggagaaatacctgcatcccgtcgacttcggcgactggcggggccacgtgctgcggctcacccagaccaaaacgacccacgttctcgttttgtgcgaccaggtcgtgcacgggctgtaccagaatcagatacaaacgctgctcgatgacaccgccgtagctggccgatccttttatgtccacgtgattccaaacggtgagccggtcaaacacatctccttcaaggccgaaatcgaagaaaaaatgctgtcgctgcacttcccgcgaggcaccagcgcgctggtcgcgctgggaggtggggtgattggcgacctcgggggcttcgtggcggcgacgtacgctcggggcatcccggttatccaggtgcccaccacca

SEQ ID NO: 287263 - DNA, 289 bp, Unknown
  Bacterial polypeptide expressing nucleotide sequence isolated from the Sargasso Sea
atttctcaaaaaggtaaactaacaaaattttcatctaacaacgctggcggtattcttggcggcatatcaagtgggcaagacattatcctttcttttgcagttaaaccaacatcatcaattctaacttctagaaaaactattaataaatttggcaaaaacacatcaatttcagtaaaaggtagacatgacccgtgcgttggtatcagagctgttcctataggcgaggcaatgatgcattgcgttctattggatcacctacttatgcatagggctcagtgtgaagattaat

SEQ ID NO: 287264 - DNA, 400 bp, Unknown
  Bacterial polypeptide expressing nucleotide sequence isolated from the Sargasso Sea
ctcgatatggacttagctgctgcgatgatgagtataaatgctgtaaaaggagtcaatattggatctggtatgaattcagctcaattaactggtgaacaaaattcagatgagatgtctaagaaaggaaaaaagacaaaattttattcaaataatgccgggggtattttgggtggaatttctagtggtcaagaaataatagtatcttttgctgttaaaccaacttcctctattttaagccaaagaaaaactatcgataaatttggaaaaaatacatcaatttctgttaaaggtaggcacgatccttgcgttggtatcagagcagttccaataggtgaggcaatggtgaattgcgtgattctggatcattaccttttaaataaagctcaatgtggaagttaat

SEQ ID NO: 287265 - DNA, 526 bp, Unknown
  Bacterial polypeptide expressing nucleotide sequence isolated from the Sargasso Sea
atgtcatttaatacttttggaaagtcttttcgttttacaacttggggagaatctcatggtccagctattgggtgtattatagatggatgtccaccattaataccaataaaagaagcagatattcaaaaagaattgaataaacgaaaacctgggcaatctaagtttactactcaaaggaaggaaagtgacaaggttcaaattctttcaggaattttcgagggaaaaacgacagggacccctatatcattaataatttacaatgaagatatgcgttcaaaagattataatgatattaaagataaatttagacctggacatgctgattttacatattttaaaaaatatggaataagagactacagaggtggtggtagatcgtctgcaagagaaacagctgcaagagttgcagcgggtgctgtggcaaaaaaagttttagaaaataaattaggaaaaaaatttaaaatcaccggggctgtaactcagcttggaatattaggatgtgatactaataaatgggatgataaag

SEQ ID NO: 287266 - DNA, 247 bp, Unknown
  Bacterial polypeptide expressing nucleotide sequence isolated from the Sargasso Sea
aatggagatgatatcaatattgattttatgattaaacctacctccagtattagcaagccaactaaatcaattgatgagcaaggcaatgaggttaatttagagataaaaggtagacatgatccatgtgttggaattcgtgcagtacctattgctgaggcaatggtaaatttagttttaattgatcactttttgaggaatcaagctcaatgcggacatattgagcaaaatctgcctttcggtgaataaa

SEQ ID NO: 287267 - DNA, 974 bp, Unknown
  Bacterial polypeptide expressing nucleotide sequence isolated from the Sargasso Sea
cataaatctagatgaaaaagatattcaagtagaattgaacaaaaggaaaccaggacaatcaaaatttaccacacaaagaaaagaagacgacaaagtccaaattctttctggtgtatttgaaggaaaaactactgggacaccaatttctttaattatttataataaagacatgagatctaaagattatggaaatataaaagataaatttagaccaggtcatgcggactttacctatttcaaaaaatatggaattagagattacagaggtggaggaagatcttcagctagagagacagcttcaagagttgcggctggtgctattgctaaactagtacttcaaaaaaaattgggaaaaaaatttaaagttataggtgctgtcactcaattaggaatcttaggatgtgatacgtcacaatggaatgataaaattatttcaaaaaatccattcttttgtccagataagtccatgatcaaattatgggaaaaatatttacttggtgtaagaaaatcagggtcatcatgtggagctgtaatagaagtgagagcaagaggtatcccagcgggccttggagcgccaatttactcaaaattagattcggatattgcatcagcttttatgagtattaatgcagttaaaggagtaaatgttggtgctgggatgaattcggcacaactaagcggtgagcaaaactctgatgaaatatcatcaaaaaataataaattaaaatttaactctaataatgcaggcggtatcctgggtggaatttcttctggacaagaaataatagcatcatttgcagttaaaccgacatcttcaattttaaccacaaagaaaacgattaataaatttggaaaaaatactacaatatctgttaaaggaagacatgacccgtgcgtaggaataagagctgttccagttgggagagctatgatgaatttgtgttttattagaccactatctaatgaatcaggct

SEQ ID NO: 287268 - DNA, 793 bp, Unknown
  Bacterial polypeptide expressing nucleotide sequence isolated from the Sargasso Sea
atgggcgacagtttcggacaccttttccgcatcacaacttggggagaatcccatggcggcggcattggagtagtgattgatggctgccctgcgggattggaaatcagtgaatcggaaattcaatatgaactggaccgtcgtcgtccaggccagagtaaaatcaccacacagcgcaaggaaagcgattctgcacggattctttccgggatcttcgagggaaaaactaccggtactgcgatttcgatcatggtcgaaaatcaggacgcccgcccacaagcctataagcatctgaaaaacctctatcggccaagtcacgcggattatacctacgaagccaaatatggattccgtaattggatgggtggaggaagagccagtgcccgtgaaaccatcggcagggttgctgcaggagcccttgccaagaaactgctgaaacaatggaatggaacccaaaccctagcatgggttgaacagatccatgacctcaaagcaaatgttgatcactcacagatcacggaacaacaaattgagcaaagtatcgtgcgctgtcctgatactgcagcctcaaatgccatggaacaacggattcttgaggttcgtaaaaaaggggacagtgtgggcgggatcattcgagcagtcagtacaaatgttcccgtcgggctgggtgagcccgtttttgacaaactgacagcagacttagcaaaagcgctgatgtccttgcctgctacaagaggagatgagttcggcctaggctttcaatcgatttccctgatggttcagagcacaatgacga

SEQ ID NO: 287269 - DNA, 412 bp, Unknown
  Bacterial polypeptide expressing nucleotide sequence isolated from the Sargasso Sea
gggctaggtgaacctgtatatgataaactagatgctgatcttgcaaaatcaatgatgagtataaatgcagtaaagggtgttgaaataggaaacgggtttaatagtgtatatgaaagtggtgtttcaaatgttgatgaaatgagaatcaaaaataacaaaccaatttttttatctaataataatggtggtatactaggaggaatttctacaggacaggatataatagttaggttttgtgttaaaccaactagttctattctaacgaaaagaaaaactatagatattaattataacgaaaaagaaatttctactaaaggaagacatgatccttgtgttggtattagagctgttccagttggagaagctatgatggctactacattagctgatcattgtttaagatatttataat

SEQ ID NO: 287270 - DNA, 157 bp, Unknown
  Bacterial polypeptide expressing nucleotide sequence isolated from the Sargasso Sea
catgcagattacacatatttggaaaaaatatggcataagagattatagaggtggtggtagatctagtgctagagaaactgcaatgagagtagcggcaggggcaatagcaagaaaaatcataaataataaaattaaaaatcaagttgtaataataggt

SEQ ID NO: 287271 - DNA, 862 bp, Unknown
  Bacterial polypeptide expressing nucleotide sequence isolated from the Sargasso Sea
tattattttgaagagagtaaatcctatgtctatgaatagctttggtcatctttatcgtttcaccacatggggagaaagtcatggaaaagcaattggtgttactattgatggttgtcctccaaaagttgatttaaatgaaaaaaaaatacaaaaatttttagataaaagaaaacccggacaaagtaggtttacaactcaacgaaaagaacccgacaccgttgaaatcttatcaggagtttttgaggggaaaactacaggtactccaattcagttaatgataaaaaatttagatcaaaggtcaaaagattattcaaaaatttctacttctttcagaccaggccatgcagatataacttatttccaaaaatatggaattagagattatagaggtggcggaagatcgtctgcaagagaaactgcagcaagagtagcagctggagctgtggctaggattgcgttaaaaaaaattttacccagattagaaatcctaggttacttagtccaaataggaaataaaaaaattaattggaatcgttttgataaaagacaaatttctaaaaatccattctggtgccctgacaaagatatagtagaagattggtcattatatttaagcaaaatacgtaaggatggtaactctattggtgcaataatagaagtaattgcaaaaaatcttccggctggtattggagctccaatttataataaattagatactcagattgcttcggctatgatgtcaattaatgcagtaaaaggagttgaaattggagaaggtatgaacgctgcaactcttactggaaatgaaaatgatgatgaaattagatctaccagtaaaaaaaatactatgtacaaatcaaat

SEQ ID NO: 287272 - DNA, 823 bp, Unknown
  Bacterial polypeptide expressing nucleotide sequence isolated from the Sargasso Sea
attattgaaaacaatgatgttaaatcaaaagattataatgatataaaaaataaatttagaccagggcatgccgattatacttatcaaatgaaatatgggattcgagattttcgtggaggaggtagagcgtctgccagagagactgctatgagagttgctgctggtgcaatagcacaaaagattctgggaaataaagtaaaaattagaggtgcacttattcagatcggtaaagaaaaaattaattatgataattgggactggaatcaaataaaaaaaaataactttttttgcccagataaatctgttctaggaaaatgggaaaaatacattaaagaagttagaagggatggttcttctataggagcaatgatcgaaattaatgtttctggtgttccagttggtcttggagaacctgtttttaataaaattgatgcaatgttagctcaaggaataatgagtattccagcagtaaaagggtttgaaataggatctggacttaaaagcgctgagttaagaggtgaagaaaatgcagacgaaattatctcaaaaaacaataaagtctctttcaaatctaataatgctggaggcacacttggaggtataacatctggtcaagatttagttataagatttgcagtaaaacccactagttcgattctaaagaaaaaatcaactataaatgtcgaaggaaaaaacacatatataaccactaaagggagacacgatccttgtgttggtattagagctgttccaattggtgaagcaatggtggcaatagtattggcagatttattacttattcaaaagtcactaaaaaattaaa

SEQ ID NO: 287273 - DNA, 326 bp, Unknown
  Bacterial polypeptide expressing nucleotide sequence isolated from the Sargasso Sea
ttcggctatgctgactggagaagaaaactctgatgagattttacaaagaaaaggtaaaactagttttaaatcaaacaacgcaggtggaattttgggtggaatttcaacaggtcaagaaataaaaatttcatttgctgttaaaccaacatcatcgattttatcatctagaaaaactatcgataagtttggcaagaatacaacaatatctgttaaaggaagacatgacccatgtgtaggaattagagcagttccaataggagaagctatgatgcattgtgtaattcttgaccactatctaatgaacactgctcaaaataaaatttaat

SEQ ID NO: 287274 - DNA, 322 bp, Unknown
  Bacterial polypeptide expressing nucleotide sequence isolated from the Sargasso Sea
caatggctttggtagtataaatgaagatggaaaaacaaatgtagatgaaatgagcattaaagatggaaaaccttcatttcttagtaataataatggggggattcttggaggtattagctccggtcaggacataatttgtcgctttgttgtcaagccaacaagttcaatttcaactgaaagaaaaacgatagacattaatttacaagaaacaacaatttcaactaaaggccgtcacgatccttgtgttggcataagagcagttcctgtcggtgaagcaatgattgcgacgacaattgcagatcatattctccgtttcttataa

SEQ ID NO: 287275 - DNA, 883 bp, Unknown
  Bacterial polypeptide expressing nucleotide sequence isolated from the Sargasso Sea
gagaaagcctggccccgaattaacaggaataattgaaggcgttcccgcaggatttacaattagtaaagaatttatagattcttatttaaaaagaaggcagaaagatactggttctggtggtcgaatgaatattgaaagcgatgaagtatttatatcatccggagtaatcaataatatttcaacaggggctcctattgctttacgaattaaaaataaagattgggaaaattggaaagataaagatatagaaccttacgtagttcctagacctgggcatgcagatttaattggtaccgcaaaatatcatttaaatgacataaggttagtattagaaagatcaagtgctagagagacagccatgaggtctgcaataggagcaatagccatgcagatactagagtcaatgggaatatcaatatgtggttatgtttcatctatagggaaggttgattatagatattcaaatgatttttcattagatgagatgagaaaattaacagatgattcgccggtctcttgtccagatgttaataaatctaagcaaatggtaaaagaaatttcagatgcaagaaagaagaaggacacacttggggggtctataactaccattgctacaggcgttcctccaactttaggaagttatgtacattgggacaaaaaactagatgctaaattagcaagaattcttatgtctatacaaagtgttaaggctatagaagttggagacggcattgagtcatcaaaaaattatggtacatcagttcaagatcaatatgctttaaataagaaagaaataaaaaaagaatcaaataatcttggaggttttgaaggaggtatgacaaatggtgaaaatatagaattaacggcttatttgaaccaataa

SEQ ID NO: 287276 - DNA, 793 bp, Unknown
  Bacterial polypeptide expressing nucleotide sequence isolated from the Sargasso Sea
tcaaaactttgtagtcaccacctttggcgagagccatggtgttgctttgggttgtattattgatggttgcccacctgggctcgaattaaccgttgaagatatgcaacatgatttagacagacgacgtcctggtacttcgcgttatactactgcacggcgtgaagccgatgaagtgaaaattttatcaggtgtgtttgagggtaaaaccacaggcacctcgattggtttattgattgaaaataccgaccaacgtagccaagattattccgacattaaagacacctttcgtccaggccatgctgattacacttatcagcaaaaatatggcatgcgcgattaccgtggtggtggtcgttcatctgcgcgcgaaaccgcaatgcgtgtggcggcgggcgccgtggctaaaaaataccttaagcaagtgcacggtattgagatttatggctaccttgctcagctagggcctattactgctgacactgttgatttaactcaaatcgaacaaaatgcgttttttttccctgatgcgactaagttagacgcattagatgaatacatgcgcgatttacgtaaatcgggtgactcaattggcgccaaaattaccgtggcagctactggcgtaccagtgggtttaggtgagccagtatttgatcgcttagatgctgatattgctcatgcgcttatgggcattaatgccgttaaaggtgtcgagataggtgatggctttggtgtggtgactcaaaaaggctctgaaggtcgcgacttaatgtcaccagaggggtttgcctctaat

SEQ ID NO: 287277 - DNA, 957 bp, Unknown
  Bacterial polypeptide expressing nucleotide sequence isolated from the Sargasso Sea
ttttttggaagctatttagatttactacctgggggagagtcgcatggtccagctattggatgtgttgttgacggctgccctccaaatatcccaataaaagacagcgatatacaaaaagagcttaataaaagaaaaccaggacaatctaaatttacaactcaaagaaaagaagatgataaaattaatattatatctggggtttttgagggtagaacaactggaactcctatttctcttattatttataataaagatatgaaatctagggattatgagacaataaaaaataaatttaggccaggccatgcagactatacttattttaaaaaatatggtatccgggattacagaggtggtggaagacaatctgctcgtgagaccgctgcaagagttgcggcaggtgctattgcaaaagttgttttgaaacataaaattggtaagaagtatcaagcagttggtgctgttacgcaattaggaatattaggatgtgacttaaagaaatggaaagacaaaacaatttctagtaacccatttttttgtcctgataaaaccgtgattaaactttgggaaaaatatttacttgggataagaaaagccggatcatcttgtggagcaattattgaagtcagagtaagaggggttcctttaggacttggagcaccaatatactcaaaattagatatggatattgcggcagcaatgatgagtattaatgctgtaaagggggtaaatattggatcaggaatgaactctgcaatgttaactggtgaagaaaactctgatgaaattttgaaaaaaaaaggtaaaactagttttagatcaaataatgcaggaggaatacttggaggaatatctactggacaagaaataattgtttcatttgcagtaaaacctacatcatctattttgtcgtctaggaaaacaatcgacagatttggtaagaatacgacaatatct

SEQ ID NO: 287278 - DNA, 706 bp, Unknown
  Bacterial polypeptide expressing nucleotide sequence isolated from the Sargasso Sea
aatgtcatttaatacttttggaaagttttttagatttaccacttggggagagtcgcatgggccagctatagggtgtgtcattgatggttgtccaccaaatatacaaattagagctgcagatatccaaaatgaattgaacaaacgaaaacctggtcaaagcaaatttgtcacgcaaagaaaagaaaaagatttggtgcatattatgtctggtgtatttgagggaaaaacaactggcacaccaatatctttaattatttataatgaagatcaaaaatcaagggactacgaaacaattaaaacgaaatttagacctggccatgctgactatacttacttcatgaaatatggaattagagattataaaggtggtggaagacagtcagcaagagaaactgcagcaagagtagcagctggtgcgattgcaaaaaaagtcttagaaaataaaattggaaagaaatataaagtcattggcgcagtcacacaaattggaattttaggaattaatcctaataattgggatgataagtttataggtaaaaattcatttttttgtcctgataaaaaaatactaaaactttgggaaaaatatctgttgtcaatcagaaaagtaggttcatcatgtggggctgttattgaagtaagagcaaaaggagtacccgttggtttaggcgccccaatctactcaaaattagatatggatattgca

SEQ ID NO: 287279 - DNA, 619 bp, Unknown
  Bacterial polypeptide expressing nucleotide sequence isolated from the Sargasso Sea
atgtcgggtaattctataggccaactctttaaagtgaccacctttggtgaaagccatggcccagccattggtggcatagtggatggtttgccgcctggcttaaagctcgacctggagcaaattcagcacgaattagacagacgcaaacctggtacctcacgttacaccacggcacgtcgagaggatgatatcgttaaaattttatccggagtgttcgaaggttacagtacgggagcatccatcggcttactgattgaaaataccgaccagcgctcacaggactattctgctattaaagacctgttccgccctggtcatgccgattacacttactggcataaatttggtattcgcgattaccgtggtggcggccgctcgtcagcccgtgaaacagctgtccgtgtggctgcaggtgctattgccaagcagtatttaaaagctaaatttggtatcgaaattcgtggttatctggcgcagcttggcccaatcaaagcgcaaaagctggattgggaccaggtggaacaaaatgcttttttctgccctgatgtcgacgtgctcgagcagttagatgagtatatgcgtcagctgaaaaaagacggtgattcagtcgggcccgcat

SEQ ID NO: 287280 - DNA, 486 bp, Unknown
  Bacterial polypeptide expressing nucleotide sequence isolated from the Sargasso Sea
taagaaaatcaggatcctcatgtggggcagtgattgaaataagagcaagaggtatcccagttggtttaggtgctccaatttattctaaattggatactgatatagcttcaggtctaatgagtattaatgcagttaaaggtgtaaacataggtgcaggaatgaactcagcacaattaagtggagagcaaaattcagatgaaatttcctcaaaaggaaataaattaaaattcaattcaaataaagcgggtggaattcttggtggaatttctacgggccaagaaattattgcatcttttgctgtcaaaccaacatcgtcaattttaactactagaaaaactataaataaatttgggaaaaatacttcaatatctgttaaaggtagacatgatccttgtgtaggaattagagctgtaccaattggtgaagctatgattaactgtgttttacttgaccactacttaatgaataaagcccaatgtagttagc

SEQ ID NO: 287281 - DNA, 841 bp, Unknown
  Bacterial polypeptide expressing nucleotide sequence isolated from the Sargasso Sea
tctttaataatttacaatgaagatatgcgttcaaaggattatgatgatattaaagataaatttagaccaggacatgctgatttcacatattttatgaaatatggaataagagactatagaggtggtggtagatcatctgctagggaaacagctgcaagagttgcagcaggtgcagtagcaaaaagagttttagaaaacaaattaggaaagaaatttaaaatctctggagctgtaactcaacttggaatattaggatgtgatacaaataaatgggatgatagagtaatttctaaaaacccatttttttgcccggataaatcaatgttaaaaatttgggaaaaatacttattaagtattagaaaagctggatcttcgtgtggagcgataatcgaagtaagagcaaatggtattcctgctggattaggtgcacccatatactcaaaattagattctgacatagcatcagctatgatgagtattaatgccgtaaaaggggtaaatattggctcaggaatgaactcggcacaattatcaggtgaagaaaattcagatgaaatttctcaaagtagaaaaaaaacaaaatttaaatccaataacgctgggggtattctgggaggtatttcctcaggtcaagaaataattatttcttttgctgtaaaaccaacttcatcaattttaaaaagcagaaaaacaattaataagtttggaaaaaatacaagtatatcggtaaaaggtagacatgatccatgcgtgggtattagagctgtgccagtaggtgaagcaatgctatcatgtgttttattagatcattatcttctacacaaagctcaatgtggttaat

SEQ ID NO: 287282 - DNA, 667 bp, Unknown
  Bacterial polypeptide expressing nucleotide sequence isolated from the Sargasso Sea
agctgctggtgctattgcaagaaaagttattgaaaaaaaactaaaaaacaaatttaaaattactggagcattagttcaaataggtcaatcaaaaatagattataataattggaacaatgcatttataaataagaatgattttttttctcctgataaaaaaattgtaagcgaatgggaaaaattaattcttaaagcaagaaaaaatggttcctctttaggtgctattatagagttacgttgtagtggaatgcctgtaggattaggagaacctgtttatgataaactagattctgatttagcaagagcaataatgagcataaacgccgtgaaaggaattgaaattggaaatggtttttcaagtgtatatgaaagtggcatttctaacgtagatgaaatgagaattaaaaacaaaaaaccaatttttctttctaataataatggcggtattcttggaggtatttctaccggacaggatataattttaagattttgtgtgaaaccaacaagttcaattttaagctccagaaaaacaattgataaaaatcttaaagaaagagtaatttcaactaaaggtaggcatgatccttgcgtagggattagagctgtaccggttggagaagcaatgatggcaataactcttgcggatcattgtttaagatatttatag

SEQ ID NO: 287283 - DNA, 661 bp, Unknown
  Bacterial polypeptide expressing nucleotide sequence isolated from the Sargasso Sea
aaaagttgttcttcaaaaaaaattaggtaaaaaatttaaagtaattggtgcagtaactcagctaggaattcttggatgtgatacatatcaatggaatgataaagtaatttcaaaaaatccatttttttgtccagacaaatcaatgattaaattatgggaaaaatatttgcttggcgtaagaaaatcaggttcttcatgtggagcagtgattgaaataagagcaagaggtatccctgttggtttaggtgctccaatttattcaaaattggatactgacattgcttcaggtctaatgagtattaatgcagttaaaggtgtaaatattggcgcaggaatgaactcagcacaattaagtggagaacaaaattcagatgaaatttcttcaaaaggaaataaattaaaattcaattcaaataaagcgggtggaattcttggaggaatttctactggccaagaaataattgcatcttttgctgtcaaaccaacatcgtcaattttaactagtagaaaaactataaataaatttgggaaaaatacttcgatatctgttaaaggtagacatgatccttgtgtaggaattagagctgtaccaattggcgaagctatgatgaactgtgttttgcttgaccattacctaatgaataaagcgcagtgtagttaa

SEQ ID NO: 287284 - DNA, 598 bp, Unknown
  Bacterial polypeptide expressing nucleotide sequence isolated from the Sargasso Sea
tattcttgggatgtgacactgcaaaatggaatgacaaaattatttataaaaacccatttttttgtcctgacaaatcgatgcttaaaatattgggaaaaatatttattgagtataagaaaagcaggatcatcttgtggtgccataattgaagtacgtgcaaacgggataccagcaggtttaggagcaccgatttattcaaaattagattctgatattgcagcagctatgatgagtattaatgctgttaaaggtgtaaatatcggttctggaatgaattctgctcaattatctggtgaagaaaattcagatgaaatttcacaaaacaaaacaaatatgaaatttacttcaaacaatgcaggtggaattctaggtggtatttcttcaggacaagaaataattatatcttttgctgtcaaaccaacatcctcaattttaaaaagcagaaaaacaataaacaaatttggaaaaaatactactatatctgtaaaaggtagacatgatccttgtgttggaattagagcagtgccagttggtgaggctatgctttcatgtgtattattagatcattatctaatgaataaagctcaatgtggttaaa

SEQ ID NO: 287285 - DNA, 451 bp, Unknown
  Bacterial polypeptide expressing nucleotide sequence isolated from the Sargasso Sea
agaactaagagcaagaggtgttccagtcggattaggagctccgatatattcaaaacttgatgcagatatagcctctgcacttatgagtattaatgctgttaaaggagttaatattggtgctggaatgagttctgcctatttaacaggagaagaaaattctgatgaaataagaggtggagctggtagaataaaatttaaaagtaataaagctggaggaattttaggcggcatatcatctggacaagatattatagcttcgtttgccgtaaaacctacatcttctattctaaatagtagagagacgataaataaaaaagggaaaaatactaaaatatctgttaaaggcaggcatgacccgtgcgtaggaattagagctgttccaattggtgaggctatgttggcttgtgtgatattagatcactacatgatgaataaagctcagtgcagttaa

SEQ ID NO: 287286 - DNA, 688 bp, Unknown
  Bacterial polypeptide expressing nucleotide sequence isolated from the Sargasso Sea
aatgtcatttaatacttttggaaagacttttcgattcacaacttggggcgaatcccatggtccagctattgggtgtgttatcgatgggtgcccaccattaataccattaaaagaagccgatattcaaaaagaattaaacaaacgaaaacctgggcaatccaagtttactactcaaaggaaggaaagtgacaaggttcaaattctttcaggagtttttgaaggaaaaacgacagggacaccgatatcattaataatttacaacgaagatatgcgttcaaaggattataatgatattaaaaataaatttagaccaggacatgctgatttcacttattttaagaaatatggaataagagactacagggggggtggtagatcatctgcaagagaaacagctgcaagagttgcagcaggtgctgtggcaaaaaaagttttagaaaataaattaggaaaaaaatttaaaatcaccggagccgtaacccaacttggaatattaggatgtgataccaataaatgggatgataaagtaatctctaaaaactcatttttttgcccagataaatcaatgttaaagatttgggaaaaatacttattaagtattagaaaagctggatcttcatgcggagcaataatcgaagtaagagcaaatggtattcctgctggattaggtgcacctatatactcaaaa

SEQ ID NO: 287287 - DNA, 751 bp, Unknown
  Bacterial polypeptide expressing nucleotide sequence isolated from the Sargasso Sea
tatgtcttttaatacttttggaaaaatatttaggtttaccacatggggagagtcccatgggccgtctattggctgtgttatcgatggttgtcctccaaatatacccatatctgagaaagatattcaaattgatatggatagaagaagacccggtcagtcaaaatttacaacacagagaaaagagtcggataaagctataattttatctggagtttttgaaggcaagacaactggtacacctatctctatcatcattcataatgaagacaaaagatctagagactatgaaacaataaaaagtaaattcagacccggtcatgccgattatacatattttaaaaaatatggaatacgtgattttaggggaggtggaagacaatctgcaagagagactgcttgtagagttgcagcgggcgctgtagcaaaaattgtgttaaaaaaagtgattgggtcaaaatttaatgttataggcgcagtaactcagttaggattgatgtcttgtgataaatcaaattggaaagacagtgagataagaaaaaatccttttttctgtcctgataaaaaatctgttaaactttgggagaaatatcttttagctgtaagaaaagctgggtcgtcttgtggtgcgattatagagttaagagcgactggtattccagtagggttaggagctccaatttactcaaaattagatacagatatagctgcggctttaatgagcatcaatgcagttaaaggagttaatatggag

SEQ ID NO: 287288 - DNA, 655 bp, Unknown
  Bacterial polypeptide expressing nucleotide sequence isolated from the Sargasso Sea
atagcaagaaaagtaataaaaaataaaattaaaaacaaagtggtaattactggtgctttagttcaaataggaaatcataaaattaattacaacaattggaatagtagttttatagctaaaaataatttttggagtcctgataaagaaattattaaaacatgggaaaaagaaatacaaaatgcaagaaaatctggttcctctttaggtgcgataattgaaattagagttaaaggtttgcctgctgggttaggtgagcctatttatgaaaaaattgactctgacatagctaaggggcttatgtcaattaatgctgttaaaggtgtagaaatgggaaatggtttcaatagtgtttacgaaactggaatttctaatgttgatgaaatgagaattaaaaataaaaaaccaatatttctatcaaataataatggaggagttcttggcggtatcaccactggtcaggagctcattagtagatttgttgtaaaacctacaagttcaattttatcaacaaaaaaaactattaattcaaaactaaaagaaacaactatctccactaaaggccgtcatgatccttgtgttggaattagagctgttcctgttggtgaggcaatggttgcaacaactatagctgaccactgtttaagatttctttaaa

SEQ ID NO: 287289 - DNA, 876 bp, Unknown
  Bacterial polypeptide expressing nucleotide sequence isolated from the Sargasso Sea
ttgaaggcaaaactacaggtcacccaattgcgcttcacataaaaaatgaagatcaaagaagtaaagattactctgaaatttctaatcaatttagaccaggacatgctgacattacataccagaataaatatggaataagagattatagaggtggaggtagatcaagtgccagagaaacggctgtaagagttgcggcaggtgcaatagcatttaaggtattagagcataagttaaaaaaatctataaaaattagagctagtgtaattcaattaggaccaaataagattaatcgtgaaaattttgattggaatgaggttaataaaaatccttttttttgtggagatccaaaagcagctaaagaatgggaaatttggttagacaatctaaggaaaaatggaaatagtgcaggcgcaataatcgaagttatcgctgaaaacgttcctaggggattaggaagccccgtctataaaaagttagacagtcaaattgcagaagctttaatgagcattaatgctgtaaaaggtgtagaaattggctctggttttgacttagtatctttaacagggagtgaagccaatgacgaaatctatcctgataataaaggggattattattttggctctaaccactctggagggatattaggtggaatttcttcgggccagcctataatagctaaatttatcgttaaaccaacaagttctattttaacagaaaaaaattctataaatttacaaaatgaacctgttaaaattaaaacaaaaggaaggcatgatccttgtgttggaattagagctgttcctgtagcggaagctatgatggctataactatcctagatcaattattagaacatgaaagtcaaatggaaagatgaa

SEQ ID NO: 287290 - DNA, 706 bp, Unknown
  Bacterial polypeptide expressing nucleotide sequence isolated from the Sargasso Sea
aatgacatctaattcaataggaaaaatctttaattttactacatggggagaaagccatggcaaagctattggttgcgttgtcgatggagttccatcaaatataaatttaactgaaaaagatattcaaccctatttagataaaagaaagcctggtcaatcgaaatttacaactcaaagaaaagaagaggataaagttgaaatactatctggaacttttgaaggaaaaactactggtcatcctatttctctaattatttacaatcaagatcagagatcaaaagattatggtgatataaaaagtaaatttagaccaggtcatgcagattacacttattggaaaaaatatggcataagagattatagaggtggtggtagatctagtgctagagaaactgcaatgagagtagcagcaggggcaatagcaagaaaaatcataaagaataaaattaaaaatcaagttgtaataacaggtgcattaattcaaataggtaatcataaaattaattatgataattggaataataattttattcctaaaaataatttttggagtcctgataaagaaattattaaaaaatgggaaaacgaaatacaaactgcaagaaaatctggttcctctttaggtgccataattgaaattagagtaaaaggtttgcccgctggattaggagaacctatttatgaaaaaatagactctgatattgct

SEQ ID NO: 287291 - DNA, 547 bp, Unknown
  Bacterial polypeptide expressing nucleotide sequence isolated from the Sargasso Sea
gatgaatcaaaattgtctgaactagattcaatgttcccagacctaattgaggagggtaattctgtaggtgcaaagttaggagttattgttaagaactgtccagttggattgggagatccagttttcgagaagttagatgctaatttagcaaaagcaataatgactattaacgcagtaaagtcagtatcaattggcaatgcagatgatctattaagccttaaaggttcagaagcaagggatgaaataacagaatcaggctttacttcaaataattctggaggaatattaggcggtatatctaatggagatgatataagcctaagctttatcataaagccaacatcaagtattaaagcaaaaggaaaaactgtaaacaaagaaggtaatgaggttgatatagaggttactggaagacatgatccatgtgtcggcatcagagcagtgccaattgccgaggctatggttagtttagttttagtagatcatttattaatcaataaagctcaatgtgctgatgttgaacaaaatcttccatttagtgagtaaa

SEQ ID NO: 287292 - DNA, 829 bp, Unknown
  Bacterial polypeptide expressing nucleotide sequence isolated from the Sargasso Sea
attgttcaaagttactacttggggcgaaagccatggaaaagctattggatgtataattgatggctgcccaccgcttattagtttgaatgaaaaagatattcaaaaatatttagatttaagaaaacctggcacatcaaaatttgttactcagcgcaaggaggatgataaggttgaaatattatctggagtattcaaaggaaaaacaactggtacgcctatttctcttataatttataataaggatcaaaagtctaaagactatggcgatatcaaaaataaatttagaccagggcacgctgatttaagttattttcttaagtatggaatccgcgattatcgaggtggcggtagatcatctgctcgagaaacagcaactcgagttgcggctggagcaattgctcgaaaagtaattaaacatatactcaaaaaggatataaaaattagaggtgcagtcacacaagttggtgctctaagtattaacccaagaaatttcaactggaattctgttaattcaaatccctttttttgcccagataaaaaaattgttcaggtttgggaggaatatttagatttaattagaaaaaaaggtctttcagtcggagcaataattagagtaaatgcgcaaggattgccttcaggtattggtgagccaatttacgggaagcttgatactgaattggcagcagctatgatgagtataaatgccgtaaagggagttgaaataggtttaggaatggaagcggctactattactggtgataaaaattccgatgaaattagaactaagggaaaaatatcatttttagttcaaacaatgccggtggaatat

SEQ ID NO: 287293 - DNA, 511 bp, Unknown
  Bacterial polypeptide expressing nucleotide sequence isolated from the Sargasso Sea
atgtcggaaaacagtttcggaaagctgttctcctttaccagtttcggcgaaagccacggccctggtatcggctgcgtcgtcgacggcgtgccgccgcgcctgcctctctcggaagagatcatccagccctatctcgatcgtcgcaagccggggcagagccggtttgtcacgcagcgacgcgaggatgacgaggtcgaaatcctgtcgggcgtgttcgagggcatgaccaccggcacgcctgttgccatgctgatccgcaacaaggaccagcgatccaaggattacagcgaaatctcgcggcaattccgcccgggccatgccgatttcacctatcaggaaaaatacggtattcgcgattatcgcggcggcggcaggtcatcggcgcgcgagacggctgtccgtgtcgctgccggcgccattgccgaccagatgctgaaaaccgtgctcggcgacagctatcgcattcgcggcggcgtggtccagatcgggccccacgccatcgaccgcagcc

SEQ ID NO: 287294 - DNA, 973 bp, Unknown
  Bacterial polypeptide expressing nucleotide sequence isolated from the Sargasso Sea
atgtctgataacagcttcggaaaactgttctcctttaccagctttggggagagtcatggaccgggagtcggttgtgtagtcgacggcgcaccgccgcgcatggcgctttcagaggcgctgatccagccctatctggaccgccgtcggcccggccagagccggtttgtcacgcagcgcaaggaggaggacaaggttgaaatcctctccggtgttttcgaggggcagacaaccggcacgccaatcgggctgttgatccgcaacaatgaccagcggtctggggattatggagacatcgccagacagtttcggcccggccatgccgactacacctatcaggaaaaatatggcatacgcgactatcgcgggggcggccggtcctcggctcgggagacggcggtacgtgtcgctgctggcgcaatcgccgatctgtttctcaaacaggcgcttggcagtgcctatcgggtgcgtggcagcgtcgtgcagatcggaccacatgcgatcaaccgtgaaaatctcgattgggatcaatttgacaggaacccctttttctgtcctgacgccgaagcggcaaaggcgtgggaggcttatctggacgaagtgcgcaagcagggttcatcggctggagccattctcgagattgtcgccgatggcattcccgccggtctcggccagccaatctatggcaagctggacaccgaactttcggcagcgatgatgagcatcaatgccgtcaagggagtggagattggcggcggctttgctctggcagcgatggatggccgtgaggcaggtgatgaaatgcgggaaggacctgcctttctgagcaaccatgccggcggtattcttggcggcatttcgacaggtgcgcagatcgtcgtgcgcatcgcgattaaacccacatcatcaattctgacaaagcggcgctcaattgacgaggacggcaaggaagtggaactgctgaccaaggggcggc

SEQ ID NO: 287295 - DNA, 504 bp, Unknown
  Bacterial polypeptide expressing nucleotide sequence isolated from the Sargasso Sea
aatattgtttgagcattagaaaagctggatcttcttgtggtgcaatcattgaaattagagcaagaggtgtccctgttggtttaggagccccaatttattcaaaattagatatggatcttgcttctgcaatgatgagtattaatgcagtcaaaggagtaaatattggttctggtatgaactcagctcaattaaccggtgaacaaaactcagatgagattacaaaaaaaggaatgaaaacaaaattcaaatctaataatgctggaggtattttaggaggtatatcatcaggacaggaaattatagtttcttttgctgttaaacctacatcatcaattttaatcacaagaaaaactatagatagatatggaaaaaatacttcaatatcagttaaaggtagacatgacccttgtgttggtattagagctgttccaattggtgaagcaatgatgcactgtgttattctagatcattttttaatgaatgaagcccaatgtaacagttaat

SEQ ID NO: 287296 - DNA, 900 bp, Unknown
  Bacterial polypeptide expressing nucleotide sequence isolated from the Sargasso Sea
gggttaagtgtaattcttgaagggataccttcaaacctatcaattagtgaagacttcatagaaaaagatatgtcaagaagacaaaaaggatatggttctggtggaagaatgaagattgaaaaagatcgagcagaaattttatccggtgtaaggcatggaaaaacattaggctcacccatatctctttggattgaaaataaagattgggctaactggactacccctatgtctattactcctgttgatgtaaatgaagatataaagaaacaaacaaaaattgttcctggtcatgctgacttccctggtacattaaaattcaaccataaagatgtcagaaatgtactagaaagagcaagtgctagagaaacagcagcaagagtcgctgcagcttcagtttgtaagaaatttctaaatgaaattggtatagaaataaaatctagggcgaaatctgttggctggaaaaaatctgaaattgaaaatatagatgaaatagattgggattttgtagaaagttcagaagttagggcttcaaatgctaatgaagatattaacttcaaaaaagttatagataaagtaaaaaaagaaagaacaacaattggaggtatatttcaagtaatagcattcaatgttcctttagggcttggaagtcatactcattgggataataaattagatggcaaaattgctcaatctatggtttcaataaacgcagtaaaaggagttgagataggaaatggttttgaaaatactgaaagatggggcagagaagtccaagatgttattgaaccaaatagttccgatgtaagaaatttttctcaaatttcgaataactctggaggaatagagggtgggatgtctaatggaaatgacattattgtaaatgttgctataaaaccaata

SEQ ID NO: 287297 - DNA, 271 bp, Unknown
  Bacterial polypeptide expressing nucleotide sequence isolated from the Sargasso Sea
taaaactaattttatatctaataatgcaggaggtattcttggtggaatatcaactggacaggatattgttgtatcatttgctgttaaaccaacttcttcaattcttacaacaaaaaaaactatagatagatttggaaaaaatacatccatttctgttaaagggagacatgatccatgtgttggaattagagctgttccaattggcgaggcgatgatgaactgtgttctattagatcatttcttaatgaacagcgctcaatgtaaaagttaa

SEQ ID NO: 287298 - DNA, 581 bp, Unknown
  Bacterial polypeptide expressing nucleotide sequence isolated from the Sargasso Sea
tacaaatcaatggaacgataaagtaatttcaaaaaatccatttttttgtccagataaatcaatgattaaattatgggaaaaatatttgcttagtgtaagaaaatcaggatcctcatgtggagcagtgattgaaataagagcaagaggtgtcccagttggtttaggtgctccaatttattcaaaattagatactgacatagcttcaggtctaatgagtattaatgcagttaaaggtgtaaatattggtgcaggaatgaactcagcacaattaagtggagaacaaaactcagatgaaatttcttcaaaaggaaataaattaaaattcaattcaaataaagcaggaggaattcttggtggaatttctacgggccaagaaattgttgcatcttttgcagtcaaaccaacatcgtcaattttaactagtagaaaaactataaataaatttgggaaaaatacttcaatatctgttaaaggtagacatgatccttgtgtaggaattagagctgtaccaattggtgaggctatgatgaactgtgttctacttgaccactatttaatgaataaagcccagtgtggttagc

SEQ ID NO: 287299 - DNA, 498 bp, Unknown
  Bacterial polypeptide expressing nucleotide sequence isolated from the Sargasso Sea
tatggctggaaattcttttggaaacatatttacattaacaacttttggagaatctcatggtcctgctcttggaggaattattgatggttgtcctgcaggattaaaaattaatttaaagaaggttaatgatgatttaaataggaggagacccggtcagtcagaaattgttactcaaagaaaagaagcagattcagttgaatttctttcaggtatatttaaggataaaacaacaggtactcctataggatttataatcaaaaacagagatcataaatctaaagactataaacatataatgaattcctatagaccttcgcatgctgattttgtttatgataaaaaatatggatttagagactatagaggaggaggtcgaagctcagcaagagagactgttgttagagtagttgctggatcaattgcaaaacaactaattagccccgtaaaaatcaatgcatttgtttcttcagtaggagatgtaaaaatggatttagattt

SEQ ID NO: 287300 - DNA, 757 bp, Unknown
  Bacterial polypeptide expressing nucleotide sequence isolated from the Sargasso Sea
catgcagattatacatatttaagcaaatatggaattagagaccctcgagggggtggacgtcaatctgcacgagaaactgctatgagagttgccgccggagcaattgcaagaaagattattcctgaaattgaaataaaaggggcactcgttcaattaggagatttaaaaatcgataaaaccaaatgggatgatgattttataaatgaaaatcctttttggtgtcctgataaaagtgcaattaaaagttgggaagataaaattaactctcttgtagatgagggagatagttgtggagcaattattgaaattatagctaaaaatgttccagttggattgggtgcgccagtttatggaaaacttgactcggatttaggttctgcaattatgagtataaacgcagttaaaggtgttgaaattggaaacggttttgacgctgtaaacttgaaaggtagtgaaaacggtgatgagatgcgaatgaaaaataataaaccagctttcctatctaataattcaggaggtattcttggaggaatatcttcgggacaagatattattgtaagatttgctgttaaaccaacctcgtctatcagaaaaaagagaaaaacaattgataaaactcaaaaagatacagaaataactactaagggaagacatgatccttgcgtaggtattagagcagtgcctgttggagaagcaatggttgcatgtgttttggctgatcatttcttaagaaatagagctcagattggaaattaag

SEQ ID NO: 287301 - DNA, 574 bp, Unknown
  Bacterial polypeptide expressing nucleotide sequence isolated from the Sargasso Sea
aatgtcatttaatacttttggaaagctatttcgcttcacaacttggggtgaatctcatggtcctgctatagggtgtgttgtagatggatgtcccccaaatataaatattaatgaacaggatattcaaattgaactaaataaaagaaaacctggtcaatcaaaatttactacacaaagaaaagaagatgataaagtaaatatcttatcaggaatttttgaaggcaaaactacaggaactcctatctcaatgattatttataacaaagatatgagatcaagagattatgaaacaattaaaaataaatttagaccgggtcatgccgattatacatatttaaaaaaatacggaattagagactataaaggtggtggtagacagtccgcaagagaaacagcagcaagagttgctgcgggtgctatagcaaaaaaagttttagagatcaaaattggaaaaaaatataaagttattggagcagtcacgcagcttggaatgcttggatgtgacataaataattggaatgacaaatttatttcaaaaaacccatttttttgtcccgacaaatcaataataaaa

SEQ ID NO: 287302 - DNA, 932 bp, Unknown
  Bacterial polypeptide expressing nucleotide sequence isolated from the Sargasso Sea
tgcgttgttgatgggtgtccaccaaatatcctcctaaaagaagaagatattcaaaaagaattgaataaaagaaagccgggacaatctaaatttacaactcaaagaaaggaagatgataaagtgcaaattctttctggtgtatttgagggtaaaacaacaggaacacctatatcaatgataatttttaataaagatatgaggtctagagattatgaaacaataaaaaataaatttagacctgggcatgctgattttacgtattttaagaaatatggaataagagactatagaggtggtggaagacagtcagctcgagaaactgcttcaagagtggctgcgggagctatcgctaagaaagtcttagaaaaaaaaattgggttaaaatataaagttgttggtgctgtaacacaattaggaatattgggttgtgatatttcaagatggaacgataatgtaataaaaaaaaatccatttttttgtcctgaccagaaaataataaaactttgggaaaaatatttgcttgctattagaaaatcagggtcatcctgtggggcaattatagagattagagcaagaggaattcctactggtttaggggctcctatttactctaaattagatatggacttagcggcggccatgatgagtataaatgcagttaaaggagttaatattggctcaggaatgaattctgcacaattgactggtgaagaaaattcagatgaaatatctaatagaggtaaaaaaattaagtttaaatcaaataatgcgggtggaattcttggtggaatatcaagtggtcaagaaattgttgtttcctttgcagttaagcctacctcatcaattctaacttcaagaaaaacgatagataggtttggaaaaaatacgtcaatttcagtcaaaggtcgacatgacccttgcgttggtattag

SEQ ID NO: 287303 - DNA, 637 bp, Unknown
  Bacterial polypeptide expressing nucleotide sequence isolated from the Sargasso Sea
aatgacttctaattcaataggaaaaatctttaattttactacatggggagaaagccatggcaaagctattggttgtgttgtcgatggagttccttcaaacataaatttaactgaaaaagatattcaaccttatttagataaaagaaaacctggtcagtcgaaatttacaactcaaagaaaagaagaggataaagttgaaatactatctggaacttttgaaggaaaaacaacaggtcatcctatttctctaattatttacaatcaagaccagagatcaaaagattatggtgatatcaaaagtaaattcagaccaggtcatgcagattacacatattggaaaaaatatggcataagagattataggggtggtggtagatctagtgctagagaaactgcaatgagagtagcagcaggggcaatagcaagaaaaattataaaaaataaaattaaaaatcaagttgtaataacaggtgcattaattcaaataggtaatcataaaattaattatgataattggaataataattttattccaaaaaataatttttggagtcctgataaagaaattattaaattatgggaaaacgaaatacaaactgcaagaaaattctggttcctctttaggtgctataattga

SEQ ID NO: 287304 - DNA, 598 bp, Unknown
  Bacterial polypeptide expressing nucleotide sequence isolated from the Sargasso Sea
cgtgaaaatatggcatggagcgagcgtcataataatccatttttttgccctgatgcagccatggcaaaacaatgggaggcgtatcttgacggggtgcgaaaggccggctcatctgcaggcgccattcttgaaatcaccgccgatggtattcccgtcggacttggtcagccggtatatggcaagctggacagtgagctagccgcagcgatgatgagcattaacgcagcaaaaggcgtcgaaattggtggtggatttgatctttcagcagttgatggcagttttgccagcgatgaaatgcgagcaggaaaaagtctcgagacacccagctttctcagcaattacgctggcggtgttcttggcggcatttcatctggtcaacagattgttgtacgcgttgccattaagccaacttcctcgatcctaacgccccgcaaatcaattgaccgagataacaagaatgttgatgttatcaccaagggacgacatgacccatgcgtagggatcagaggtgttcccgtagctgaagccatgatgtctcttgtgctggctgacctttttatgcgacatcaggcgcaatgcggatttggagatttttaac

SEQ ID NO: 287305 - DNA, 664 bp, Unknown
  Bacterial polypeptide expressing nucleotide sequence isolated from the Sargasso Sea
ttgcttcgatttcttactggcggtgagtcacatggccctgggcttgtcgctttactagagggcttgcctgcaggaataaaaatttctgaggcagacattcgcctggatctggcccgtcgacaggcaggctatggccgtgggggacgtatgaaaatagaaactgactacgcggtagtacagtcaggggtaaggcacggtgccacgactggagcgcctatttcgctcttaattgagaataaggaccatctatctggtaacgggccagatggtaaaccttggactattactatgtcgaaagaggcagtggaggaagaagtcaccccgattcatagattgagaccaggtcatgccgacactccggggattagtaaatatttacaaaatgacgcaaggaatattcttgaacgttcttcggctcgcgagtcaacttctagagttgcaataggcgcaatttgtcgtgcttttttattagaatttggtgttgaagttcatagccatgtaactaatataggaggaatacaggctagaaagcctaatgtaattaattgggcgaatgtagagaaatctcctgtaagatgctcagaccctgaagcagaaaaacaaatgatagatgagattgataacgctcaagaggcaggggatagcttgggcggagttattgagg

SEQ ID NO: 287306 - DNA, 634 bp, Unknown
  Bacterial polypeptide expressing nucleotide sequence isolated from the Sargasso Sea
aatgtcatttaatacttttggaaagctatttcggttcacaacttggggtgaatctcacggaattgcaattggatgcgtggttgatggttgtccaccaaatataaaaattaaagaaaatgatattcaaattgaattaaataaaagaaaacctggccaatctaaatttactagtcaaagaaaggaagatgataaagtaaatattttatctggtatttttgaaggtaaaacaacaggagctcctatatctttgattatttataataaagatatgagatcaagagattatgagactataaaaaataagtttcgaccgggacatgctgactatacctattttaaaaaatatggaattagagattacaaaggtgggggaagacaatcagctagagagactgcggccagggttgcagcaggagctatagcaaaaaaagttttacaacataaaattggatcaaaatataaggttataggtgcagttactcaattaggaatattaggttgtgatactaaaaattggaatgataattttatttctaaaaatgcttttttctgtccagataaatcaattttaaaactttgggaaaaatatttattaagtattagaaaatcaggttcatcttgtggggcaataata

SEQ ID NO: 287307 - DNA, 723 bp, Unknown
  Bacterial polypeptide expressing nucleotide sequence isolated from the Sargasso Sea
ggggcggtggaaggcagtcggcaagagaaactgcttgtagagttgctgcaggtgctattgctaaaatagttttaagaaagataataggtaaaaaatttagtatagttggggctgttactcaactaggattaatgtcatgcgataagcagaactggaaggactctgaaattagaaaaaatccttttttctgccctgataaaaattctgtaaaattgtgggaaaaatatcttttagctgtaagaaaagctggctcatcttgtggagcagttattgaattaagagctaaaggtattccagttggattaggagctcctatttactcaaaattagatactgatattgctgctgcacttatgagtattaatgcagttaaaggagtaaatattggatctggaatgaacgcagcatttttaagtggtgaagaaaattccgacgaaattagaaaagatttaggaaaaattaaatttaaaactaatcatgcgggtggaattttaggaggcatctcttctggtcaagatattgttgcctctttcgctgttaaaccgacttcttctattttaaatagtagagagactattgataaaaaaggtaaaaatactaaaatttccgtcaaaggaaggcatgatccatgtgtagggataagagctgtgcctattggtgaagcaatgatcagttgcgttattcttgatcatttattaatgcacagagcgcaatgtggttaat

SEQ ID NO: 287308 - DNA, 273 bp, Unknown
  Bacterial polypeptide expressing nucleotide sequence isolated from the Sargasso Sea
aaaaaataaaatttgaaactaataatgcaggaggaatattaggtggcatatcctcaggtcaagaaattaaagtctcttttgctgtgaagcctacatcgtctatcctcacatctaggagaactattgataaatttgggaaaaatacatcaatatcagttaaaggaagacatgacccttgtgtaggaattagagctgttcctataggagaagctatgatgaattgtgttttgcttgatcatttgttaatgaataacgctcagtgtaaattttaat

SEQ ID NO: 287309 - DNA, 447 bp, Unknown
  Bacterial polypeptide expressing nucleotide sequence isolated from the Sargasso Sea
aatgtcatttaatacttttggaaaggtttttcgtttcactacgtggggagaatctcatggtcctgcaattggttgtataatagatggttgtccaccactcataaacctcaatgaaagagatattcagatagaactcaataaaagaaaacctggtcaatctaaatttactactcaaagaaaagagagtgataaagtagagattctttcaggagtcttcgaaggtaaaacaactggaactccaatctctttaataatttataacgaggatatgcgctcaaaagattatagtgatattaaggataaattcagaccaggtcatgctgattatacctactttaaaaagtatggaattagagattatagaggtggtggaaggtcttctgcgcgagagactgcttctagagttgcagcaggagcggtagcaaaaaaagttttggaaaaaaaatt

SEQ ID NO: 287310 - DNA, 694 bp, Unknown
  Bacterial polypeptide expressing nucleotide sequence isolated from the Sargasso Sea
atgagtagtagttttggaaaaatttttcgtgttaatacttttggagaatctcatggtggtgcagttggagttatccttgatggatgtccccctaagttaaaagtagatataaatctgatacaaaatgaattagataggcgcagacctggtcaaagtgacattacaacaccccgaaatgaagaagataaaattgaaatattaagtggaataaaggaaggattaacacttggaactccaatagcgatgttggtaagaaacaaggatcaaaggccaggtgattataatgatttggagcaagtatttagaccttctcatgcagatggtacatatcatctgaaatatggaattcaggcaagttctggtggtggaagagcttctgcaagagaaacaattggaagagtagctgctggtgctgtagcaaaacaattattaaaaaacttctgtaacactgaaatactatcttgggtaaagcgtatacatgatattgattctgatataaataaagaaaaaatttctcttaacaaaatagattctaatattgttagatgtcctgacgaaaaggtatcagcagaaatgatagagagaattaagcaattaaagcgtcaaggagactcttgcggcggtgttattgaatgtctagtaagaaatgtcccttctggtctaggaatgcctgtttttgataaattagaagctg

SEQ ID NO: 287311 - DNA, 931 bp, Unknown
  Bacterial polypeptide expressing nucleotide sequence isolated from the Sargasso Sea
agaacttaataaaagaaaaccaggtcaatctaaatttacaactcaaagaaaagaagatgataaagttgaaatattgtcaggtatgtttgggggcaaaactactggaacacctatctctatgattatttataataaagatatgcgatcaaaagactacaaagatataaaaaacaaatttagaccgggccatgcagatttcacatattttcaaaaatatggaataagagattacagaggcggtggaagacaatcagcaagagaaactgcttcaagagtagcagctggagctatagcaaaaaaagttttacaaacaaaattgggcaaaaaatataatgtgataggaggtgtaacccggttaggaattttaggatgtgacctaaataattggagagataaagaaatttcgaaaaaccctcttttttgtccagataagtcagttgtaaagttatgggaaaaatatttattaagtatcagaaaagcaggttcttcatgtggagcaattattgaaataagagccagaggtgttcctgttggtctgggtgcaccaatatattcaaaactcgatatggatttagcgtcagctatgatgagtattaatgctgttaaaggagttaatattggatctggtatgaattctgctcaattatctggtgagcaaaattcagatgaaatgtctaaaaaaggaaaaaaaacaaaattttattcaaataatgcgggaggaattttaggtggaatttctagtggtcaagaaattgtggtctcatttgctgttaagccaacttcttcaattttgagccaaagaaaaactatagacaaatttggaaaaaatacttcaatatcagttaaaggcagacatgatccttgtgttggtattagagcagtaccaataggtgaagcaatgatgcattgtgtaattttagatcattacctt

SEQ ID NO: 287312 - DNA, 814 bp, Unknown
  Bacterial polypeptide expressing nucleotide sequence isolated from the Sargasso Sea
atgtcattcaatacatttggtcacttatatagaacaactacttggggagagagtcatgggcccgctattggttgcgtggttgacggttgcccacctaatataaatttagaagaaatagatattcaaaaatggttagacaaaagaaagccgggacaatcgagatttacaactcaaagaaaagagcaggataaagttaaaattctctcaggagtgtttgaaggtaaaaccacaggcacacctatatctttattaattgaaaatacggatgcaagatcaaaggattatgataaaattaaagataaatttcgacctgggcacgctgactttacctatgaaaaaaagtatggtcatagagactacagaggtgggggcagacaatccgctagagaaacagcatgcagagtagcgtctggagctatagcaagaaaaatcttaggttctgaattatcaataaaaggggctgtcattcagataggtgatttagaaattaaccgaaacaattggaatgaaaatgaaattgataataatcccttttggtgccctgatattgagaaagttaagatttgggaaaaatatttagatgagataagaatgtcaggatcatctgtcggcgcggtaattgaaataactgctagaggaattcctgtgggcctaggcgctcctatatataaaaagttagatgcagatatagctagcgctatgatgagtattaatgctgtgaaggctatagaaattggttctggtgtcaatgcttctactttaaaaggtgaagagaacgcagatgaaatagttataaaaaataataaaataaaat

SEQ ID NO: 287313 - DNA, 737 bp, Unknown
  Bacterial polypeptide expressing nucleotide sequence isolated from the Sargasso Sea
tcgcggtgggggccggtcatcggcccgtgaaaccgcggtgcgcgtcgcagcgggtgcgatcgcagatttgacattgcaacaggtattgggcgccgattaccgcgtgcgcggtggtgtggtacaaattggcccgcacgccatctcgcgcgaccgccttgattggaacgaatgtgacaataacccgtttttctgtccggacccggtcgcagccaaggaatgggaggcctatctcgacggggtccgcaagcaaggctcgtcagccggtgccattctcgaaattgttgccgacggcattcccgccggtttgggccaaccgatttatggcaaactagataccgaactcgccgccgcaatgatgagcatcaatgcggtcaaaggtgtggaaatcggcagcggctttgacttggccgccattgatgggcgcgaggccggtgatgaaatgcgcgccggcaccgatggtccgtcctttagcagcaaccatgctggtggcattttgggtggtatttcgtctggtcaacaaattgttgttcgcattgcaatcaagccaacctcatcgattctgaccccgcgtcaatcgatcgataaggatggcaaggaagtcgatatcatgaccaagggacggcatgatccatgcgtgggtattcgtggcgtgccggtggctgaagcaatgatggcaataaccttgctggacgcgctgatgcgccataaggcacagaccaacctgatccccgaatagg

SEQ ID NO: 287314 - DNA, 421 bp, Unknown
  Bacterial polypeptide expressing nucleotide sequence isolated from the Sargasso Sea
atggctgaaaatacattagggaaaatatttagttttacaacttggggagaaagtcatggtaaggctattggttgcgttgtagatggagtgcctccaaatatatctttaactgaaaaagatattcaaaaatacttaaataaaagaagacctggacaaacaaaatacacaagtcagagaaaagagtctgacaaaataaatattctttcaggtacttttaacggcttaacaacaggacatcctatttcacttattataaataatgaagatcaaagaactaaagattattcagaaataaaaaatatatttcgacccggccatgcagattatacatattgggctaaatataaaataagagactatagaggaggaggtcgttctagtgctcgagagacagctatgagagtagcggcaggagcgattg

SEQ ID NO: 287315 - DNA, 637 bp, Unknown
  Bacterial polypeptide expressing nucleotide sequence isolated from the Sargasso Sea
atgtcagggaattctttcggaagctcttttattgtgaccacttttggtgaaagtcatggagtagcccttggttgtatcgttgatggctgcccacctggattagagctttgtgaagaagacatccagaaggaattagataagagaaaacctggatcttccaagtatacaactcaaagaaaagaagacgacgaagtagaaatattatctggtgttttcgaaggaaaaacgacaggaacacctataggcttgctgattagaaataaggaccaaaaatctaaggactatgatcaacttaaagatgtttttaggccctcccacgcagattatgtttattcaaagaaatatggaataagagaccacagaggaggaggaagatcttcagctagagagacttctatgcgtgtagcggcaggagcaatagctaaaaaatacttaagcgaaaaactggatatcaaaatcataggatacttatctcaaataggttctataactatatctaattttgattcttcacaaattagtcaaaatcccttcttttgcccagatcctgaagttttgacttctattgaagatttaattgatcaacttagaaaagatggtgactcagtgggggcaaaaatagaagtctcagtcagta

SEQ ID NO: 287316 - DNA, 643 bp, Unknown
  Bacterial polypeptide expressing nucleotide sequence isolated from the Sargasso Sea
aatgttaggtcataaattcaatgttataggagcagtcactcaactaggtttaatgtcttgtgataaatcaaactggaaagataatgaaatcagaaagaatccttttttctgtccagataaaaaatctgttaaactttgggaaaaatatcttttagctgttagaaaagcaggatcatcttgtggagcaattattgaattaagagcaaaaggaattccagtaggtttaggtgctcctatttattcaaaattagatactgatattgctgctgcactaatgagtataaatgcagtgaaaggcgtaaatattggagcaggaatgaatgctgcttttttaagtggagaagaaaactcagatgaaatgcataaaggtagtggaagtataaaatttaaatcaaatcaggcagggggaattttaggtggtatttcttcaggtcaggaaattattgcatcgtttgctgtgaaaccaacatcgtcaattctaacaagtagaagtacgatagataaaagaggtaaaaatacaaaaatttccgtaaaaggaagacatgacccttgcgttggcataagagcagttccaattggtgaggcaatgataaactgtgttttacttgatcatcttctcatgcataaagcacaatgtggttaa

SEQ ID NO: 287317 - DNA, 434 bp, Unknown
  Bacterial polypeptide expressing nucleotide sequence isolated from the Sargasso Sea
tatgtcagggaatacatttggaaaattatttcaagttaccacttatggagaaagccatgggagtgcgcttgggtgcattatagatggttgtccgccacaaatagagctttcatctgatgatattcaatctgagcttaatcgaagaaaaccaggccagtctgatgtaacaactcaaagaaaagaggatgacattgtggaaattttgtctggtgtatttgaaggcaagactttaggaaccccaatcagtttgatagtttataacgaagatcaaagatcaaaagattactctaaaatcaaagatgtatttcgtcctaatcatgctgatattacctatcaagcaaaatatggtcatagagactatagaggcggaggcagatcaagtgctagagagactgctatgagagtcgccgcgggagctgttgctaaaaaatatc

SEQ ID NO: 287318 - DNA, 727 bp, Unknown
  Bacterial polypeptide expressing nucleotide sequence isolated from the Sargasso Sea
ttttagaggtggtggaagacaatctgctagagaaactgcttgtagggtagctgccggagctgttgctaaaatagttttaaataaaattttaggtaaaaaatttaatgtaattggcgcagtaacacaattaggattaatgtcttgtgataaacagaattggaaaaactctgaaataagaaaaaatccttttttctgcccagataaacgatcagtaaaattatgggaaaaatatcttttagctgttagaaaagcaggttcatcttgtggagctgtaattgaactaagagcatctgggattcctgtaggattaggtgctcctatttactcaaaattagatactgatattgcctcttcattaatgagtatcaatgcagttaaaggagttaatattggttctggaatgaatgctgcttttttaagtggtgaagaaaattctgatgaaattagaaaaagttctgggaaaattaaattcaaaactaatcatgctggaggaattttaggaggaatttcttcaggtcaagatatagttgcatcttttgccgttaaaccaacctcctcaattttaaccagtcgaaaaactatagataaaaaaggtaaaaatacaaaaatttctgtcaaaggaagacatgatccttgcgtaggaataagagctgttcctataggcgaggcaatgataagttgtgttatcctcgatcatttattaatgcatcgagcgcagtgcggttaa

SEQ ID NO: 287319 - DNA, 735 bp, Unknown
  Bacterial polypeptide expressing nucleotide sequence isolated from the Sargasso Sea
aaaaatatggaatacgtgattatagaggtggtggaagatcaagtgcgagagaaactgcaatgagagtagctgcaggagctgttgcaagaaaagttataaataaaaaaattggaaataagcctaaaataattggctctctggttcagattggtaattctaaaattgattataataattgggatgaaaaaataatatctcaaaatgaatttttttctgctgatgaaaaaattatccctaaatggaaaaatcttattgataaagcacgtaaagaaggttcttcattaggtgcaataatagaaataagagcattgggcattcctgcaggtcttggggaacctatttatgagaaattagactctgatattgcaaaagctttaatgactataaatgctgtaaaaggcgtggaaataggtaatggtttcaatagtgtaaatgaaaatggtaaaaccaatgttgacgaaatggttataaaaaatggagagccattatttttaagtaacaataatggcggtattcttggaggaattagttctggtcaagatatcatttgccgatttgtagttaaaccgacaagctctataatttctgagagaaaaacaattgacatcaattttaaagaaacaaaaatatcaacaaaaggtcgtcatgatccatgtgttggtattagagctgtcccagttggggaagcaatgttagcaacaactattgcagatcattgcttacgtcatttttgat

SEQ ID NO: 287320 - DNA, 358 bp, Unknown
  Bacterial polypeptide expressing nucleotide sequence isolated from the Sargasso Sea
aatgtcatttaatacatttggaaagatatttcgtttcacaacttggggagagtcccacggacccgctataggatgtgttattgatggatgtcctccaaatataagcataaaagaaaaagatatacagtatgaattaaataaaagaagacctggccaatcaaaatttacaactcagagaaaagaagacgataaaataaatattttatctggtgtatttgagggtaaaactactggcacacctatatcgttgctaatttataataaagatatgagatcaagagattatgaaacaataaaaaataaatttagacctggtcatgctgattttacatattttaaaaaatatggaataagagat

SEQ ID NO: 287321 - DNA, 762 bp, Unknown
  Bacterial polypeptide expressing nucleotide sequence isolated from the Sargasso Sea
cctggacgccgcagtcaccccccgcgcctccggctcctccttcggtcgcctcttccgcgtgacgacgttcggcgagtcccacggcggtggcgtcggttgcgtggtggacggcgtccccccccgtctgcagatcacgcgcgaggagcttcagtttgagctcgaccgccgccgccccgggcagagccggatcacgaccccgaggaacgaggaggattcctgcgagatcctcagcggcgtcggcctcgacggcgtcaccctcggcacgcccatcgcggtcctcgtcaggaacaaggaccaccggagccaggactacggcgagatcgccgtggcgtaccgcccctcgcacgcggacgcgacgtacgacatgaagtacggcgtgcgcgccatcgccggcggcgggcgctcctccgctcgcgaaaccatcggccgcgtcgccgcgggcgccatcgcgaagaaggtcctgaagcagatcgccggcacggagatcctcgcgtacgtctcccaggtcaaggacgtcacgtccgagaacgtggaccacgcgacgatgacgatggaggacgtggaggcgaacatcgctcggtgtcccgacgaggcgagcgcggagcggatgatcgccgccatcgacgaggttcgcgtgaagggcgactcgtgcggcggcgtggtgacgtgcatcgtgcgcaattgcccgcgcggtctgggcgcgccggtgttcgataagctcgaggcggacctcgcgaaggcgatgatgtcgcttcccgcgac

SEQ ID NO: 287322 - DNA, 335 bp, Unknown
  Bacterial polypeptide expressing nucleotide sequence isolated from the Sargasso Sea
aatgggtaattcatttggtaagttatttcgaattacgacatggggagagtcccatggcggtggagttggtgttgtaatagatggatgtcctccgaatattgatatcgatctaaatttcattcagcaagaactagatcgtcgcagaccaggacagagtcatataacaacccctagaaaagagtctgatgaagttcatgtattgtctggaatatttgagggaaaaacattagggactccaatttcaatgatggtcaaaaataaagatgctaacccaaaagcgtataatcatttaaaggacgtttatcgtccttcacatgccgactatacttatgact

SEQ ID NO: 287323 - DNA, 815 bp, Unknown
  Bacterial polypeptide expressing nucleotide sequence isolated from the Sargasso Sea
cccgggatctccctatcggttgaggatcttctcgtcgacatggatcgacgccgacccgggcagagtcgcatcgtgactcaacggaaagagtcggacaccccggaaatactctcgggagttttcgaggggcgcaccacgggtacaagcctcgccatccttgtccgcaacgaggatcagcgcagccgtgattactcgaatatcaaagacaagtaccggcccggccacgcggacttcagcttcgatgcccgttacgggtttcgagattaccgcggcggtggccgttcgagtgcccgcgaaacaaccgtccgggttgccgccggagtcgtcgcgaaaaaaattctcgaatcattcggagccaaggttgtcggctacgtctgccaggtcggcggcatccacgcgacggttcccgatccggcttccgtgacgctcgagcaggtcgagaagcttcccgatggtgagcccaacatcgtccgctgcccggacctggacgccgcggagaagatgattcagctcatcgaagaagtccgcaaagatcaggactcgatcggtggagcggcggagattgtggcgagtggcgttcccgcgggcctcggcgaacctgtctttgacaaaatcaaagcggacctggccaaagccctcttcagtcttccggccgtgctcggcgtcgagtatggaattggcttcggctgcacgacgatgcgcggcagtgagcacaacgatctgttcgtcgctggagacgcgaccgcgtcgaacccgcgaggcatcaccaccaaaacgaaccgccacggcggaatgctcggtggaatcacgaccgg

SEQ ID NO: 287324 - DNA, 957 bp, Unknown
  Bacterial polypeptide expressing nucleotide sequence isolated from the Sargasso Sea
acgacatggggagaaagtcatgggaaagctattggttgtgttatagatggagttccttcaaatattaaattaactgaaaaagatattcagccatatttagataaaagaaaacctggtcagtctaagtttacaacgcagagaaaggaaaaggattttattgaaatattatctggaacctttgaagataaaacaactggtcatcctatttcacttataatttataataaagatcaaagatctagagattataaagatattaaagaaaaatttagacctgggcatgctgattatacatattgggcaaagtatggaatcagagactatagaggtggaggtagatcaagcgctagagagactgctatgcgagtagcagcaggtgcagtagcaagaaaaataattacaaagaaagtaaaaacacaagtttcaattactggagctctagttcaaataggtagatataaaataaattataataattggaataataattttatttcacaaaatgaattttggagtcctgataaaaaaattatatctacttggaaaaaagcaattaacgatgcaagaaaactaggttcttcacttggtgctataattgaaattagagttaaaggattgcccgcagggttaggtgagccaatttatgagaaaattgactctgatatcgcaaaagctttaatgtcaataaatgcagttaaaggtgtagaaattggtaatggttttgattgtgtaaacgagagtggagtaaccaatgttgatgaaatgagaataaaaaataacaaacctatttttctatctaataataatggaggcatattaggcggaattactactggacaagaattagtgtgtagatttgttgtaaaaccaacaagttcaatattatcatcaaaaaaaactattaatacaaaaatgaaagaaacaataatatcaactaaaggacgtcatgatccatgc

SEQ ID NO: 287325 - DNA, 673 bp, Unknown
  Bacterial polypeptide expressing nucleotide sequence isolated from the Sargasso Sea
gcaatagcaaaaaaagtcttacaaaacaaattaggaaaaaaatataaagttgtaggagcagtaattcaattgggtatacttggttgtgatgtaactaaatggaatgagcgcttcatttcaaaaaatccttttttctgtcctgataaatcaataatcaaactgtgggaaaaatacctattgagtataagaaaatctggatcttcttgtggagcagtaattgaattaagagctaaaggaattcctgtaggattgggagctcctatttactctaaattagatatggatttagcctcagctatgatgagcattaatgccgtcaaaggtgttaacattggatcaggaatgagttctgcccaactcactggtgaacaaaactctgatgaaattgtacaaaaaagtaaaaaaaccaattttaaatcaaataatgccggaggaattcttggaggtatatcttcaggtcaggatataattgtttcatttgcagtaaaaccaacttcttcaattctaacatcaagaaaaacaattgacaaatttggacaaaatacatctatttcagttaaaggaaggcacgatccttgcgttggtattagagcggtaccaattggagaagcaatgatgcattgcgtgttattagaccattatttaatgaatgccgctcaatgtaatagttaac

SEQ ID NO: 287326 - DNA, 850 bp, Unknown
  Bacterial polypeptide expressing nucleotide sequence isolated from the Sargasso Sea
caaggtgataattctttcaggcgtatttggaggaaaaacaactgggacacctatttcgattataatttataatgaggataaaaagtctagagattacgaatctattaaaaacaaattcagacctgggcacgctgattatacttatttcaagaaatatggaatcagagactttaaaggtggtggaagacagtctgcgagggaaactgcttgtagagtagcagcgggtgccgttgctaaaatagttttaaaaaaaattttagggataaaatttaatattattggagcagtaacccaattaggattaatgtcctgtgataaacaaaattggaaggactcagaaataagaaaaaatccttttttctgtcctgataagaagtctgtaaagttgtgggaaaaatatcttttagctgttagaaaagctggatcttcatgtggagcaattattgaattaagagcctcaggaattccagtgggattaggtgcacctatttattcaaaattggacactgatattgcggctgcacttatgagtataaatgcagttaaaggagtaaatattggttcaggaatgaattctgcttttttgagtggtgaggaaaactcggatgaaattagaaaaaattctggaaagataaaattcaaaactaatcatgctggaggaattttaggtggaatttcttctggtcaagatattgtagcttcatttggagttaaaccaacttcctcaattctaaccagccgcgaaactatagataaaaaaggtaaaaacacaaaaatttcagttaaaggaagacatgatccttgtgttggtatcagagccagtgcctataggagaagcaatgttaagctg

SEQ ID NO: 287327 - DNA, 706 bp, Unknown
  Bacterial polypeptide expressing nucleotide sequence isolated from the Sargasso Sea
tggtggtagatctagtgctagagaaactgcgatgagagtagctgcaggtgcaatagcaagaaaaatcataaaaaataaagttaaaaatcaagttgtaataacaggtgcattaattcaaataggtaatcataaaattaattatgataattggaataatagttttattccaaaaaataatttttggagtcctgacaaaaaaattattaaaacatgggaaaacgaaatacaaactgcaagaaaatctggttcctctttaggtgccataattgaaattagagtaaaaggtttgcccgctggattaggagagcctatttatgaaaaaatagactccgatttagccaaggcattgatgtctattaatgctgttaagggtgtagaaatgggaaaagggtttagtagtgtttatgaaactggaatttctaatgtagatgaaatgagaattaaaaataaaaaacctttatttctctcaaataataacggaggagttcttgggggaattacaactggtcaagagttaattactagatttgtagtaaaaccgacaagttcaattttatcaacaaaaaaaacaattaatacaaaattaaaagaaacgacaatatctactaaaggtcgtcatgatccatgtgttggtattagagctgttcctgttggtgaagcgatggttgccacaactatagctgatcattgtttaagatttctctaa

SEQ ID NO: 287328 - DNA, 246 bp, Unknown
  Bacterial polypeptide expressing nucleotide sequence isolated from the Sargasso Sea
tttcaggcggtacgctaggaggtatctctacaggtcaagatttacatgtaaacattgctcttaagccaacatcgagtattttaatacctggtaaaaccatcgatcagaaaaacaaaccgactactatacgtactaaaggaagacatgatccttgtgtgggaataagagccgtcccgatagctgaagctatgatggcactgactctatgtgacttatatttgagacataaagcacaaaacaaataat

SEQ ID NO: 287329 - DNA, 931 bp, Unknown
  Bacterial polypeptide expressing nucleotide sequence isolated from the Sargasso Sea
tcaaaaattacaactcaaagaaaagaagatgataaggtaaatatcttatcaggtatatttgaaggtaaaactaccggtactccaatttcaatgattatttataataaagatatgagatcaagagattatgaaacaatcaaaaataaatttagacctggtcatgcagactatacatatttcaagaaatatggaattcgagattataggggtggaggaagacaatcagcaagagaaacagccgcaagagttgcagcaggtgctatagcaaaaaaagtattagaaaataaaattggtaaaaaatataaagttattggagctgttacacaacttggtatacttggttgtgatcttaaaaagtggaatgataaatttatttctaaaaatccatttttttgtccagacagatcaataataaagctttgggaaaaatatcttttaagtgttagaaaggctggatcttcgtgtggagcaataatagaggttagagcaagaggtgttccaattggattaggtgcaccaatatactcaaaattagatatggatctagcttcagctatgatgagtattaatgcagtaaaaggtataaatattggatcaggaatgaattctgcacaattgactggggaagaaaactcagatgaaattttaaaaaaaggaaaaaaaataaattttaaatcaaataatgctggtggaattttaggtggcatttcatctggacaagatattataatttcttttgcagttaaaccaacttcatccattcttacaaaacgtcaaactatagatagatttggtaaaaatacttcaatatcagttaagggaagacatgatccatgcgtaggtataagagcggttccaattggtgaagcaatgatgcattgtgtaattctagatcactatttaatgaatattgctcaatgtggcaattaat

SEQ ID NO: 287330 - DNA, 550 bp, Unknown
  Bacterial polypeptide expressing nucleotide sequence isolated from the Sargasso Sea
aaaaatccattcttttgtccagacaagtctatgattaaattatgggaaaaatatttacttggtgtaagaaaatcaggatcatcatgtggcgctgtaatagaagttagagcaagaggaattcctgcgggttttggggcgcctatttattcaaaattagattctgatattgcatcagcatttatgagtattaatgcagttaaaggggtaaatgttggtgcagggatgaattctgcacaactaagtggtgagcaaaactctgatgaaatatcttcaaaaaataataaattaaaatttaactctaataatgcaggtggtatcttgggtggaatttcttcagggcaagaaataatagcatcatttgcagttaaaccgacatcttcaattttaactacaagaaatacagttaataaatttggaaaaaataccacaatatctgtaaaaggaagacatgatccatgcgtaggaataagagctgttccagttggagaggctatgatgaattgtgttttattagatcactatctgatgaatcaagctcagtgcggataac

SEQ ID NO: 287331 - DNA, 767 bp, Unknown
  Bacterial polypeptide expressing nucleotide sequence isolated from the Sargasso Sea
aatgtcatttaatacttttggaaagttttttcgttttaccacatggggagagtcacatggtccagctataggatgtgttattgatggttgtccacctaatatagcattaaaacaggaacatattcaaaaagaactaaataaaagaaaaccaggacaatcaaagtttactactcaaagaaaagaagatgataaagtcgagatattgtctggtgtttttgaaggaaaaacgacagggacccctatatcactaattatttataacaaggatatgagatcaagagactacgagaccataaaaaataaatttagacctggtcacgcagattttacatattttaaaaaatatgggattagagattaccgaggaggtggtagacagtcagcacgagaaactgcctctagagtggccgctggggcggtagcaaaaaaagttttagaaaaaaaaatagggaaaaaatataaagtcgtaggagcggttacccaacttggaatattaggttgtgatgtaactagatggaatgataaagaaatagggaaaaatccatttttttgtccagataaaaaaattataaagttatgggaaaaatatttgttggccatcagaaaatcgggttcatcttgtggtgcgattattgaagtacgagcaagaggtgtgccagttgggctaggagcacctatatatgctaagcttgatatggatttagcctcagcaatgatgagtattaacgcagttaaaggagtaaatataggatctggtatgaatgcag

SEQ ID NO: 287332 - DNA, 630 bp, Unknown
  Bacterial polypeptide expressing nucleotide sequence isolated from the Sargasso Sea
aatgtcatttaatacttttggaaagtcttttcgttttacaacttggggagaatcccatggtccagctttagggtgtgttatcgatggatgtccaccattaataccattaaaagaagctgatattcaaaaagaattaaacaaacgaaaacctgggcaatcaaagtttactactcaaaggaaggaaagtgacaaggttcaaattctttcgggagtttttgagggaaaaacgactgggacaccaatatcattgataatttacaacgaagatatgcgttcaaaggattataatgatattaaagataaatttagaccaggacatgctgatttcacatattttaaaaagtatggaataagagactacagaggtggtggtagatcatctgctagagaaacagctgcaagagttgcagcgggagcagtggcaaaaaaagttttagaaaataaattaggaaaaaaatttaaaatcaccggagctgtaacccaacttggaatattaggatgtgataccaataaatgggatgataaaataatttctaaaaatccatttttttgcccagataaatcaatgttaaaaatttgggaaaaatactttgtaagtatcagaaaagctggatcgtcatgtggagcaat

SEQ ID NO: 287333 - DNA, 692 bp, Unknown
  Bacterial polypeptide expressing nucleotide sequence isolated from the Sargasso Sea
catgagggttgcagcaggcgcaatcgcaagaaaatatttatttgaaaaagcgggaatagagatattcggttttttaggtcagttgggaccgattcatcttgaaatgaaggacagatcatttattgaaacaaacccttttttctgtggcgatcctgaaaagatttcagaattggagtcatatatggatcaattgagaaaagagggcgattccattggcgccagaattaacttggtagcgacgaatgtcccagttggattgggcgaaccagtttttgacaaactggaagcagatatcgctcatggattaatgagtatcaatgcggtcaaaggagttgagattggctctggattctctgtagtgaatcaaaaaggcagcgagcatagagatgagattgataccgatggctttaaacagaataactctggcggcacattaggcggtatctcaagcgggcaggatatttttgcaagcattgctttgaagcctacatccagcattatcaagccggctgagacaattgataaaacaggtgaaaagactgaaattgtaaccaaaggaaggcatgatccctgtgtaggccttagggcaacacccataggcgaagccatgctggcaattgttttaatggatcattttttgagaaatcgagcccaaaatgctgatgtctcaatagaagaaaaaggcgaataaa

SEQ ID NO: 287334 - DNA, 748 bp, Unknown
  Bacterial polypeptide expressing nucleotide sequence isolated from the Sargasso Sea
atgtcaggcaatacgtttggaaaaatatttaaaattacgacttttggtgagagtcatggcactgctatgggctgtattttagatggctgtccgcctcaaattgagctaaaaaaagaagatattcagcatgaattagatcgaagaaaacctggtcaatcagatgtaaccactcaaagaaaagaagatgatgctgttgaaattttatctggagtttttgaagggaaaactcttggaacacctataggaatgataatttacaacaaagatcaacaatctaaggattattcaaatataaaagatgtctttagaccaaatcatgccgatattacctatcaggcaaaatatggtcatagagattacaggggtggaggtagagccagtgccagagaaactgtgaattgggttgctgctggagcgattgctaaaaagattcttcaagaagaaggcatctcagtaaatggatttgtttctgaaataggaaaggtgaaggctgaacaaattaataataaagacattaacaataaatactttttttgtgatgaatcaaaactatctgatttagattcgatgtttagtgatttaatagaagaaggtaattctgttggagcaaagttaggagttgttgtagaaaattgtcctgttgggcttggtgatccagtttttgagaagttagatgctaatctagcaaaagctaatatgactattaacgcagtcaaatcagtatcaattggaaatgcagatgaccttt

SEQ ID NO: 287335 - DNA, 344 bp, Unknown
  Bacterial polypeptide expressing nucleotide sequence isolated from the Sargasso Sea
agtaaaaggtgtggagattggagcaggcttcgatgttgttagccaaaaaggttctgaagcaagagatgaaatcaccccaaaaggttttttgagtaacttctcaggcggtacattaggaggcatctctacaggtcaagatttacatgtaaatatcgctctaaagccaacatcgagtattttaatacctggtaaaactgttgatcagaaaaacaaaccgactactatacgcactaaaggaagacatgatccttgtgtgggaataagagccgtacccattgctgaggctatgatggcactaactctatgtgacttatatttgagacacaaagcacaaaacaaataat

SEQ ID NO: 287336 - DNA, 484 bp, Unknown
  Bacterial polypeptide expressing nucleotide sequence isolated from the Sargasso Sea
tcttgggtaaagcgtatacatgatattgattctgatataaataaagagaagatttctctaaaaaaaatagattctaatattgttagatgtcctgatgaaaaggtatcaacagaaatgatcgagagaattaaggaattaaagcgtcaaggagactcttgcggcggtgttattgaatgtctagtaagaaatgttccctctggtcttggaatgcctgtttttgataaattagaagctgatttagcaaaggctttgatgtctttgcctgccacgaaaggctttgaaataggttcaggtttctctggaacttatttaaaaggaagcgaacataatgatgccttcatcaagtctgatgatattagtaagttaagaacaacatcaaacaattcaggaggtatacaggggggaataagtaatggtgaaaatatcgagatgaagatagcttttaaacaaacagcaaccatagggaaagaacagaaaacagtaa

SEQ ID NO: 287337 - DNA, 489 bp, Unknown
  Bacterial polypeptide expressing nucleotide sequence isolated from the Sargasso Sea
ctagaaaaaaaggatcatcattgggtgcaaaattattagtaaatgcaaaaaatgttcccgccggacttggagaaccagtatatggtaaattagatgctgaccttgcaggtgcaatgatgagcatcaacgctgttaaaggtgttgaaataggagctggtaatgaggctgttgaattatcaggagatgaaaactccgacgaaataagagctaataaaaataaaaaaattatcttttcttctaataactctggcggaatcttaggtggtatatcaagtggtcaggatttaaatttatcaataacgattaaaccaacgtcgtcaattttgaaggcaaaaaaaacaattaataataaatttcaaaatacatcgatttcaacaaaaggtcgtcacgatccatgtgtaggtttgagagctgtcccaattgctgaggctatgatggcgtgtgttttagcagatcatatattgcgcaatagagcgcaatgtggctaaa

SEQ ID NO: 287338 - DNA, 769 bp, Unknown
  Bacterial polypeptide expressing nucleotide sequence isolated from the Sargasso Sea
tgctgactatacatattttaaaaaatatggaataagagattatagaggtggtggaagacaatctgctagagaaactgcttcaagagtagcagctggagcgattgcaaagaaagtattacagagcaaattaggaaataaatataaagttgtcggtgctgtaatacagataggaattctaggttgtgatactagtaaatgggacgaaaaatttatttctaaaaatccttttttttgtcctgataaatcaataataaaactttgggaaaaatatttactaagtattagaaaatcaggttcttcatgtggagcgattattcaagtaagagccaagggcgttccaattggattgggggctccgatttattctaaactagatatggatttagcagcagctatgatgagtattaatgcagttaaaggcgtaaatattggatcaggaatgaacgttgcccagcttaccggagaacaaaattctgatgagattacacaaaaaggcaaaaaaactaattttaaatcaaataatgctggaggaattcttggtggtatttcttctgggcaagacataattgtttcatttgccgttaaaccaacatcttctattctttcatcaagaaaaacaattgacaaatttggaaagaatacatttatttctgttaaaggaagacacgatccatgtgttggtatcagagcagtaccaattggagagtcaatgatgcactgtgtgttattagatcactatctaatgaatgttgctcagtgtaaaagttaa

SEQ ID NO: 287339 - DNA, 637 bp, Unknown
  Bacterial polypeptide expressing nucleotide sequence isolated from the Sargasso Sea
tggttcgaaatttaacgtaacaggagcagttacacaattaggactaatgtcttgtgacaaatcaaattggaaagatagtgaaataagaagaaatccttttttctgcccagataaaaaatctgtaaagttatgggaaaaatatcttatggctgtaagaaaatctggttcatcatgtggagcaataattgaattaagagcaaaaggagttcctgtaggtttaggtgctcctatttattctaaattagatgccgatatagcatcagctcttatgagtataaacgcagtaaaaggtgttaatattggagcaggtatgaatgcagcttttttgagcggtgaggaaaattctgatgaaatgaataaaaaatctggaaaaataaattttaaatctaatcaagcaggtgggattttaggaggaatatcttcaggtcaaaatattatagcctcattcgcagtgaagccaacttcatcaattttaacaagtcgagatacgatagataaaaaaggtaaaaatacgaaaatttctgttaaaggaagacatgatccttgtgtaggaattagagctgtacccattggagaagcaatgattagttgtgtgctactagatcattatttaatgaacaaagcgcagtgtggttaa

SEQ ID NO: 287340 - DNA, 518 bp, Unknown
  Bacterial polypeptide expressing nucleotide sequence isolated from the Sargasso Sea
tatgtcttttaatacttttggaaaaatatttagatttactacgtggggtgagtcccacggacctgcaataggctgtgttatcgatggttgtccaccaaatatacctatttctgaaaaggatatccaaaaagatatggatagaagaagacctgggcaatcaaaatttactacccaaaggaaagagtcagataaggtaattatactgtctggtgtttttgaagggaaaacaactggcaccccaatatctatcataatctataatgaggataaaagatcaagagattatgaaaccataagaaataagttccgaccaggtcatgcagattttacgtattttaaaaaatacggaataagagattttagaggaggaggcagacagtcggctagagaaactgcttgtagagtggctgctggggctgtagcaaaaattatattaaaaaagattataggattaaaatttaatattataggagctgttactcaattgggtttaatgtcttgtgataaacaaaatggaa

SEQ ID NO: 287341 - DNA, 400 bp, Unknown
  Bacterial polypeptide expressing nucleotide sequence isolated from the Sargasso Sea
ttagatatggatctagcttcagcaatgatgagtataaatgcagttaaaggggtaaacattggatctggtatgaattctgctcaattaactggagagcaaaattcagatgaaatttctcaaaaaggtagcaaagctaaatttgcatcaaacaatgctggcggcattctaggtgggatatcttcaggtcaagaaataatagtttcatttgcagttaaacctacttcatccattttaactagcagaaaaacaatcaataaatttggtaaaaatacatcaatatctgtaagaggaaggcacgatccatgtgttggtataagagctgtgccaattggacaggctatgatgcactgtgttttattagaccactatctaatgaatcaagcccaatgtaaatattaat

SEQ ID NO: 287342 - DNA, 446 bp, Unknown
  Bacterial polypeptide expressing nucleotide sequence isolated from the Sargasso Sea
aataatagaagttagagcctcaggtattcctgcaggacttggggaacctatttatgaaaaattagactctgatattgcgaaggctttaatgactataaatgctgtaaaaggtgttgagataggaaatggtttcaacagtgtaaatgaagatggaaaaacaaatgttgatgaaatggtcataaaagatggggaaccaaaatttttaactaataataatgggggtattctaggaggtattagttcaggtcaagatataatctctagatttgttgttaaacctacaagttctataatttcagagaggagaacaattgacattaattttaaagaaacaataatatcaacaaaaggacgtcatgatccatgtgttggtattagagctgtaccagttggagaagcaatgttagcaacaactattgcagatcattgcttacgtcacttttgat

SEQ ID NO: 287343 - DNA, 618 bp, Unknown
  Bacterial polypeptide expressing nucleotide sequence isolated from the Sargasso Sea
taaaattgaaatcttgtcaggtatttttaatggaaaaactactggaaccccaatctcaattttaattcgaaatgaggataaaagatcaagagattatgagtctattaaaaacaaatttagaccaggccatgcagattttacttattttaaaaaatatggaattagagattatcgtggaggcggtagacagtctgctagagagacagcttcaagggttgctgctggagcaattgcaaaggtagttttaaaaaagatattaggtaataaatttagcatttatggtgcagttacacagttaggtttgatgggttgtgatagaacaaattggagtaatggtgaaataagaaaaaatccttttttctgtcctgataaaaaatcagttaaattatgggaaaaatatcttatggctgttagaaaatctggatcctcatgtggggctattattgagttaagagccaatggtattccggctgggcttggttcaccaatttattctaaattagatatggatatcgctggtgcattaatgagtataaatgcagttaagggagtaaatataggagcgggaattaaagcagcctatttatctggcgaagaaaattctgatgaaatgaaatc

SEQ ID NO: 287344 - DNA, 856 bp, Unknown
  Bacterial polypeptide expressing nucleotide sequence isolated from the Sargasso Sea
ctattgctcttcaattaaaaatgaagatcagagaagtaaagattactctgacattgctaaacaatttagacctggacatgcagacattacttaccaaaacaagtatggaattagagattatagaggtggtggcagatcgagtgctagagaaactgcagtaagggttgccgctggggcaatagcttttaaagtcttagaacataagttaaataaaactatcaaaattagagcaagtgttgttcaaatgggccccaataaaataaatagagaaaatttcaattggaacgaagttaatcataacccatttttctgtggagatcgagaagctgcaaaagaatgggaaatatatttagatggcttaagaaaaagtggaaatagtacaggtgctataattgaagttattgccgaaaatgttccaagaggcttaggaagtcctgtatataaaaaattagatagtcaaattgctgaagctatgatgagtataaatgcagttaaaggagtcgaaattggttctggttttggtttagcttctttaacaggtgaagagtcaaatgatgagatttttccagataataaaggagattattactttggctctaatcattctggaggaatacttggagggatttcatctggacagcctatcgttgcaagatttatagttaagcccacgagctctattcttaaagaaaaaaactctataaatctaaataatgaagcaattcaaattagaacaaagggtaggcatgatccttgcgttggtattagagccgttccggtcgctgaatctatgatggccataactatacttgatcaattattagagcatgaaagccaaattggaaaagttaaataa

SEQ ID NO: 287345 - DNA, 694 bp, Unknown
  Bacterial polypeptide expressing nucleotide sequence isolated from the Sargasso Sea
atgtcatttaatacatttggaaagttttttcgtttcacaacatggggagaatctcatggaccagctataggttgtgttgtagatggttgtcctccgaacatacctatcaaggaggcagaaatacaattagaattggataaaagaaaacctggacaatcaaaatttacaactcaaagaaaagaggatgataaaatcaatatactttctggaatttttgaaggtagaacaactggaactcctatcttaatgttgatctacaataaagatatgagatcaagggattatgaaactataaaaaataaatttagacctggacacgctgattatacctattttaaaaaatatggtataagagactatagaggtggtggaaggcaatctgctcgtgaaacagcggcaagagttgccgcaggagcaatagcaaaaaaagttttagaaaaattaattggaaaaaaatataaaactattggcgcagttactcagctaggaacacttggatgtgataaaaatagatggaatgataactttattagaaagaacccatttttttgtcctgataaatcagtattaaaactttgggaaaaatatcttttaagcattagaaaagcaggatcttcgtgtggagcaataattgaaatcagagccagaggagtgcccttgggtcttggagctcacaatttattcaaaacttgat

SEQ ID NO: 287346 - DNA, 580 bp, Unknown
  Bacterial polypeptide expressing nucleotide sequence isolated from the Sargasso Sea
taaatctaattggaaagatagcgaaataagaaatcttccctttttttgtccagacaaaaagtcagttaaactttgggaaaaatatcttttagccgtaagaaaagctggttcatcttgtggtgcaattatagaattaagagcaactggtattccagttggtttaggagcaccgatttacgcaaaattagatacggatatagctgcagctttaatgagcatcaatgcagttaaaggagttaatattggagcaggtatgaatgcagcttttttaagtggtgaagaaaattctgatgagataagcaaatattcaggaaaagtaaaatttaaatctaatcaagcagggggaattttaggaggtatttcgtctgggcaaaatattgttgcctcgttcgctgttaaacctacatcatcaattttaactagcaggaaaacaatagataaaaaaggcaaaaacacgaaaatttctgtaaagggaagacatgatccttgtgttgggataagagctgtgccaataggtgaagcaatgattaattgtgtgctattagatcattttttaatggatagagctcaatgtggttaa

SEQ ID NO: 287347 - DNA, 877 bp, Unknown
  Bacterial polypeptide expressing nucleotide sequence isolated from the Sargasso Sea
aaagaagatgacaaagttaagattctttcaggtgtatttgaaggaaagaccaccggaacgcctattggcctaattatctttaatgaagatcaaagatcgcatgactattcaaatataaaagatgtttttagacctaatcatgctgatattacatatcaaggtaagtatgggataagagactatcgtggaggcggcagggcgagtgccagagaaacatcaatgcgagtcgcagctggagctgttgccaaaaaggtgctcaaagaaaaagggattgtcattagttcttgggtccagcaaattggtgagattaaagcagagaatttcaataataactcttcaaataaatataatttttgcgatgaatcaaaactgccagagctagatgaattatttaatcagcttattgatgatggtgattcagttggagctgagctaggagtcaaaatttctggttgtaaaattggtctcggcgaaccagtttttgataaattagatgcagagcttgcaaaagcaatagtttcaatcaatgctgttaaaagcatatcttttgggaatgcagatctatttttatcaaaaaaaggctcagaggtaagggatgaaatgaactctgatggttatctctccaataattctggtgggattcttggaggaatttcatccggtcaagatatcgacctttcatttattatcaagccaacctcaagcattgcatcaaaatcaaaagctgtggatgtggatggcaatgaagtatcgcttgaggtcaaaggaaggcatgatccatgtgttgcaataagagcagttcccattgcagaagctatgtgtgctctttgtattcttgatcattatctaagaaatgttgctcaatgctctgatgtaa

SEQ ID NO: 287348 - DNA, 703 bp, Unknown
  Bacterial polypeptide expressing nucleotide sequence isolated from the Sargasso Sea
gggggtggaagaagttcggcaagggaaactgcatgcagggtagttgctggttcaattgccaaacaaattttaaaaaatatcaaaataacagcatttgtgaaatcagtaggttctgtttctttaaatggatcatacaagaattacaacttaaaagatgctgaaaataatatagtgagatgtcctgataaaagtgttgcaaaaaaaatggagaaattaattattgaaacaaggaagatgggggatacaattggtggcgttgtttcatgcgtaataacaggatcacccattggacttggtgaacctgtttttgataaacttcacgctgaacttggaaaagcaatgctttctattaatgctgttaaaggttttgaatttggtagtggttttaatggaactaaaatgtatggtagtgagcataacgaccaatttgatagcgcggggaaaactgtaacaaacttttctggtggaattcaagggggaattagtaatggtatggatatattctttaatgttgcttttaaacctgttgctaccattatgaaatcacaaaaaactatcaacaaagatggagatgagaaagagatgaaaggtaagggcaggcatgacccatgtgtagtaccaagagctgttcccattgtagagtcaatggctgcacttgtaattcttgataatttattattaaacaataaaaaagaaatttaat

SEQ ID NO: 287349 - DNA, 643 bp, Unknown
  Bacterial polypeptide expressing nucleotide sequence isolated from the Sargasso Sea
aaaattaggtaaaaaattcaaagttattggtgctgtaactcaattaggtatattaggttgcgatactaacaaatggaatgacaaaataatttcaaaaaatccatttttctgtcctgacaaatctgtgattaagctttgggaaaaatatttgttaggggtaagaaaatccggatcatcatgtggtgcagtgattgaaataagagcgagaggaattccggtggggttgggtgcgcctatttactcgaaactagactctgatatagcatctagtttcatgagtattaatgcagttaaaggagttaatattggagcaggaatgaactccgcacaactaagtggtgaacaaaactcagatgaaatttcattaaaaggtaaaaaattaaagtttaattcaaataatgctggtggaatattaggtggtatttcaactggacaagaaattattgcttcatttgcagtaaaaccaacttcttcaatcttaacaacaagaaaaactgtcgataaatttggaaaaaatacaacaatatctgttaccggaagacatgatccatgtgttgggataagagctgtgcctgttggtgaggcgatgatgaattgtgttttattagatcactatctaatgaacaaggctcagtgtcagtag

SEQ ID NO: 287350 - DNA, 483 bp, Unknown
  Bacterial polypeptide expressing nucleotide sequence isolated from the Sargasso Sea
gaaaaaaaggttcatctcttggtgcagtaattgaagttagagtctcaaattgtcctgtaggtataggagagccaatatatcaaaaacttgactctgagttatcaaaagcaattatgagtattaatgctgtaaaaggtatagagtttggtacaggttttgatttagtaaattttgacggtactaatggatctgatcaaattaatttcaaaaataagaaaattaattttaatactaatcatgcgggtggaatattaggtggtatttcttcaggacaagatattatttttaaatatattgtaaaaccaaccagttcagtattaagtgaaaaaaatactattacaaagaattttaaaaatacaaaaataaaaactaaaggacgtcatgatccttgtgtgggtattagggcagtgccagtgggaattgctatgactaattttgtaattgcagatttattattaattcataaatccaaattactttaaa

SEQ ID NO: 287351 - DNA, 820 bp, Unknown
  Bacterial polypeptide expressing nucleotide sequence isolated from the Sargasso Sea
atgtcatttaatacttttggaaagttttttcgtttcactacatggggagaatctcatggaccagctattggctgcataattgatggttgccccccgttaattcaactaaaagagcaagatattcaaaaagaattagacaaaagaaaaccaggccaatcaaaatttacaactcaaagaaaagagagtgataaagttcaaattttatctggaatcttcgaaggtaagacgactggtacaccgatatccttaataatttataacgaagatatgagatcaaaagattataaaaatattaaagataaatttagacctgggcatgctgattttacttatttcaaaaaatatggaattagagattatagaggtggaggacgatcttctgcaagagaaacagctgcaagagttgctgcaggtgctatcgcaaaaaaagttttagaaaaaaaattaggtaaaaaatttaagatttctgctgcagttactcagcttggtattcttggatgtgatactacaaaatggaatgataaaataatttacaaaaatccttttttttgtccagataaatcaatgttaaaaatttgggaaaaatatttattaaatattcgtaaagcgggatcttcctgcggcgcggtaattgaagttagggccaatgggattcccgcaggtttaggtgcacctatttattcaaagttggactctgatattgcatctgcaatgatgagtataaatgcagttaaaggagtgaatattggatcgggcatgaattctgcgcagttatctggtgaagagaattccgatgaaatttcacaaaataataaaaaga

SEQ ID NO: 287352 - DNA, 760 bp, Unknown
  Bacterial polypeptide expressing nucleotide sequence isolated from the Sargasso Sea
aatgtcatttaatacttttggaaagttatttcgttttactacatggggtgagtcccatggacctgcaattggctgtataattgatggctgtcctccattaattcacctaaaagaccaagatattcagagggaactggataagaggaaaccgggtcagtctaagttcactactcaaagaaaagaaaatgataaagttcacattttatctggtgtcttcgaaggtaaaaccacaggaacccccatttctctaataatttataatgaggatgtaagatcaaaggattataaaaatatcaaagataaatttcgaccaggacatgctgattttacttattataaaaaatatggaattagagattataaaggaggtggaaggtcctctgctagagagacggcagcaagagttgctgctggagcaattgctaaaaaagttttagaaaaaaaattgggtaaaaaatttcaaatttctggtgcagtaacacaacttggtattcttggttgtgatacaacaaaatggagtaacaaaattataaataaaaacccatttttttgcccagataaatcaatgttaaggatatgggaaaaatatttactaagtataagaaaagctggatcttcttgtggtgcaataattgaagtaagagctaatggtatcccagcaggtttaggtgcacctatttattccaaattagactctgatatcgcctcagctatgatgagcataaatgctgtcaaaggggtcaatattgggtcaggcatg

SEQ ID NO: 287353 - DNA, 583 bp, Unknown
  Bacterial polypeptide expressing nucleotide sequence isolated from the Sargasso Sea
ctctcaacaaatagattctaatattgttagatgtcctgatgaacagatatcagcagaaatgatagagagaattaagcaattaaagagtcaaggagattcttgtggcggtgttattgaatgtttagttagaaatgccccttctggtcttggaatgcctgtttttgataaattagaagctgatttagcgaaggctttaatgtctttgcctgccacgaaaggatttgaaataggttcagggttctctggaacttatttaaaaggaagcgaacataatgatgccttcattaaatctgatgatattaggaagttaagaacaatatccaataattcaggcggcatacagggaggaataagtaatggcgaaaatattgagatgaagatagcttttaaacctacagcaactatcggtaaagaacagaaaacagtaaatgctgaaggaaaagaagttttgatgaaagcaaaagggagacatgatccatgcgttctaccaagagcagttcctatggttgatgctatggttgctttagtacttgctgatcatttactactgaatcaagctcaatgtggcttaatgactaattag

SEQ ID NO: 287354 - DNA, 847 bp, Unknown
  Bacterial polypeptide expressing nucleotide sequence isolated from the Sargasso Sea
gcgatttcatcatggtcgaaatcaggacgcccgaccacgagcctatgaacatctgaaagacctctatcggccaagccacgctgattatacctacgaagccaaatatggattccgtaattggatgggcggaggaagagccagtgcccgtgaaaccatcggcagggttgctgccggagccctcgccaagaaactgctgaaacaatggaatacaacccaaaccctcgcatgggttgaacagatccatgacctcaaagcaaatgtcgatcactcacagatcacggaacaacaaattgagcaaagcatcgtgcgctgtcctgatactgcagcctcaaatgccatggaacaaagaattcttgaggttcgcaaaaaaggggacagtgtgggcgggatcattcgtgcggtcagcaaaaatgttcccgtcgggctgggtgagcccgtctttgacaaactgactgctgacttagcaaaagcgctgatgtccctgccagctacaagaggagttgagttcggtcttggctttcaatcggtttccctgatgggatcagagcacaatgacgaatatgtgattgaagatggtaatgttaagacccgttccaaccgttcggctggaatccagggagggatctccaatggagaagagatcgaccttcggattgccttcaaacccaccgcgaccatcaaccatgaacagaaaacggtcacccgagacggagaatcgactaccctcagcgccaaaggccggcatgacccctgcgtgcttccaagggctgttcccatggtcgaagccatgatcaacctcgtactggctgaccattacctgcgccaacagtccagccagctccactga

SEQ ID NO: 287355 - DNA, 928 bp, Unknown
  Bacterial polypeptide expressing nucleotide sequence isolated from the Sargasso Sea
atgggcagcagtttcggcagcctgttccgcatcagcaccttcggtgattcccacggaggcggcgttggcgtgatcgtcgatggctgcccgccaatgctgaacctcgacctcgaggccatccaggctgagctggaccggcgcaaacccggtcagagccggatcaccacacctcgtaaagaagacgaccgagtggaggtgctcagcggcctactcgacgggcagaccctgggcacgccgatcgcattggtggtgcgcaacaaagaccagcggccgggcgattacaaagagatgcaggtggcgttccgcccttcccacgccgatgcgacgtatcaagccaaatacggaattcaggcccgcagtggcggcggtcgcgcctccgcgcgcgagacgatcggccgcgtggccgccggagcggtggcgaaacaactgctgcatcagctgcatggcacagaggtgctcgcctgggtgaagcggatccacaccctcgaggccagcatcgatccagccgtaccaacgctggaaacggtggaagccaacatcgtgcgctgccctgatgccgccatggctgatgagatgatcgagcgcatcgaggagatcggccgcgatggcgattcctgtggtggcgtgatcgaatgcgttgtgcgtcgagcacccatcggcctgggcatgccggtgttcgacaagctggaagccgatctggccaaggcggtgatgtcgctgcctgccaccaagggatttgaaattggctcaggctttgcgggcacgctgatgcgaggcagtgagcacaacgatgccttcctgcccacagcggacggcgccttgcacacagccaccaacaattcaggtggcattcaggggggcatcagcaacggcgagcccatcgtgctgcgcgtggccttcaagccaacggccaccatccgcaagaaca

SEQ ID NO: 287356 - DNA, 811 bp, Unknown
  Bacterial polypeptide expressing nucleotide sequence isolated from the Sargasso Sea
aatggctggaaatacgattgggcaaatttttacactgactacctttggcgagagtcacggacctgcattaggcgctatagtggatggttgcccgccaggtatagaaatttctgtggaagatcttcaactagatttggatagacgtaggcctggccaatccaagtacaccactcaaagaagggagaaagaccagatacaaatactttcaggggtctttgaaggaaagacaacgggtacttcaatagggcttttgattcaaaatgaggatcaaaaaagtaaggactacgaggatataaaaaatatttttcgtcctgctcacgcggattttacttatcagaaaaagtatgggttgagagattatcgcggaggcggtaggtcatcagctcgagagacatcaatgagggttgcagccggagctattgctaagaaatttctttcgaagcatgccggaatatctgtttatggatatctttctgctattggagaactaaagcttgcttgtaaggaccgcgaatttattaatgaaaatccatttttttcgggcgatccagatagcaccgatcaaattgttagtttgattgactcgatcagaaagcagggcgattcaattggcgcccaggttagtgttgtagctgaaggtgtacccgctgggttgggtgaacctgttttcgacaaattggacgctgacttggctggtgcgctaatgggtatcaatgcggtcaaagcggtcgagattggtgatggagtttctgttgtagagcaaaagggcagtgagcatagggatgagatgactaaggctggttttttgtca

SEQ ID NO: 287357 - DNA, 573 bp, Unknown
  Bacterial polypeptide expressing nucleotide sequence isolated from the Sargasso Sea
aatgtcaggaaattcgtttggaaaatcttttgttgtgaccacttttggtgagagtcacggggttgcgcttggctgtatagtagatggttgccctccaggacttgagctgactgccgaagatatacaaatggatttaaataaaagaaaacctggaagttccaaatacacaactcaaagaaaagaggatgacattgttgaaattctttctggtgtctttgaaggaaagacaacaggaacacctataggcctattaattaggaataaagatcagaaatcgaaggattacgatgatctcaaggatgtcttcaggccttctcatgccgattatacttacactaagaaatatggttttagagaccatagagggggtggaagatcttctgctagggaaaccactatgagagtagcagctggctcaatcgctaaaaaatatttaaaaacagtagctgggataaatattaaaggttatttgtctcagattggaaaaatgaaagttaagcagatagacttatctgaagttgataacaatccttttttctgcccagatcctctgcttattaaagagatagaaaa

SEQ ID NO: 287358 - DNA, 532 bp, Unknown
  Bacterial polypeptide expressing nucleotide sequence isolated from the Sargasso Sea
aatgtcatttaatacttttggaaagttttttcgtttcactacatggggagagtctcatggacctgccattggctgcataattgatggttgccccccattaattcaactaaaagagcaagatattcagaaggaattgaacaaaagaaaaccaggtcaatcaaaatttacaactcaaagaaaagagagtgataaagttcaaattttatctggagtcttcgaaggtaagacaactggtacaccaatatctttaattatttataacgaggatatgaaatcaaaagattataaaaatattaaagataaatttagacccggtcatgctgattttacttattttaaaaaatatggaattagagattatagaggtggaggaagatcctctgcaagagaaactgctgcgagagttgcagcaggtgctgttgccaaaaaagttttagaaaaaaaattaggtaaaaaatttaagatttccgctgcagttacccagcttggtattcttgggtgtgacacatcaaaatgggatgataaaataatt

SEQ ID NO: 287359 - DNA, 345 bp, Unknown
  Bacterial polypeptide expressing nucleotide sequence isolated from the Sargasso Sea
tatggctagtaataccttcggtaatattcttcagtttagcacttggggtgaaagccatggagttgccatcggaggggttgtcgatggtgttccgcccttaataccgcttgttgaggaagatattcaatattacttggacaaacggaaaccagggcagtctcgtttcaccacccaacggaaggaaccagataaaatcaaaattttatctggtgtatttgaaaataaaaccacaggcacaccgataagcttactcatccaaaacgaagatcagcgatcaaaagattatggtgaaataaaggatcagtttcgtcctgggcacgcagatttcacctatcaaaaaaaata

SEQ ID NO: 287360 - DNA, 645 bp, Unknown
  Bacterial polypeptide expressing nucleotide sequence isolated from the Sargasso Sea
agtcttgtagtaataaattaaaagtgacaagtgcagtcatacaaataggaaatgaaaaaattaatgataaagcctggaataatagctttataaataaaaatccgtttttctcacctaataagactatagtaaaaaaatgggaagaattaattttatttcatcgcaaaaatggttcttcgataggtgccataatagaagtaagggtttccaattgtcccgtgggcattggggaaccaatttatcaaaaacttgactcagaaatatcaaaggcaattatgagtattaatgcagtaaaaggaattgaatttggtagtggatttaatcttgtaaatttagatggaacaaatgcttctgatcaaatggatcttgataaaaaaaatataagctttgatactaatcatgcaggtggtgttttaggtggaatatcatctggtcaagatattgtatttagatatatagtaaaacctacgagttcagttctaacagtaaaaaaaactataactaagaatttaaaaaagacaaaaattagaactattggtcgtcatgacccttgtgttggtataagagcagtacctgttggtatagcaatgacaaattttgtattggcagatctatatttaataaataaatctaaatcactttaaa

SEQ ID NO: 287361 - DNA, 550 bp, Unknown
  Bacterial polypeptide expressing nucleotide sequence isolated from the Sargasso Sea
actaccattggaggaatttttcaggttgtagctttttattcgccggtgggtttaggtaatttttcacagtgggacagaaaacttgatggcaaaattgcacaagcaatgatgagcattaatgctgtgaaaggggtggaaatcggaaacggttttgaaaacacaagaaaacctggctctgaagttcaagatgtaatagttcctgacacaaaagatagaagaaattttaaacacatcaccaatcatgcagggggtttagaaggtggtgtaactaacggagagccaattgttgtaaatgtagcaataaaaccaattgcaacacttgcaaaacctttgccatctgttgacataaatactggtgaaataattgaggcacagtacaatcgtagtgacgtttgccaagttccacctgcttgtgtgattggagaagcaatgatgtcattaatattaactgaatcaatcattgagaaatttggtggtgaccatattgatgaattagttatgaatttttcaaattatattaaatctcataatgaatttggaaaaaaataaa

SEQ ID NO: 287362 - DNA, 576 bp, Unknown
  Bacterial polypeptide expressing nucleotide sequence isolated from the Sargasso Sea
tatgtcgggaaacagtattggacaggtatttaaactaactacttttggagagtctcatggaccatttattggtggagtaattgacggatgtccttcagggttgaaagtagattttgatgctattcagcacgatctagatagaagaaaaccaggtcaaagtaaagttactacagcaagaaaagaagctgattttgttgaatttgtgtctggaatttacgatggacatactactggaacacctatcggtttcttaattaagaataaagatgcaaagagtaaagattatggtgatttagaaaatgtctttagaccttcacatgcagattatacctatcatcaaaaatacggtaatagagaccatagaggtggaggtaggtcatcagcaagagaaaccgccaatagggttgttgctggagccatagccaagcaggttcttgctaattataaaattgaagttctcgcctttgtatgtgctgttggtgatatagcttgtaatattgataaggagttgtctaatgaaagcctaagagctgctgttgaatccaacattgtaaggtgccctgatcaggaaactgc

SEQ ID NO: 287363 - DNA, 616 bp, Unknown
  Bacterial polypeptide expressing nucleotide sequence isolated from the Sargasso Sea
tattggagctgtaacccagcttggattaatgtcatgtgacaaagataactggaagaattctgaaataagaaaaaatccatttttttgcccagataaaaaatctgttaagtcatgggaaagatatttattagcagttagaaaatctggatcttcgtgtggagctatcatagagttaagggcgtcaggagttcccgttggtctaggagcgcccatttattcaaaactagatagtgatattacagctgcattgatgagcataaatgcggtaaaaggagtaaatataggatcaggaatgaattctgcatttttgagtggagaagaaaatgatgaaataagaattagatctggaaaagtaaaatttaaaactaataatgctggaggtattcttggaggaatatcctcaggtcaaaatattgttgcttcatttgctgttaaaccaacttcttcaattctaacaagcagggagacggttgataaaaaaggaaaaaatacaaaaatatctgttagaggtcgtcatgatccctgcgttggtatcagggcggttccaataggtgaagcaatgcttttgtgtgttcttttagatcattatttaatgaatagagcgcagtgcggttaa

SEQ ID NO: 287364 - DNA, 595 bp, Unknown
  Bacterial polypeptide expressing nucleotide sequence isolated from the Sargasso Sea
atgtcatttaatacttttggaaagatatttcgttttacaacatggggtgaatctcatggacctgctattggttgtgtagtggatggctgccctcctaatattccattatctgaaagagatatacaaaaagatatgaatagaaggcgtcctggaaaatcaaagtttacatcccaaagaaaagaatctgacaaagtagaaattttatccggtgtttttcaggggaaaactactggaactcccatttctatgattatttacaatcaagatgccaaatcaagagattacgaaagtataaaaaacaaatttagacctggtcatgcggattatacttatttgaaaaaatatggaataagagattttcgtggcggaggaaggcaatcagctcgagaaacagcttcacgtgttgctgccggtgctattgcaaaaactgttttaaataaacttataggtaaaaaatttaaaattgtaggaggtgtagttcaattaggacttcttgggtgtaacaaaaataattggaatgaaagagaaataagaaataatccatttttttgtcctgacaagaaagcagttaagcttgggaaaaatatcttctgca

SEQ ID NO: 287365 - DNA, 427 bp, Unknown
  Bacterial polypeptide expressing nucleotide sequence isolated from the Sargasso Sea
tggtttgggggctcctatatattctaaattagatatggatattgcttctgcaatgatgagtattaatgcagttaaaggagtaaatattggagctggaatgaattcagcccaattaatgggtgaacaaaattctgatgaaatatcaaataaaggaaaaaaaataaaattttcctcaaataatgcaggtggtattcttggtggaatatctactggacaagaaattgtagtttcttttgctgtcaaaccaacttcatcaattttattaagtagaaaaacaatagacaggtttggaaaaaacacctctatatcagtaaaaggtcgccatgatccttgtgttgggattagagcagttccaattggtgaagctatgttaaattgtgttttgctagatcactaccttcttaataaagcacagtgtggaaattaa

SEQ ID NO: 287366 - DNA, 463 bp, Unknown
  Bacterial polypeptide expressing nucleotide sequence isolated from the Sargasso Sea
atgtcatttaatacttttggaaagctatttcgtttcacaacttggggagagtctcatgggcctgcaattggttgtattgttgatggttgccctccaaacataaatcttaaagagcaagatattcaaatagaattagataaaagaaaaccaggacaatctaaatttacaactcagcgaaaagaggatgacaaagttcaaatattgtcaggaatatttgagggtaaaactacaggaacacccatttctcttataatctacaataaagatatgagatccaaagattatagtaatattaaagataagttcagaccaggtcatgcagattttacttattttaaaaaatatggaattagagactatagaggtggtggcagatcttctgctagagaaactgcagcacgagttgcggccggtgcaatagcaaaagtagtacttcaaaaaaaactaggtaaaaaatttaaag

SEQ ID NO: 287367 - DNA, 199 bp, Unknown
  Bacterial polypeptide expressing nucleotide sequence isolated from the Sargasso Sea
attatttacaatcaagatcagagatcaaaagattatggtgatataaaaagtaaatttagaccaggtcatgcagattacacatattggaaaaaatatggcataagagattatagaggtggtggtagatctagtgctagagaaactgcaatgagagtagcggcaggggcaatagcaagaaaaatcataaataataaaatta

SEQ ID NO: 287368 - DNA, 322 bp, Unknown
  Bacterial polypeptide expressing nucleotide sequence isolated from the Sargasso Sea
aagcgaacataatgatgccttcatcaagtctgatgatatgagtaagttaagaacaacatcaaacaattcaggaggtatacagggcggaataagtaatggtgaaaatatcgagatgaagatagcttttaaacctactgcaaccatcgggaaagaacagaaaacagtaaatgctgaaggtaaagaagtacttatgaaagcaaaagggagacacgatccatgcgttctaccaagagcagttcccatggttgatgctatggtggctttagtacttgctgatcatttgcttctaaatcatgctcaatgtgacttaataaataagtag

SEQ ID NO: 287369 - DNA, 258 bp, Unknown
  Bacterial polypeptide expressing nucleotide sequence isolated from the Sargasso Sea
aatcaaacaatgctggtggaattttgggtggaatttcaacaggtcaagagataaaaatttcatttgctgttaaaccaacttcatcgattttatcatctagaaaaacgattgataagttcggcaaaaatacaacaatctctgttaaaggaagacatgacccatgtgtaggaattagagcagtcccaatcggagaggctatgatgcattgtgtgattcttgaccactatttaatgaacactgctcaaaataaaatttaat

SEQ ID NO: 287370 - DNA, 646 bp, Unknown
  Bacterial polypeptide expressing nucleotide sequence isolated from the Sargasso Sea
aaaaaaattaggtaaaaaatttaaaatttctggtgcagttacacaacttggaattcttggatgcgatacaaacaagtgggatgataagataatttataaaaatccgtttttttgtcctgataaatctatgcttaaaatatgggaaaaatatcttttaagtattagaaaggcaggttcatcttgtggtgctataattgaaattagagctaatggtatccctgcaggactgggggcaccaatttactcaaaactagactctgatattgcatctgcaatgatgagtattaatgctgtaaaaggtgttaatattggttctggaatgaattctgctcaattgtctggagaagaaaattcggatgaaatttcaaaatcaaaaaataaattaaagtttaactcaaataatgcaggtggaattcttggtggcatctcctctggtcaacaaatagttgtttcatttgctgtaaagcctacatcatcaattttaaatagcagaaagacaattactaaatttggaaaaaatactaacatatctgttaagggtagacatgatccgtgtgtaggaattagagcagttccagtaggtgaagctatgctatcatgtgttttacttgatcattatttattgaaccaagctcaatgtggataa

SEQ ID NO: 287371 - DNA, 734 bp, Unknown
  Bacterial polypeptide expressing nucleotide sequence isolated from the Sargasso Sea
tcctggccgtcccgctgcagggtggcctgatcccctgcggcgtgcgcggggccgccacacatgcgccggcctttgcccggctgggagatgctgcgtgagcttcaatagtttcggccgcctgttccgcttcaccacctggggcgagagccatggcccggcgctgggcgcggtggtcgacgggtgcccgccgggtatcgcgctgtcggaagaggacatccagccctggctcgacaagcgccgcccgggcaccagccgcttcaccacgcagcggcgcgagcccgaccaggtccgcatcctgtccggcgtgttcgaggggcggacgaccggcaccccgatcagcctgatgatcgagaatgtcgaccagcggtccaaggattacggcaatgtcgcgctcgcctatcgccccggccatgccgattatgcctatgacgcgaaatacggctttcgcgactatcgcggcggcggacgctcttcggcccgcgagacggcggcgcgggtggcggcgggcgcggtcgcgcgcgcggtgatcccgcaggtcaagattcgcgcctgggtcgagtcgatcggcggcgaccggatcgattacgaggcgttcgacgatgcgcagatcgacgccaacccgttcttctgccccgatgcggcggccgccgaacgctgggaagcgatcgtcgacggcgcgcgcaagtccgggtcctcggtcggcgcggtcgtcgcctgcgaggcgaccggcgtcc

SEQ ID NO: 287372 - DNA, 794 bp, Unknown
  Bacterial polypeptide expressing nucleotide sequence isolated from the Sargasso Sea
cacggtcctgccattgggctgcataattgatggttctccgccaaatataggtataaatgaaaaagaaatacaaattgaactaaataaaagaaagcctggtcaatcaaaattcactacccaacgaaaagaagatgataaagtagaaattttatctggagtatttcaaggaaaaacaaccgggactcctatttctttaattatttataacaaagatgcaaaatcaagagattatgaaacaataaaaaataagtttagacctggacatgctgattttacatatttaaaaaaatatggaattagagactatagaggtggaggaagacaatcggctagagaaactgcatctagagttgcagcaggagcaattgctaaaaaaattttacagaaaaaaattggcaaaaaatttaaagtaattggagctgttactcaattaggaatacttggatgtgacactaaaaaatgggaagataaagtaattacaaaaaatccttttttctgtccagacaagacaattataaaactatgggaaaaatatttgttaagtataagaaaatctggctcatcttgtggagcgataattgaattaagagcaagaggagtgccggttggcttaggagcacccatatactcaaaattagatatggatatagctgcagctatgatgagtattaatgcagtaaaaggggtaaatgttggatcaggaatgaattctgcattattaactggtgaacaaaattcagacgaaatttctcaaaaaggtaaaaaaataaaatttaattcaaacaatgctggtg

SEQ ID NO: 287373 - DNA, 688 bp, Unknown
  Bacterial polypeptide expressing nucleotide sequence isolated from the Sargasso Sea
gagtagccgcgggtgctctagcaaaaaaggttttcggaaaaaaaaatttggaaaaaaatataaagtcacaggaggagttacacagctgggaattcttggttgtaatttaaaaaattggaacgacaattttatttctaaaaatccttttttctgtcctgacaagtcaattgtaaaaatatgggaaaagtatttgttaagcataagaaaagcaggttcatcttgtggagcaataattgagataagagctaaaggagtccccttaggattgggagctccaatttactcaaaattagacatggatttagctgctgcaatgatgagcattaatgcagtaaaaggtgtaaatattggttcagggatgaactcggcccaactcactggtgaacaaaactctgatgagatttctcaaaagggaaaaaaaactagttttaaatcaaataatgcaggtggcattcttggagggatatcaaccggacaaaatatagttctttcatttgcagtaaaaccaacttcttcaattattaattcaagaaaaactattgacaagtttggaaataatacatctatatctgtgaaaggaagacacgacccttgtgttggaattagagcagttccaataggagaggcaatgatgcattgtgtaattttagaccattatttaatgcacaatgcgcaatgtaaaagttaa

SEQ ID NO: 287374 - DNA, 439 bp, Unknown
  Bacterial polypeptide expressing nucleotide sequence isolated from the Sargasso Sea
aatgtcagggaattctttcggaaactcttttattgtgaccacttttggtgaaagtcatggagtagcccttggttgtatcgttgatggctgtccacctggattagagctttgtgaagaagacattcagaaggaattagataagagaaaacctggatcttccaagtatacaacccaaagaaaagaagacgacgaagtagaaatattatctggtattttcgagggtaaaacgactggaacacctataggcttgcttataagaaataaggaccaaaaatctaaggactatgatcaacttaaagatgtttttaggccctcccacgcagattatgtttattcaaagaaatatggaataagagaccacagaggaggaggaagatcttcagctagagagactgctatgcgagtagcggcaggagcaatagctaaaaaatacttaagc

SEQ ID NO: 287375 - DNA, 643 bp, Unknown
  Bacterial polypeptide expressing nucleotide sequence isolated from the Sargasso Sea
aatgtcatttaatacttttggaaagatatttcgtttcactacttggggagagtctcatggacctgctattgggtgtgttgtagatggttgtccccctttaattcaactaaaagaacaagatattcaaaaagaattggataaaaggaaacctggtcaatcaaaatttacaacccaaagaaaagaagctgataaggtgcaaattgtatctggagtatttgaaggcaaaacaactggtactccaatatcactaataatttataatgaagatgcgagatcaaaggattataaagacattaaagataaatttagacctggtcatgcagactttacatattttaaaaaatatggaattagagattatagaggtggtggaagatcctcagcaagagaaactgcctcaagagttgctgcaggagctatagctaaaaaagtattagaaaataaattaggaaaaagatttaaaatttctggagctgtaacacaactaggtattcttggttgtgatacaacaaaatgggatgataaaataattaataaaaatccatttttttgcccagatagatcaatgttaaaaaatatgggaaaaatatttattaagtgtaagaaaagcaggatcttcttgtggagctattatttgaagtaa

SEQ ID NO: 287376 - DNA, 423 bp, Unknown
  Bacterial polypeptide expressing nucleotide sequence isolated from the Sargasso Sea
taggggcaccaatttattcaaaattagatatggatctcgcatctgcaatgatgagtattaatgcagtgaaaggagttaatattggctctggaatgaattctgctcaattaacaggtgaacaaaattcagatgaaatatttcaaaaaagaaaaaaaataagctttgaaagtaataacgcaggtggaattttaggtggaatatcatctggtcaagatataattgtttcctttgcagttaaaccaacatcctcaattctcacctcaagaaaaacaattgataaatttggcaaaaatacatccatatcagtgaaaggcagacacgatccctgtgttggaatcagggcagtacctataggtgaagcaatgatgtattgtgttttattagatcattatatgatgcactttgctcaatgcaaaagttaat

SEQ ID NO: 287377 - DNA, 724 bp, Unknown
  Bacterial polypeptide expressing nucleotide sequence isolated from the Sargasso Sea
aaaacaactggtactccaatctcaatgataatttataacaaagatatgagatcaagagattacgaaacaataaaaaataaatttagaccaggtcatgctgattatacatactttaaaaaatatggaataagagattatcgtggaggaggaagacagtcagcaagagaaactgccagtagagtagctgctggagcaatcgctaaaaaggttttagaaaataaattaggaaaaaaatataaagtaattggagctgttactcagcttggtattcttgggtgtgataaagagaattggaatgacaaattaataaataaaaacccattattttgtcctgataaatcaatattaaaactatggaaaaaatacttacttggtataagaaaatctggatcttcttgtggtgcgattattgaggttagagctagaggtataccggcgggattaggagcaccaatttattccaaactagatatggatttagcctctgcaatgatgagcataaatgctgtaaaaggtgtcaatataggatccggaatgaattcggcatttttaagtggagaagaaaattctgatgaaattgtacaaaaaggaaaaaatccagtattcaaatctaataatgcaggaggaattcttggaggaatttctagtggacaagaaattatagtatcttttgcagtaaaaccaacttcttccattattaagatcaagaaaaacaatagataaa

SEQ ID NO: 287378 - DNA, 586 bp, Unknown
  Bacterial polypeptide expressing nucleotide sequence isolated from the Sargasso Sea
atgacgagcaacactttcggaaatttatttacactaacaacatttggcgaatcgcatggagaatgtattggtggtataattgatggatgtcctgcaggaaaaaaaatagacataaaatccgttcaaactgatcttgacagaagaaaaccaggtcaatctaaaatagtcacacaaagaaaggaagatgatcaattagaaatattatccggaatatttgaaggaaaaaccactggcaccccaattgggttcattattaaaaacaaagaccataagtcaaaagactataaccatataaaagaatcttttagaccttcacatgctgattatgtttatgagaaaaaatatggaaatagagactacagaggaggaggtaggagttctgcaagagaaaccgcatgtagagtagttgctggttcaattgctaaacaaatattggataatgttaaaatcaatgcatacgtatcttcagttggaaatatttcggtcaacaaacctcactcagaacttgactttgataatacagaaaaaaataatgttagatgtccagatttagatgttgccaaagaaatggaagaattaatataaa

SEQ ID NO: 287379 - DNA, 772 bp, Unknown
  Bacterial polypeptide expressing nucleotide sequence isolated from the Sargasso Sea
aataagtttagaccagggcatgctgattatacatatcttttaaagtataaaactagagattatcgtggtggtggaagacagtcagctagagaaactgctgcacgtgtagctgctggtgctattgcaaaaattgttcttaataaattaataggcaaaaaatttaaagttattgggggagttacacagcttggtattcttggttgtaacaaaagtaactggaatgaaaaatttataagaaaaaatccatttttttgtcctgataaaaaatcagttaaactttgggaaaaatatcttctttcaattagaaaagcgggttcctcatgtggagcaataatcgagttgagagcctctggagtaccagcaggtttgggagctcctatttattcaaaacttgattcagatttagcgggagctctaatgagtattaatgctgttaaaggtgtgaatattggagctggcatgagttcagcttttttaagtggagaagaaaattctgacgaaattagaaatattaaaggtaaaacaaaatttaaatctaataatgctggaggaattttaggtggaatatcttctggacaagaaattattgcgtcctttgctgtaaaacctacttcatcaattttaagcaaaagaagcactattgataaaaaaggaaaaaatacaataatttctgtaaaaggaagacatgatccgtgcgtaggaattagagctgtgcctatcggtgaagctatgatgtcttgtgtaatattagatcattttttattaaatcgag

SEQ ID NO: 287380 - DNA, 716 bp, Unknown
  Bacterial polypeptide expressing nucleotide sequence isolated from the Sargasso Sea
tatgtcttttaatacttttggaaaaatatttaggtttaccacgtggggtgagtcacatggtcccgctattggctgtattgtcgatggttgcccaccaaatattggcttatctgagaaagatattcaaaaagatatggaccgaaggcgccctggaaattccaagtttgtatctcagagaaaagagtctgataaagttgaaattttatcaggagtatttcagggtaaaacaactggaaccccaatttcattgataattcataatgaagataaaagatcaagagattatgagtctataaaagataaattcagaccaggacatgctgatttcacgtactttaaaaaatatgggattagagactttagaggaggtggtaggcaatctgcaagggagaccgcgtcaagagttgccgctggttctatagcaaaaatagttctgaaaaaaataattggaaaaaaatttaatatagttggtggtgttatacagttaggtttgatgggttgtgataggaataattggaataataaagaaataaataaaaatccatttttctgtcctgataaaaaatctgtgaaattatgggaaaagtatttaatggctgttagaaaatccggttcgtcttgtggtgcaattatcgaattaagagctaatggtgtgcctgcaggattaggagctcctatatattctaaattagataccgatatcgctgctgcactga

SEQ ID NO: 287381 - DNA, 745 bp, Unknown
  Bacterial polypeptide expressing nucleotide sequence isolated from the Sargasso Sea
atgagtagtagttttggaaaaatttttcgtgttagtacttttggagaatctcatggtggtgcagtaggagttatccttgatggatgtccaccaaagttaaaactagatactaagttgatacaaaatgaattggataggcgcaggcctggacaaagtgatattacaactccccgaaatgaagaagacaaaattgaaatactcagtggactaaaggaaggatttacacttggtacaccaatcgcgatgattgttagaaacaaagatcaaagaccaagagattacaataatttggagcaaatatttagaccatcacatgcggatggtacttatcatcttaaatatggaattcaggctgggtctggtggaggaagagcctctgcaagagaaacaataggtagagtggcagccggtgcagtagcaaaacaattattaaaaaatttttgtaacactgaaatactatcttgggtaaagcgtatacatgatattgattctgacataaataaagaaaagatttctttcactaaaatagattctaatattgttagatgtcctgatgagaaggtatcagctgaaatgatcaagagaatcaaggaattaaagcttcaaggagactcttgtggaggggttattgaatgtttggttagaaatgttccttctggtctaggaatgcctgtctttgataaattagaagctgatttggcaaaggctttgatgtctttacctgctaccaaagggttgaaatagg

SEQ ID NO: 287382 - DNA, 706 bp, Unknown
  Bacterial polypeptide expressing nucleotide sequence isolated from the Sargasso Sea
tatgtcttttaatacttttggtaaaatatttagatttacaacatggggtgagtcacatggccctgcaataggctgtgtaattgatggttgtcctcccaatatacctatatctgaaagagatattcaaaaagatatggatagaagaagacctgggcagtctaaatttaccactcaaagaaaggagtctgataaagtaattatattgtctggtatttttcaagggaaaaccacaggaaccccaatatcaataattatttataatgaagataaacggtctagagactatgagtctataaaaaacaaatttagacctggtcatgctgattttacatattttaaaaaatatggaattagggattttagaggtggtggacgtcaatcagcaagagaaactgcttgcagagttgctgcaggtgcggttgcaaaaattgtattaaaaaaaataattggatcaaaatttaacattattggagctgtaactcagcttggattaatgtcttgtgataaagacaactggaaaaattctgaaataagaaaaaatccatttttttgtccagataaaaaatctgttaaatcatgggaagaatatttgctagcagttagaaaatctggatcatcatgtggagccattatagaattaagagcatcaggaatccctgttggcctaggagcgcctatctattcaaaattagatagtgacatctcc

SEQ ID NO: 287383 - DNA, 793 bp, Unknown
  Bacterial polypeptide expressing nucleotide sequence isolated from the Sargasso Sea
aataaaaaataaatttagacctggtcatgctgattatacatatttcaaaaaatatggaataagagattttagagggggtggaaggcaatctgcaagagagacagcttgtagggttgcagcaggtgctgtagcgaaagttgtattaaaaaaaatgattgggtcaaaatttaatgttgtgggtgcagttactcaattagggttaatgtcgtgtgataaaactaattggaaagatagtgaaataagaaaaaatccatttttttgccctgacaaaaagtctgttaaactttgggagaaatatcttttagctgtaagaaaagctggttcatcttgtggtgcaataattgaactaagagcaactggtgttccagttggcttaggagctccaatttactcaaaattagatacagatatagctgcggctttgatgagcatcaatgctgttaaaggggtcaatatcggagcgggtatgaatgcagcttttttaagtggagaagaaaattctgatgaaatgagtaaaagctcagggagcgtaaaattcaaatctaatcaggctggaggaattttgggtggaatttcttcaggacaaaatattatagcctcatttgctgtaaaacctacatcatcaatcttaacaagtagaagtacaatagataaaaaaggtaaaaacacaaaaatttctgtgaaaggaagacacgatccttgtgttggtataagagctgttccgattggtgaagcaatgatcaattgtgttctactagatcattatttaatgaacaaagctcagtgcggttag

SEQ ID NO: 287384 - DNA, 739 bp, Unknown
  Bacterial polypeptide expressing nucleotide sequence isolated from the Sargasso Sea
attggaaaaatatggaataagagattatagaggtggtggaaggtcgagtgcaagagaaacagcaatgcgagttgctgcaggagcagttgctagaaaagtaataagtaaaaaaataaaaaataaagtttttataactggtgctttggtacagataggaaattacaagattaattacaataattggaatgataattttattcttaaaaataatttttggagtcctgacaaaaaaattattaacatatgggaaaaagaaattagaaatgcaagaaagaatggttcatctttaggtgcaataattgaaattagagtaaaaggtttaccagctggattaggagaaccagtatatgacaaaatagactctgacatagcaaaagctttaatgtcaataaatgcggttaaaggtgttgaaataggaaatggcttcaatagtgtttacgaaagtggaatttctaacgtagatgaaatgagaattaaaaataaaaaaccaatatttctctcaaataataacggaggtgttcttggtggaattacaactggacaagagctaatatgtagatttgttgtaaagcctactagctcaattttatcaacaaaaaaaacaattaatacaaaattgaaagagacaactatttcaactaaaggtcgccatgatccatgtgttggtataagagcagttccagttggtgaggcaatgatagcaactacaattgccgatcattgtttaaggtttctctaa

SEQ ID NO: 287385 - DNA, 293 bp, Unknown
  Bacterial polypeptide expressing nucleotide sequence isolated from the Sargasso Sea
tgacgaaatgagatctgacaagggaaaagtaaaatttaaaagcaataatgcaggaggtatacttgggggtatttcttctggacaggagattgtagcctcttttgctgttaaaccgacatcttcaataatcaacagtagagagacaatagataaaaaaggtaagaatacaaaaatttctgttagaggtcgtcatgatccatgtgttggtattagagctgttcctataggtgaagcaatgctgtcctgtatattgctagatcatttcctgatgaatagagctcagtgcggttaag

SEQ ID NO: 287386 - DNA, 431 bp, Unknown
  Bacterial polypeptide expressing nucleotide sequence isolated from the Sargasso Sea
aatgtcatttaatacttttggaaagatatttcgttttacaacttggggtgaatctcatggacctgctatcgggtgcgtggtagacggctgccctccaaatataaaaataactgaaaaagacatacaaattgaactgaacaagagaaaaccagggcaatcaaaatttacaactcaaagaaaagaggatgatagagtaaatattttatcaggtgtttttgaagggaaaacaactggcactccaatctcaatgataatttacaataaagatatgaagtcaagagattacgaaacaataaaaaataaatttagacctggccatgctgactatacatattttaaaaaatatggaatcagagattttagaggtggtggaaggcaatctgcaagagagactgcttcaagagtagcagctggcgcaattgcaaaaaaag

SEQ ID NO: 287387 - DNA, 598 bp, Unknown
  Bacterial polypeptide expressing nucleotide sequence isolated from the Sargasso Sea
tatgtcttcaaatagtttagggaaaatttttaattttacaacatggggagaaagtcatggggaggctattggatgtgtagttgatggagttccttcaaaaatagccttatgtgaaaaagatattcaaaaataccttgataaaagaaggcctggtaaatcaaaattcactacgcaaagaaaagaaaaggataaagtagaaattttatcaggaatttttgatggttatacaacaggtcatccaatttctttaattattagaaacacagatcaaagatcgaaagattattcagatataaaaaatatttttagacctggtcatgcggattatacatattgggctaagtatggaataagagattatcgaggaggtggtcgttccagtgcaagagaaacagcaatgagagttgctgcaggtgcaattgctagaaaagtgatatcaagtaaaattaaaaataaaattgaaataattggggctttggttcaagtaggagatagtaaaatagattataataattggaataataattatattaaaaaaaatgattatttcagtcctgataaaaaaataattagtgaatgggaatctctaataaataaa

SEQ ID NO: 287388 - DNA, 450 bp, Unknown
  Bacterial polypeptide expressing nucleotide sequence isolated from the Sargasso Sea
catgtcatttaatacttttggaaagatatttcgtttcactacttggggtgaatctcatgggcctgctataggatgtgtggttgatggatgtcctccaaatataaaaataagtgaaaaagacatacaaattgaattaaataagagaaaacctggtcaatccaaatttacaactcaaagaaaagaggatgataaagtaaatattttatcaggcgtatttgaaggaaaaacaactggtactccgatctcaatgataatttataataaagatatgagatcaagagattatgaaacaataaaaaataaatttagaccaggacatgctgattatacatattttaaaaaatatggaataagagattatagaggtggcggaaggcaatctgccagagaaactgcttctagagttgcagctggtgcaattgcaaaaaaagtcttacaaaataaaattgg

SEQ ID NO: 287389 - DNA, 685 bp, Unknown
  Bacterial polypeptide expressing nucleotide sequence isolated from the Sargasso Sea
atgacatcaaattctataggaaaaaattttagctttactacatggggtgaaagtcatggtaaggctattggttgtgtaattgatggagtaccttcaaatataaaattgaccgaaaaagatattcagccttatttagataaaagaaaaccagggcaatcaaagtttacaactcaaagaaaagaaaaagatattgttgaaattttatcaggaacttttgaagaaaaaacgactggtcaccctatttctctaataatttataatcaagatcatagatctaaggattattctagtataaaaaataaatttagacctggtcatgcagattatacatattggaaaaaatatggaattagagattatagaggtggtggaagatcaagtgctagagaaactgcaatgagagtagcagctggagctgttgcaagaaaaataatacaaaaaaaattaagtaataaagtcaaaattttaggcgctgttgtacaaataggtagacataaaattaactacaaaaattggaatgaaaagtttatttctaaaaatagtttttggagtccagataaagatataatttctatatgggaaaaagatatccttaatgcaagaaagaatggatcatcattgggagcaataattgaaataagagttaggggtttacctgcaggtttaggagagcccaatatatgaa

SEQ ID NO: 287390 - DNA, 403 bp, Unknown
  Bacterial polypeptide expressing nucleotide sequence isolated from the Sargasso Sea
catgtcacataattcttttggaaatttattaaagtttacaacttggggagaaagtcatggagatgctataggttgtgtcgttgatggttttccagcaggaatacctattgacacaaaatatattcaaacaagactagatttaagaaaaccaggtcagtcaaaatttacaacacaaagaaaagagaaagatgaagttaatttactctctggagtttttaacggtaaaagcacgggcgctccgatatcaatgataatttacaactctgaccaaagaagcaaggactattcagaaataaaaaataaatttcgacctggtcatgccgattacacctattttatgaaatataaaaattatgattatagaggtggaggaagatctagtgctagggaaactgccgtgaga

SEQ ID NO: 287391 - DNA, 700 bp, Unknown
  Bacterial polypeptide expressing nucleotide sequence isolated from the Sargasso Sea
agaactgctagtagagtagctgctggcgctgttgcaagaaaggtagttggccatattttaaaaaaagatattttaattcaaggtgcagttactcaagttggcaagcttgctatcaatcaaagaaattttaattggaatgatgtaaagaaaaattcatttttctgtcctgataaaaaaatagttaaagtttgggaagagtacctagatgaaactagaaaaaaagggtcatcattgggtgcaaaattattaataaatgcaagaaatgttcctgccggacttggagaacccgtatatggtaaattagatgctgaccttgcaggtgcaatgatgagtattaacgctgttaaaggagttgaaattggagctggtaatgaggctgttgaattatcaggagatgagaactccgatgaaataagggctaataaaaataaaaaaattatcttttcttctaacaatgctggcggaatcttaggtggtatatcaagtggccaagatttaaatttatcaataacgatcaaaccaacatcatcgattttaaaggcaaaaaaaacaattaataataaatttcaaaatacatcgatttcaacaaaaggccgtcatgatccatgtgtaggtttgagagctgtcccaattgctgaggctatgatggcgtgtgttttagcagatcatatattgcgcaatagagcgcaatgcggctaaa

SEQ ID NO: 287392 - DNA, 436 bp, Unknown
  Bacterial polypeptide expressing nucleotide sequence isolated from the Sargasso Sea
tatgcctgtttttgataagttagaggctgatttagcaaaggcattaatgtctttgcctgccactaaagcttttgaggtgggctctggtttcggaggtacttatttgaaaggcagcgaacataatgatccttttttgccatcggattctgatcaattgaaaactgctactaacaattcagggggaattcaaggaggtataagcaatggtgaggatatagttctgagagttgggtttaaaccaactgcaactattaggaaaagtcaaaaaacaattgatgaggatggtaatgcaataactctccaggcaacaggtaggcatgatccttgtgttttaccaagggcagttccaatggttgaagcaatggtcgctattgttttggctgatcattttcttaggcacaaaggccaatgtaccgactattgctcaaataattaa

SEQ ID NO: 287393 - DNA, 424 bp, Unknown
  Bacterial polypeptide expressing nucleotide sequence isolated from the Sargasso Sea
tttcgagaagttagatgctaatttagcaaaagcaataatgactattaacgcagtaaagtcagtatcaattggcaatgcagatgatctattaagccttaaaggttcagaagcaagggatgaaataacagaatcaggttttacttcaaataattcaggaggaatattaggcggtatatctaacggagatgatataagcctaagctttatcataaagccaacatcaagtattaaaacaaaaggaaaaactgtaaacaaagaaggtaatgaggttgatatagaggttactggaagacatgatccatgtgtcggcatcagagctgtgccaattgccgaggctatggttagtttagttttagtggatcatctattaatcaataaagctcaatgtgctgatgttgaacaaaatcttccatttagtgagtaa

SEQ ID NO: 287394 - DNA, 782 bp, Unknown
  Bacterial polypeptide expressing nucleotide sequence isolated from the Sargasso Sea
ttacaataaagatcaaaaatctaaagattactcgaatataaaagatgtttttagaccaaatcatgcagacattacttatcaagcaaaatatggtcatagagattacagaggtggcggaagagcaagtgctagagaaactgcaaactgggtagcagctggagcaattgctaaaaagattcttaaaaacgaaggtgtttcagtaaatggttttgtatcagaaataggaaaagtgaaggctgattcaattaatcataaaaatataaataataaatacttttttagtgatgaatcaaaattgtctgaactagattcaatgttcaaagacttaattgatgagggtaattctgtaggtgcaaaattaggagttattgttgagaactgtccagttggattgggagatccagttttcgagaagttagatgctaatttagcaaaagcaataatgactattaacgcagtaaagtcagtatcaattggcaatgcagatgatctattaagccttaaaggttcagatgcaagggatgaaataacagcatcaggttttacttcaaataattcaggaggaatattaggcggcatatctaacggagatgatataagcctaagctttatcataaagccaacatcaagtattaaaacaaaaggaaaaactgtaaataaagaaggtaatgaggttgatatagaggttactggaagacatgatccatgtgtcggcatcagagctgtgccaattgccgaggctatggttagtttagttttagtggattatttattaatcaata

SEQ ID NO: 287395 - DNA, 779 bp, Unknown
  Bacterial polypeptide expressing nucleotide sequence isolated from the Sargasso Sea
ggccgcccacaggcctatgaacatctgaaagacctctatcggccgagccacgcggattacacctatgaagccaaatatggattccgtaattggatgggtggaggaagagccagtgcccgtgaaaccatcggcagggttgctgctggagccctcgctaagaaactgctgaaacaatgcaatggaaccgaaaccctcgcatgggttgaacagatccatgacctcaaagcaaatgtcgatcactcacaggtcacggaacaacaaatcgagcaaagcatcgtgcgctgtcctgatactgcagcttcaaatgccatggaacaacggattcttgaggttcgcaaaaaaggggacagtgtcggcgggatcattcgagcagtcagcaaaaatgttcccgtaggactgggagagcccgtttttgacaaactgactgctgacttagcaaaagcgctgatgtccctgcctgctacaaggggagttgagttcggtctaggttttcaatcggtttccctgatgggttcagagcacaatgacgagtatgtgatcgaagatggaaatgtaaagactcgttccaaccgttcagccggaatccagggagggatctccaatggagaagagatcgaccttcggattgccttcaaacccaccgcaaccatcaaccatgaacagaaaacggtcacccgagacggagaatcgaccaccctcagcgccaaaggccggcatgacccctgcgtgcttcctagggctgttcccatggtcgaagccatgatcaatctcgtttttgg

SEQ ID NO: 287396 - DNA, 847 bp, Unknown
  Bacterial polypeptide expressing nucleotide sequence isolated from the Sargasso Sea
atgtcatttaatacatttggaaagttatttcgtttcactacttggggtgaatctcatggaccggctattggatgtgtagttgatggatgtcctccgagaataaaaatatctgaaaaagacatacaaaaagaactaaataagagaaaacctggtcaatcaaaatttactactcaaagaaaagaagatgacaaagttgaaattttgtcgggagtatttaatggtgagacaactggtacaccaatattaatgattatttacaataaggatatgaaatcaagagactatgagactatcaaaaataaatttcgtcctgggcacgctgatctaacttattttaaaaaatacggcataagagacttcaggggaggtggtaggcaatcagcgagagagactgcagctagagtagctgcgggtgcaattgcaaaaaaagttttagaaaaaaaaattgggaaaaaatattacgttaaaggtgccgttacccaacttggaattttaggttgtgatgtatctgcatggaacaacaaatttatagaaaaaaatccatttttctgtcctgacaaaaaagttttaaaattgtgggaaaaatatttgttggcaatcagaaagtctggttcatcttgtggtgcagtcatagaattaagagctaacggggtgccatctggcctaggtgcacctatttactcaaaattagatatggatttagcatcagctatgatgagtattaatgctgtaaaaggtgtcaacatcggaactggaatggatgttgcgcaattaactggtgaacagaattctgatgagataagacaaaaagggaataaaacagttttcaaatctaacaatgcgggtg

SEQ ID NO: 287397 - DNA, 505 bp, Unknown
  Bacterial polypeptide expressing nucleotide sequence isolated from the Sargasso Sea
aatgtcatttaatacttttggaaagatatttcgtttcactacatggggagaatctcatggaccggctataggatgtattatagatggttgtccaccaaatatagagattaaatctgaggatattcaaaaagaattaaataaaagaagaccaggtcaaagtaaatttgttactcaaagaaaagaaaaagatttagtgcatataatgtctggtgtatttgagggtaaaacaacaggtacaccaatatcattaattatttataataaagatcaaaaatctagagactacgaaacaataaaatctaaatttagaccagggcatgctgattacacttactttatgaaatatggaataagagactataaaggtggtggtagacaatcagcaagagaaactgctgcaagagttgcagcaggagcagttgcaaaaaaagttttagaaaaaaaaattggaaaaaaatacaatgttattggagcagttactcaagttggaattttaggaagtaat

SEQ ID NO: 287398 - DNA, 589 bp, Unknown
  Bacterial polypeptide expressing nucleotide sequence isolated from the Sargasso Sea
ccccaggctgtgacgctggacgccatcgagagcaacatcgttcgctgcccggacgcccccacagccgctcagatggtggaacggatcgaggcgatggggcgcgacggcgactcctgtggcggcgtgatcgaatgcgtggtgcgcaacccagcaccggggctgggcatgcccgtattcgacaagctggaggccgatctggccaaggcggtgatgtccctccccgccaccaagggctttgagatcggttctggcttcagcggaaccctgctcaagggcagcgagcacaacgatgcctttgtgcccaccgatgacggaaggctgcagacggctaccaacaactcaggtggcatccagggcggcatcagcaacggcgagccgattgtgatccgggtggcgttcaagcccaccgccacgatccgcaaggaacagcagaccattgattccgacggcaaggccaccaacctggccggcaagggtcgacacgacccctgtgtgctgccgagggccgtgccgatggtggaggcgatggtggcgctggtgctggcggatcacctgctgcggcagcagggtcagtgcagcctctggtgag

SEQ ID NO: 287399 - DNA, 634 bp, Unknown
  Bacterial polypeptide expressing nucleotide sequence isolated from the Sargasso Sea
aaaaaatttaaaatcactggagctgtaacccaacttggaatattaggatgtgatactaataaatgggatgataaaataatttctaaaaatccatttttttgcccagataaatcaatgttaaaaatttgggaaaaatacttattaagtattagaaaagctggatcgtcatgtggggcgataattgaagtaagagcgaacggtattcctactggattaggagcgcctatatactcaaaattagactctgacatagcatcagctatgatgagtataaatgctgttaaaggagttaacattggctcaggtatgaactcagcacaattgtcaggtgaggaaaattcagatgaaatttctcaaaatagaaaaaaaacaaaatttaaatctaataacgctggagggattctaggaggcatttcttcaggtcaagagataattgtctcttttgctgtaaagccaacttcttcaattttaaaaagtagaaaaacaatcaataaatttggaaagaatacaagtatatcagtaaaaggtagacatgatccatgtgtgggtataagagctgtacctgtgggtgaggcaatgttatcttgtgttttattggatcattatcttcttcacaaagctcagtgtagttaat

SEQ ID NO: 287400 - DNA, 250 bp, Unknown
  Bacterial polypeptide expressing nucleotide sequence isolated from the Sargasso Sea
tggaggaatattagggggaatctcttctggccagcctatagtagctaaatttattgttaaaccaacgagttctattttaacagaaaagaattctataaacttacaaaatgaacctattaaaattaaaacaaaaggtaggcatgatccctgcgttggaattagagctgttcccgtagctgaagctatgatggctataactattttggatcaattgttagagcatgaaagtcaaattgggaaaattgaataa

SEQ ID NO: 287401 - DNA, 811 bp, Unknown
  Bacterial polypeptide expressing nucleotide sequence isolated from the Sargasso Sea
ggcacgccgatcagcctgatgatcgagaataaagaccagcgatcgaaggattattcggaggttgccaaggcctatcgccccggccatgccgactatgcctatgacgccaaatatggctttcgcgactatcgcggcggcgggcggtcctcggcgcgcgaaaccgctagccgggttgcggccggcgcggtcgcgcggctggtcatcccggaagtcgatatcttcgcctatgtgagcgagataggcggcgacgccatcgactatggcaatttcgacgcggcgcagatcagccagaatcctttcttctgccctgactccgaagctgcggtgcgctgggaagcgcttgtcgatggcgcgcgcaaggacggttcctcgctcggcgcagtggtcgaatgcgtggccagtggcgtgccggccggctggggcgcgccgctctatgccaagctcgacagcgaactggcgagcgcgatgatgagcatcaatgcggtcaagggcgtggaaattggcgacggcttcgccgccgcccggctgcgcggcgagcagaatgccgatccgatgcggcccggacaggacggcccggtcttcctggccaatcatgccggtggcatcgctggcggcatttcgaccggtcagccggtcaaggtgcggatcgccttcaagccgaccagttcgatcctcattccggtcgagacggtgacgcgcgaaggcgaagcgtccgacatcatcaccaagggccgtcatgacccgtgcgtcggcattcgcggcgtgccggtggtcgaagcgatgatggcgctggtgctggccgaccagaagc

SEQ ID NO: 287402 - DNA, 340 bp, Unknown
  Bacterial polypeptide expressing nucleotide sequence isolated from the Sargasso Sea
atgggagactctttcggacatttatttcgtattaccacatggggtgaatcacatggtggaggcgttggcgtcgtcattgatggttgcccggcaggactatccctgaccgaggaagaaatccagatagaactggaccggagaaagccgggacaaagccgaatcaccacccaaagaaaggaaagtgatactgcccgaatcctgtccggcctttttgaaaatacgactctgggaacggccatctcgattatggtgaaaaaccaggatgcccgttccaatgcatatgatgatatgaaagatttatttcgccccagtcatgccgactacacttatgaacaaaagt

SEQ ID NO: 287403 - DNA, 928 bp, Unknown
  Bacterial polypeptide expressing nucleotide sequence isolated from the Sargasso Sea
atcaaaatttactactcaaaggaaagagtctgataaaattacaattctctcaggggtatttgagggaaaaactacgggaacaccaatttcaattataatatataatgaggataaaagatctagagactatgagactataaaaaataaatttagaccaggtcatgctgattatacttattttaaaaaatatggaataagagattacagaggcggaggtagacaatcagcaagagaaactgcttgtagagtagccgcgggagcagtagcaaaaataattttaaaaaatattttggggaaaaaatttaatgtaattggggctgtgacacaattaggtctgatgtcgtgtgataaacaaaattggaaagatgcagaaatcaggaaaaattcttttttttgccctgataaaaaatcagtaaagctttgggaaaaatatttattagctgttagaaaagctggatcctcatgtggggcagtaattgaaattagagcttcaggagttcctgttggattgggggcgccaatatattcaaaattagatacggacattgcagctgctttaatgagtattaatgctgttaaaggagttaacataggatctggaatgaatgcagcttttttaagtggtgaagaaaattcagatgaaattattagaagctcaggcaaagttaaatttgagtctaatcatgcaggaggtattttaggaggtatctcctctggtcaaaaaattattgcaacttttggagtcaaaccaacttcttcaatattaacaactagaagaactatagacaagaaaggtaaaaatacaaaaatttctgtaaaaggaagacacgatccgtgtgtaggtataagagcagttcctataggtgaaagcatgatgagttgtgtgatccttgaccacttgttaattcatagagctcagtgtggttaa

SEQ ID NO: 287404 - DNA, 283 bp, Unknown
  Bacterial polypeptide expressing nucleotide sequence isolated from the Sargasso Sea
ttcacaaaataataaaaagatgaaatttagttcaaataatgcaggtggaatacttggaggtatctcttctggacaagaaatagttgtttcttttgctgtaaagcctacatcttcaattttaaaaagcagaaaaacaataaataaatttggaaaaaatactacaatatctgtatctggtagacatgatccatgtgttggtattagagcagttccagttggcgaagctatgctttcatgtgttttgttagatcattacttaatgaataaagcacagtgtggttaa

SEQ ID NO: 287405 - DNA, 389 bp, Unknown
  Bacterial polypeptide expressing nucleotide sequence isolated from the Sargasso Sea
aatgtcatttaatacatttggaaagttttttcgtttcacaacttggggggagtcccatggcccggcaataggctgtataattgatggttgcccaccattaattcaattaaaagaacaggatattcagagagaattagacaaaagaaagcctggtcaatccaaatttacaactcaaagaaaagaaagtgataaagtcgaaattttatcaggggtatttgagggaaaaactacaggcactccaatatcattaataatttacaatcaggatgtgcgatctaaagattataatgatataaaagataaatttagacctggtcatgctgattttacttattttaaaaaatatggaattagagattacagaggtggggggagatcttcggcaaaga

SEQ ID NO: 287406 - DNA, 910 bp, Unknown
  Bacterial polypeptide expressing nucleotide sequence isolated from the Sargasso Sea
agaaaagaatttgataaagtagaaattttatctggtgtttttggtggtaaaactttaggcacgccaatttccatgattatctacaacaaagatgcaaaatctagagattatgaaactattaaaaataaattcaggcctggtcatgctgattatacttattttttaaagtatggaataagagattataggggtggcggaagacagtctgcaagagaaactgcatccagagtagcagctggcgcaatagcaagagttgttttgtcaaagttaattggtaaaaaatttaaagttattggagcggtaattcaacttggtcttcttggttgcaacaaaaataattggaatgagaaatatattaggaaaaatccctttttttgtcctgataaaaagtcaataaaactttgggaaaaatatttactagcagttagaaaagcaggttcatcttgtggagcaattattgaattaagagcttcaggcataccggcaggcctgggtgctcctatttattcaaaactagattctgatttagctggtgctttgatgagtattaatgctgtaaaaggtgtaaatataggagctggaatgagtgcagcctttttaagcggtgaagaaaattcagatgaaattagacgtataaaaggaagcgcaaaatttatatcgaacaatgctggaggaatacttggaggcatatcttctggacaagaaattattgcttcctttgcagtaaaacctacatcttcaattttaagtagccgtaaaacaatagataaaaaaggaaaaaatacaaacatatccgtacatggtagacatgatccttgtgtaggtatcagggcagtacctattggtgaggcccatgatgtcttgcgtgctattagatcattatttattaaatcgtgctcagtgcaagtaa

SEQ ID NO: 287407 - DNA, 704 bp, Unknown
  Bacterial polypeptide expressing nucleotide sequence isolated from the Sargasso Sea
tcagaaagaattgaataaaagaaggcccggtcaatccagattcacctcccaaagaaaagagacagatgaagtaagcattatgtctggtgttttcgagggggttacaacaggtacgccgatcaatttggttgttcaaaatgtagaccaaaagtcaaaagattatactgccattaaggataaattcagacccggccatgctgattttacttattaccaaaaatacggaatcagagattacagaggcggaggcagatcttctgctcgtgaaaccgtgatgagggttgcagcaggcgcaattgcaagaaaatatttatttgaaaaaatggggatagagatttttggttttctaggtcaattgggaccgattcatcttgaaatgaaggacagatcatttattgaaacaaacccctttttctgtggcgatcctgacaagatttcagagttagagtcatatatggatcaattgagaaaagagggcgattccattggcgcaagaattaacttgatagcgacaaatgtaccagttggattgggcgaaccagtttttgacaaactggaagcagatatcgctcatggattaatgagtatcaatgcggtcaaaggagttgagattggtgctggattctctgtagtgaatcaaaaaggcagcgagcatagagatgagattgataccgatggcttcaaacagaataactctggcggca

SEQ ID NO: 287408 - DNA, 511 bp, Unknown
  Bacterial polypeptide expressing nucleotide sequence isolated from the Sargasso Sea
tatgtcatttaacacatttggaaagatatttcgcttcaccacttggggtgagtcacatggtcctgcgatagggtgtgttgtcgatggctgtccacccaatgtaagtataaatgaggcagatattcaaaaagaattaaataaaagaaaaccaggacaatcaaaatttacaacgcaaagaaaagaggatgataaagtaaatattttatcaggagtttttgacggtaaaacaactggcacaccaatatcgatgatcatttataacaaagatatgagatcaagagattatgaaactataaaaaataagtttcgtccaggacatgcagattatacatattttaaaaaatacggaataagagattatagaggtggaggaagacagtcagcaagagaaacagcatcgagggttgccgcaggagcaatagcaaaaaaagttttggaaaaaaaaataggaaaaaaatataatgttaaaggagctgttactcaattagggatacttggttgtgatataaaa

SEQ ID NO: 287409 - DNA, 313 bp, Unknown
  Bacterial polypeptide expressing nucleotide sequence isolated from the Sargasso Sea
atctgggtgaagaaaaattctgatgaaatttcacaaaataataaaaaaatgaaattttactcaaacaatgcaggtggaatacttggtggtatttcttctggacaagaaatagtaatttcatttgctgtaaaacctacttcttcaattttaaaaagcagaaaaactattaataaatttggaaaaaatacaactatatcagttaaaggtaggcatgatccatgtgtaggtataagagctgtaccagtcggtgaagctatgctttcatgtgttttattagatcattaccttatgaacaaagcgcaatgtagttaaa

SEQ ID NO: 287410 - DNA, 909 bp, Unknown
  Bacterial polypeptide expressing nucleotide sequence isolated from the Sargasso Sea
gcctgcaattggctgcatagttgatggttgcccgccaaatataaacttaaaagaacaggatattcaaatggaattgaataaaagaaaacctggacaatcaaaattcacaactcaaagaaaagaagacgataaagttcaaatattatctggtgtatttgagggtaaaactactggagcacccatttctcttataatttataataaagatatgagatcaaaagattatagcaatatcaaagataaatttagaccaggccatgcagattatacatatttcaaaaaatatggaataagagactatagaggtggtggaagatcatcagcaagagaaaccgctgctagagttgccgctggcgctatagctaaattagttttacaaaaaaaattaggtaaaaaatttaaagttataggtgctgtaactcaattgggggtattgggatgtgatataagtcaatggagcgataaagtaatttctaaaaatccatttttttgtcctgataaatctataataaaactttgggaaaagtatttattaggcgtaagaaagtcaggatcttcatgtggagctataattgaaataagagctagaggaattccagcaggtcttggagctccaatttattcaaaactagacacagatattgcttctgcattaatgagtataaatgcagtcaaaggtgttaacatcggggccggaatgaattcagcgcaattaagtggtgaacaaaattcagatgaaatttttcaaaaaggaaaaaaattaaaatttaattctaataatgctggtggaattttaggagggatttcaagtgggcaagaaattattgcatcttttgccgttaaacctacgtcttcaattttaacaactagaaaaacaattaataaatttggaaaaatactactatatca

SEQ ID NO: 287411 - DNA, 751 bp, Unknown
  Bacterial polypeptide expressing nucleotide sequence isolated from the Sargasso Sea
aatgcttgatctaagaagacctggccaatcattagtttcaacacaaagaaaagaaggtgacattgtagagattctttcaggtgtgtttaggggatacacaactggtgcacccatcacaacaatcatctggaataaggatcatgactcaaaaagttatgataaattacggactgcgatgcgacctggtcactctgattatcctgcttttgtaaaatataaaaaattcaatgatcatcgtggtggtggaagattttctggtagattgacagctacacacgtaatgggtggagcaattgcaaggaaattactcaaagttactctcggtgttgaaacaaatgcgtacacatgcaaaattggaaagataggaatgaaaaatcaagctactaaacagttactcaaatcaatatatacaaacgaagttagatgtcctgaaaaaactatcgcaggaaaaatgaaaaaatcaatacttgatgctaggaaaaagggcgattcgttaggaggcattgttgaatctgtaacaaataatattcctattggactaggtgaaccgatttttagctcacttgaatcagaactcagtaaagccatttatgcaataccagctgtaaaaggtgttgaatttggttctggattttcaggatctgagaaacacggctcacagaataatgactcatatacatttcgtgatggcaaggtggttaccaagacgaacaatgctggtggaattttaggcggaatatcaaatggaaat

SEQ ID NO: 287412 - DNA, 606 bp, Unknown
  Bacterial polypeptide expressing nucleotide sequence isolated from the Sargasso Sea
aattgggagttcttggttgtgatataaaaaaatggaatgataaaaatattagaaaaaatccttttttttgtccagacaaatcaattgttaaattgtgggaaaaatatcttttaagtataagaaaatctggctcatcatgtggtgctgttattgaaattagagccagaggagtccctgttggtttaggggctccaatatattcaaaattagatatggatatagcatcagcaatgatgagcattaacgcagtcaaaggagtaaacataggagctggaatgaattctgctcaattaatgggtgaacaaaattctgatgaaatatcaaacaaaggaaaaaaaataaaatttttttctaataatgcaggtggtattcttgggggaatatctactgggcaagaaattatagtttcattcgcagttaaaccaacttcttcgattctcgtaaatagaaaaacaattgataagtttggaaaaaatacatctatatcagtgaaaggtagacatgatccgtgcgtaggaattagagcagttccaattggtgaagcaatgctgaattgtgtattacttgatcactatcttcttaataaagctcagtgcggaaactaaa

SEQ ID NO: 287413 - DNA, 865 bp, Unknown
  Bacterial polypeptide expressing nucleotide sequence isolated from the Sargasso Sea
atggcaggtaatagcattggacagttatttaaagtgtccacttttggagagagccatggcgttgctttaggcggcgttgttgacggcactcccgcaggtcttgaattaacagaggccgacttacaaatagatttagatcgccgcaaaccaggccaaagccgatacactacgcagcgccgcgagagcgatcaaataaaaattttagcaggcgtttttgaaggtaaaacaacgggtacaagtattggtttattaatcgaaaataccgatcaacgttcacaagattacggcaaaattaaagacgtgtttcgcccaggccatggtgattacagctattggcacaaatatggccttcgtgattatcgcggaggtggccgctcgtctgcacgtgaaaccgctattcgggttgcagctggcgctattgctaaaaaatatctaaagcaatttcatggtattgaagtaaaagcatgtttaagccaactaggtcctattaaagcagaaagttacgattgggatgaagttgaaaacaacttgttcttttttcctgatgtaagcaagctagaagcgctcgatgaatacatgcgtgacctaaaaaaacaaggtgactcagttggcgctaaagtaaaagtggtggctagcaacgtaccggtaggattaggcgagcctgtatttgataggttagatgctgaaattgcgcattcactaatgagtattaatgccgttaaaggtgtcgaaattggtgatggctttgacgttgttgaacaaaaaggctcagagcatcgtgatgaactaacacctgagggttttacatctaaacatgctggtggtgtgcttgcaggtatctctacagggcaagacatagtagcgt

SEQ ID NO: 287414 - DNA, 319 bp, Unknown
  Bacterial polypeptide expressing nucleotide sequence isolated from the Sargasso Sea
atgtcttttaatacttttggaaaaatatttagatttactacgtggggagagtctcatggcccagctattggttgcgtaatagatggttgtccccctaatattcccatttctgagaaggatatacaaatagacatggatagacgtaggcccgggcagtctaaatttactacccaaagaaaagagtcggataaggtaaatattctttcaggagtttttgaggggaaaacaactggaacgccaatatcaataataatctacaatgaagataaaagatctagagattacgagtctataaaagataaatttagaccaggacatg

SEQ ID NO: 287415 - DNA, 832 bp, Unknown
  Bacterial polypeptide expressing nucleotide sequence isolated from the Sargasso Sea
atgtcaggcaatacgtttggaaaaatatttaaaattacgacttttggtgagagtcatggcactgctatgggctgtattttagatggttgtccgcctcaaattgatctaaaaaaagaggatattcagtatgaattagatagaagaaagcctggtcaatcagatgtaactacacaaagaaaagaagatgacgctgtagagattttgtctggagtttttgaaggaaaaaccctcggtacacctataggaatgataatttacaataaagatcaaaaatctaaagactactcgaatataaaagatgtttttagaccaaatcatgcagacattacttatcaagcaaaatatggtcatagagattacagaggcggtggaagagcaagtgctagagaaactgcaaactgggtagctgctggagcaattgcaaaaaagattcttaaaaacgaaggtgtttcagtaaatggttttgtatcagaaataggaaaagtgaaggctgattcaattaataacaaaaatataaataataaatacttttttagtgatgaatcaaaattgtctgaactagattcaatgttcaaagacctaattgaggagggtaattctgtaggtgcaaagttaggagttattgttaagaactgtccagttggattgggagatccagttttcgagaagttagatgctaatttagcaaaagcaataatgactattaacgcagtaaagtcagtatcaattggcaatgcagatgatctattaagccttaaaggttcagaagcaagggatgaaataacagaatcaggttttacttcaaataattctggaggaatattaggcgggt

SEQ ID NO: 287416 - DNA, 254 bp, Unknown
  Bacterial polypeptide expressing nucleotide sequence isolated from the Sargasso Sea
aatgtcatttaatacttttggaaagctatttcgtttctctacttggggtgaatcccatgggcctgctataggctgtatcattgatggttgcccacctaacataaaacttaatgaaaaagacatacaaatagaattagataaaagaaaacccggacagtctaaatttacaacccaaagaaaagaagcagataaagttcaaattttatctggagtttttgaaggtaaaactacaggcactcctatttctttaatta

SEQ ID NO: 287417 - DNA, 875 bp, Unknown
  Bacterial polypeptide expressing nucleotide sequence isolated from the Sargasso Sea
atgtaatgggaaaacttttggttctttatttaaaatttccacgtggggtgaaagtcacggagggggtgtcggagtagttatagacggctgcccttctttacttcccctaacggaagctgatattcaacgtgatctcgacaggagacgtccggggcagagcaggattacaactcaacgtgacgaatcagacaaagcggagatactttcgggtgtattcgagggaaaaacgattggagccccaattgcaattttggtcagaaacgaagatgcaaagcctgccgcatacgaacacctgaaagatacttacagaccttcacatgccgatttcacttatgaagctaaatacgggatccgtaactggcagggcggtggccgctctagcgcacgcgaaacgataggaagggtggctgctggtgcagtggccagagcgcttttaagtgaaacaacccaaatagaagttatcgcttgggtttcacaaattcataatataaaagcaaatgtcgaaacagaaactgtcaatatagatgacatagaggcagaaataactcgatgtcccgatcacaacgcatcagaagcgatgactgccgcaataactgatgcgagaaaaaatggcgactcgctcggaggtatcgtcacatgcctggtaagaggtgtgcctcctggccttggagttcctgtttttgaccgaattgaagccgacttagccaaagcagttctctcattacctgcatctaaaggttttgacataggcagcggattctctgctgttgaaatgacaggaagtgagcataatgacgcttttgaaccaggtgcttccagtccagtcactacctctaaccattcaggcggtgtgcaaggcggaattacaaacggct

SEQ ID NO: 287418 - DNA, 961 bp, Unknown
  Bacterial polypeptide expressing nucleotide sequence isolated from the Sargasso Sea
aaaattacgacttttggtgagagtcacggcactgctatgggctgtattttagatggctgtccaccccaattagagttaacaaaagaagatattcagcacgaattagataaaagaaagcctggtcaatcagatgtaactacacaaagaaaagaggatgatgctgtagagattctatctggagtttttgaaggaaaaactcttggtacacctattggaatgattatttataacaaagatcagaaatctaaggattattcaaatataaaagatgtttttaggccaaatcatgctgacattacttatcaagcaaaatatggtcatagagattatagaggcggtggaagagctagtgcgagagaaactgtaaattgggtagctgctggcgcgattgcaaagaaaatacttgaaaaggaaggagtttcagtgaatggttttgtttctgaaataggacaagttaaggctgacttgattaatcatatagacattaataataaatactttttttgtgatgaatcaaaattatctgatttagattcaatgtttaatgatttaattgaagagggtaattcagttggtgcaaaattgggcgtcgttgttgaaaattgtcctgtaggacttggtgatccagtctttgagaagctagatgctaatcttgccaaagcaattatgacaattaatgctgttaaatctgtatcgattgggaatgcagatgatcttttgaacttgaaaggttctgaggcaagggatgaaatgacttcatcaggatatgcttcaaataattcaggtggaattttgggaggcatttcaaatggagatgatataagcctaagttttatcatcaagcctacttcaagcattaaatcaaaaggtaaaacagtaaacaaagatggtgaggaagttgacattaaagtaactggaagacatgacccttgtgtaggtataagagctgttcctatgccga

SEQ ID NO: 287419 - DNA, 581 bp, Unknown
  Bacterial polypeptide expressing nucleotide sequence isolated from the Sargasso Sea
catgtcaggcaatgcgtttggaaaaatttttaaaattatgacttttggtgaaagtcacggcacagctatgggttgtattttagatggttgtccaccagaaatagaaatatcagaagaagatattcagcttgaattggatagaagaaagcctggtcaatcagatgtaaccactcagagacaggaagacgatgctgttcagatattatctggagtttttgaaggaaaaacccttgggacaccaataggaatgataatttacaacaaagatcaacaatctaaagattattctaatattaaagatgtcttcaggcctaatcatgcagatattacatatcaagcaaagtacggtcatagagattacagaggtggcggaagagctagtgcaagagagacagcaaattgggtcgcagcaggtgcgattgctaaaaagattcttaaaaaagaaggagttgaagtaaatggttttgtttctgcaataggaaaagtaagagctgaatcaattaattataaagatatagataataaatacttcttttgtgatgaatctaaattaactgacttggattcaatgtttgataatt

SEQ ID NO: 287420 - DNA, 724 bp, Unknown
  Bacterial polypeptide expressing nucleotide sequence isolated from the Sargasso Sea
ctatgagacaataaagaataaatttagaccaggacatgcagattatacttattttaaaaaatatggaatccgggattacagaggaggtggaagacaatctgctcgcgaaactgctgctagagttgcagcgggtgctattgcaaaagttgttttgaaaaacaaaattggtaaaaaatatcaagctgttggtgctgttacacaattaggaatattaggatgtgacttaaagaaatggaaagataaaacaatttctagtaacccatttttttgtcctgataaaactgtggttaaactttgggaaaaatatttacttggaataagaaaagctggatcatcttgtggagcaattattgaggttagagcaagaggagttcctttgggacttggggcaccaatatactcaaaattagatatggatcttgcggcagctatgatgagcattaatgctgtaaagggtgtaaatattggatcgggaatgaactcggcaatgttaactggtgaggaaaactctgatgaaattttgaaaaaaaaaggtaaaactagttttaaaacaaataatgcaggaggaattcttggaggaatatctactggacaagaaataaatgtttcatttgcagtaaaaccaacatcatctattttatcatcgagaaaaacaatcgataggtttggcaaaaatacgacaatatctgtaaaaggaagacacgacccgtgtgtggaattagag

SEQ ID NO: 287421 - DNA, 207 bp, Unknown
  Bacterial polypeptide expressing nucleotide sequence isolated from the Sargasso Sea
tttgactcaaacaatggtggtggaatactcgggggaatttcctatggtcaagaaattaccgtgtcttttgatgtgaaaccgacttcatcaattttaacaagtagaaaaacaattgatcgatttggaaaaaatacctcgatatctgtaaaaggtagacatgatccttgtgtaggtatcagggcagttccaattggagaagccatgatg

SEQ ID NO: 287422 - DNA, 391 bp, Unknown
  Bacterial polypeptide expressing nucleotide sequence isolated from the Sargasso Sea
tatgtcatttaatacatttggaaagatatttcgttttaccacttggggtgagtcgcatggacccgctatagggtgcgttgtagatggctgtcctcctaacatcagtataaaagaggcagatattcaaagagatttgaatagaagaaaacctggacagtctaagtttactactcaacgaaaagaagatgataaagtaaatattctttcaggtgtttttgaaggaaagacaacgggaacaccaatatcaatgattatttataacaaagatatgaggtctagggattacgaaactataaaaaataaatttcgtccaggtcatgcagattatacttattttaaaaaatatggaataagggattatcgtggtggaggaagacagtcagcaagagaa

SEQ ID NO: 287423 - DNA, 258 bp, Unknown
  Bacterial polypeptide expressing nucleotide sequence isolated from the Sargasso Sea
aaaacccagaatttttatcaaataataatggtggaattcttggtggaatttcaacaggacaagaaattattgtcagattttgtgtaaaaccaacaagttctataaatacaaaaagaaaatcaattaataataaatttaaagaagtagaaattgcaactaaaggaaggcatgatccttgtgtaggaataagagctgttccggttggtgaagctatgatggcaacgactttagctgatcatagtttaagatatctctaat

SEQ ID NO: 287424 - DNA, 783 bp, Unknown
  Bacterial polypeptide expressing nucleotide sequence isolated from the Sargasso Sea
tagactgggtcatgctgactatacatattttaaaaaaatatggaataagagattatagaggtggtggaagacaatctgctagagaaactgcttctagagtagcggctggagcgattgcaaaaaaagtattacaaaacaaattgggaactaaatataaagttgttggtgctgtaacgcagatagggattctgggttgtgatactagtaaatgggatgaaaaatttatatctagaaatccttttttctgtcctgataaatcaataataaaactttgggaaaaatatttattgggcattagaaaatcaggatcctcatgcggggcaattattcaagttagagcaaaaggtgttccaattggactaggagctccaatttactctaaattagatatggatttagcggcagctatgatgagcattaatgcagttaaaggtgtaaacattggatcaggcatgaactctgcccaactaacaggcgaacaaaattctgatgagattattcaaaaaggaaaaaaaactaattttaaatcaaataatgcagggggaattcttggtggtatttcttccgggcaagatataattgtttcttttgccgttaaaccaacatcttctatactttcatcaagaaaaacaattgataaatttggaaagaatacatctatttctgttaaaggaagacacgatccatgtgttggtatcagggctgtgccaattggagaagcaatgatgcactgcgttatattagatcactatttaatgaatgttgcgcagtgtaaaatttagt

SEQ ID NO: 287425 - DNA, 427 bp, Unknown
  Bacterial polypeptide expressing nucleotide sequence isolated from the Sargasso Sea
cgttccttcaggccttggcaatccagtttttgataaagttgatgctttaatagcatatgcaatgatgtctattaatgccgtaaaaggagttgaaattggtagcggattcgatgttgtcaatcaaaaaggttcagaatctagagatgagatttctagcaaaggatttctatctaacaatgccggcggaactcttggtggaatatcctctggtcaagatattatagttaagatggcactgaaacctacatcaagcattcttataccaggatcaacagttaccactgataataaagatactactattgtaactaagggtagacacgacccttgtgtaggtattagagctacaccaattgcagaagcaatgttagctttagtgttgtgtgatctatatttgcgtgataaagctcaaaactcaaacaaataa

SEQ ID NO: 287426 - DNA, 748 bp, Unknown
  Bacterial polypeptide expressing nucleotide sequence isolated from the Sargasso Sea
cgagttctgggtggtggaagagcttctgcaagagaaacaattggaagagtagctgctggtgctatagcaaaacaattgttaaaaaacttctgtcatactgaaattctttcttgggtaaagcgtatacatgatattgattctgatataaataaagaaaagatttctctcaacaaaatagattctaatattgttagatgtcctgatgaaaaggtatcagaaaaaatgatcgagagaattaagcaattaaaacgtgaaggagactcttgtggcggtgttattgaatgtctagtaagaaatgtcccttctggtcttggaatgcctgtttttgataaattagaagctgatttagctaaggctttgatgtctttgcctgcaacgaagggctttgaaataggttcaggtttctctggaacttatttaaaaggaagcgaacataatgatgcctacattaaatctgatgatattaggaagttaagaacaatatctaataattcaggcggtatacagggaggaataagtaatggcgaaaatattgagatgaagatagcttttaaacctacagcaactatcgggaaagaacagaaaacagtaaatgctgaaggaaaagaagttttgatgaaagcaaaaggaagacatgatccatgcgttctaccaagagcagttcctatggttgacgctatggtggctttagtacttgctgatcatttacttctgaatcaagctcaatgtggcttaattaataattagt

SEQ ID NO: 287427 - DNA, 613 bp, Unknown
  Bacterial polypeptide expressing nucleotide sequence isolated from the Sargasso Sea
atgggaagtagtttcggaaaactttttaatatcagcacctttggcgaatcacatggtggtggtgttggtgtaattattgatggatgtccaccaaggttggagcttgatataaatgcaattcaaaatgatctcaatcgaaggaggccaggacaaagcaaaataactactccaagaaacgaaagtgatgaagtagaaattcttagtggtctgtcagggaacaaaaccttaggaacaccaattgccatggttgtaagaaataaagatcatcggcctaaggattattctgaaattaaaaaaacttttagaccatctcatgctgatgctacgtatcagaaaaaatatggaattcaggcttcaagtggcggaggacgagcatcagcaagagagacgataggtagagttgctgccggttctgttgcaaagcaactcctcactcagtcttctaatacggaaatacttgcttgggtaaagagaattcatgatattgacgctgagattcatccgagtgaagtgacttctgatgagattgagaaaaatattgttcgatgtccaaatcaatcagctgcagatttaatgattcagagagtggaaacttttggtaaagagaggtgac

SEQ ID NO: 287428 - DNA, 834 bp, Unknown
  Bacterial polypeptide expressing nucleotide sequence isolated from the Sargasso Sea
taatctataatgaggatatgagatcaaaggattaccaaaatattaaaaataaatttaggcctggtcatgctgattttacttattttaaaaaatatggaattagagattacagaggtggaggaagatcgtctgcaagagaaactgctgcgagagtagccgcaggagctgtagcaaaaaaagttctagaaaataaattaggtaaaaaatttaaaatttctgcggctgtaacacaacttggtattttaggttgtgatacaacaaagtggaacgataaggtgatttatcaaaatccatttttttgtccagataaatcaatgataaaaatatgggaaaaatatcttttaagcatcagaaaagctggatcttcttgcggtgcaattattgaggttagagctaatggaatacctgcaggcttaggggcaccaatatattcgaaattagactccgatatagcgtctgcaatgatgagtattaatgctgttaaaggagtaaatattggctcaggaatgaattcggcacaattatctggtgaagaaaattcagatgaaatttctcaaaataaaaaaaaattgaaatttaaaacaaataatgcaggagggatacttggtggtatttcttcaggacaagaaataatagtatcatttgctgtaaaaccaacttcctcaatcataaaaagtagaaaaacaattaccaaatttggaaaaaatactactatatctgttaaaggaagacacgatccctgtgttggtattagagcagtacctattggtgaagcaatgctgtcttgtgttttgttggatcattacctaatgaataaagctcaatgtagttaaa

SEQ ID NO: 287429 - DNA, 861 bp, Unknown
  Bacterial polypeptide expressing nucleotide sequence isolated from the Sargasso Sea
ttcacaacttggggtgaatctcatggtcctgctattggctgtatagttgatggttgtcctccaaacataaatctaaatgaaaaagaaattcaattagaattggataaaagaaaacctgggcaatcaaaatttacaacccaaagaaaagaagacgataaagtccaaatactttcaggtgtatttgaaggaaaaactactggcacaccaatttctctaattatttataataaagacatgagatctaaagattatggaaatataaaagataaatttagaccaggtcatgcagactttacctatttcaaaaaatatgggattagagattatagaggtggaggaagatcttctgctagagagacagcttcaagagttgcagctggtgctatagctaaaatagtacttcaaaaaaaattaggaaaaaaatttaaagttataggtgctgtcactcaattaggaatcttaggatgtaatacatcgcaatggaatgatgaaattatttcaaaaaacccattcttttgtccggacaagtctatgattaaattatgggaaaaatatttacttagtgtaagaaaatcagggtcatcatgtggagctgtgatagaagtgagagcaagaggtatccctgcgggtcttggggcacctatttattcaaaattagattcagacattgcatcagcttttatgagcattaatgcagttaaaggggtaaatgttggtgctgggatgaattctgcacaactaagtggtgagcaaaactctgatgaaatatcatcaaaaaataataaattaaaatttaactctaacaatgcaggcggtatcttaggtggaatttcttcagggcaagaaataatagcatcattg

SEQ ID NO: 287430 - DNA, 517 bp, Unknown
  Bacterial polypeptide expressing nucleotide sequence isolated from the Sargasso Sea
aaaatttgggaaaagtatttattaagtataagaaaagctggatcttcatgtggtgctattattgaaataagagctagaggaatacccgcaggtttgggtgcaccaatctactcaaagttagatatggatttagcttcggcaatgatgagtataaatgcagttaaaggtgtaaatattggctcaggaataaactcagcttatcttactggagaacaaaactctgatgaaattgttcaaaaaggaaaaagaactaaatttttttcaaataatgcgggaggaattttgggaggaatttctagtggccaagaaataattgtttccttcgcagtaaaaccaacttcatctattttgactagtagaaaaactataaataaatacggaaaaaatactactatctcagtcaaaggaagacacgatccatgtgtgggtataagggcggtaccaataggagaggctatgatgcattgtgtgctattagatcattatttaatgaacaaagcacaatgtggaaattaat

SEQ ID NO: 287431 - DNA, 751 bp, Unknown
  Bacterial polypeptide expressing nucleotide sequence isolated from the Sargasso Sea
ctgtgtagttgacggatgcccaccaaatatcccgataaatgcagatgatatacaaatcgaattaaatagaagaaaaccaggtcaatcaaagtttactactcaaagaaaagaggatgataaagttcagatactctcaggtgtttttgagggaaaaacgactggaactcctatctcattaataatttataataaagatatgagatctcgagattacgagacaattaagaataaatttagaccaggtcatgccgattttacttatttaaaaaaatatggaataagagattatagaggaggcggaaggcaatcagctcgagaaacagcatctagagtcgcggctggagcaatagcaaagaaggtattaggagtcaagctaggcaaaaaatacaatgttgtaggagcagttacccaactaggaatattaggttgtaatttaaaaaattggaatgataaatttattagaaaaaataaacttttttgtccagataaatcaattttaaaactttgggaaaaatatttattaagcatacgtaaatctggctcatcttgtggtgcagttatagaggtaagagcaagaggaataccagtaggattaggggcaccaatttattcaaaattagatatggatctcgcagctgcaatgatgagtattaacgctgttaaaggtgtcaatataggctctggaatgaattctgcacaattaactggtgaacaaaattctgatgagatgtcaaaaaaaggacgaagcaca

SEQ ID NO: 287432 - DNA, 733 bp, Unknown
  Bacterial polypeptide expressing nucleotide sequence isolated from the Sargasso Sea
atgtcttttaatacttttggaaaaatttttaggtttaccacttggggggagtcacacgggcctgctattggttgtgttattgatggttgccctcctaatataccactatctgaaagagatattcagagtgatatggatagaaggcgacctgggcagtcaaaatttactacgcaaagaaaagagtccgataaggcagtgattttgtcaggagtatttgaaggaaaaacaaccgggacgcctatttctataatcatccataacgaggataaaagatctagggactacgagacaataaagaataagtttagacctggacatgctgattatacttatttcaaaaaatatggaataagggattttagaggaggcggaaggcaatctgctagagaaactgcatgtagagtggcagcaggagcagtggcaaaaattgttttaaaaaaattaattggttcaaaatttaaggtaattggtgcagtcactcaacttggcttgatgtcttgcaataaatctaattggaaagatagcgaaataagaaaaaatccatttttctgtccagataaaaaatctgtaaaactttgggaaaaatatctattagctgtaagaaaagcaggttcgtcttgtggagctatcattgaattgagagcaacaggagtgccggttggattaggcgctccaatttactccaaattagataccgatatagctgcaggtttaatgagtataaacgcagtca

SEQ ID NO: 287433 - DNA, 306 bp, Unknown
  Bacterial polypeptide expressing nucleotide sequence isolated from the Sargasso Sea
agcaaaattcagatgagatttctcaaaaaggtaccaaagctaaatttgcgtcaaacaacgctggcggcattctaggcggaatatcttcaggtcaagaaataattgtttcatttgcagttaaacctacttcatctattttaactagaagaaaaacaatcaatagatttggtaaaaacacatcaatatctgttaaaggaagacacgatccatgtgttggtataagagctgtaccaattggtgaagctatgatgcactgtgttttattagaccactatctaatgaatcaggctcagtgtagttattaat

SEQ ID NO: 287434 - DNA, 478 bp, Unknown
  Bacterial polypeptide expressing nucleotide sequence isolated from the Sargasso Sea
gctggttcgtcttgtggagcggttattgaattaagagcgactggtataccggttggcttaggagctccaatttactcaaagttagatacagatatagctgcagctttaatgagtatcaatgcagttaaaggggtaaatattggagtaggtatgaatgcagcttttttaagtggagaagaaaactcggatgaaatgagtaaaagctcaggaaaagtaagatttaaatctaatcaagctggaggaattttgggtggaatttcttcagggcaaaatatcgtagcatcatttgctgttaaacctacgtcatcaattttaacgagtagaagcacaatagataaaaaaggtaaaaatacaaaaatttcagtcaagggaagacatgatccttgtgtgggtattagggctgtgccgataggtgaagcaatgatcaattgcgttctattagatcacttcttaatgaatagagcacaatgcgattaat

SEQ ID NO: 287435 - DNA, 446 bp, Unknown
  Bacterial polypeptide expressing nucleotide sequence isolated from the Sargasso Sea
aatgtcatttaatacttttggaaagctatttcgattcacaacttggggagagtctcatggatcagctatcgggtgcatagtagatggatgtcctccaaatataaagattagagagcaagatattcaaaaagaacttgataaaagaaaacctggacaatcaaagtttactactcaaagaaaagaagatgataaagtccaaatattatctggagtgtttgagggaaaaaccaccggaacacctatttctctaattatttataataaagatatgaaatcaaaagattacaatgatattaaagataaattcagacctggacacgcagattacacatattttaaaaaatatggaataagagaccatagaggtggaggaagatcttcagcgagagagacagccgctagagttgcagcaggagctattgcccaaattgttctaaaaaaaaatt

SEQ ID NO: 287436 - DNA, 999 bp, Unknown
  Bacterial polypeptide expressing nucleotide sequence isolated from the Sargasso Sea
cattaggctgcatcctagatggatgcccgcctgggttagttttatctgaaaaagatatccagaaagatttggatcgcagaaagccgggtaaatcgaaatacacaacacaacgtaaagaaagtgataaagttgagatattgtcaggaacatttgaaggcaaaaccacgggcacgcctattgcaatgattatctataatgaagatcaacgatctaaagattacagtgagattaaaaataagtttaggcctggacatgcggattatacttatactatgaaatacggttttagagattatcgtggagcgggtagatcttctgctcgtgagactgttgcgagagttgctggtggcgctatagcaaaaaaagtacttcatgataaattgaaaatgaaaataactggttatgtatcacaaattggacaatataaacctaaaaaaatcaatttaaaagaaattgaaaataattcattcttttttccagataaaagtatgatcccagatttagagaaatatattaatagtatccgtaaagagggtgattcaataggcgctgaggtaacagtagttgctaaaaaagtccctgcaggtctaggaaatcctgtgtttgataagttagatgctttaatcgcatttgcaatgatgtcaattaatgctgtaaaaggtgtagaaataggaaatggctttgatgttgtagcacaaaaaggttcagaatgtcgagatgaaataacatctaaaggttttctgtcaaataattctggtggaactctaggtggaatttcatctggacaagatatagttgttaagctagcacttaaacccacatcaagtattataaaatcaggtaaaactattacttctaagaagaaaaataccaccattgtcacaaaaggtagacatgatccttgcgtaggaatcagggcaactccaattgccgaggcaatgttagctcttgtattatgtgacctttatcttagagataaagcacaaaactcgatataat

SEQ ID NO: 287437 - DNA, 394 bp, Unknown
  Bacterial polypeptide expressing nucleotide sequence isolated from the Sargasso Sea
tatggatttagcttctgcaatgatgagcattaatgctgtaaaaggagttaatataggttcaggaatgaattccgcatttttaactggagaagaaaattctgatgaaattgtccaaaaaggaaattatccagtttttaaatctaataatgcagggggaattcttggaggaatttcaagtggacaagaaattaaattatcttttgcagtaaaacctacctcatcaatattaaaatcaagaaaaacaatagataaatttggtaaaaacacttctatatcagttaaaggaagacacgacccatgcgtaggaattagagcggtcccaattggagaagcaatggcacattgcgttatattagatcattatttaattaacaaagctcagtgtggaaaataa

SEQ ID NO: 287438 - DNA, 673 bp, Unknown
  Bacterial polypeptide expressing nucleotide sequence isolated from the Sargasso Sea
aatgtcatttaatacttttggaaagctatttcgtttcacaacttggggagagtctcatggacctgcaattggttgtattgttgatggttgtcctccaaacataaatcttaaagaacaagatattcaaatagaattagacaaaagaaaaccaggacaatctaaatttacaactcagagaaaagaagatgataaagttcaaattttgtcaggagtatttgagggtaaaactacaggaacacctatttctctcataatctacaacaaagatatgagatctaaagattatagtaatattaaagataagttcagaccaggtcatgcagattttacttattttaaaaaatatggaattagagactatagaggtggtggcagatcttctgctagagaaactgcagcacgagttgcggctggtgcaatagcaaaagttgtacttcaaaaaaaattaggaaaaaaatttaaagtaattggtgcagtaactcagttaggaattcttggatgtgatacaaatcaatggaacgataaagtaatttcaaagaatccatttttttgtccagataaattaatgattaaattatgggaaaaatatttgcttagtgttagaaagtcaggatcctcatgtggagcagtggttgaaataagagcaagaggtatcccagtaggtttaggtgct

SEQ ID NO: 287439 - DNA, 895 bp, Unknown
  Bacterial polypeptide expressing nucleotide sequence isolated from the Sargasso Sea
gcaataggttgtgtaattgatggttgtcctccaaatatacctatatctgaattaaatatccaaaaagatatgaataggagaaggcctggacagtctaaatttactactcaaagaaaagagtctgacaaggtgataattctttctggcgtttttcaaggtaaaactactggaacccctatatcaataattatttataatgaagataaaaaatccagggactatgaatccataaagaataaatttagacctggtcatgctgattttacatattttaaaaaatatggaattagagattttagaggtggaggaagacagtctgctagagaaacagcttgtagagttgcggcaggagcggttgcaaaaattgtattaaaaaaaatgataggaccaaaatttaatgttattggagctgtgactcagctagggttaatgtcttgtgataaaggcaattggaaaaattctgaaataagaaaaaatccatttttctgtgcagataaaaaatcagttaagttatgggaaaaatatttattagcagttagaaaatctggatcttcttgtggagctatcatagagctaagagcttcggggattccagttggtctaggagcgcctatatactcaaaattagatagcgatatttctgctgcactgatgagtattaatgcagttaaaggtgtaaatattggatctggaatgaattcagcatttttaagtggagaagaaaatgatgaaattaaaataaaatctggaaaaataaaatttaaaactaataatgcaggtggtattcttggagggatatcttcaggacaaaatattgttgcttcctttgctgtaaaaccaacttcttctattttaacaagtagagaaacgatagataaaaaaggtaaaaatacaa

SEQ ID NO: 287440 - DNA, 592 bp, Unknown
  Bacterial polypeptide expressing nucleotide sequence isolated from the Sargasso Sea
tgggatgagtgtgcgaaaaacccgtttttttgcgctgatgcgaaagccgccacaaaatgggcagaatatcttgatgaggtgcgcaagtctggatcttcagcaggggcaattctggagattgttgccgaaggtattcctgccggccttggacagccaatttacggcaagctggacagtgaacttgctagagccatgatgagcattaacgccgtgaaaggtgttgaaattggtggcggttttgcgctgtcagcaatagaggggcatcttgccagtgaccagatgcggtccggtaacagccctgaacagccgcattttatcggcaaccaatcaggtggaatacttggcggcatttcatctggccaaccaattgttgttcgcgttgcgataaaaccaacatcatctatccttacaccgcgccagtcaattgaccttgacggaaaaaatatcgatgtagttacaaaaggtcggcatgatccatgcgttggcattcgaggggtgccagtggccgaggccatgatgtctctggtacttatcgatatgctgatgcgtcataatgcacagactggcagtcttaacgcgcagcaacactagc

SEQ ID NO: 287441 - DNA, 655 bp, Unknown
  Bacterial polypeptide expressing nucleotide sequence isolated from the Sargasso Sea
tatgagatctaaggattatggaaatattaaagataaatttagaccgggacacgctgactttacatacttcaaaaaatatggaattagagattataggggtggtggaagatcatctgcaagagaaactgcatcaagagttgcagctggtgcaatagcaaagttggtcttacaaaaaaaattaggtaaaaaattcaaagttgttggtgccgttactcaattaggtatattaggatgcgatactaacaaatggaatgacaaaataattacaaaaaatccatttttttgtcccgacaaatcgatgattaaactttgggaaaaatatttgttaggggtaagaaaatctggatcatcatgtggagcagttattgaaataagagcgagaggaattccagtaggactaggcgcacctatttactcaaaactagactctgatatagcatctagtttcatgagtattaatgctgttaaaggagtaaatattggtgcaggaatgaactccgcacaactaagtggtgaacaaaactcagatgaaatttcaaaaaaaggtaaaaaattagagtttaattcaaataatgctggtggaatattgggtggtatttcaacaggacaagaaattattgcttcatttgctgtaaaacaacatcttcgatcttaa

SEQ ID NO: 287442 - DNA, 627 bp, Unknown
  Bacterial polypeptide expressing nucleotide sequence isolated from the Sargasso Sea
tatgggaagtagtttcggaaaactttttagtatcagcacctttggcgaatctcacggtggtggagttggtgtaattattgatggatgtccacccaggttggagcttgatatcaatgcaatacaaaatgatctcaatagaaggagaccaggtcaaagcaaaatcactactccaagaaacgagagtgatgaagttgaaattctaagtggccttttagggaaccaaaccttaggaacaccaattgccatggttgtaagaaataaagatcatcggcctaaagattattctgaaatcaaaaaaacttttagaccatctcacgctgatgctacttatcagaaaaaatatggaattcaagcttcaagtggaggtggaagagcatcagcaagagaaacgataggtagagttgctgctggttctgttgcaaagcaactgctcaccaaagcctctgatacagaaatactcgcttgggtaaagagaattcatgatattgaagctgaaattcaacctagtcaagtaacttttgatgatattgagaaaaatattgttcgatgtccaaatcaatccgctgcagatttaatgattcagagagtggaggcttttggtaaagaagagactcttgtggcggataa

SEQ ID NO: 287443 - DNA, 823 bp, Unknown
  Bacterial polypeptide expressing nucleotide sequence isolated from the Sargasso Sea
acagttattgttgagggcatgcctgctgatcttgaaatttctgaaaattatattgaacatcagatgacaaggaggcaaaaggggtatgggtcgggaggaagaatgaaaattgaaaaagataaagctttaattaaatctggtgtacgccatggaaaaacactaggatctcctatagctttatggatagaaaacaaggactttgaaaactggaatgaagcaatgtccatagaagaagtacccgttgatgttgacaaaaaagttttcactaaggtagttccaggtcatgctgactttcctggagctcttaagtacaatcaaactgaccttaggaatattttagagagagcaagcgctagagaaactgcttcaagagtagctgctggttcaatcgctaggaaattcttagaattctttggcgtatctattcattcaagagtaatttctattggttcaaaaagttctcaaaatctaaattatgaaaaaatagactgggagtttattgaaaactcggaagttcgtgcaaatgatcttgactctgaagcaaaatttaaaaaagaaatagacttagcgaagtctcaaagaacaaccgttggaggaatttttcaaataattacatacggtgtacctgttggtctaggaagccatgtccactgggacagaaaattagacgggcaaataggacaatctattcttagtataaatgccgtaaagggtgtcgagattggaaatgggtttgaaaatactacaaaaaaaggtaaggaagttcatgatgttatcatacctgataaaaataacatcaaaaacttcaagcatattctaatca

SEQ ID NO: 287444 - DNA, 562 bp, Unknown
  Bacterial polypeptide expressing nucleotide sequence isolated from the Sargasso Sea
atgtcatttaatacatttggaaagatatttcgcttcacaacatggggagaatcgcatggcccggccataggatgtgtggtcgatggatgtcctcctaatataagtattaacgaaaaggatattcagacagaacttaataaaagaaaacctggtcaatcaaaatttactacacaaagaaaagaagatgacaaagtgaatatactctcaggtgtatttgagggaaaaactactggaactccaatttcaatgattatttataataaagatatgaaatcaagagattatgaaacaataaaaaataaatttagacctggtcatgctgactacacatattttaaaaaatatggaattagagactatagaggaggtggtagacaatcagcaagagaaacagctgcacgagtcgctgcaggagctgtagcaaaaaaggttttagaaaataaaattggcaaaaaatataaagttgttggtgctgttacgcagcttggtatacttggttgtgatacaaaaaattggaatgataaatttatttcgaaaaatcctttgttttgccccggataag

SEQ ID NO: 287445 - DNA, 777 bp, Unknown
  Bacterial polypeptide expressing nucleotide sequence isolated from the Sargasso Sea
attatacctatcaacaaaaatatggtattcgcgattatcgaggaggaggtcgcgcctctgcacgtgagacctgtatgcgcgttgctgctggcgcaattgcaaaaaaatatcttaaggaaaagttcgggataattattcgggggtatttgtcacagcttggcccaatcagaattgaacataaggattggaatgaagtagaaaataatgttttcttctgtccggatgcgagtcgtgtttcagagcttgatgactatatggatgcgcttcgaaaagaaggcgaatctgttggtgcacgtattaatatccatgcggaaaacattccagttggtttgggagaaccaatttttgatcgtttagatgcggatattgctaaaggcatgatgagcattaatgccgttaaaggagttgaactgggaattggctttggttgcgttgaacaaaaaggtacacagcatcgcgatgaaataacaccaaaaggttttattggtaataattcaggcggtgttttaggcggaatttcctcaggacaagatattattgtaagtgtcgcactaaaacctacatcaagtatccgtcttcctggtaatacagttgataaatcaggtaaagcgactaaagttgagactaaagggcgacatgatccttgtgttggtattcgggcaacaccaattgccgaggctatgcttgctcttgtgataatggatcatacactacgacaccgcgcacaaaatgccgatgtcgcttcagaaacacctatcattccttcaagtaaatagt

SEQ ID NO: 287446 - DNA, 517 bp, Unknown
  Bacterial polypeptide expressing nucleotide sequence isolated from the Sargasso Sea
atgtcatcaaattctattggaaaattattctcattctcaacatggggagaaagtcatggtaaagcaataggttgtgtaattgatggagtcccagctagtattgaactaagtgaaaaagatattcagccttaccttgatagcagaaagcctggtaaatcaaaatatacaacacaaagaaaagaagatgataaagtagaagttttatctggggtttttgaaggtaagacaacaggtcacccaatatcgttaataatttacaataaagaccaaagatcaaaagattattcagatataaaagacaaatttcgacctggtcatgcagattatacctattggaaaaaatatggaataagggattatagaggtggtggaagatcaagtgctagagaaaccgctatgcgagtagcagcaggagctattgctagaaaaattatatgtaaaaaaattggtaatgaggcgaaaattactggagcacttgttcaaataggtaattctagaatcaactacgataattgaa

SEQ ID NO: 287447 - DNA, 774 bp, Unknown
  Bacterial polypeptide expressing nucleotide sequence isolated from the Sargasso Sea
aatataaaagataaatttagaccaggtcatgcagactttacctatttcaaaaaatatggaattagagattatagaggcggaggaagatcttcagctagagagacagcttcaagagttgcggctggtgctatagctaaaatagtacttcaaaaaaaattaggaaaaaaatttaaagttataggtgctgtcactcaattaggaatcttaggatgtgatacatcacaatggaatgataaaattatttcaaaaaatccattcttttgtccagataagtctatgattaaattatgggaaaaatatttacttggtgtaagaaaatcagggtcatcatgtggagctgtaatagaagttagagcaagaggtattcccgcgggtcttggggcgcctatttattcaaaattagattctgatattgcatcagcttttatgagtattaatgcagttaaaggagtaaatattggtgctgggatgaattctgcgcaactaagtggtgagcaaaactctgatgaaatatcatcaaaaaataataaattaaaatttaactctaataatgcaggcggtgtcttgggtggaatttcttcagggcaagaaataatagtatcatttgcagttaaaccaacatcttcaattttaactacaagaaaaacaattaataaatttggaaaaaataccacaatatctgttaaaggaagacatgatccgtgcgtaggaatacgagctgttccagttggagaagctatgatgaattgtgttttattggaccactttttaatg

SEQ ID NO: 287448 - DNA, 824 bp, Unknown
  Bacterial polypeptide expressing nucleotide sequence isolated from the Sargasso Sea
gggcgaaagccacggtggtggcattggtgtggtcattgacggctgccctcctcgccttcctttatcggaagaggatattcaatgtgagttagatcgtcgtcgtccgggtcaaagtgagattacgactccgagaaaagaatcagataaggcaacgattgtctctggagtttacgaaggtatgactttaggaacaccgattgctatttatgtgccgaatggcgaccatcgccctgaagcttacaaggaaatgaaggataagtttcgcccttcgcacgctgattttacttaccaaacaaagtttggcattcgaaatcatgaaggtggtggacgctcttccgctcgtgaaacaattggccgagtggctgcgggtgcgatcgcacagaaaattttaaaacacgcaggcggtgtagaggtacgagcttttattcgtcgtattcactcaattgaagctcccgaaatgaaggaattcccgacccttgaggcggtggaagcttcgccggtgcgttgccctcacccagaaactgctgaaactatggtgaatttcattaaggaaatgcgttcaaagggagattcagttggtggcgtaattgaatgccgtgtcaaaaatttaccggtaggcttaggagtaccagtctttgatcgcttggaagctgatttagctaaagcgatgctttccttacctgcgactaaagggtttgaagtgggtagtggctttgctggcactgaattaattggctctgagcacaatgatgtctttattgaaaaggatggtcatgtcggtacagagaccaatcgttctggtggagttcaaggtgggtattagc

SEQ ID NO: 287449 - DNA, 454 bp, Unknown
  Bacterial polypeptide expressing nucleotide sequence isolated from the Sargasso Sea
attgaagtaagagcaagaggtgttcccgttggtttatgtgctccaatttattcaaaattggatactgacatagcttcaggtttaatgagtattaatgcagttaaaggtgtaaatattggtgcaggaatgaactcagcgcaattaagtggagaacaaaattcagatgaaatttcttcaacaggaaataaattaaaattctattcaaataaagcgggtggaattcttggtggaatttctacgggccaagaaattatagcatcttttgctgtcaaaccaacatcgtcaattttaactagtagaaaaactataaataaattcggtaaaaatacttcaatatctgttaagggtagacatgatccttgtgtaggaattagagctgtaccaattggtgaagctatgatgaactgtgttttacttgaccactacttaatgaataaagctcaatgtagttagc

SEQ ID NO: 287450 - DNA, 488 bp, Unknown
  Bacterial polypeptide expressing nucleotide sequence isolated from the Sargasso Sea
tagaaaaaaagggtcatcattaggtgcaaaattattaataaatgcaagaaatgttcctgccggacttggagagcctgtatatggtaaattagatgctgaccttgcaggagcaatgatgagcattaacgctgttaaaggagttgaaataggagctggtaatgaggctgttgaattatcaggagatgagaactccgatgaaataagagctaataaaaataaaaaaattatcttttcttctaataattctggcggaatcttaggtggtatatcaagtggccaagatttaaatttatcaataacgatcaaaccaacgtcatcgattttaaaggcaaaaaaaacaattaataataaatttcaaaatacatcgatttcaacaaaaggccgccatgatccatgtgtaggtttgagagctgtcccaattgctgaagctatgatggcgtgtgttatagcagatcatatattgcgcaatagagcgcaatgtggctaaa

SEQ ID NO: 287451 - DNA, 217 bp, Unknown
  Bacterial polypeptide expressing nucleotide sequence isolated from the Sargasso Sea
tatggccggtaacacctttggtgaacaattccgtattactactttcggcgaatcccatggaggaggcgttggagtcgttattgacgggtgtcctccccgccttgagctcgacgcgagtgacgttcaggtggagcttgaccgcagacgcccaggccagagtcgtcttgtaacgcaacgtaacgaggacgatcgagtggaaatttatagcgggttgttt

SEQ ID NO: 287452 - DNA, 406 bp, Unknown
  Bacterial polypeptide expressing nucleotide sequence isolated from the Sargasso Sea
ctagcaagcggtctgatgtctataaatgcagtgaaaggtgttgaaataggcattggtatgcaagctgctgagattgaaggaatagagaatgctgatgaaatctttttggaggacgataaaatctcttttacatccaataacgcgggaggtgttttgggtggcataacttcgggtcagcatattgttacaagatttgctgttaagccaacgtcatccattttaagcgagagaaaatcaattactaaggcaggatcttcaaccacggtttcaacaaaaggaagacatgatccgtgtgtagggataagagcggtgccagtaggagaagctatggtcgcgtgtattattttagatcattttttactacatagaggccaaattggatccaattctggcacattattatagc

SEQ ID NO: 287453 - DNA, 676 bp, Unknown
  Bacterial polypeptide expressing nucleotide sequence isolated from the Sargasso Sea
tatgagagtagcagctggggcagttgctagaaaagttataaataaaaagattggaagttatccaaaaattacaggggcattaattcaaattggaaaaagtaaaatagattataaaaattggaatgaaaattttattacaaaaaatgaatttttttgccctgatgaaaatattattcctgaatggaaagatttgattaataaagctcgtaaggatggttcttcaattggtgctattatagaaattagagcttcaggcattcctataggactaggtgagccagtatatgaaaaattagattcagatattgcaagggcattaatgacaattaatgcagtaaaaggtgttgaaattggaaatggctttaattgtgtatatgaaacaggcaaagataatattgatgaaatggcaattgaagataataagccagtttttttaagcaataataatggaggagttttaggaggaattagttcaggccaagagattgtttgtagatttgtagttaagccaaccagttctataattactgaaagaaaaacaattgatatacattataatgaaacaaagatttctactaaaggacgtcatgatccttgtgttggaataagggcagttcctgttggtgaagcaatgatagctactactattgctgaccattgtttacgtcatctatga

SEQ ID NO: 287454 - DNA, 571 bp, Unknown
  Bacterial polypeptide expressing nucleotide sequence isolated from the Sargasso Sea
aatgtcttttaatacttttggaaagttatttcgatttacaacatggggagagtctcatggccctgcaataggttgtattgtagatggctgtcccccaaatattcaaattagtgaaaaagaaattcaattagaattaaacaaaagaaaaccaggccaatctaaatttacaactcaaagaaaagaggatgataaagtaaatattttatcaggtgtctttgaggggaaaactacgggtactccaatatcaatgattattttcaataaagatatgagatctagagattatgaaacaattaaaaataaatttagaccaggtcatgcggattatacatattttaaaaagtatggaattagagattatagaggtggaggaagacaatctgcaagagaaactgctacaagagtggctgctggtgcaatagcaaaaaaagtcttacaaaaaaaaattggaaaaaaatacaaagttattggtgctgtaaactcaattggtattttaggatgtgacacaaaaaaatggaatgataattttatatttatcaattcattattttgtcctgataatcagttctaa

SEQ ID NO: 287455 - DNA, 508 bp, Unknown
  Bacterial polypeptide expressing nucleotide sequence isolated from the Sargasso Sea
gggaaaatatttacttggaattagaaaagctggatcatcttgtggagcaattattgaggttagagcaagaggagttcctttgggacttggagcaccaatatattcaaaattagatatggatcttgcagcagcaatgatgagcattaatgctgtaaagggagtaaatattggatcaggaattaactcggcaatgttaactggtgaggaaaactccgatgaaattttgaaaaaaaaaggtaaaactagttttaaatcaaataatgcaggaggaattcttgggggaatatctactggacaagaaataaatgtctcatttgcagtaaaacctacatcatctattttatcatcgaggaaaacaatcgataggtttgggaagaatacaacaatatctgtaaaaggaaggcatgacccatgcgtaggaattagagcagttccaataggggaagctatgatgcattgtgtaattctcgatcactatttaatgaatacagctcagaataaaatctaa

SEQ ID NO: 287456 - DNA, 775 bp, Unknown
  Bacterial polypeptide expressing nucleotide sequence isolated from the Sargasso Sea
ccaggtcatgctgacttcacatattttaaaaaatatggaataagagattttagaggtggaggaagacaatcagcaagagaaacagcgtcaagagttgctgctggagcaatagctaagatagtattaaaaaatttgttaggaaaaaaatttagtgtttatggtgctgttatacaattaggattaatgggttgtgatagaaaaaattggaataataaagaaataagaaaaaacccgtttttttgtcctgataaaaaatcagtaaaactttgggaaaaatatttgatggcagtgaggaaatctggttcttcatgtggtgctactatagagcttagagcgaatggtattccagcaggacttggggcaccaatttactctaagcttgatactgacatagcaggtgctttaatgagtattaatgcagttaagggagtgaacataggtgcgggtatgagcgctgcccatttatcaggagaggaaaattctgatgaaatgagatctaaatctggaaagactaagtttaaaagtaataatgctggaggtatacttggtggtatttcttcgggacaagaaattattgcttcatttgcagtcaagccaacttcttctataattaatagtagagagacaattgataaaaagggtaagaatacaaaaatatctgttaaaggtcgtcatgatccatgcgttggtattagagcagttcctattggtgaggctatgctctcttgtgtgttattagatcactttttaatgaatagagcccaatgtggttaag

SEQ ID NO: 287457 - DNA, 832 bp, Unknown
  Bacterial polypeptide expressing nucleotide sequence isolated from the Sargasso Sea
atttacaatgaagataaaaaatctagagattatgaaacgataaaaaacaaatttagacctggacatgctgattacacttattttaaaaaatatggtatcagagattttagaggtggtggaagacagtcagcaagagagactgcttgtagagttgcagctggagccgtagctaaaatagttttaaaaaaaactttaggaatgaaatttaatatcattggagcagtaacacaattagggctaatgtcatgcaataaacaaaattggaaagactctgaaattagaaaaaatccttttttctgccctgataaaaaatcaataaaattatgggaaaaatatcttttagcagtaagaaaagcaggttcttcatgtggagcggtaatagaattaagagcatctggagttcctgtagggttgggtgctccagtctactcaaagttggatacggatattgctgcagctcttatgagtataaatgctgttaaaggagtgaatattggatctggaatgaatgcagcttttttaagtggtgaagaaaattcagatgagataagaaaaaaagctggaaaagtaaaattcaggactaatcatgcaggtggaattttaggtggaatttcctctggtcaagatattattgcttcttttgcggtaaaaccgacttcatcaattttaactagtagagagactatagataagaaaggtaaaaatacaaaaatttctgttaaaggaagacacgacccctgtgttggaataagagcagttcctattggagaagcaatgatgagttgcgttattcttgatcatcttctaatgcatcgagctcagtgtggttaat

SEQ ID NO: 287458 - DNA, 706 bp, Unknown
  Bacterial polypeptide expressing nucleotide sequence isolated from the Sargasso Sea
tgggagagtagctgctggtgctgtagcaaaacaattattaaaaaccttctctaacactgaaatactatcttgggtaaagcgtatacatgatattgattctgatataaataaagagaagatttctcttaaaaaaatagattctaatattgttagatgtcctgatgaaaaggtatcaacagaaatgatcgagagaattaaggaattaaagcgtcaaggagactcttgcggcggtgttattcaatgtctagtaagaaatgtcccctctggtcttggaatgcctgtttttgataaattagaagctgatttagcaaaggctttgatgtctttgcctgccacgaaaggctttgaaataggttcaggtttctctggaacttatttaaaaggaagcgaacataatgatgccttcatcaagtctgatgatattagtaagttaagaacaacatcaaacaattcaggaggtatacagggcggaataagtaatggtgaaaatatcgagatgaagatagcttttaaacctacagcaaccattgggaaagaacaaaaaactgtaaatgctgaaggtaaagaagtacttatgaaagcaaaagggagacacgatccatgtgttctaccaagagcagttcccatggttgatgctatgatagctttagtacttgctgatcatttacttctaaatcatgctcaatgtgacttaataaataagtag

SEQ ID NO: 287459 - DNA, 388 bp, Unknown
  Bacterial polypeptide expressing nucleotide sequence isolated from the Sargasso Sea
tatagcttcagcaattatgagtattaatgctgtgaaaggtgtaaatattggggctggaatgaattctgctcaattaatgggcgaacaaaattctgatgaaatatttaataaaggaaaaaaaataaaattttcttcaaataattctgggggtattcttggaggaatatctactggacaagaaataataatttcattcgctgttaaaccaacttcatcaattttattaaccagaaaaacagtagataaatttggaaaaaatacatctatatctgtaaaaggcagacatgatccatgtgtaggaataagggcagttccaataggtgaggctatgttaaattgtgtactgcttgatcactaccttcttaataaagcacagtgtggagattag

SEQ ID NO: 287460 - DNA, 574 bp, Unknown
  Bacterial polypeptide expressing nucleotide sequence isolated from the Sargasso Sea
tttgattgggaaaaatacaaataaaaattcatttttttgcccagataaaaagataattccaatttgggaagaatatttagatactattagaaaaaaaggcttatcggttggtgcaaaaatttttgttgaagctaaaaatgttcctgcgggtctgggtgagcctgtttacagtaaactagattcagatcttgcctcggctatgataagtatcaatgctgtcaaaggagtagagattggtcttggaaatgactctgttgatatcactggagctgaaaattctgatgaactcagagtgaataaaaataaaaagattattttttcctcaaataattctggagggatactaggtggtatttcatcaggacaagacattcaattatctgttgcaataaaacctacctcatcaattttaaaatcacaaaaaacaataaatgataaatataaaaatactactatatctactcgaggtagacatgatccatgcgttgggatcagagctgttccaatagttgaagcaatgaccgcatgtgtattagctgatcatttaatgagaaataaagctcagtgcggctag

SEQ ID NO: 287461 - DNA, 172 bp, Unknown
  Bacterial polypeptide expressing nucleotide sequence isolated from the Sargasso Sea
ccgcaaggaacagcagaccgtggattccgacggcaaggccaccaccctggccggcaagggacgacacgatccctgtgtgttgcccagggctgtgccgatggtggaggccatggtggcgctggtgctggcggatcacctgctgcggcagcagggacagtgcagcctctggtga

SEQ ID NO: 287462 - DNA, 645 bp, Unknown
  Bacterial polypeptide expressing nucleotide sequence isolated from the Sargasso Sea
aaattggtaagaaatatcaagctgttggtgctgttacgcaattgggaatattaggatgtgacttaaagaagtggaaagacaaaacaatatctagtaacccgtttttttgtcctgataaaactgttattaaactttgggagaaatatttacttggaataagaaaagctggatcatcttgtggagcaattattgaggttagagcaaggggagttcctttaggacttggtgcaccaatatactcaaaattagatatggatcttgcagcagcaatgatgagcattaatgctgtaaagggtgtaagtattggatcgggaatgaattcggcaatgttaactggtgaagaaaactctgatgaaattttgaaaaaaaaaggtagaactaatttcaaatcaaataatgcaggaggaattcttggaggaatatctactggacaagaaataaatgtttcgtttgctgtaaaaccaacatcatctattttatcatcaaggaaaacaatcgacagatttggcaagaatacgacaatatctgtaaaaggaagacacgacccctgtgttggaattagagcggttccaattggagaggcgatgatgcattgtgtgattcttgatcattatttaatgaatatagcacagaataaaatttaat

SEQ ID NO: 287463 - DNA, 686 bp, Unknown
  Bacterial polypeptide expressing nucleotide sequence isolated from the Sargasso Sea
tgttgcagctggagcgattgcaaagaaagttttaatttctaaaattggaaaaaagtacaatgtagttggtgctgtaactcaattgggaattcttggctgtgatgtaaataaatggaaagataaatttataaataaaaatccattcttttgtccagacaaatcttcaataaaactttgggaaaaatatttgctttcaattagaaaagctggttcttcttgtggagcaataattgaagtaagagcaagaggggttcctttgggtttaggtgcaccaatatattcaaaattagatatggacttggcctctgctatgatgagtatcaatgcagtaaaaggagtaaatataggttctggaattagttctgctcaattaactggagaacaaaattctgatgaaattttaagaaaaggaaataaaataaaatttaaatcaaataatgccggtggtatactaggtggtatatcaagcggacaagaaattatagtatcttttgctgtaaaacctacttcatcaattttaaattctcgtaaaacaatagataaatttggaaaaaatacaaatatatcagtaagaggaaggcatgacccatgtgtaggtattagggcagtgcctattggtgaagctatgatgcattgtgttattttagatcactacctaatgaacaaagcacagtgctatagctaat

SEQ ID NO: 287464 - DNA, 637 bp, Unknown
  Bacterial polypeptide expressing nucleotide sequence isolated from the Sargasso Sea
atgtcatttaatacttttggaaagttatttagatttaccacttggggggaatcgcatggtcctgctataggatgcgtcgtagatggctgccctccaaatattccaataaatgaaagcgatatacaaaaagaacttaataaaagaaaaccaggacaatctaaatttacaactcaaagaaaagaggacgacaaaattaatattttatctggtgtttttgagggtagaacaactggaactccaatttccctaataatttataataaagatatgagatctagagactatgagacaataaagaataaatttagaccagggcatgcagattatacttatttcaaaaaatacggcatccgggattacagaggtggtggaagacaatctgcccgtgagactgcggctagagttgctgccggcgctattgctaaagttgttttgaaaaataaaattggtaagaagtaccaagcagttggtgctgttacacaattaggaatattaggatgtgacttaaaaaaatggagagacaaaacaatttctagtaatccatttttttgtcctgataaaacggttattaaactttgggaaaaatatttacttgcaattagaaaagctggatcatcttgtggagccaattattgag

SEQ ID NO: 287465 - DNA, 265 bp, Unknown
  Bacterial polypeptide expressing nucleotide sequence isolated from the Sargasso Sea
aaaatttaaatcaaataaagctgggggtatacttggaggtatatctagtggacaggaaattaaattgtcttttgctgtaaaaccaacctcatcgattctgtcctcaagaaaaacaattgataaatttggaaaaaatacatctatatcagttaaaggtcgtcacgacccatgtgttggaataagagcagtccctattggtgaagcaatgatgcattgtgtattactcgatcattatttaatgaacaaagctcagtgcagcaactaa

SEQ ID NO: 287466 - DNA, 437 bp, Unknown
  Bacterial polypeptide expressing nucleotide sequence isolated from the Sargasso Sea
tatgaatggaaatcaattcggaaaattatttcaaattactacttttggagagagtcatggacctggaattggatgtactatctctggctgccctgccggagttaaaatagatgacagctatatccaacacgacttggacaggaggcgacctggacaatctatggttactactagtagggatgagcccgaccaagtttcccttttatctgggttagaaggtggctacacaactggggcacctattggaatggtcatatacaataaagatgcaaaatccaataagtacgaaccatttgtcaccgctcctcgccctagtcatggtgattttacctactcagcaaaatttgggacaaggagttgggctggaggaggccgatcgagcgctcgggaaactgccaattgggtcgcagctggtgcagtggctaaaaaagtactcg

SEQ ID NO: 287467 - DNA, 886 bp, Unknown
  Bacterial polypeptide expressing nucleotide sequence isolated from the Sargasso Sea
atggaaaagcgacgacctggacaaagtaaatacactacacagcgacgcgagaaggatttggtagaaattttatctggcgtctttgaaaacaaaagtacaggaacgccaatccagctcttgataaagaatactgatcaaagatccaaagactatagtgaaattgaaaatacgttccgcccagggcacgctgatataacttattggcagaaatatggtattagagattaccggggtggtggtaggtcttcagcaagagagacagcttctcgtgtcgctgcgggagcggtggctcgtgccgttttatcagaattgatgccagaccttcgaatacaagcttacctaactcaaataggtccggataaaattgataaaagtaattttgattggcaagaaatagagcaaaatgatttttggtctccggacaaaaaagcagcggaaagatgggctaaatatctagataagatcaggaaatcacataattccacaggtgctgtaattgaggtacaagcaaccaacgtacccgctggattaggtgcgccaatttatggaaaattagatatggatatagcttctgcattaatgtccataaatgcagtaaagggtgttgagattggtgaaggaatgcaagctgcagaattgactggttcagaaaatgctgacgaaatatttttagggaatgacggtaagccagagtatacttctaatcatgctggcggtattttgggaggtatatcaacaggacaacatattattgctagatttgcggtaaaaccaacttcctcaattttgagttcacgtaagtcgataactaagactggcgaaccaactaaagtggttactaaaggccgccatgatccatgtgttgaatacgagcagtgccggtagc

SEQ ID NO: 287468 - DNA, 538 bp, Unknown
  Bacterial polypeptide expressing nucleotide sequence isolated from the Sargasso Sea
aatgtcatttaatacttttggaaagttttttcgttttactacatggggagagtcacatgggccagctataggatgtgttgttgatggttgtccgcccaatgtagctttaaaacaggaagatattcaaaaagaactaaataaaagaaaaccaggacaatcaaagtttaccacacaaagaaaagaagatgataaagttgagatattgtctggtgtttttgagggaaaaacgacagggacccctatatcactaattatttataacaaggatatgaggtcaagagactatgaaaccataaaaaataaatttagacctggtcacgcagattttacatattttaaaaaatatgggattagagattaccgaggaggtggtagacagtcagcaagagaaactgcctctagagtggccgctggagcgatagcaaaaaaagttttagaaaaaaaaatagggaaaaaatataaagtcgtaggagcggttacccaacttggaatattaggttgtgatgtaactagatggaatgataaagaaatagagaaa

SEQ ID NO: 287469 - DNA, 1040 bp, Unknown
  Bacterial polypeptide expressing nucleotide sequence isolated from the Sargasso Sea
gatgtcttttaatacttttggaaaaatatttagatttacgacatggggtgagtcacatggtcccgctataggctgtattatagatggttgtcctccaaatatagcaatttcggataaagaaatacaggcagacatggacaggagaagacctggaaacacaaaatttgtctcccaaagaaaagagtcagataagatagaaattttatctggagtatttgagggaaaatcaacaggtactccaatttcaatattgataagaaatgaggacaaaagatcgagggactatgagtcaataaaaaataaatttagaccaggtcatgctgatttcacatattttaaaaaatatggaataagagattttcgaggaggtggaagacaatcagcaagagaaacagcttcgagagttgctgctggtgctatagcaaaaatagtattaaaaaatttattaggtaaaaaatttagtctttatggtgctgttgtacagttgggattaatgggatgtgataggaaaaattggaataataaagaaataagaaaaaatccatttttttgcccagacagaaagtctgttaaactctgggaaaaatatttaatggcagtaaggaaatctggatcatcatgtggtgcagtaattgaactcagggctaatggtattcctgcaggacttggggcaccaatttactctaaacttgatactgacatagctggagctttgatgagtattaatgctgttaagggtgtaaatataggtgcgggaatgggtgctgcatatttatcaggagaggaaaattctgatgaaatgagatctaaatctggaaaggctaagtttaaaagtaataatgccggaggaatacttggtggtatttcctcaggacaagaaattattgcttcatttgcagtaaaaccaacttcatcaataattaacagtagagaaacaattgataagaaagggaaaaatacaaaaatatctgtgagaggccgccatgatccttgtgttggtataagagcagttccaattggtgaggctatgctttcgtgtg

SEQ ID NO: 287470 - DNA, 1099 bp, Unknown
  Bacterial polypeptide expressing nucleotide sequence isolated from the Sargasso Sea
atgagcggcaacaccatcggtaccctattcgcagtcaccaactttggtgaatcccacggcccggccattggctgcgtgattgacggctgcccgcccggcatgcccctcaccgaggctgacatccagaccgacctggaccggcgtcgccctggcaccagccgccacgtcacgcagcgcaacgagcccgatgcggtggaaatcctctccggcgtgtacgagggcaagaccaccggcactcccattgccctgctgatccgcaacaccgatcagcgcagcaaggactacagcaacatcgccgagagcttccgcccgggccatgccgactacacctactggcacaagtacggcatccgcgacccgcgcggcggcggccggtcttccgcccgcctgacggcgcccacggtggctgcaggtgccgtggccaagaagtggctggcgcagcaatatggcgccgagttccgcgcctgcatgacccagctgggcgaactgcccattccgttcgagagctgggaccatgtgcgcagcaaccccttcttcgcccccgtggccgacgtgcagcagtacgaggattacatggacgccctgcgcaaggccggtgactcttgcggcgcgcgtatccgggtgcaggccacgggcgtgccggtgggcctgggcgagccgctgtacgacaagctcgacgccgacattgcccatgccatgatgggcctgaacgccgtgaagggtgtggaaattggcgcaggctttgccagcgtggcccaccggggcaccatgcatggcgactcgatgacgccgcagggcttccgcaccaacaacgccggcggtgtgctgggcggtatcagcaccgggcaggacctggaggtgagcatcgccatcaagcccaccagctccatcatcagcccgcgcgagtccatcgatatccatggcaagagcaccgaagtgatcaccaagggccgccacgacccctgcgtgggcatccgcgccgcgccgattgccgaagcgcttctggcgctggtggtgatggagcacgcactgcgccaccgcgcccagtgtggcgacgtggtaccgcccgtgccgcccatccaggcctcgtttctgtaac

SEQ ID NO: 287471 - DNA, 1087 bp, Unknown
  Bacterial polypeptide expressing nucleotide sequence isolated from the Sargasso Sea
atgtcatttaacacttttggaaaaaattttcgatttacaacatggggggaatctcatggagaggctattggatgtgtaattgacgggtgtcctcctctaataccgcttaaggataaagatattcaaaaatatttggatatgagaaaaccaggaaaaaatcgatttgttactcaaagaaaagaagatgataaagtttcaattttatctggtgtctttgagggaaaaacaactggaactccgataatgctgttaatttggaacaaagatcagaaatcaaaagactacagcgatataaaaaataaatttagacctggccatgctgatttgacatattttttgaaatatggagtaagagattatagaggtggaggtcgttcttccgcaagagaaactgctagtagagtagctgctggcgctgttgcaagaaaggtagttggccatattttaaaaaaagatattttaattcaaggtgcagttactcaagttggtaagcttgtcatcaatcaaagaaattttaattggaatgatgtaaagaaaaattcatttttctgtcctgataagaaaatagttaaagtttgggaagagtacctagatgaaactagaaaaaaagggtcatcattgggtgcaaaattattaataaatgcaagaaatgttcctgccggacttggagaacctgtatatggtaaattagatgctgaacttgcaggtgcaatgatgagcattaacgctgttaaaggcgttgaaataggagctggtaatgaggctgttgaattatcaggagatgagaactccgacgaaataagagctaataaaaataaaaaaattaccttttcttctaataattctggaggaatcttaggtggtatatcaagtggacaggacttaaatttatcagtaacgatcaaaccaacgtcatcgattttaaaggcaaaaaaaacaattaataataaatttcaaaatacatcgatttcaacaaagggccgtcatgatccatgtgtaggtttgagagctgtccctattgctgaggctatgatggcgtgcgttttagcagatcatatattgcgcaatagagcgcaatgtggctaaa

SEQ ID NO: 287472 - DNA, 825 bp, Unknown
  Bacterial polypeptide expressing nucleotide sequence isolated from the Sargasso Sea
atgaagatatgagatcaaaagattataagatatcaaaagataaatttagactgggtcatgctgactttacctattttaaaaaatatggaataagagattatagaggtggagggaggtcttctgccagggaaacagctacaagagttgctgctggtgcaatagccaaaaaagttttagaagaaaaattaggtaaaaaatttaaaatttctgctggtgttactcaattaggtattcttggttgtgacactacaaaatgggatgaaaaaataatttataaaaacccatttttttgccctgataaatcaatgttaaaaatatgggaaaaatatttgcttagtataagaaaagctggatcttcctgtggtgcagtaattgaagtaagagcgaatggagttcctgcagggttaggagctccaatttacgcaaaattagattcggatattgcatctgcaatgatgagtattaatgccgtcaaaggagtaaatattggttctggaatgaattcagctcaattatctggggaagaaaattcagacgaaatatctcaagacaaaaagaaaatgagatttgcttcaaataatgctggtggaatacttggtggtatttcatcaggacaagatataattgtttcttttgctgttaaacctacttcttcaattttaaaaagtagaaaaacaattaataaatttggaaaaaatacaactatctctgtaaaaggtagacatgacccttgtgtaggaataagagctgtgccagtcggtgaggctatgctttcgtgtgttttattggatcattatcttatgaataaaggacagtgtggttgat

SEQ ID NO: 287473 - DNA, 778 bp, Unknown
  Bacterial polypeptide expressing nucleotide sequence isolated from the Sargasso Sea
atgtcatttaatacttttggaaagttatttagatttactacttggggagaatctcatggcccagctataggatgcgttgttgatgggtgtcctccaaatatcccaataaaagaaagcgatatacaaatagaacttaataaaagaaaaccaggacagtctaaatttacaactcaaagaaaagaagatgataaaattaatattttatcaggtgtttttgagggtagaacaactggaactccaatttctctaataatttataataaagatatgagatctagagattatgagacaataaagaataaatttagaccaggacatgcagattatacttattttaagaaatacggaatccgggattatagaggtggtggaagacaatctgctcgcgagactgcggcaagagttgcggcgggtgctattgcaaaagttgttttaaaaaataaaattggtaaaaattatcaagctgttggtgctgttacgcaattaggaatattaggatgtgacttagagaagtggaaagacaaaacaatttctagtaacccatttttttgtcctgataaaactgtgattaaactttgggaaaaatatttacttgggattagaaaagctggatcatcttgtggagcaataattgaggttagagcaagaggagttcctttagggcttggagcaccaatatactcaaaattagatatggatcttgccgcagccatgatgagtattaatgctgttaagggagtgaatattggatcaggaatgaactcggcaatgttaactg

SEQ ID NO: 287474 - DNA, 852 bp, Unknown
  Bacterial polypeptide expressing nucleotide sequence isolated from the Sargasso Sea
aatgtcttttaatacttttggaaagttatttcgattcacaacatggggggagtctcatggacctgctataggctgtgttgtggatggttgccctccaaacataaaaattagtgagaaagaaattcaattagaattaaacaaaagaaaaccaggtcaatctaaatttaccacccaaagaaaagaggatgataaagtgcatattttatctggcatctttgaggggaaaagcaccggtactccaatatcgatgattatacataataaagatatgagatctagagattatgaaacaattaaaaataaatttaggcctggtcatgcagattatacatattttaaaaaatatggaattagagattatagagggggaggaagacaatctgctagagaaactgctacaagagtagcagctggtgcaatagcaaaaaaagttttacaaaaaaaaatagggaaaaaatataaagttgttggtgctgtgactcaaattggtattctaggatgtgataaaaaaaaatggaatgataattttatattatcaaattcattattttgtcctgatagatcagttttaaaattatgggaaaaatatttactaagtataagaaaggccggatcttcatgcggagctgtcattgaggttagagcaaggggtttgcctgctggactaggtgcaccaatatattcaaaacttgatatggatttagcttcagcaatgatgagtattaatgcggtaaaaggagttaatattggctctggaatgaattcagctctgttaactggtgaagaaaattccgatgaaatatttcaaaaaagtaaaaaaataaattttaaatctaataatgctggtggtat

SEQ ID NO: 287475 - DNA, 499 bp, Unknown
  Bacterial polypeptide expressing nucleotide sequence isolated from the Sargasso Sea
atggctagcaattcttttggtaatatttttagatttactagttttggggagagccacgggaaagttattggatgtgtggttgacggtgtacctccaaatatttcattgagcgaaaaagatattcaaaaatttcttgatagaagaaagcctggtcagtcaaaatttgtaagccaaagaaaagagagcgataaggttgaaatactatctggagtatttgaaaacaaaaccacaggtcaccctattgcattaaatattgtaaacgaagatcatagaagtaaagattattctgaaattgctaaaaaatttagacctggtcatgcagatataacttactatgaaaagtataagattagagattaccgaggtggaggtagatccagtgccagagaaactgctgtaagagttgcggcaggagctattgctagtaaagttttaaattttaaattgaaaaataaaattaaaattagagcaagtgttatacaaatttggccctcacaaa

SEQ ID NO: 287476 - DNA, 507 bp, Unknown
  Bacterial polypeptide expressing nucleotide sequence isolated from the Sargasso Sea
aatgtccgataattcttttggcacactttttcgcgtcaccacctggggagagagccatggtccttctatcgggtgcgtcgtggacggaactcctccgggtatagctttaaaggaggcagatattcagtcatggctagacaaacgaaggccggggacctcacgatttgttactcagaggaaggagccagacaaagtaaaaatcttatcgggtatatttgaaggcaaaaccaccggaacacccattagtttattaatagagaatcaagacgcaagaagtaaggattataaagcaataaaagataaatttcgaccaggtcatgcggattttacttattggaaaaaatacggttttcgtgattttcgtggtggtggcagacctagtgcacgtgagactgcaatgcgggtagccgcaggcggaattgcgagaaaagttttgggcagatccgttaaaattcggggcgccatgatccagttaggaacagaaaagatcgaccgagggcggggagc

SEQ ID NO: 287477 - DNA, 1099 bp, Unknown
  Bacterial polypeptide expressing nucleotide sequence isolated from the Sargasso Sea
atgtcaggtaacagcttcggaaaacttttcactgtaaccacgtttggtgaaagccacggcattgcaattggcggtgtagtagacggttgccctccaggacttgagatcactgaagaagatcttcaggttgatttagacagacgtaagcccggcacctctcgttatactacggcgcgaagagaagacgatgaagtacaaattttatctggcgtatttgaaggtaaaactactggcaccagtattggtttattaattaaaaataaagatcagcgaagccaagattacggcaatatcaaggaccgctttcgtccaggccacgctgactatacctacgatcaaaagtacggaagccgtgactatcgcggtggtggtcgttcgtctgcacgtgaaacggctattcgcgtagccgcaggtggtattgcgaaaaagtaccttaaagaagtgcacggtattgaggtattaggctatttgtctcagcttgggccggtaacagtagataaggttgatcacagcgtaaccaacactaacccgtttttctgtcctgatgagtctaagctagacgcgctggacgagtacatgcgagaccttaaaaagtcaggcgacagcattggcgcgaaggtatcggttgttgcgaagaatgtgcctgtaggcctaggcgagcctgttttcgataggctagatgctgaaatcgcccacgccatgatgggaattaacgcagtgaaaggcgtggaaattggtgatggttttgatgttattaatcaaaaaggcagtgaacaccgcgatacgcttactcctgaaggattcacatctaatcatgcaggtggcgtgctaggcggcatctctaccggtcaggatattgaagtacacatggcgcttaagccgacctcaagtatttcggttcccggtaaaactatcaataaagacaatgaagaaatcgatatcgtcaccaaaggtcgtcacgacccgtgtgtgggtatccgtgctgtacctattgctgaagccatgctggcactggtattgatggatcatctgctacgccaccgcgcgcaaaatgccggtgtgcagtcgaccacgaaaccaattgcgggtcaggcatagc

SEQ ID NO: 287478 - DNA, 1074 bp, Unknown
  Bacterial polypeptide expressing nucleotide sequence isolated from the Sargasso Sea
aatgtcatttaatacttttggaaaggtttttcgtttcacaacatggggtgagtcacatgggcccgctataggctgtgttattgacggttgtcccccattaattcaactaaatgaacaagatattcaaagagaattggataaaagaaaacctggtcaatccaaatttacaacccaaagaaaagaaagtgataaagtgcaaattttatctggggtctttgagggtaaaactacaggtactcctatatcattattaatctataatgaagatatgcgatcaaaagattacaaaaatattaaggataaatttagacctggacatgctgattttacatattttaaaaaatatggaattagagattatagaggtggtggtagatcttcagcaagagagactgctgctagagtagcggcaggagctatagcaaaaaaagttttgaaaaataaatttggaaaaaaatttaagatttcaggagctgtaactcagttgggaattcttgggtgtgatacaaaaaaatggaatgacaaaattattcataagaatccatttttttgtcccgataaatctatgttaaagatttgggaaagatatttattaaccataagaaaagccggatcttcatgcggcgctataattgaggttagagctaatggtattccagcgggtttaggtgctcctatatattcaaaattagactctgacatagcctctgcaatgatgagtatcaatgcagttaaaggtgttaatataggatcgggaatgaactcagcacacttatccggagaagaaaattcagacgaaatttcacaaaacaaaaaaaaattgaaatttcattctaataattcaggtggcattcttggaggcatctcatcaggtcaagaaatagtcgtatcctttgctgttaaacctacttcgtctattttaaaaagtagaaaaacaatcaacaaatttggaaaaaataccactatatctgtaaaaggaaggcatgatccttgtgttggtattagagcagtaccagttggtgaagctatgctttcatgtgttttactagatcattatatgatgaataaagcaca

SEQ ID NO: 287479 - DNA, 1051 bp, Unknown
  Bacterial polypeptide expressing nucleotide sequence isolated from the Sargasso Sea
acaacttggggagagtcccatggtccggcaataggttgtgttgttgatggttgtccacctaacgtaaaaattaaagaacaagatattcaaaaagaacttaacaaaagaaaaccaggccaatcaaaatttacaactcaaagaaaagaagatgataaagtaaatattctttcgggtgtctttgagggtaagacaacagggacaccaatatcaatgattatctataataaagatatgagatcaagagactatgaaactataaaaaataagtttagacctggtcatgccgactatacttatctcaaaaaatatggaattagagattttagaggtggcggtagacaatcagctagggaaaccgctggaagagttgcagctggagctatagcaaaaaaaatcctagaacaaaaaattggaaaaaaatataaggtaattggagctgtaacacaattaggtatattaggttgtgatgaaaaaaaatggaatgataaatttattttaaaaaacccatttttttgtccagataaatctattgtaaaactttgggaaaaatatttattaagcattagaaaagctgggtcgtcttgtggtgcaacaattcaagtaagagcaaaaggagttcctgttggtttgggagccccaatatattcaaaattagatatggatcttgcagcagcaatgatgagtataaatgctgtaaaaggagtaaacattggatcaggaatgaattctgctcaattaacaggggaacaaaattctgatgaaatttttcaaaaaggaaaaagaactaattttaaatcgaacaatgctggaggtattctcggaggtatatcttcaggtcaagatataattgtttctttcgcagtaaaaccaacttcctcaattcactctaaaagaatgacaatcgataaatttggaagaaatacctcaatatctgtaaaaggaagacatgatccgtgtgttggcattagagctgtgccaattggcgaggcaatgatgcactgtgtaatactggatcactatttgatgcacagcgctcaatgcaaaagctagt

SEQ ID NO: 287480 - DNA, 1084 bp, Unknown
  Bacterial polypeptide expressing nucleotide sequence isolated from the Sargasso Sea
tatggctagtaatgccttcggaaagatttttcagtttagtacttggggtgaaagccatgggaatgctatcggaggtgtcgtcgatggcgtaccacctctaattcctatcgtcgaggaagacatccaatattacatggacaagcgaaaaccgggacaatctcgttttacaactcaacgcaaagaaccagataaagtaaaaatcttatccggcgtatttgaaaataaaacaactggcacaccaatcagcttgcttattcaaaataaagaccaacggtcaaaagattatggcgaaatcaaggaccaatttcgccctggccatgcagattttacctatcaaaaaaaatatgggatacgcgactataggggtggcggtcgatcttcagcccgagaaaccgctatgcgtgtagccgctggggctatagcgagaaaagttttagaattaaagactggaaacaaaatttcgataaaaggtgcattggtgcaaattggtcctcacaaaataaacagaaaaaattgggactggaatcaggtggaacgaaatcctttctggtcaccagacgcagagaccgccgtgaaatgggcggattttttagatgacatccgtaaaaaaggctcatccgccggtgcagttgttgaaattgaaattaatggtattcctgctgggcttggtgaaccaatatatggaaaattagacagtgacctagctaatgcgatgatgtctataaatgcagtaaagggcgtggaaataggagatggctttgatttggtcacaacaccaggcgagttagcttcggatgaaatcagaatatcagacggggaaccggtttttttaacaaataaagcaggcggaattttgggtgggatatctaccggccaacccattatagtgcgatttgcaataaagcctactagttctattcttactccgagacgctcaatagatacattagggaatgaagtggaagtcagaacaaagggaagacatgacccgtgtgtggggatacgcgcggttcccgtcggtgaagcaatggcggcctgcgtactagcagaccacgctctcagacatcaggcacaatgttattaa

SEQ ID NO: 287481 - DNA, 981 bp, Unknown
  Bacterial polypeptide expressing nucleotide sequence isolated from the Sargasso Sea
gatgtcttttaatacttttggaaaaatatttagatttacgacttggggcgagtcacatggtccagctataggctgtattatcgacggttgcccaccaaatataccaatttctgagaaggaaatacagttagatatggatcgtagaagacctggcaacactaagtttgtgtctcaaaggaaagagtcggataaaatagaaattttgtctggcgtatttgatggaaagtctacggggactcctatttcaatattaataagaaacgaagacaaaagatctagagattatgaatcaataaagaataagtttagaccaggccatgctgatttcacatattttaaaaaatatggaattagagattttagaggaggaggaagacagtctgcaagagaaacagcctcgagagttgctgctggtgctatagctagaatagtattaaaaaatttattaggaaaaaagtttagtgtttacggagctgttatacagttaggattaatgggctgtgatagaaaaaattggaataataaagaaataagaaaaaacccatttttttgccctgacaaaaaatcagtaaaactttgggaaaaatatttgatggcagtaagaaaatctggttcatcatgtggtgctataattgagttaagagcaaatggtataccagcaggacttggtgcaccaatttactctaaacttgatactgacatagcaggtgctttaatgagtattaatgctgttaagggagtaaatatcggtgcaggtatgggtgctgcatatttatcaggggaagaaaattctgatgaaatgagatctaaatctggaaaagctaaatttaaaagtaataatgctggaggaatacttggtggtatttcatcagggcaggaaataattgcttcatttgcagtaaagcctacttcgtcaataataaatagtagagaaacaattgataaaaaaggaaaaaatacaaaaatatctgtcagaggacg

SEQ ID NO: 287482 - DNA, 1090 bp, Unknown
  Bacterial polypeptide expressing nucleotide sequence isolated from the Sargasso Sea
atggcaggtaatacttttggaaaaatctttactttgacgactttcggcgaaagtcatggcactgctttgggttgtattttagatggatgtcctcctggtttagagatttcagagtcagatatacaaaaggaattagataaaagaaagcctggatcttccaagtacacgactcaaagaaaagaagaagataaagttgagatactttctggagtttttgaaggaaaaaccacaggaactcctattggtatgattatcaagaataaagatcagaaatctaaagattatgataatttaaaagatgtttttaggccttctcatgctgattattcctatactcaaaagtatggaataagagatcatagagggggaggaagagcatcagcacgagaaactgtaatgagagtagctgctggagccatagccaggaagttcttaaaggagaaactaaatctggatatagttggatatttatctcagattggtaaattgaagattaacgaagttgattttaatgagattcccaataactcttttttctgtccggatgaaggtcttataaaagaaattgaacttttaatagatgacctcagaaaagaaggcgattctgtaggtgcccagatcagtattgctgttaagaacatgcctttaggtctcggcgagccagtttttgataaattagatgcagatattgctaaagcaatgatgagtattaatgcagtaaaaggagttgaattgggaggcggatttagcttggttgagtcaaaaggttctgaagtaagagatgagatggcttctgatggatttaaaaaaaacaactctggcggctcagctggaggaatatcaacaggtcaagatttaatagtaaatattgccttaaagcctacctctagcatcaataaagaaggcaagaccatagataaagagggtaaaaacactaagattcaagtaactggaagacatgacccgtgtgtaggaataagggctacgcctatagctgagtctatgatagctttggttttaatggatcattatcttagaaacagagctcaaaatgctgatgtagatactaagccactgttagaagattaaa

SEQ ID NO: 287483 - DNA, 1063 bp, Unknown
  Bacterial polypeptide expressing nucleotide sequence isolated from the Sargasso Sea
atgcctggaaatagtcacggacaattgttcaaagttaccacatatggcgaaagccatggtgaggctattggttgtataatagatggttgtccaccaaatctcaagattgatattgaagatattcaaagagatttagataggcgaaaacctggcaaaacaaggcacacttctcagagaagagaatcagataaggtaaaaatattgtcaggtgtttttgaaggaaaaaccactggcactccaattagtttgatcatctataatgaagacgcaagaagtaaggactactcagaaattaaagacttatatagaccggggcacgcagatataacctacgatcagaaatatggtttaagggactataaaggtggaggaagatcttcagcaagagaaacagcaacgagagttgcggcaggtgctatagctaaattatatttaaaagaacatttcaatttaaatattcaaggatatgttgctcagcttggaccaattgtttcagataaaaaaaattatgctgatattgaaaaaaatccttttttctttccaaataatgaaaaggttaaggaccttgaagattatatggatgctttaagaaaagaggggaattctattggagcaagaataaatgtaatggctactaacgtgccagctggtttaggggaaccagtgtttgatagaatagatgcagatattgcaaaagcaatgatgagtataaatgctgttaaagcagttgaaattggcgcaggatttttgtctgttacgcaaaagggtacagagcatagagatgaaattgattcaaaaaaaggatttttaagtaataattcgggaggtactttaggtggaattacctcaggccaagatatagaggttagtattgcaataaagccaacttcaagtatcaggttagaaggaaaaacaatcgataacaaaggcaaaaatgcaaaggttgttacaaaaggacgccatgatccttgtgtaggaataagagcagttccaatcgctgaagcaatgctcgcattagttttaattgaccacgctcttagacataaggcacaaaatttataat

SEQ ID NO: 287484 - DNA, 580 bp, Unknown
  Bacterial polypeptide expressing nucleotide sequence isolated from the Sargasso Sea
atgtcaggtaatacgtttggaaaattatttaaaattacgacttttggagagagtcatggcactgctatgggatgcgttttagatggctgtccaccacaaatagagttaacaaaagaagatattcagcatgaattagatagaagaaagcctggtcaatcagatgtaactacacaaagaaaagaagatgatgctgtagagattttatctggagtttttgaaggaaaaactcttggaacacccattgggatgattatttataacaaagaccaaaaatctaaggattattcaaacataaaagatgtttttaggccaaatcatgctgatattacctatcaagcaaaatatggttatagagactatagaggtggtggaagagcaagtgcaagagagactgtgaattgggtagctgcaggagcaattgcaaagaaaatacttaaaaaggaaggagtttcagttcatggctttgtttctgaaataggacaagttaaagctgattcaattaatcataaagatataaataataaatactttttttgtgatgaatcaaaattatctgatttagattcaatgttttatgatt

SEQ ID NO: 287485 - DNA, 999 bp, Unknown
  Bacterial polypeptide expressing nucleotide sequence isolated from the Sargasso Sea
aatgtcatcaaatacatttggtaaactttttagatttacaacctggggagagtctcatggtcctgcaattggctgtgttatagacggatgtcccccaaatattcaactaaatgaaaaagatattcaaaaatttctagataaaagaaaaccaggaacctctaaatttgttacccaaagaaaagaagatgataaagttttgattttatctggtgtatttaatggaaaaacaacaggaacccctatttcactcatcatatggaataaagatcaaaggtcaaaggactatggtgatataaaaagtaaatttagacctggtcatgcagatttaacttattttttaaaatatcaaaatagagattaccgtggtggaggaagatcttcagcaagagaaacagcatgtagagttgctgctggtgctatagcaagaaaggttattaagcatttaactaaaaaggaaatcttaatacatggtgcggttgtccaggttggagaaatagctattaatccaagaaactttgattggaaaaatacaaataaaaatccatttttttgcccagataaaaagataattccaatttgggaagaatatttagatactattagaaaaaaaggcttatcggttggtgcaaaaatttttgttgaagctaaaaatgttcctgcgggtctgggtgagcctgtttacagtaaactagattcagatcttgccttggctatgataagtatcaatgctgtcaaaggagtagagatcggtcttggaaatgactctgttgatatcactggagctgaaaattctgatgaactcagagtgaataaaaataaaaagattattttttcctcaaataattctggagggatactaggtggtatttcatcaggacaagatattcaattatctgttgcaataaaacctacctcatcaattttaaaatcacaaaaaacaataaatgataaatataaaaatactactatatctactcgaggtagacatgatccatgcgt

SEQ ID NO: 287486 - DNA, 920 bp, Unknown
  Bacterial polypeptide expressing nucleotide sequence isolated from the Sargasso Sea
tatgtcagggaatacatttggaaaattatttcaagttacaacttatggggagagccatgggaaggcgcttggctgcattatagatggttgcccgcctcaattagaactatcttctgatgatattcaatttgaacttaaccgcagaaggccaggtcaatctgatgttacaactcaaagaaatgaggatgacattgtcgaaattttatctggcgtatttgaaggtaaaactcttggaacaccaattagtttaattatttataatcaagatcaaagatcaaaagactattctaagatcaaagatgtttttcgtcccaatcatgcagatataacctaccaagctaaatatggtcacagagactatagaggaggaggtcgatcaagcgcaagagagactgctatgagagttgctgctggcgctattgcaaaaaaataccttaactctcttgggatttacactgatggctatgtcactcaaataggatcaatttcagcagatgcaattaatttaacaaacgctaaaagtaacaaatatttttttgctgatgagtctaagttggaagaattagatgttatgtttttggaattgattgaggagggtaattcagtaggagcaaagctgggagtaagagttacaaattgtccgataggcttaggtgagccagtctttgacaagattgatgctgatatagctaaagcgattatgagtattaatgcagtgaaatctgttagcatcggaaatgctcagaatatacttgatcttagaggctctgaggctagagatgagataacaaaagaaggctttaaatcaaataatgcaggcggtatcttaggtggtattacaaatggtgatttgatagagcttgaatttattattaagccaacatctagcattaaatctcaaggccaaactatcaatacat

SEQ ID NO: 287487 - DNA, 520 bp, Unknown
  Bacterial polypeptide expressing nucleotide sequence isolated from the Sargasso Sea
atgttaaaaatttgggaaaaatacttattaagtattagaaaagctggatcttcatgtggagcgataatcgaagtaagagcaaacggtatccctgctggattaggagcacccatctactcaaaattagactctgacatagcatcagctatgatgagtataaatgctgtaaaaggagttaatattggctcaggtatgaactcagcacaattatcaggtgaggaaaattcagatgaaatttctcaaaatagaaaaaaaacaaaatttaaatctaataacgctggagggattctagggggtatttcttcgggtcaagaaatagttgtttcttttgctgtaaaaccaacttcttcaattttaaaaagtagaaaaacaatcaataaatttggcaagaatacaagtatatcagtaaaaggtagacatgatccctgtgttggtattagagctgtgcctgtgggtgaagcaatgttatcttgtgttttattggatcattatcttcttcacaaagctcagtgtagttaac

SEQ ID NO: 287488 - DNA, 1072 bp, Unknown
  Bacterial polypeptide expressing nucleotide sequence isolated from the Sargasso Sea
aatgtcatctaattcaattggaaaaattttctccttttcaacatggggggagagtcacggtaaagcaatgggttgcgtaattgatggagttccttcaaatattgaacttagtgaaaatgatatacaaccatatcttgaccttaggaaacctggtcaatctaagtacacaactcaaagaaaggaagatgataaagtagaaattttatcaggagtttttgagggtaaaacaacgggtcatccaatatcactaattatcttcaacaatgaccaaagatcaaaagattactccgaaataaaagataaattccgacctggtcatgctgattttacatattggaaaaaatatggcatcagagattacagaggtggaggaagatctagtgccagagaaactgcaatgcgagttgcagctggggctgttgcaagaaaagtaatttggaaaaaaattgataataaagttaaaatcacgggcgcacttattcaaataggtagctcaaaaattaattataataattggaatgaaagctgtattcatgaaaatgattttttctgcccagatgaaaaaattatacctaaatggcaagatcttattactcaagctagaaaagatggttcatcattaggtgcaataattgaagttcgggcatctggcgtaccagcaggactaggagaaccaatttatgataaactagactcagatatcgcgaaagcgctaatgacaataaatgcagttaaaggtgtagaaataggaaatggctttggtagcgtaaatgaagatggaaaaacaaatgtagacgagatgagcatcaaagatggaaagcctgcatttctaagtaataacaatggagggatacttggaggtattagttctggacaagatataatatgccgttttgttgtaaagccaacaagttcaatttcaactgaaagaaaaacgatagatattaatttacaagaaacaacaatttcaactaaaggccgtcacgatccgtgtgttggcataagagcagttcctgtcggtgaagcaatgattgcgacgacaatcgcagatcatattcttcgtttcttataa

SEQ ID NO: 287489 - DNA, 925 bp, Unknown
  Bacterial polypeptide expressing nucleotide sequence isolated from the Sargasso Sea
tatgtcttttaatacttttggaaaaatatttagatttaccacatggggggaatcccatggtccagcaattgggtgtgtaattgatggttgtcctcctaatatccctatatctgaaaaagatatccaaaaagacatggataggcgtagacctgggcagtctaaatttactacacaaagaaaagagtccgacaaagtgaatattctctctggtgtgtttgaaggaaagacaactggaacaccaatttcgattataattcacaatgaggataaaaaatctagagattatgagtctatcaaaaacaaatttagacctggtcatgctgattacacttattttaaaaaatatggtatcagagattttagaggtggcggaagacaatctgcaagagaaactgcttgcagagtagcggctggagctgtggcaaaaatagttttaaaaaaaattataggtatcaaatttaacataatcggagcagtaacccaattaggattaatgtcatgtgataaacaaaattggaaaaattcagaaataagaaaaaatccttttttctgtccagataaaaaatctgttaaattgtgggaaaaatatcttttggctgtaagaaaagctggttcttcttgtggagctgtaattgaagtaagagcatctggaattccagttggtttaggtgcccctatttattcaaaactagatactgatattgctgctgctcttatgagtataaacgcggttaagggagtcaatattggatcagggatgaatgcagcttttttaagtggcgaagaaaattccgatgaaattagaaaaagtgttggcaaagttaaattcaaaactaatcatgcaggaggaattttaggtggaatttcatctggtcaagatattgttgcatccttcgcagttaaaccaacttcttcaattttaact

SEQ ID NO: 287490 - DNA, 558 bp, Unknown
  Bacterial polypeptide expressing nucleotide sequence isolated from the Sargasso Sea
tatgccaggtaattcaataggacaagcatttcaagtaacaacatttggtgaaagccatggcaaagctattggctgtataatagatggttgtccgcctaatctcaagattgatctatctgaaattcacaaagatcttgatagaagaaagactggtaaaagccgtcatacgtcacaaagaagagaggaggataaggttgaaatactttctggattatttgatggcgtaaccacaggtactcctattagtttattaattcataataacgatgctagaagtaaggattacaacgatattaaaaatctatttagaccaggacatgccgacttcacatatcaaaaaaaatacggattacgagactataaaggaggaggaagatcctcagctagagaaactgctattagagttgcagcaggctcaatcgcaaaacaatatcttaaaaagaaatataaaacaaaaatatttggttacttaaaaagcttaggtccgattgaagctgagaaaattatagtaactgatatcgaaaaaaatcctttcttttttcctaataataaacagat

SEQ ID NO: 287491 - DNA, 1060 bp, Unknown
  Bacterial polypeptide expressing nucleotide sequence isolated from the Sargasso Sea
tatgtctggcaactcatttggaaaactattctccgttacaacttttggtgaaagtcatggaaaggcaattggctgtattgtcgatggatgcccacctggatacaaagtaagcgaaaaagatattcaacctgatttaaacaggagaaagccagggcagtcaaaatatacaactcaaaggaaagaagatgataaggttgaaattctatctggaacatttgaaggtataacaacaggtacccctataatgctcattattcataatattgatcagagaagcagagattatagtgaaatcaaaaataaatttcgaccaggtcacgctgattttacgtatcaacaaaaatatggtttgagagattatagaggtgcaggaagatcatctgcacgcgagactgttgcaagggttgcagcaggagcaattgcaaaaaaaattttaaaagaagtttgtaagactaaaatttatggctacgtttctcaactcggtaatatcatccctagtaaattcaataagaacgatattgaaaaaaatcctttcttctttccaaataacaagcaaataaaggatttagaggaatatattaattcaattagaaaagaaggtgattctattggagcaaaagtaagcgtagtagcaaacaaagtacccgtgggtttgggaaatcctgtctttgataaaactgatgctttactcgctcaagcgatgatgtctataaatgcagtaaaaggagtttctataggttctgggtttgaagttgttgatatgaaaggttctgaatgtagagatgaaataacaccaaaaggatttttatctaatcactctggaggtactttaggaggaataacaacaggtcaagatatttgtattcatttagctttgaaacctacttcaagtattttaaaagaaggaaaaacagttaatctaaaaaacaaagcaaccactatcaaaacaaaaggtcgtcatgacccatgcgtaggtataagagctgttcctattgcagaagcaatgatggctcttgtgttgttagatttgtatttatgtgacaaagcgcaaaacaaatga

SEQ ID NO: 287492 - DNA, 1084 bp, Unknown
  Bacterial polypeptide expressing nucleotide sequence isolated from the Sargasso Sea
atgtcatttaatacttttggaaagttttttcgtttcactacatggggagaatctcatggaccagccattggttgtataattgatggttgcccccctttaattgagctaaaagagcaagatattcaaaaagaattagacaaaagaaaaccaggccaatcaaaattcacaactcaaagaaaagagagtgataaagttcaaattttatctggagtctttgaaggtaagacgactggtacaccaatatccctaataatttataatgaagatatgagatcaaaggattataaaaatattaaagataaatttagacctggacatgctgattttacttattttaaaaaatatggaattagagattatagaggtggaggacgatcttctgcaagagagacagcaacaagagttgccgcaggagctatagcaaaaaaagttttagaaaaaaaattaggtaaaaaatttaagatttctgcagcagttacacagcttggtattcttggatgtgatacaacaaaatggaatgataaaatcatttacaaaaatccatttttttgtccagataaatcaatgttaaaaatctgggaaaaatatttgttaagtattagaaaagcaggatcctcctgcggtgcactaattgaagttagagctaacggggttcctgcaggtttaggtgcacctatttattcaaagttagattctgatattgcatctgcaatgatgagtataaatgctgttaaaggagtgaatataggatcaggcatgaaatctgccctattatctggtgaagaaaattctgatgaaatttctcaaaataataaaaaaatgaaatttagttcaaacaatgcaggtggaatacttggtggtatctcttctgggcaagaaatagttgtttcttttgcggtaaaacctacttcatctattttaaaaagtagaaaaacaattaataaatttggaaaaaatactacaatatcagtaactggtagacatgatccatgtgtaggtattagagcagtgccagttggagaggcaatgctttcgtgtgttttattagatcattatcttatgaataaagcgcaatgtgattaat

SEQ ID NO: 287493 - DNA, 820 bp, Unknown
  Bacterial polypeptide expressing nucleotide sequence isolated from the Sargasso Sea
tatgcgttctaaggattataaaaatataaaagataaatttagacctggtcatgctgattatacatactttaaaaaatatggaattagggattatagaggtggaggcagacagtcagcaagagagactgcatcaagagtagcagcaggggcaatagcaaaacaagttttgcaaaatattattgggaaaaaatatagtgtaattggagcagtaacacaattaggaatactaggatgtgacacagaaaaatggaatgacaatttcatcacaaaaaaccctttattttgtcctgataaaacagttttaaaattatgggaaaaatatttacttggaataagaaaagctggctcatcatgtggggctattattgaagttagagcaagaggtgttcctgtcggattgggagctccaatttattctaaattagatatggatttagcatcagctatgatgagtattaacgctgtaaaaggtgtaaatataggatcaggaatgaactctgctcaactttctggtgaacaaaattctgatgaaatgtctcaaaaaggaaagaaaacaaaatttaaatcaaataatgctggaggaattcttggaggaatttctagtggtcaagaaataatagtttcatttgcagtaaaaccaacttcatcaattctttctcaaagaaaaacaattaataaatttggaaaaaatacttcaatttcagtcacaggtagacatgatccttgcgtaggtattagggcagtacctattggtgaagcaatgatgcattgtgtaattcttgatcactacttaatgaataaagctcaatgtggctattaa

SEQ ID NO: 287494 - DNA, 1087 bp, Unknown
  Bacterial polypeptide expressing nucleotide sequence isolated from the Sargasso Sea
atgtcatttaatacttttggaaagatatttcgtttcacgacctggggggaatcccatggacctgcgattggctgtgttgtagatggctgtccacccaatattcaaatcaaggtagaggaaattcagaaagaactaaataaaagaaaaccaggacaatccaaatttaccactcaaagaaaagaagatgataaagtagaaattttatcgggtgtctttgaaggtaaatcaactggaacacctatttctatgattatttacaataaagatatgaggtcaaaagactatgggaatataaaaaataaatttagaccaggtcatgcagattttacttattttcaaaaatatggaattagagattacagaggtggtggtagacaatcggcaagagaaactgcttcaagagtagcagcaggagctatagcaaaaaaagttctacaaacaaaactaggaaagaaattcaatgttgttggggctgtgactcggctaggaattttaggatgtgatttaaataattggagagataaagatatatcaaaaaaccctcttttttgtccagataaatcagtattaaagttatgggaaaaatatttattaggtattagaaaagctggatcttcgtgtggagccataattgaagtaagagctaggggtgtacctgttggcctaggagcgccaatatattcaaaacttgatatggatttagccgctgcaatgatgagcattaatgcagtaaaaggagttaatatcggatctgggatgaattcagctcaattaactggcgaacaaaattcagatgagatgactaagaaaggaaaaaaaacaaaattttattcaaataatgccggaggtattttaggaggaatttctagtggtcaagaaatagtagtttcttttgctgttaaaccaacttcttctattttaacacaaagaaaaactatcgataaatttggaaaaaatacttcaatatctgttaaaggtaggcacgatccctgtgtaggtatcagagcagttccaataggtgaagctatgatgaattgtgtaattctagatcattaccttttaaataaagctcaatgtggaagttaat

SEQ ID NO: 287495 - DNA, 939 bp, Unknown
  Bacterial polypeptide expressing nucleotide sequence isolated from the Sargasso Sea
catgtcaggcaatacgtttggaaaattatttaaaattacgacctttggtgagagtcatggcactgctatgggctgtattttagatggctgtccgcctcaaattgaactcacaaaagaggatattcaacacgaattagataaaagaaagcctggtcaatcagatgtaactacccaaagaaaagaggacgatgcagtagagattttatctggagtttttgaaggaaaaactcttggaacacctattggaatgattatttataacaaagaccaaaaatctaaggattattcaaacataaaagatgtttttagaccaaatcatgccgatattacctatcaagcaaaatatggtcatagagattacagaggtggtggaagagcaagtgctagagagactgtaaattgggtagctgccggagcgattgcaaagaaaatacttaaaaaggaaggagtttcagttcatggctttgtttctgagataggacaagttaaagctgactcaattaattataaagatataaataataaatactttttttgtgatgagtcaaaactagctgacttagattcaatgtttaaggatttaattgaagagggtaactcagtcggtgcaaagttaggtgttgttgttaaaaattgtcctgtaggacttggtgatccagtttttgagaagttagatgctaatcttgccaaagcaattatgacaattaatgctgttaaatctgtatcgattgggaatgcagatgatcttttgaacttaaaaggttctgaggcaagggatgaaatgacttcatcaggatatgcttcaaataattcaggtggaattttgggaggcatttcaaatggagatgatataagcctaagttttattatcaagccaacctcaagcattaaatcaaaaggtaaaacagtaaataaagacggtgaggaagttgacattga

SEQ ID NO: 287496 - DNA, 1084 bp, Unknown
  Bacterial polypeptide expressing nucleotide sequence isolated from the Sargasso Sea
atgtcatttaatacttttggaaagtcttttcgttttacaacttggggagaatcccatggtccagctatagggtgtattatagatgggtgtccaccattaataccattaaaagaagcggatattcaaaaagaattaaacaaacgaaaacctgggcaatcaaagtttactactcaaaggaaggagagtgacaaggttcaaattctttcaggagtttttgagggaaaaacgactgggacaccaatatcattgataatttacaatgaggatatgcgttcaaaggattataatgatatcaaagataaatttagaccaggacatgctgatttcacatattttaaaaagtatggaataagagactacagaggtggtggtagatcatctgcaagagaaacagctgcaagagttgcagcaggtgctgtggcaaaaaaagttttagaaaataaattaggaaaaaaatttaaaatcactggagctgtaacccaacttggaatattaggatgtgatactaataaatgggatgataaaataatttctaaaaatccatttttttgcccagataaatcaatgttaaaaatttgggaaaaatacttattaagtattagaaaagctggatcgtcatgtggagcgataatcgaagtaagagcgaacggtattcctgctggattaggagcacctatatactcaaaattagactctgacatagcatcagctatgatgagtataaatgctgttaaaggagttaatattggctcaggtatgaactcagcacaattatcaggtgaggaaaattcagatgaaatttctcaaaatagaaaaaaaacaaaatttaaatctaataacgctggagggattctgggaggcatttcttcaggtcaagagataattgtctcttttgctgtaaagccaacttcttcaattttaaaaagtagaaaaacaattaataaatttggaaaaaatacaagtatatcagtaaaaggtagacatgatccatgtgtgggtattagagctgtgcctgtgggtgaagcaatgttatcttgcgttttattagatcattatcttctacacaaagctcagtgtagttaat

SEQ ID NO: 287497 - DNA, 797 bp, Unknown
  Bacterial polypeptide expressing nucleotide sequence isolated from the Sargasso Sea
aatgtcatttaatacatttggaaagttttttcgtttcactacctggggagagtcccatggtccagctattggctgtattattgacggttgtcctcctttaattcagctaaaagaacaagatattcaaaaagaattagataaaaggaaaccaggacagtctaaatttaccacccaaagaaaagagggagataaagttcaaattctttctggggtctttgaaggcaaaacgactggaactcctatatcactaataatttataacgaagatatgcgttcaaaagattataaggatatcaaagataagtttagacctgggcatgcagattttacatattttaaaaaatatggaattagagattacagaggaggaggaagatcatccgccagagaaacagcagcaagggttgctgcaggtgctattgccaaaaaagttttagaaaataaattaggtagaaaatttaagatttctgctgcggtaacacaacttggaattcttggctgtgatacaacaaaatgggataataaaataatctataaaaatccatttttttgtcccgataagtcaatgttaaaaatatgggagaaatatcttttaagtgttaggaaagcaggatcttcatgtggggcaataatcgaagtaagagctaatggagttccagctggtttaggtgcaccaatttactcaaaattagactctgatattgcttctgctatgatgagtattaatgctgttaaaggagtaaatattggttcaggaatgaactctgctcaattatctggagaagaaaattctgatg

SEQ ID NO: 287498 - DNA, 1084 bp, Unknown
  Bacterial polypeptide expressing nucleotide sequence isolated from the Sargasso Sea
aatgtcatttaatacatttggaaagctatttcgtttctctacttggggtgaatctcatggtcctgcaattggttgtatcgttgatggatgtcccccaaatattaatttgagtgaaaaagatatacaaaaagaactggataaaagaaaaccaggtcaatcaaaatttacaactcaaagaaaagaagacgataaagttcaaatattatctggagtttttgatggaagaaccactggtacaccaatatctttaattatttataataaagatatgagatcaaaggattacggaaatattaaggataaatttagacctgggcacgctgactttacttatttcaaaaaatatggaattagagactatagaggtggtggaagatcttcagcaagagaaactgcatcaagagttgcagctggtgcaatagcaaagttggtcttacagaaaaaattaggtaaaaaatttaaagttattggcgctgtcactcaattaggcatattaggatgtgatactgacaaatggaacgataaaataattacaaaaaatccatttttttgccctgataaatcaatgataaaactttgggaaaaatatttattaggggtaagaaaatctgggtcttcatgtggtgcagtgattgaaataagagcgagaggaattccagtaggattgggcgcacctatttactcaaaactagactctgatattgcatctagttttatgagtattaatgctgttaaaggagttaatattggggcaggaatgaactctgcacaactaagtggtgagcaaaactcagatgaaatttcacaaaaaggtaaaaaacttaagtttaattcaaataatgctggtggaattttgggtggtatttcaactggacaagaaattactgcttcatttgctgtaaaaccaacatcttcaatcttaacaacgagaaaaacaattaataaatttggaaaaaatacaacgatatctgtaacaggaagacacgatccatgtgttggcataagagctgtacctgttggtgaggcaatgatgaattgtgttttattggatcactatctgatgaacaaagcacaatgtcattaa

SEQ ID NO: 287499 - DNA, 637 bp, Unknown
  Bacterial polypeptide expressing nucleotide sequence isolated from the Sargasso Sea
aaaaagtacaaaacagttggtgccgtaattcaattgggtatccttggttgcgatacaaataaatgggatgacaaaattataagtaaaaatccattcttttgtccagataaatcaattctaaaattatgggaaaaatatttgcttggtataagaaaatctggttcttcttgtggagcagttattgaagtaagagttaaaggagttccagttggacttggtgctccaatttattctaagttagatatggacttagcatctgcaatgatgagtataaatgctgtcaaaggtgtcaacattggatctggcatgaattcagcatttttaaccggggaagaaaactctgatgaaataattcaaaaaggaaaatcgccaatatttaaatctaataatgctgggggaatacttggtggaatttcaagtggacaagatattgtaatctcatttgcagttaaaccaacttcttctattttaaaatcaagaaaaactatagataaatttggaaagaatacttcaatatctgttaagggaagacatgatccgtgcgtaggaattagagctgtgccaattggagaggcaatggcacattgtgttatattggatcattatttaatgaataaagctcagtgtgaaaaataaa

SEQ ID NO: 287500 - DNA, 1063 bp, Unknown
  Bacterial polypeptide expressing nucleotide sequence isolated from the Sargasso Sea
tctgactagttttggggaaagtcatggtaaatgtattggagcagttttagatggctgccctgcagggttggaattagaagaaaaagacattcaaaaaatgttagatttaagaaaaccaggacagtctcttgtatccacacaaagaaaagaaggagatattgtagaaattctcacagggacattcagaggatacacaacaggagcaccaattacaatggtcatttggaataaagaccagaaatcaattgcatatgaaaaattaagaactgaaatgcgtccaggacattctgattatccagcatatatgaaatataaaaaattcaatgatcatagaggtggaggtagattttcaggtagattgactgcaacgcacgtcatgggcggagcaattgctagaaaattattaaaagatacgattggagttgaaacaaattcatacacaacccaaattggaaaaataaaaatgaaaaaagcagcaacaaagaaagaattcagatctatttatacaaacgaggtaagatgtcctgaaaaaaatacagcacaaaaaatgaagagtatcatactagatgcaagaaagaagggagattcattaggaggtataatagaatccattaccactaatttacctgtaggtttaggtgaaccaatttttggttcattagaatcagacatcagtaaagcaattttttcaattccagcagtaaaaggaatagagtttggttcaggttttgcaggttctgaaaagtttggttcagagaacaatgatgcatacgtaatgaaaggaggaaaagtttcaacaaaaaccaacaactcaggagggattttaggaggtatttctaatggcatgccaattacaattagaattgcattcaaacctgcatcgtcaatttctcaaattcaacaaagtgtggacataaaaaagaaaaaatcaataaaactacaagtaggaggaagacatgatccatgtgtagttccacgtgcaccaccagtagttgattcgttagttgcattaacaatagctgatcacgcattacttagtggtactataaaaccaacattgtga

SEQ ID NO: 287501 - DNA, 1084 bp, Unknown
  Bacterial polypeptide expressing nucleotide sequence isolated from the Sargasso Sea
atgtctcataattcatttggtcatatttttaaatttactacatggggtgagtcccacggtaaagctataggatgtgtagttgatggcacacctccaatgatagaattaacggaaaaagatattcaactttggttggataaaagaagacctggacaaaaccaatacacaagcccaagaaacgaacctgataaagttgaaatactttcaggggtatatatagaagaaaaagtccaatatactactggtactcctatttcaatgataatctataataaagatcaaaaatctggtgattatgatgatacaaaagaaaaattcagaccaggtcatgcagattatacttatttaagtaaatacggaatcagagaccctagaggaggcggtcgccaatcggctcgtgaaactgctatgagagttgctgccggagctatagccagaaagattatacctaaaattgaaattaaaggagcacttgttcaattaggtgacttaaaaattgatagatcaaaatgggataataattttattgatgaaaatcctttttggtgtccagataaaagttcaattaaagactgggaagataaaattaattcacttgtagcggaaggagatagctgtggcgcagttattgaagttgtagctaaaaatgttccagttggattgggtgcaccaatttatggaaaattagactcagacttaggatcagcaataatgagtataaatgcagttaaaggtgttgaaattggaaatggctttgaagcagtaagcctaaaaggcagtgaaaatggtgatgagatgagaatgaaaaatgataagcctgtttttctttcaaataactctggaggtattcttggaggaatatcctcaggacaagatattgttgtacgatttgctgttaaaccaacctcatctataaaaaaagaaagaaaaacaatagataaatctcagaatgatacagaaataacaaccaagggaagacatgatccttgtgtaggtatcagagctgttcctgttggagaagcaatggttgcatgtgttttagctgatcatttcttaagaaatagagctcaaattggaagttaag

SEQ ID NO: 287502 - DNA, 492 bp, Unknown
  Bacterial polypeptide expressing nucleotide sequence isolated from the Sargasso Sea
aatgtcatttaatacttttggaaagatatttcgtttcacaacctggggagaatctcatggacccgcaataggatgtgtagttgatggttgtcctccaaatataagccttaaagaaaaggatattcaagtcgaacttaataagagaaaaccaggtcaatcaaaatttacaacacaaagaaaagaagacgataatgtaaatatcctatcaggtgtgtttgaaggaaaaactactggaacccctatttcaatgattatttataataaagatatgagatcaagggactatgaaacaattaaaaataaatttagacccggtcacgcagactttacgtattttaagaaatacgggatcagagattatagaggtggaggcagacaatctgctcgggaaactgcagcaagagtagctgctggagcgatagcaaaaaaagttttagaaaataaaattggaaaaaaatataaagtcactggagcagtcacacagttaggaat

SEQ ID NO: 287503 - DNA, 538 bp, Unknown
  Bacterial polypeptide expressing nucleotide sequence isolated from the Sargasso Sea
atgtcaggcaatacatttggaaaaatatttaagattacgacttttggtgagagtcatggcacagctataggttgcattctagatggttgcccacctcaaattgaactaacaaaagaagacatacagcatgaattaaatagaagaaagcctggtcagtcagatgtaaccacacaaagaaaagaggatgatgctatagagattttatcaggagtttttgaaggaaaaacccttggaactccaatagggatgattatttataacaaagaccagcaatcaaaagattattcaaatatcaaagatgtatttagaccaaatcatgcagatattacttatcaagcgaaatatggacatagagattacaggggtggtggaagagcaagcgcaagagaaactgcgaattgggttgcagctggggcaattgctaaaaaaatacttcaaaaagaaggagtatcagtaagtggatttgtttttgaaataggtaaaataaaagcagatactattaatcataaagaaactgcaaataaatatttcttttgtg

SEQ ID NO: 287504 - DNA, 889 bp, Unknown
  Bacterial polypeptide expressing nucleotide sequence isolated from the Sargasso Sea
gtcaggtgtttttgagggcaaatcgacaggctctcctattgcaatgattattgataatattgaccataggaccaaagactacactgagataaagaaaaagtttagaccaggtcacgctgattacacttataacaaaaaatatggaataagagattttagaggtggaggaagatcttctgctagagaaacagctatgagagtggctgctggagctattgctgacattattttaaaaagttacttcaaagattttctaatacaaggatgcgttaagcaaattggaccacacaaaatagaaaaaaatcaaatcaactgggaatttagcaaaactaacccattgttttgtccgaataaaaaagttttaaaagtttgggaagactttttagaaaagataagaaaaaaaggctcttcagcaggcgccattatccaactaaaagcgtcaggaattccacctggaatagggtctcctgtttattcaaaactggatagcgagatagcgtctggtttaatgtctataaatgctgttaaaggagtggaaataggttcaggatttaacttggttgatattgatggagcaaaagccagtgatgaaattaatattgatgaaaataatcatgttacttttaagtctaatcattcaggaggaatattaggaggtatttcatcagggcaagatattgaagttagttttgtagtgaaaccaacaagcagtattttaacacccaaagaatcaattgatacggatgggaataatattaacatacaaacaaaaggaaggcatgatccatgtgtaggaattagagctgttcctgttggtgaagcaatgttatcttttacgttagctgatttatatttagctcataaggcgcaagtaggtgcaattaactaa

SEQ ID NO: 287505 - DNA, 817 bp, Unknown
  Bacterial polypeptide expressing nucleotide sequence isolated from the Sargasso Sea
aatggctggcaatacaattggaaaattatttactgtgacaacgtctggggagagtcatggccctggattgtcagctattattgatggatgccctccaggtcttgccatcagtgagactgatattcaaaaagaattgaataaaagaagacccggtcaatccagattcacctctcaaagaaaagagacggatgaagtaagcattatgtctggcgttttcgagggggttacaacaggtacgccaatcaatctggttgttcaaaatgtagaccaaaaatcaaaagattacactgccattaaggataaattcagacccggtcatgctgattttacttattaccataaatacggaatcagagattacagaggcggaggcagatcttctgctcgtgaaactgtcatgagggttgcagcaggcgcaatcgcaagaaaatatttatttgaaaaagcgggaatagagatattcggttttctaggtcagttgggaccgattcatcttgaaatgaaggacagatcatttattgaaacaaacccttttttctgtggcgatcctgaaaagatttcagaattggagtcatatatggatcaattgagaaaagagggcgattccattggcgccagaattaacttggtagcgacgaatgtcccagttggattgggcgaaccagtttttgacaaactggaagcagatatcgctcatggattgatgagtatcaatgcggtcaaaggagttgagattggcgctggattctctgtagtgaatcaaaaaggcagcgagcatagagatgagattgatactgatggctttaaacagaataac

SEQ ID NO: 287506 - DNA, 976 bp, Unknown
  Bacterial polypeptide expressing nucleotide sequence isolated from the Sargasso Sea
atgtcaggcaatacgtttggaaaattatttaaaattacgacttttggtgagagtcatggcattgctatgggctgtattttagatggctgtccgcctcaaattgagctcacaaaagaagatattcaacacgaattagataaaagaaagcctggtcaatcagaggtaactacgcaaagaaaagaggacgatgctgtagagattttatctggagtttttggtggaaagactcttggaacacctattggaatgattatttataacaaagaccaaaaatctaaggattattcaaacataaaagatgtttttagaccaaatcatgccgatattacctatcaagcaaaatatggtcatagagattacagaggtggtggaagagcaagtgctagagaaactgtaaattgggtagccgccggagcgattgctaagaaaatacttaaaaaggaaggagtttcagttcatggctttgtttctgaaataggacaagttaaagctgattcaattaatcataaagatataaataacaaatactttttttgtgatgaatcaaaactagctgatttagattcaatgtttaaggatttaattgaagagggtaactcagtcggtgcaaagttaggtgttgttgttgaaaattgtcctgtaggacttggtgatccagtttttgagaagttagatgctaatcttgccaaagcaattatgacaattaatgctgttaaatctgtatcgattgggaatgcagacgatcttttgaacttaaaaggttctgaggcaagggatgaaatgacctcatcaggatatgcttcaaataattcaggtggaattttaggaggcatttcaaatggagatgatataagcctaagttttattatcaagccaacctcaagcattaaatcaaaaggcaaaacagtaaataaagatggtgaagaagttgacattgaagtaactggaagacatgacccttgtgtaggcataagag

SEQ ID NO: 287507 - DNA, 1075 bp, Unknown
  Bacterial polypeptide expressing nucleotide sequence isolated from the Sargasso Sea
atgtctggaaatacgtttggtaaaatttttaaattgactacatttggtgaaagtcatggtattgctttgggagctgtaatagacggttgtcctccaaatattgagataaatgagttagatattcaaaaagaactagatagaagaaagccaggacagtcaaaatatgttactcaaagaaaagaatcggacaaagttgaagtgctctcaggagtatttgaaggcaagacgacaggtactcctatcggtttattagtcagaaatactgatcacaagtctaaagactacgaaaatatcaaagacaaattcaggccaggccacgcagattttacttatcaacaaaagtacggaataagagattttagaggaggtggcagagctagtgcaagagaaacagtcatgcgggtagctggaggagctattgcgaagaaagttttagaaaaaaaaggagtaatagttagagcaggagtgatgcaaattggtgatatagtggctgattcacacaactttagtgacgtaagtaaaaatgactttaactttgttgataaatcaaaggttaaagctctcgaaaacttttttaaagaacttattaaggatcaagattcaattggtgcaaagattatagttaatattagtggacttcagcccggtgtcggttctccggtattttcaaaacttgatgctgagttagctaaatcattaatgagtgtaaatgctgtcaaagcaattgaaattggaacaggtgtggatagtgtcacaatgagaggttcagaaaatagagatatcatttcagtagatggctttgaaactaataattcaggaggcatcttaggaggcatttcaaatggagacgatataaacatatttacttcacttaagccaacatcaagcatttctcaaaaaactacaactacaaatatagataatcaaaaagtagatcttgaagtgaagggaagacatgacccttgtgtaggtttaagagcagttccaatacttgaagcaatggcagcacttacgattattgaccaaatgttaattgataaagcacaatgttttgatgtggagcgtaaatcctaac

SEQ ID NO: 287508 - DNA, 602 bp, Unknown
  Bacterial polypeptide expressing nucleotide sequence isolated from the Sargasso Sea
tgaagttaataaaattgatcttacccaaatagataaaaatccattcttttgtcctgattctgaagttttagaggatatagaaactttgatagataatcttagaaaagaaggtgattctataggcgctaaaattgaagttactgtttctaatatgccaataggtttgggtgagccagtcttcgataagcttgaagctgatttagcaaaagggttgatgagtataaatgctgtcaaaggttttgaaatcggtaagggttttggtctgatagtctctaaaggttcagatgcaagagatgaaatgtctccagatggcttcttgtcgaataattcaggaggaatttccggaggtataagtacaggacaggatataaatctttcaatagctttaaaacctacctccagtatcaacaaggaaggcaaaacgatagatagttctggtgagtctcaagaaatacaagttaaaggaaggcatgatccttgtgtaggtgttagagcaactccaattgctgaggcaatgacagctcttgttattatggatcatttcctacgaaacagagcacagaatgcggatgtcgtaactgatatacctgactattcttaaa

SEQ ID NO: 287509 - DNA, 766 bp, Unknown
  Bacterial polypeptide expressing nucleotide sequence isolated from the Sargasso Sea
gatggctggaaatacgattgggcaaatttttacactgactacctttggcgagagtcacgggcctgcattaggcgctatagtggatggttgcccgccaggtatagaaatttctgtagaagatcttcaactagatttggatagacgtaggcctggtcaatccaagtacaccactcaaagaagggagaaagaccaggtacaaatactttcaggggtctttgaaggaaagacaacgggtacttcgatagggcttttgattcaaaatgaggatcaaaaaagtaaagactacgaggatataaaaaatatttttcgtcctgctcacgcggattttacttatcagaaaaagtatgggttgagagattatcgcggaggcggtagatcatcagctcgagagacatcaatgagggttgcagccggagctattgctaagaaatttctttctgaacatgttggaatatctgtttatggatatctttctgctattggagaactaaagcttgcttgtaaggaccgcgaatttattgttgaaaatccatttttttcgggcgatccagatagcatcgatcaaattgctagtttgattgactcgatcaggaagcagggcgattcaattggcgcccaggttagtgtcgtagctgaaggcgtacctgctgggttgggtgagcctgttttcgacaaattggacgctgacttggctggtgcgctaatgggtatcaatgcggtcaaagcggtcgagattggtgatggagtttctgttgtagagcaaaag

SEQ ID NO: 287510 - DNA, 1099 bp, Unknown
  Bacterial polypeptide expressing nucleotide sequence isolated from the Sargasso Sea
atgtcgggtaattctataggccaactctttaaagtgaccacctttggtgaaagccatggcccggccattggtggcatagtggatggtttgccgcctggcttaaagctcgatctggaacaaattcagcttgagctggacagacgcaaacccggcacttcacgctacaccacagcacgtcgcgaagatgatatcgtcaaaattttatctggtgtgtttgaaggctatagcacaggcgcgtctattggtttactgattgaaaataccgatcagcgctcgcaagactattcagctattaaagacttgttccggcctggtcatgcggattacacctactggcataaatttggtattcgcgattaccgtggtggtggccgttcatccgcccgtgaaacagcagtgcgagttgcagctggggctattgccaagcagtacttaaaagccaaatttggtattgaaatccgtggttatctggcgcagcttggcccggtgaaagcgcaaaagctggattgggagcaggttgagcaaaatgcctttttctgccctgatgttgatgtactcgaacagttagatgagtatatgcgtcagttgaaaaaagacggtgactcagttggtgcccgtattaatgttgtcgcgtccggtgtgcctgtggggtggggcgagccagtgtttgaccgcatcgatgcagatatagcccacgccatgatgagtatcaatgcggtgaaagctgtcgaaattggtgatggttttgctgtggtcgaacaacggggttctacccatcgcgacgagctgcgcttagctggctttagtgctaaccatgcgggtggcattttaggtggcattagctcaggtcaggacattaacgtcagcattgcgttaaagccgacctccagtatcagcattccgggtcaaaccattactaccagcggtgaagaaacagaaatgatcaccaaaggccgccacgatccttgtgtcggtattcgtgctgtgcctattgcagaggcgatgctggcgatagtgctgatggatcatttcctgcgtcacagagcacaaaatgcagatgtgatagtaatgacaccagatattgcccgacagccgtaac

SEQ ID NO: 287511 - DNA, 1156 bp, Unknown
  Bacterial polypeptide expressing nucleotide sequence isolated from the Sargasso Sea
tatgctaaaaagattacaatttttaacagccggagaatctcatggaaaaggattacttggaatcatagatggacttccatctgatctagaaatatcagaagaatatatagatcaagaattaaaacgtcgtcaaatgggtcatggcagaggtggtcgtatgaagattgaaaaagatcatgctgaaatatggtgcggtgttcgccatggaaaaacactggcgtcacctgttggtattttaataaaaaatttggattgggaaaactggaccgataaaatgtctgtagaaaaattggataaagaaattaaacgagttactcttccaaggcctgggcatgctgatcttgcaggaatccataaatatggttttgatgatatccgaaatgttcttgaaagatcaagtgctcgcgaaaccaccatgcgtgtggcactgggaaccgtatgtagaaaattactggaagaggttggtataaatattggcagcagagttgttcaaatacacaatgttaaagatgaatcaaagtatgatatgaatccaaaaaaattgaatcaaactgcagatagctcaccagttagatgtttagataacaaggttgaaaagggtatgataaaagttatagatgatgctaagaagtccggcgattcagtaggcggaatttttgaagtaattgctacaggaataccttatggcttagggtcatacacacaatggaatgaaaaacttcaagcaagaattacagcaatgatgatgagcgttaatgctttcaagggaatagagattgggagtggttttcatagctcaacacaatttggtagtgaagtacatgatgaaattgggcatgatggaaataagtttactcggtatagtaacaacgctggggggcttgaaggaggtatgagcaatgctcaaccaattgtgctttggatgtcgatgaaacctatatcaacactgattaaacctttaagatctgttgatatagactctaaagaaaagaagaaagcgcacaaagaaagaacggactcatgtgcagttccagctgcttcagtaatatcagaaagtatgttatgcattgtcttggtagacgccttgcttgaaaaatttggcggagatagcatggaacaattaaagtctcacatgaaagcttcagctaagtattga

SEQ ID NO: 287512 - DNA, 454 bp, Unknown
  Bacterial polypeptide expressing nucleotide sequence isolated from the Sargasso Sea
tattgagttgagagcttctggcgtacccactgggcttggtgctccaatatattcaaaactggatgctgatattgcttcagctttaatgagtataaacgctgtcaaaggtgttaacattggatcaggaatgagttctgcatttttaagtggcgaagaaaattcagatgaaatgagatctaattcaggaaaagtaaaatttaaatctaataatgctggtggtattcttgggggaatatcttctggtcaaaatattgttgcatcttttgctgttaaacccacttcatcaattttaaataatagagaaacggtgaataaaaaaggaaaaaatactaatatttcagtcaaaggtcgtcatgatccttgtgttggaattagagctgttcctatcggggaggcaatgttagcatgtgttcttttggatcactatcttatgaacaaagctcaatgtggttaa

SEQ ID NO: 287513 - DNA, 1090 bp, Unknown
  Bacterial polypeptide expressing nucleotide sequence isolated from the Sargasso Sea
atggcagggaacagtttcggccaactctttcgtgtgacgaccttcggcgagagccacggcctggcgctgggcgccgtggtcgacggctgcccgccgggactggagatcagcgaagcggatctgcagggggatctggaccggcgcaagcccggcacctcccgctacaccacgccgcgccgcgagccggacgaggtgaagatcctctccggggtgttcgagggcaagaccaccggcacctccatcgggctgctcatcgaaaataccgatcagcgctccaaggactactccgacatcaaggacttgttccgcccgggccacgccgattacacctatcaccagaagtacggccagcgcgactatcgcggcggcggtcgctcctccgcccgtgaaaccgcgatgcgggtggcggcgggagccattgccaagaagtatctgaaacaggtgcacggcatcgagatcaccggttttctctcccagctcggccccatcaaggcagaagccttcgatgcggcacagatcgagcagaatcccttcttcttccccgatgtgggcaagctggaagcgctcgatcaatacatgcgcgacctgaaaaaagagggcaacagcatcggtgccaaggtgcaggtcatcgccagcaatgtgccggtgggcctcggtgagccggtgttcgatcgcctcgacgccgacatcgcccacgccatgatgggcatcaatgcggtgaaaggggtggagatcggtgacgggttcgcggtggtggagcaaaaaggctccgagcaccgcgacgagatgaccccggccggctttgccagcaaccatgcgggcggcattctgggcggcatctcatcgggtcaggatatcgtggtgagtatggcgctcaagcccacctccagcatcacggtacctggcaagaccatcaccaccgagggtgaggccaccgagatgatcaccaaggggcgtcacgatccttgcgtcggcatccgcgccgtgcccatcgccgaggcgatgctggcactggtgctgatggatcacctgctgcgccaccgtgcccagaaccagggcgtgctgacgcataccccgcaactgcgctgat

SEQ ID NO: 287514 - DNA, 1072 bp, Unknown
  Bacterial polypeptide expressing nucleotide sequence isolated from the Sargasso Sea
aatgacttctaattcaataggaaaaatttttaattttactacatggggtgaaagccatggcaaagctataggctgtgttgttgatggagttccatcaaacataaatttaactgaaaaggatattcaaccttatttagataaaagaaaaccaggtcagtcgaaatttacaactcagagaaaagaagaggataaagttgaaatactatcaggaacttttgaaggaaagacaacaggtcatcctatttctctaattatttacaatcaagatcaaagatcaaaagattacggtgatatcaaaagtaaatttagaccaggtcatgctgattacacttattggaaaaaatatggcataagagattataagggtggtggtagatctagtgctagagaaactgcgatgagagtagcagcaggagcaatagcaagaaaaatcattaaaaataaaattaaaaatccagttataataacaggtgcattaattcaaataggtaattataaaattaattatgataattggaataataattttattccaaaaaataatttttggagtcctgatagagatattattaaaatatgggaaagcgaaattcaaactgcaagaaaatctggttcctccttaggtgcaataattgaaattagagtaaaaggtttgcctgctggattaggagagcctatttatgaaaaaatagactctgatttagctaaagcattgatgtcaattaatgctgttaagggtgttgaaatgggaaatggatttagcagtgtttatgaaactggaatttctaatattgatgaaatgagaattaaaaataaaaaacctatatttctttcaaataataatggaggagttcttggaggaattacaactgggcaagaattaattactagatttgtagtaaaaccaacaagctcaatattatcaacaaaaaaaacgattaatacaaaattaaaagaaacaacaatatcaactaaaggtcgtcatgatccatgtgttgggataagagctgttcctgttggtgaagcaatggttgccacaactatagctgatcattgtttaagatttctttaa

SEQ ID NO: 287515 - DNA, 268 bp, Unknown
  Bacterial polypeptide expressing nucleotide sequence isolated from the Sargasso Sea
aaaattagttttaaaagtaataaagctggaggaattttaggtggcatttcatcaggtcaagaaattattgcatcatttgcggtgaaacctacttcttcaatattaaatagtagggaaactataaataaaaaaggaaaaaatactaaaatttctgttaaaggcagacatgacccatgtgtaggaattagagctgtgcctattggtgaggctatgctggcatgtgttatattagatcagtatatgatgaataaagctcaatgcagttaat

SEQ ID NO: 287516 - DNA, 1099 bp, Unknown
  Bacterial polypeptide expressing nucleotide sequence isolated from the Sargasso Sea
tatgagtagtagttttggaaaaatttttcgtgttagtacttttggagaatctcatggtggtgcagttggagttattcttgatggatgtccccctaggttaaaagtagatataaatcttatacaaaatgaattagataggcgcagacctggtcaaagtgacattacaacaccccgaaacgaagaagataaaattgaaatattaagtgggataaaggaagggttaacacttggaactccaatagcaatgttggtaagaaacaaggatcaaagaccaggagattataataatttagagcaggtatttagaccttctcatgcagatggtacatatcatctgaaatatggaattcaggcaagttctggcggtggaagagcctctgcaagagaaacaattgggagagtagctgctggtgccatagcaaaacaattattaaaaagtttctgtaacactgaaatactatcttgggttaagcgtattcatgatattgattctgatataaataaagagaagatttctctaaaaaaaatagattctaatattgttagatgtcctgatgaaaaggtatcaacagaaatgatcgagagaattaaggaattaaagcgtcaaggagactcttgtggcggtgttattgaatgtctagtaagaaatgttccgtctggtcttggaatgcctgtttttgataaattagaagctgatttagcaaaggctttgatgtctttgcctgccacaaaaggctttgaaattggttcaggtttctctggaacttacttaaaaggaagcgaacataatgattcgttcattaagtctgatgattctagtaagttaaaaacaacatcaaacaattcaggaggtatacagggcggaataagtaatggtgaaaatattgagatgaaaatagcttttaaacctacagcaaccatcgggaaagaacagaaaacagtgaatgctgaaggtaaagaagtactgatgaaagcaaaagggagacatgatccatgtgttctaccaagagcagtccctatggttgatgctatggtagctttagtacttgctgatcatttgcttctaaatcatgctcaatgtgacttaatcaataagtag

SEQ ID NO: 287517 - DNA, 284 bp, Unknown
  Bacterial polypeptide expressing nucleotide sequence isolated from the Sargasso Sea
cgtagatgaaatgatattaaaagacggtaaaccaagtttcttaagcaacaataatgggggtattcttggaggcattagttctggacaaaatatagtttgtcgatttgtggtaaaaccaacaagctcaataacatctgagagaaaaacaattgatattaatttgcaagaaacaacgattgcaacaaaaggacgtcatgatccttgtgtaggtattagagcagttcctgttggtgaagcaatgcttgcaaccactattgcagatcattgtcttcgctatttctgat

SEQ ID NO: 287518 - DNA, 1084 bp, Unknown
  Bacterial polypeptide expressing nucleotide sequence isolated from the Sargasso Sea
atgtcatttaatacatttggaaagctatttcgtttctctacttggggtgaatctcatggtcctgctattggctgtatcgttgatggatgcccaccaaatattaatttaagtgaaaaagatatacaaaaagaactagataagagaaaaccaggacaatcaaaatttacaacacaaagaaaagaggacgataaagttcaaatattatctggaatttttgaaggtagaactactggtacaccaatatccttaataatttataataaagatatgagatctaaggattatggaaaaattaaggacaaatttagacctggacacgctgactttacttacttcaaaaaatatggaattagagactatagaggtggtggaagatcatctgcaagagaaactgcatcaagagttgcagctggtgcaatagctaagttggtcttacaaaataaattaggtaaaaaattcaaagttgttggtgcagttacgcaattaggtatcttggggtgcgatactaacaaatggaacgataatataatttcaaaaaatccatttttttgtcccgacaaatcgatgattaaactttgggaaaaatatttattaagagtaagaaaatctggatcgtcatgcggtgcagtgattgaaataagagcgagaggaattccggtaggattgggcgcacctatttactcaaaactagactctgatatagcatctagtttcatgagtattaatgctgttaaaggggttaatattggtgcagggatgaactctgcacaactaagtggtgaacaaaactcagatgaaatttcacaaaaaggtaaaaaattaaagtttaattcaaataatgccggtggaatattgggcggtatatccactggacaagaaattattgcttcatttgctgtgaaaccaacatcttcaatcttaacaactagaaatactgtcaataaatttgggaagaatacaacaatatctgttacaggaaggcatgatccatgtgttggaataagagctgtacctgttggtgaggcaatgatgaattgtgttttgttagatcactatctaatgaataaagctcagtgtcagtaga

SEQ ID NO: 287519 - DNA, 319 bp, Unknown
  Bacterial polypeptide expressing nucleotide sequence isolated from the Sargasso Sea
aatgttaactggtgaggaaaactctgatgaaattttgaaaaaaaaaggtaaaactagttttaaatcaaataatgcagggggaattcttggaggaatatctactggacaagaaataaatgtttcatttgcagtaaaaccaacttcatctattttgtcaccgaggaaaacaatcgacagatttggcatgaacacgacaatatctgtaaaaggaagacacgatccatgtgttgggattagagcagttccaataggagaggcgatgatgcattgtgtaattcttgatcactatttaatgaatacagcacaaaataaaatttaa

SEQ ID NO: 287520 - DNA, 1087 bp, Unknown
  Bacterial polypeptide expressing nucleotide sequence isolated from the Sargasso Sea
atgtcatttaatacttttggaaagatatttcgtttcactacttggggtgagtctcatggacctgccataggatgtgtggttgatggttgtcctccaaatataaaaattacagaaaaagacatccaaattgaactaaacaagagaagacctggtcaatcaaaatttacaactcaaagaaaagaggacgataaagtaaatatattatcaggagtgtttgaaggaaaaacaactggtactccaatttcgatgataatttataacaaagatatgaggtctagagattatgaaacaattaaaaataaatttagacctggtcatgctgattacacgtattttaaaaaatatggaataagagattatagaggtggtggaagacaatctgctagagaaactgcttcaagagttgcagctggcgcaatagcaaaaaaaatattacaaaataaattaggaattaaatataaagttgtgggagctgtaactcaactaggaattctagggtgtgatactggaaaatgggatgaaaaatttatttcaaaaaatccatttttttgtcctgataaatcaattgttaagctttgggaaaagtatttgttgagtataagaaaatctggatcttcatgtggggcaattattgagattagagccaaaggtgttccaattggattaggagctccaatttattctaaattagatatggatttagctgcagctatgatgagtatcaatgcagtcaaaggtgtaaatattggatcaggaatgaactctgctcagcttaccggtgaacaaaattctgatgagattacacaaaaaggcagaaaaactaattttaaatcaaataacgcaggaggaattcttggaggtatttcttcaggtcaagaaatagttatttcatttgcagttaaaccaacctcatctatcctttcatcaagaaaaacaattgataaatttggtaagaatacatctatttctgttagaggtagacatgatccatgtgttggtattagggcagtacctattggagaagcaatgatgcattgtgtattattagatcactatctaatgaatgctgctcagtgcaaaagttagt

SEQ ID NO: 287521 - DNA, 968 bp, Unknown
  Bacterial polypeptide expressing nucleotide sequence isolated from the Sargasso Sea
aatgacttctaattcaataggaaaaatctttaattttactacatggggagaaagccatggtaaagctataggttgtgttgtagatggagttccatcaaacataaatttaactgaaaaagatattcaaccctatttagataaaagaaaacctggtcagtcgaaatttacaactcaaagaaaagaagaggataaagttgaaatactatcaggaacttttgagggaaaaacaacaggtcatcctatttccctaattatttataatcaagatcagagatcaaaagattatggagatattaaaagtaaatttagaccgggtcatgcagattacacgtattggaaaaaatatggcataagagattataggggcggtggtagatctagtgctagagaaactgcgatgagagtagcagcaggagcaatagcaagaaaaataataaaaagtaaaattaaaaatcaagttttaataacaggtgcattaattcagataggcaatcatagaattaattatgataattggaataataattttattccaaaaaataatttttggagtcctgataaagaaattgttaaaacatgggaaaacgaaattcaaactgcaagaaaatctggttcctctttaggggccataattgaaattagagtaaaaggtttaccagctggattaggggagcctatttatgagaagatagactctgatatagctaaggcattgatgtctattaatgctgttaagggcgtagaaatgggtaatgggtttagcagtgtttttgaaactggaatttctaatgttgatgaaatgagaattaaaaataaaaaacctatatttctttcaaataataatggtggagttcttggaggaattacgactggtcaagaattaattactagatttgtagtaaaaccaacaagctcaatattatcaacaaaaaaaacaattaataaaaatttaaaagaaacaacaatat

SEQ ID NO: 287522 - DNA, 293 bp, Unknown
  Bacterial polypeptide expressing nucleotide sequence isolated from the Sargasso Sea
gaaatatttaaaaaaaggtaaaaatataaagtttaaatctaataatgccggaggtattcttggtggcatatcaacaggtcaagaaatcattgcctcttttgctgtaaaaccaacttcatcaattcttaaatctagaaaaactatagataaatttgaaaaaaacacatctatttctgttaaaggtagacatgatccatgtgtaggaattagggcagttcctattggcgaagcaatgatgcattgcgttttacttgaccattatttaatgaacaaggcgcagtgtgtaaattaat

SEQ ID NO: 287523 - DNA, 1072 bp, Unknown
  Bacterial polypeptide expressing nucleotide sequence isolated from the Sargasso Sea
tatgtcaggcaatacaataggcaagttatttacagtaactagctatggggagagtcatggtcctgccctaggatgtgtggtggatggctgccctccaggaatggagttatgtgaatccgatatgcaaagggacctggatagacgtaagccaggtcagtctcgatttaccactcagagaagggaagatgacaaagtaaagattttgtctggtgtgtttgaaggaaaaacgacaggaacacccatcggcttgctaatcgagaacaacgatcagagatctaaggattacagtaaaataaaagaccgatttcgaccagctcatgcagattatacctattggaagaaatatggagtgcgagattatcggggaggcggaaggtcgtcggcacgtgaaactgctatgagagttgcctcaggagcgattgccaaaaagttcctgaaagagaaattttcggtagagataaggggttatctgactcagttaggccctatatccgtagaaaacatagactttgatcaaattgaccagaatcctttcttctgtcctgacaaaagtaaggtggccgagatggaagaatacatgtccgccttatctaaagaagggaattctattggtgcaaaaatcgctattgaagcatcaaatgtgccggcaggccttggagaacctgtatttgaccgattggatgccgatattgccaaagctttaatgagtatcaatgctgttaaaggggtcgagattggatctggctttgactctgtagctcaaaagggaacagaacatagggatgaaattacgccagagggttttttaagtaacaacgctggtggtgtcttggggggcatttcaagtgggcaggatataacagcaaccatagccttgaaaccaacctctagtatcagaataccggggaaatcaatcaatacggaaggtgaggtcgagaacgtagtgacaacaggtaggcatgatccatgtgtaggtattcgagctacacctatcgctgaagcaatgctcgccttggtgttgatggatcacgtattaagggtccgggggcaagtaggcagttttttggaataa

SEQ ID NO: 287524 - DNA, 1084 bp, Unknown
  Bacterial polypeptide expressing nucleotide sequence isolated from the Sargasso Sea
catgtcaggcaatacgtttggaaaattatttaaaattacgacttttggtgagagtcatggcactgctatgggctgcattttagatggctgtccgcctcaaattgagctcacaaaagaggatattcaaaacgaattagataaaagaaagcctggtcaatcagacgtaactactcaaagaaaagaggacgatgctgtagaaattttatctggagtttttgacggaaaaactcttggaacacctattggaatgattatttataacaaagaccaaaaatctaaggattattcaaacataaaagatgtttttagaccaaatcatgccgatattacctatcaagcaaaatatagtcatagagattacagaggtggtggaagagcaagtgctagagagactgtaaattgggtagctgctggagcaattgcaaagaaaatacttaaaaagcaaggagtttcagttcatggctttgtttctgaaatagggcaagttaaagctgactcaattaatcataaagatataaataataaatactttttttgtgatgagtcaaaactagctgatttagattcaatgtttaaggatttaattgatgagggtaactcagttggtgcaaagttaggtgttgttgttgaaaattgtcctgtaggacttggtgatcctgtttttgagaagttagatgccaatcttgctaaagcaattatgacaattaatgctgttaaatctgtatcgattggaaatgcagatgatcttttgaacttaaaaggttctgaggcaagggatgaaatgacttcatcaggatatgcttcaaataattcaggtggaattttgggaggcatttcaaatggagatgatataagcttaagttttattatcaagccaacctcaagcattaaatcaaaaggtaaaacagtaaataaagacggtgaggaagttgatattgaagtaactggaagacatgacccttgtgtaggcataagagcagttcctattgctgaggccatggtgagtcttgtgttggtagatcatttattgattaatcgagcacagtgtgccgaagttaaacaggaattaccgtttagtgaataa

SEQ ID NO: 287525 - DNA, 1105 bp, Unknown
  Bacterial polypeptide expressing nucleotide sequence isolated from the Sargasso Sea
atgagcctaaattcttttggacatatgtataaagtgacaacctggggcgagagccacggcccaagtcttggtgcgactatagacggttgtcctccaggcatagaaatcgatcaaaacaaattgcaagtttggatggataaaagaaaaccgggtcaaaacaaatatacaacccaaagaaatgaagcagatagtgttgaaatattatctggtgtttttgaaggggtttcgacagggacacctatccaattggtaattaaaaacactgatcaaagatcaaaagattacagcgaaatagctcaaacttttcgacccggtcatgcagacataacctactggcagaaatatggcatccgagattatcgtggtggtggtagatcatcggccagagaaactgctgctcgagtggctgcaggtggagtagctcgccttgtactaaaacatttagcgcccaatttagaaatatatggttatatgacgcaaatgggcgatcaaaaaattgatagatctagaattgatttaaatcaaattgacgataatcctttttggtgtcccgatttgaaagctgtcagcaagtggaaagattatttagagaaagtcagaaagtctcgggactctgttggggccataatcgaaattatagctaaaaatgtctctcctggtttaggagctcccatatatggaaagattgatactgacctagcagccgcgatgatgtcaataaacgccgttaagggtgtagagattggcgaaggtatgaatgctgcatcacttttagggtctcaaaatgcagatgagattttcatggatggaaaaaacggacctcgatattcatcaaaccattctggcggtatacttggcggcatctccactggacaagacattgttgtaaggtttgcagttaaaccaacttcctcaatcctatcacctaaaaaaacaataacacaaaagggcgaagagactgaaattataactaaggggcggcatgatccttgtgtgggtattcgggctgttccagttggcgaggctatgatggcgtgcgttcttcttgaccattatcttttgcaccggggccaaataggtgaaaacagaggccaaataggctaat

SEQ ID NO: 287526 - DNA, 286 bp, Unknown
  Bacterial polypeptide expressing nucleotide sequence isolated from the Sargasso Sea
tatgtcttttaatacttttggaaaaatttttaggtttaccacatggggagagtctcacgggccagctattggctgtgttatcgatggctgccctccaaatatacctatatctgagaaagatattcaaaaagatatggatagaaggaggcccgggcagtcaaaatttacaacacaaagaaaagagtcggataaagctataattttatctggagtttttgaaggaaaaacaactggtacaccaatatctatcatcatacataatgaagataaaagatctagggactat

SEQ ID NO: 287527 - DNA, 562 bp, Unknown
  Bacterial polypeptide expressing nucleotide sequence isolated from the Sargasso Sea
aatgtcatttaatacttttggaaagctatttcgtttctctacttggggtgaatcccatggtcctgctatcggctgtatcgttgatggatgcccacctaacataaaacttaatgaaaaagacatacaaatagaattagataaaagaaagcccggacagtcaagatttacaactcaaagaaaagaagcggacaaagttcaaattttatctgggatttttgaaggcaaaactacaggtactcctatttctttaattatttacaatcaagatatgagatcaaaagattatcaagatatcaaaaacaaatttagaccaggacatgctgattatacatattttaaaaaatatggaataagagattacagaggaggtggaagatcctctgcaagagaaacagcttctagagttgctgctggtgcaatagctaaaatagttctaaaaaataaattaggtaaaaaatttaaagtaattggtgcagtcactcaattaggaatattaggatgtgatacgagtcaatggaatgataaaataattaaaaaaaatccatttttttgcccaagataa

SEQ ID NO: 287528 - DNA, 679 bp, Unknown
  Bacterial polypeptide expressing nucleotide sequence isolated from the Sargasso Sea
tatgtcttttaatacttttggaaaaatatttagatttactacttggggtgagtctcacggcccagcaataggatgtataattgatggttgtccgcctaatataccaatttctgataaggaaattcaaaaagatatggacctaagaaggcctggacaatccaaatttactactcagagaaaagagagtgacaaagtaacaattttatcgggtgttttcgaaggcaaaacaacggggacaccaatttcgattataatttataatgaggataaaagatcaagagattatgaaacaattaaaaataaatttaggcctggccatgccgattatacatattttaaaaaatacggaattagagactacagaggtggtggcaggcaatcagctagagaaactgcctgtagagtcgcagcaggggcagtggcgaaaattgttttaaaaaaaataatcggccctaaatataatgtcatcggagcagtaacgcaattaggtttaatgtcttgtgataaatcaaattggaataataatgaaatcagaaaaaatccttttttctgtccagataaaaaatcagttaaactttgggaaaaatatctgctagcagtaagaaaggctggctcatcctgtggtgctattatagagttgagagcgactggggtgccagttggccttggtgcacccatt

SEQ ID NO: 287529 - DNA, 1084 bp, Unknown
  Bacterial polypeptide expressing nucleotide sequence isolated from the Sargasso Sea
aatgtcatttaatacttttggaaagctatttcgtttcacaacttggggagagtctcatgggcctgcaattggttgtattgttgatggttgtcctccaaacataaatcttaaagatcaagatattcagatagaattagataaaagaaaaccaggacaatctaaatttacaactcagcgaaaagaggatgataaagttcaaatattatcaggagtatttgaagggaaaactacagggacacctatttctctcataatctataacaaagatatgagatccaaagattatagtaatatcaaagataagttcagaccaggtcacgcagattttacttattttaaaaaatatggaattagagatcacagaggtggtggtagatcttctgctagagaaactgcagcacgtgttgcagctggttcaatagcaaaagttgtgcttcagaaaaaattaggtaaaaaatttaaagtaattggtgcagtaacacagctaggaattcttggatgtgatacaaaccaatggaacgataaaataatttcaaaaaatccatttttttgtccagataaatcaatgattaaattatgggaaaaatatttgcttggtgtaagaaaatcaggatcctcatgtggagcagtgatagaaataagagcaagaggtatcccagttggtttaggtgctccaatttactcaaaattggatactgatatagcctcaggtctgatgagtattaatgcagttaaaggtgtaaatattggagcaggaatgaactcggcacaattaactggagaacaaaattcagatgaaatttcttcaaaaggaaataaattaaaattcaattctaataacgctggtggaatccttgggggaatttctacgggccaagaaattattgcatcttttgctgtcaaaccaacatcatcaattttaacgagtagaaaaactataaataaatttgggaaaaatactttaatatctgttaaagggagacatgatccttgtgtaggaattagagctgttccaataggcgaagctatgatgaactgtgttttgcttgaccactacttaatgaataaagctcagtgtagttag

SEQ ID NO: 287530 - DNA, 1096 bp, Unknown
  Bacterial polypeptide expressing nucleotide sequence isolated from the Sargasso Sea
gatgtctggaaacagtattggtcaaaattttgtggtgactacctttggtgaaagtcacggtgtggcgctcggttgtattattgatggttgcccaccagggctcgaactcaccgaagccgatatgcagcatgatttagaccgccgtcgtcctggcacatcccgttataccaccgcgcgtcgtgagcctgatgaagtacggatcttatccggtgtgtttgagggcaaaaccacgggcacctccattgggcttttgatcgaaaacaccgatcagcgcagccaagattattccaatatcaaagatttattccgtccaggacatgccgattacacctatcagcaaaagtatggcctgcgtgattaccgtggtggcggccgttcatcggcacgcgaaaccgctatgcgggttgctgcaggcgctgtggcgaaaaagtatttaaagcaagtgcatgggattaatatccaaggctatatgtcgcaacttggaccgattagtgccgagaccctcgattttagtcaaatcgagcagaacgcctttttcttccccgatgcgactaagctcgaggcgctggatgagtatatgcgcgagctgaaaaaatccggtgattccattggtgcaaaaatttcggtggtggcgacgggcgtgcctgttggactgggtgagcctgtgttcgataggctcgatgccgacatcgcccatgccttaatgggcataaacgcggtaaaaggcgtggaaattggtgatggttttggggttgtgacgcaaaagggctcagaagggcgcgatttaatgtcgccgcagggttttgaatctaatcatgcgggcggcatcctcggcggcatctcatcgggtcaaccgattattgctcatatcgcattaaaaccaacctcgagtatcagtgtgccgggtcaaagcatgacggcccaaggtgaaatggcagaagtggtgactaaaggtcgtcacgacccctgtgtcgggatccgcgcggtaccgatcgccgaagctatgctggcgattgtgttgatggatcatctgttaagacacagagctcaaaatcaggatgttcgcagtcatacaccgattctcggcatgagatag

SEQ ID NO: 287531 - DNA, 842 bp, Unknown
  Bacterial polypeptide expressing nucleotide sequence isolated from the Sargasso Sea
ctctttactaatttataacgaggatatgcgctcaaaagattatagtgatattaaggataaattcagaccaggtcatgctgatttcacttactttaaaaagtatggcattagagattatagaggtggtggaagatcttctgcgcgagaaactgcttctagagttgcagcaggagcggtagcaaaaaaagttttggaaaaaaaattaggtaaaaaatttaaaatttctggtgcagttacacaacttggaattcttgggtgcaatacaaacaagtgggatgataagataatttataaaaatccgtttttttgtcctgataaatcaatgcttaaaatctgggaaaaatatcttttaagtattagaaaggcaggttcatcttgtggtgccataattgaaattagagctaatggtattcctgcaggattgggggcaccaatttactcaaaattagactctgatattgcatctgcaatgatgagtattaatgctgtaaaaggtgttaatattggctctggaatgaactctgctcaattgtctggagaagaaaattcagatgaaatttcaaaatcaaaaaataaattaaagtttaagtcaaataatgcaggtggaattctgggtggcatctcttctggtcaacaaataattgtttcatttgctgttaagcctacatcatcaattttaaagagcagaaaaacaattaataaatttggaaaaaatactagcatatctgttaaaggaagacatgatccatgtgttggaattagagcagttccagtgggtgaagctatgttatcatgcgttttacttgaccattatttattgaatcaagctcaatgtggataat

SEQ ID NO: 287532 - DNA, 553 bp, Unknown
  Bacterial polypeptide expressing nucleotide sequence isolated from the Sargasso Sea
ttctaaaaatccatttttttgcccagataaagcaatgttaaaaatttgggaaaaatacttattaagtattagaaaagctggatcgtcatgtggagctataatcgaagtaagagccaacggtattcctgctggattaggagcgcctatatactctaaattagactctgacatagcgtcagctatgatgagtataaatgctgtaaaaggagttaatattggctcaggcatgaactcagcacaattgtcaggtgaggaaaattcagatgaaatttctcaaaatagaaaaaaaactaaatttaaatctaataacgctggagggattctgggaggcatttcttcaggtcaagagataattgtatcttttgctgtaaagccaacttcctcaattttaaagagtagaaaaacaattaataaatttggaaagaatacaagtatatcagtaaaaggaagacatgatccatgtgtgggtataagggctgtacctgtgggtgaagcaatgctttcttgtgttttattagatcattatcttctacacaaagctcagtgtagttaa

SEQ ID NO: 287533 - DNA, 1056 bp, Unknown
  Bacterial polypeptide expressing nucleotide sequence isolated from the Sargasso Sea
tatgtcaggaaacacattcggtaaaatttttagagtaaccacctttggtgaaagccatgggaaagcacttggttgcgttatagatggttgtccacctaacattaaaatagatgaatctgatattcaaaaagacttaaataggcgaaaacctgggcagtctaaatatacaactcaaagaaaagaagatgataaggtagaaatactctcaggtattttcaatggagtcactacaggcacaccaatcactttaattattttcaataaggaccaaaaatctaaagactattctgaaattaaaaataaatttcgtccaggacatgctgattttacttatcagaaaaaatatggcattagagactatagaggtgctggaaggtcatcagcaagagaaacagttgcaagagtagcagctggagctatagctaagaaatttttaaataagattaataaaacaaaaatatttggatatgtttcacaacttggtgagatcacgcctgataaaataaaacttactgatatagaaaagaactccttcttttttcctgatagaaaaaaaatacctgaattagaaaaatatttgatgggtattagaaagtctggcgactctataggagcgaaagttactattgtaggtaagaatattcctattggtataggcgaacctgtatttgacaaacttgatgcaatgcttgctcaagcaatgatgtctatcaatgctgtaaaaggggttgagattggagcaggttttgatgtggttacccaaaaaggctcagaagctagggatgaaattacacctaaaggttttttgagtaatttctcaggcggaacactaggtgggatatcgactgggcaagaccttaaaattaatattgcgcttaaacctacatctagcattttagttcctggcaaaacagtagatattaaaaacaagccaactacaattagaacgaaaggcagacacgacccttgtgttggcataagagcggtacctatagccgaggcgatgatggcattaacactatgtgatttatatcttcgccataaagcacaaaatct

SEQ ID NO: 287534 - DNA, 889 bp, Unknown
  Bacterial polypeptide expressing nucleotide sequence isolated from the Sargasso Sea
atgagtctgaattcttttgggcatatgtataaggtcatgacctggggcgagagccatggcccaagtcttggtgcaactatagatggatgtcctccaggcatagaaatcaaccagagcaaattgcaagtttggatggataaaagaaaaccaggtcaaaacaaatacacaacccaaagaaatgaaccagatagcgtagaaatattatctggtgtattcgaaggggtttcgacagggacacctatccaattaattattaaaaacactgaccaaagatcaaaagattatggcgaaatagctcagacttttcggcctggtcatgcggacataacctactggcagaaatatggcatccgagattatcgtggaggtggcagatcatctgcgagagaaactgctgctcgagtggctgcaggtggagtggctcgacttgtactgaaacatttggcgcccaatctagaaatatatggttatatgacacaaatgggcgatcagaaaattgatagatctagaattgatttaaatcaaattgacaataatcctttttggtgtcccgatttgaacgctgccaacaattggaaagactacttggagaatgtcagaaagtctcgggactctgttggagccgtaatcgaaattatagctaaaaatgtctctcctggtttaggagctcccatatatggaaagattgataccgacttagcggctgcaatgatgtcaataaatgctgttaagggtgtagaggttggcgaaggtatgaatgcggcatcacttttagggtctgaaaatgcagacgagattttcatggatggacaaaataggccacgatattcgtcaaaccgctccggtggcatacttggcggcataaccactggacaagacattatttaag

SEQ ID NO: 287535 - DNA, 1060 bp, Unknown
  Bacterial polypeptide expressing nucleotide sequence isolated from the Sargasso Sea
tatgtcaggaaacacattcggtaaaatttttaaagttactacttttggtgagagccatgggaaggcactcggctgcatcatagatggctgtcctccaaatcttaaaattgatgagagcgatattcaaagagatcttgatcggagaaagccagggcaatcaaaatatactactcaacgaaaagaggatgataagattgagatcttatcaggagtttttaatggtttaacaacaggaactcctattgctctattaatatacaataaagatcataagtcaaaagattactctgagattaaaaataagtttagaccaggtcatgcagattttacttatcagaagaagtatggaataagagactatagaggagctgggcgatcatctgctcgagaaactgttgctcgtgtagcagctggggcaattgcaaaaaaatacttatcgaaaattaacaaaactaaaatatttggatatgtatcacagcttggcgaaatcaaagctgaaagcataaagatatctgatattgaaaaaaatcctttcttcttccctgataagaaaaaaatccttgagcttgaggaatatttaacaggtataaggaaagctggtgactctattggtgctaaagtaacgattattggtaaaaatattccaattggattaggtgagccagtgtttgataaattagatgcattgttagcacaaggtatgatgtctataaatgcagtcaaaggtgttgagattggagcaggcttcaatgttgttagccaaaaaggttctgaagcaagagatgaaatcaccccaaaaggttttttgagtaacttttcaggcggtacgctaggaggtatctctacaggtcaagatttacatgtaaacattgctcttaaaccaacatcgagtatcctaatacctggtaaaaccatcgatcagaaaaacaaaccgactactatacgtactaaaggaagacatgatccttgtgttggaattagagccgtcccgatagctgaagctatgatggcactaactctatgtgacttatatttgagacataaagcacaaaacaaataa

SEQ ID NO: 287536 - DNA, 763 bp, Unknown
  Bacterial polypeptide expressing nucleotide sequence isolated from the Sargasso Sea
tgctgatattacttatcaaggtaagtatggaataagagactatcgtggaggcggcagggcgagtgccagagaaacatcaatgcgagtcgcagctggagctgttgccaaaaaggtgctcaaagaaaaagggattgtcattagttcttgggttcagcaaattggtgagattaaagcagagaatttcagtaataactcttcaaataaatataatttttgcgatgaatcaaaactaccacagctagacgaattatttagtcagcttattgatgatggtgattcagttggagctgagttaggagtcaaaatttctggttgtaaaattggtctcggcgaaccagtttttgataaattagatgcagagctagcaaaagcaatagtttcaatcaatgctgttaaaagcgtatcttttgggaatgcagaactatttttatcaaaaaaaggctcagaggtaagggatgaaatgaactctgatggttatctctcgaataattctggcgggattcttggaggaatttcatccggtcaagatatcgatctttcatttattatcaagccaacctcaagcattgcatcaaaatcaaaagctgtggatgtggatggcaatgaagtatcgcttgaggtcaaaggaaggcatgatccatgtgttgcaataagagcagttcccattgcagaagctatgtgtgctctttgtattcttgatcattatctaagaaatgctgctcaatgctctgatgtaaaccaaaagcttccttttaattcctga

SEQ ID NO: 287537 - DNA, 589 bp, Unknown
  Bacterial polypeptide expressing nucleotide sequence isolated from the Sargasso Sea
tgtcgatcactcacaggttacggaacaacagatcgagcaaagcatcgtgcgctgtccagatactgtaacctcaaatgccatggaacaacggattcttgaagttcgcaaaaaaggggacagtgtgggcggaatcattcgtgcggtcagcaaaaatgttcctgtcgggctgggtgagccggtttttgacaaactgactgctgacttagcaaaagcgctgatgtccctgcctgctacaagaggcgttgagttcggtctaggctttcaatcgattgccctgatgggttcagagcacaatgacgaatatatgttcgaagatggaaatgtaaagacccgttccaatctttcggccggaatccagggagggatctccaatggagaagagatcgaccttcgaattgccttcaaacccaccgcgaccatcaaccatgaacagaaaacggtcacccgagaaggagaatcgaccaccctcagcgccaaaggcaggcatgatccctgtgtgcttccaagggctgttcccatggttgaagccatgatcaacctcgtattggctgaccattacctgcgccaacagtccagccagctccactga

SEQ ID NO: 287538 - DNA, 1087 bp, Unknown
  Bacterial polypeptide expressing nucleotide sequence isolated from the Sargasso Sea
aatgtcttttaatacatttggaaaattttttcgatttactacatggggtgagtctcacggtccagcaataggatgtgttgttgatggttgtcctccaaatattaagcttaatatcagagacattcagttagaattaaataaaagaaagcctggtcagtcaaaattcacaacccaaagaaaagaggatgataaagtagaaattttatcaggaacatttgagggcagaacaactggtacacctatctcaatgattatcttcaataaagatatgcgttctagggattataaaaatattaaagataaatttagacctggtcatgctgattatacatattttaaaaagtatggaattagagattatagaggtggaggcagacaatcagcgagagagactgcttcaagagtggcagcaggggcaatagcaaaacaagttttgcaaaatattattgggaaaaagtacagtgtaattggagccgtaacacaattaggaatactaggatgtgacacagaaaaatggaatgacagtttcatcacaaaaaaccctttattttgtcctgataaaacagttttaaaattatgggaaaaatatttacttgggataagaaaagctggctcatcatgtggggctattattgaagtaagagcaagaggtgttcctgtcggattaggagctccaatttattcaaaattagatatggatttagcatcagcaatgatgagtattaacgcagtaaaaggggtaaatataggatcaggaatgaactctgctcaactttctggtgaacaaaattctgatgaaatgtcccaaacaggaaagaaaacaaaatttaaatcgaataatgctggaggaattcttggaggtatttctagtggtcaagaaataatagtttcttttgcagtaaaaccaacttcatcaattctttctcaaagaaaaacaattaataaatttggaaaaaatacttcaatttcagtcacagggagacatgatccatgtgtaggtattagagcagtgcctattggcgaagcaatgatgcattgtgtaattcttgatcattacttaatgaataaagctcaatgtggtaattaa

SEQ ID NO: 287539 - DNA, 1075 bp, Unknown
  Bacterial polypeptide expressing nucleotide sequence isolated from the Sargasso Sea
tatgtctggaaacacttttggaacaatctttaaattaacgacttttggcgagagtcatgggttggctatgggggctattatagatggctgtcctccaaatattgagttaaatgaaaaaatgattcaaatggaactagatcgaagaaagcccggacaatctaaacatgtcacacaaagaaaagaaccagatgaaattgaaatactatctggagtttttgagggcaaaacaacaggtacaccaattggactattaataagaaataaagatcaaaaatcaaaagattatgaggatattaaagataaattcaggcccggccatgctgattttacttaccttaaaaagtatggaactagagattatagaggtggtggaagggctagtgcgagagaaacagtaatgagagtagccggaggtgcaatagctaaaagaatactatcttctatggaagtaaaaatatctggaggagttgttcagataggttcaataaaagcagattccattgatcttgctggtatatcaaacaatagtttttcttttgccgataattcaaaagttaacgagttagaagaattctttgaaaagttgagaaaagaacaagactcaataggagcaaagatacttataagggtagaagggcttatgcctggggttggatcacctgtattctcaaaacttgatgcagaattagctaaatctatgatgggagtaaatgctgtaaaagccgttgagttaggttctggggttggagtagtagagatgaaaggttctgagaacagagatttaataaaaaaagatggttttgaaactaataattcaggaggcatcctaggcggaatatcaaatggcgacgatattgatatatttgtatctttaaaaccgacttctagtatttcacaaaaaacaaaaacagttgatacagaaaataaagaagttgatttacaagttaagggcaggcatgatccatgtgttgggctaagagcaacaccaattctagaagcaatggcagcaatgtgcatactagatcagatattgttagatagagggcaatgcttcaatgttgatagagacctttga

SEQ ID NO: 287540 - DNA, 464 bp, Unknown
  Bacterial polypeptide expressing nucleotide sequence isolated from the Sargasso Sea
aatgtcatttaatacatttggaaagttatttcgtttcactacttggggtgaatctcatggaccagctattggatgtgtagttgatggatgtcctccgagaataaaaatatctgaaaaagacatacaaaaagaactaaataagagaaaacctggtcaatctaaatttactactcaaagaaaagaagatgataaagttgaaatcttgtcaggagtatttaatggtgagacaactggtacaccaatattaatgattatttacaataaggatatgaaatcaagagactatgagactatcaaaaataaatttcgtcctggacacgctgatctaacttattttaaaaaatatggcataagagacttcagaggaggtggtaggcaatcagcgagagagactgcagctagagtagctgcgggtgcaattgcaaaaaaagttttagaaaaaaaaattgggaaaaaatattacg

SEQ ID NO: 287541 - DNA, 1129 bp, Unknown
  Bacterial polypeptide expressing nucleotide sequence isolated from the Sargasso Sea
atgttaaaaaaaatatcatacatgaccgctggtgaatcgcatggaaaagggttgataggtataattgagggtatacctgcaggtctccagctaactgaagaatacatagctgttgatttattaagaagaatgcaaggtcatggaagaggaaaaagaatgaaaattgaaaaagattttgcagaaattttttctggagtgcgacatgaacatactcttggatctccgatttctcttataattaagaatttagattgggtgaactgggaagatagaatggcagtaggtaaacctaaaaaagagcataaaaaagtaacaatgccacgcccaggccatgcagacttagcaggaatgatgaaatatgattttgatgacattagaaatgttttggaaagatcttccgcaagagaaactgcaatgagagttgctattggtgctatttgtagaaaactattagatgaggcaggaataactattggtagtagggtatatcaaattcatgatgttgttgataacaaagaagttgaccatactttaactatgtcaaaattaaatgatttagctgataagtcttcagtaaggtgtttagataaagatgcggaagaaagaatgattaatgttattgatgaagcaaaaagcaagggagattcggttggaggttcttttgaggtaattgctaagggaatgccttatggtttaggaagttatatcaatgctgatggaaagcttcaggcaagaatttctcaagcaatgatgtctgttaatgcatttaaaggagtagaggttggagctggttttgcatcatctgcggcttttggaagcgaactccatgatgaaatattatttgaaaatgaaagaatcactcgttcaagaaataatgcaggtggtattgaaggtggaatgagtaatgctcaaccaatacatgttaaggtaagtatgaaacctatttcaacgctgataaagccattaagatcgatagatttaaatacaatggagcccaagcttgctcacaaagaaagaacagattcttgtgctgttcctgcagcatcaataattggggaaagtatgttggcaattgtacttgccgatgcattgcttgaaaagtttggtggagatagtataaagcaataaa

SEQ ID NO: 287542 - DNA, 1090 bp, Unknown
  Bacterial polypeptide expressing nucleotide sequence isolated from the Sargasso Sea
atgttaggtaacacatttggaaaaatcttttctgtaacgacttttggtgaaagtcatggcgaagctatgggctgcataattgacggatgtccacctaattttgaaataaaaaatgaagatattcagatggagcttgacagaagaaagcctggccaatcagatgttactacccaaaggaaagaggacgacaaagttgaaatcatgtcaggagtttttgaaggaaaaacccttggaactcctatagcattgttaatcagaaatgaagaccagatttcaaaagattattcaaatattaaagacacatttaggccaaatcatgctgacctcacatatcaagcaaagtatggtattagagattacagaggtggtggcagatcaagcgcaagagagacagcaatgcgagttgctgcgggagcagttgctaagaagtatttaaatacacatggaattataactaagggctttgtatcacaaattggaagtatttctgctgatacagttgatcttaaatttgtaaatgaaaataaattcttctttcctgatagatcaaaaattagcttacttgaagagttttttgaagaactcatcaaagaaggagactcaataggtgccaagctaaatattaaagtccaaaactgtccagttggtcttggagaacctgttttcgataaattaaatgctgatttggcaaaagccatgatgagtatcaatgccgtaaaatcggtttctattggcaactctgacatgattccattttctaaaggatctgagctaagagatgaaattaccaagactggattcgattcaaataattctggtggaatccttggtgggatttcaaatggtgatgatattgatataagttttttaattaaacccacatctagcataagtaaagccacaacatccatagataaagatggaaatgaggttgagcttgaagttaaaggaagacatgatccttgtgttggaattagagcagtaccaattgctgaggcaatggtgaaccttgttttaattgaccatcttctaagaaacaaggcacagtgcggtgatgttgatcaaaaactcccatttgtaacggaataat

SEQ ID NO: 287543 - DNA, 1072 bp, Unknown
  Bacterial polypeptide expressing nucleotide sequence isolated from the Sargasso Sea
atgtcatctaatagttctggtaaaatatttaacttcaatacatggggagaaagtcatggtaaggctataggatgtgtagttgatggagttccatctaaaattgaattatctgaagaagatattcagatttatttaaataaaagaagaccaggtcaatccaagtttactactcaaagaaaagaaagtgatcaagttgagattctttctggtgtttttgaagggaagactacagggcatccaatatcattattgataaataatgaagatcaaaaaacaaaagattattcagatattaaagatatatttagacctggacatgctgattatacatattggtccaaatatgggattagagattacagaggagggggcagatctagtgcaagagaaactgcaatgagagtagcagcaggtgcaattgctagaaaagtaattaaaaataaaattaaaaaggaatttaagataactggagctttagttcaaattggagagattaaaataaattatgataactggaatgaagattttattgaaaaaaatgattttttttctccagatgaaaaaataattgaaaaatgggaaaagcttattctcaaagccagaaaagaaggttcttctttaggagcaattattgaagtaagatgcaagggaatgcctgttggactaggtgaacctgtatatgataaactagatgctgatcttgcaaaatcaatgatgagtataaatgcagtaaagggtgttgaaataggaaatgggtttaatagtgtatatgaaagtggtgtttcaaatgttgatgaaatgagaatcaaaaacaacaaaccaatttttttatctaataataatggtggtatactaggaggaatttctacaggacaggatataatagttaggttttgtgttaaaccaactagttctattctaacgaaaagaaaaactatagatattaattataacgaaaaagaaatttctactaaaggaagacatgatccttgtgttggtattagagctgttccagttggagaagctatgatggctactacattagctgatcattgtttaagatatttataat

SEQ ID NO: 287544 - DNA, 1041 bp, Unknown
  Bacterial polypeptide expressing nucleotide sequence isolated from the Sargasso Sea
catgactgctggtgaatcgcatggaaaaggtttgataggtattattgaaggaatacctgccggtcttcagctaactgaagaatacattgcaattgaccttttaagaagaatgcaaggtcatggtagaggaaaaagaatgaaaatagaaaaagattttgcagaaattttttcaggagttcgtcatgaacatactcttggttctccaatttctctaattatcaaaaatttagattgggttaactgggaagatagaatggctgtaggaaaacctaaaaaagaacataagaaggttactatgcctcgtcctggacatgctgatttagctggtatgatgaaatacgactttgatgatattagaaatgtattagaaagatcttcagcgagagaaaccgctatgagagttgcaataggtgcaatatgcagaaaattacttgaagaggtcggaatatctattggaagcagagtttatcaaattcatgatgtagtggattctgatgaagtcgatttatctttgaccatgtcgaaattaaatgatttagccgacaagtcatcagtgagatgccttaataaggatgctgaaaatagaatgattaatgtaatcgatgaagcaaaaagtaatggtgattctgttggtggttcatttgaagttattgccaagggaatgccatatggcctaggaagttatataaatgctgatgggaagcttcaagcaaggatcactcaagcaatgatgtctgtcaatgctttcaaaggtgtagaagtaggagctggatttgcttcatctgcagtatttggtagtgagcttcacgacgaaattttatttgaaaatgaaaagattactcgttcaagaaataatgctggaggaattgaaggcggaatgagtaatgctcaacctattcatgttaaagtaagcatgaaacctatctcaactcttataaaaccgctgagatcaatagatcttaacacgatggaacctaagcttgcgcataaagaaagaactgactcttgtgccgttccagctgcatctattattggggaaag

SEQ ID NO: 287545 - DNA, 511 bp, Unknown
  Bacterial polypeptide expressing nucleotide sequence isolated from the Sargasso Sea
tatgtcaggaaattcttttggaaattcatttgttgtgaccactttcggtgagagtcatggcatagccctggggtgtgtcattgatggttgtcctcccggattagatttatcaaaagaggatatacagagcgaactagataaaagaaagccaggttcttcaaaatatactactcaaaggaaagaagatgatgaggtagaaattctatctggagtttttgaaggcaagacgacgggaacaccaattggtttgctcatcagaaataaagatcagaaatcaaaagattatgatgacttaaaagatgtttttagaccctcccatgctgattacgtttattcaaaaaaatatggtcacagagatcataggggaggaggaagatcttctgctagagaaacagctatgagagttgctgcaaggtgcatagcaaaaaaatatttaagcgataaacaaggcattaacgttaaaggatatttatctcagatcggtacgattgaagttaataaaattgatctt

SEQ ID NO: 287546 - DNA, 631 bp, Unknown
  Bacterial polypeptide expressing nucleotide sequence isolated from the Sargasso Sea
tatgtcaggtaacacatttggaaaaatcttttctgtaacgacttttggtgaaagtcatggcgaagctatgggctgcataattgatggatgtccacctaattttgaaataaaaaatgaagatattcagatggagcttgatagaagaaagcctggccaatcagatgttactacccagaggaaagaagatgacaaagttgaaattatgtcaggagtttttgaaggaaaaacccttggaactcccatagcattgttaatcaaaaatgaagatcagatttcaaaagattattcaaatattaaagatacatttaggccaaatcatgctgacctcacatatcaaggaaagtatggtattagagattacagaggtgggggcagatcaagtgcaagagagacagcaatgcgagttgctgctggagcagttgctaaaaagtatttaaatacacatggaattataactaagggctttgtatcacaaatcggcagtatttctgctgatacagttgatcttgaatttgtaaataaaaataaatttttctttcctgatagatcaaaaattagctcacttgaagagttttttgaagaactcatcaaagaaggcgactcaataggtgccaagctagatattaaagta

SEQ ID NO: 287547 - DNA, 268 bp, Unknown
  Bacterial polypeptide expressing nucleotide sequence isolated from the Sargasso Sea
tggaattttaggaggaatttctaatggtgatgatattagtttaagttttattatcaaaccaacttctagtattaaaacaaaaggaaaaactgtaaataaagaaggtaaagaagttgatattgaagttaccggaagacatgacccgtgtgttggtattagagcagtgcctattgctgaggccatggtaagtcttgtattagtagatcatttattaataaataaagcacaatgtgctgatattgaacaaaaactaccatttagtgaataa

SEQ ID NO: 287548 - DNA, 701 bp, Unknown
  Bacterial polypeptide expressing nucleotide sequence isolated from the Sargasso Sea
tcgcgtagcagcgggtggtattgcaaaaaaataccttagagaagttcatggtatcgaagtgtcgggttacctatctcaactgggccccattgccgtagagaacgttgatcattctattaccaataccaatccttttttctgcccagacgagaacaaactagacgctctcgacgaatacatgcgcgatttaaagaagtctggcgacagtattggcgcgaaagtgtcagtggtcgctaagaacgtgcctgtaggacttggtgagcccgtgtttgacagactagatgcagaaattgcgcatgccatgatgggtatcaatgcggttaaaggcgttgaaattggcgacgggtttgacgttattaaccaaaagggcagtgagcatcgcgatacgctgactcctgatggcttcgcgtctaatcatgccggtggcgtacttggtggtatttctacggggcaagacattgaagttcacatggcattaaagccaacgtcgagtatttctgtgccaggtacgacaatcaataagcaaaacgaagaaattgatattgtgacaaaaggtcgccatgatccctgcgttggcattcgcgctgtgcctattgctgaggcaatgatggcgctagtattgatggatcatctattgcgccaccgcgcacaaaatatgggcgttgtatcaacgacagcacctattgcaggcagccgttaaa

SEQ ID NO: 287549 - DNA, 955 bp, Unknown
  Bacterial polypeptide expressing nucleotide sequence isolated from the Sargasso Sea
gatatgaataagcgaaaaccaggccaatccaaatttactactcaaagaaaagagtcagataaagtgattattctctctggagtatttgaaggtaaaacaactggaactccaatctctatgattattcacaatgaagacaaaaaatctagagattatgagtctattaaagataagtttagaccaggccatgctgattatacttatttcaaaaaatatgggattagagattttaggggtggtggaagacagtcggcaagggaaactgcttgtagagtagctgcaggtgctattgctaaaatagttttaagaaaaattataggtaaaaaatttagtgtagttggggctgtcactcaactaggattaatgtcatgcgataagcagaattggaaggactctgaaatcagaaaaaatccttttttctgcccagataaaaattctgtaaaattgtgggaaaaatatcttttagcagtaagaaaagctggctcatcttgtggagcagttattgaattaagagctaaaggtattccagttggattaggagctcctatttactcaaaattagatactgatattgctgctgcacttatgagtattaatgcagttaaaggagtaaatattggatctggaatgaatgcagcatttttaagtggtgaggaaaattccgacgaaattagaaaagatttaggaaaaattaaatttaaaactaatcatgcgggtggaattttaggaggcatctcctcaggtcaagatattgttgcctctttcgctgttaaaccgacttcttctattttaaacagtagagagaccattgataaaaaaggtaaaaatactaaaatttccgtcaaaggaaggcatgatccatgtgtagggataagagctgtgcctattggtgaagcaatgatcagttgtgttatcctcgatcatttattaatgcacagagcgcagtgcggttaat

SEQ ID NO: 287550 - DNA, 624 bp, Unknown
  Bacterial polypeptide expressing nucleotide sequence isolated from the Sargasso Sea
cggaagttcgtgcaaatgatcttgagtctgaagtaaaatttaaaaaagaaatagacttagccaagtctcaaagaacaaccgttggaggaatttttcaaataattacatgcggtgtgcctgttggcctaggaagtcatgttcactgggacagaaaattagatgggcaaataggacaatctatacttagtataaatgcagtaaaaggtgtagaaattggaaatgggtttgaaaatactacaaaaaaaggtaaagatgttcatgatgtaatcatacctgataaaaataacgtaaaaaacttcaagcatatttctaatcatgcaggaggaattgagggtggtatgactaatggagaacctataattgtaaatgtggcaatcaaacctatagccaccatgacaaaaccacttccttcagttgatataaatacaggagaaatagttgaagctgcctataatagaagcgatatttgtcaagtttctcgtgcatgtccaataggagaatcaatgattgcactaacgctagctaattcttttttggaaaaatttggaggtgactcaatgttagaaatccaaacaaattacacaagttttataaaaacacacaaaaaatttggtagtaagtagt

SEQ ID NO: 287551 - DNA, 1072 bp, Unknown
  Bacterial polypeptide expressing nucleotide sequence isolated from the Sargasso Sea
aatgacttctaattcaataggaaaaatctttaactttaccacatggggagaaagccatggcaaagctattggttgtgtagtcgatggagttccatcaaacataaatttaactgaaaaagatattcaaccctatttagataaaagaaaacctggtcagtcaaaatttacaactcaaagaaaagaagaggataaagttgaaatactatctggaacttttgagggaaaaacaacaggtcatcctatttctctaattatctataatcaagatcagagatcaaaagattatggtgatataaaaagtaaatttagaccaggtcatgcagattatacatattggaaaaaatatggcataagagattataggggtggtggtagatctagtgctagagaaactgcaatgagagtagcagcaggggcaatagcaagaaaaatcataaaaaataaaattaaaaatcaagttgtaataacaggtgcattaattcaaataggtaatcataaaattaattatgataattggaataataattttattccaaaaaataatttttggagtcctgataaagaaattattaaaatatgggaaaacgaaatacaaactgcaagaaaatctggttcctctttaggtgcaataattgaaattagagtgaaaggtttgccagctggattaggagaacctatttatgaaaaaatagactctgatattgctaaggcattgatgtctattaatgctgttaagggagtagaaatgggaaatggatttagcagtgtttatgaaactggaatttctaatgttgatgaaatgagaataaaaaataaaaaacctttatttctttcaaataataatggtggagttcttgggggtattacaacgggccaagaattaattactagatttgtagtaaaacctacaagctcaatattatcaccaaaaaaaacaattaatacaaaattaaaagaaacaacaatatctactaaaggtcgtcatgatccatgtgttggtataagagctgttcctgtcggtgaagcaatggttgccacaactatagctgatcattgtttaagatttctttaa

SEQ ID NO: 287552 - DNA, 928 bp, Unknown
  Bacterial polypeptide expressing nucleotide sequence isolated from the Sargasso Sea
ttctaagttcgtatcccaaagaaaggagtctgataagattgaaatcttgtctggtgtttttcaaggaaagacgactggtacacctatttcaataataattaaaaacgaggataaaagatctagggattatgagtctattaaaaataaatttaggcctggtcatgcagatttcacatattttaaaaaatatggaataagagattttagaggtggtggaagacaatcggctagggaaactgcatcgagagttgcggcaggggctattgctaaaatagtgctaaaaaaattgattggaaaaaattttaatgtaattggtggcgttacccaactcggtttgatgggttgtgatataaataattgggatgataatcaaattaataaaaatccttttttttgtcctgataaaaagtctgttaaaatctgggaaaaatatcttttggcagtaagaaaatctggttcatcttgtggagctattattgagataagagctcgaggtgtacccgcaggccttggcgcacctatttactcaaaattagactctgacatagcagcagcacttataagtataaatgctgttaagggagtaaatattggtgccggaatgtcctctgcttatttatcgggagaagaaaactcagatgaaataagatccaaatcaggaaaaattaaatttaaaagtaataatgctggtggaattttaggaggtatatcttctggtcaggaaataattgcatctttttcggttaaaccaacttcctctattattaatagtagagaaacaattgataaaaaaggtaaaaatacaaaaatttcagttagaggacgacatgatccctgcgtagggataagagccgttccaatcggagaagcaatgttatcttgtgtgttgttagatcactatctgatgaataaagctcaatgtggttaa

SEQ ID NO: 287553 - DNA, 1102 bp, Unknown
  Bacterial polypeptide expressing nucleotide sequence isolated from the Sargasso Sea
atgtccggcaacacgctcggtacgcttttcactgtcacgacctttggcgaatcgcacggccccgctattggctgcgtgatcgacggctgccccccgggcatggcgctcaacgaagccgatatccagctcgaactcgaccgccgcaagccgggcacgtcgcgccacgtcacgcagcgccaggaagaggacaaggtcgagatcctgtcgggcgtgttcgaaggccagaccaccggcgcgccgatcgcactgctgattcgcaatacggaccagcgcagcaaggattacggcaatatcgcggacactttccgtcccggccacgccgattacacctactggcagaaatacggcattcgcgactatcgcggcggcggccgttcgtcggcccgtctgaccgcgcctacggtggcggctggtgccgttgcgaagaaatggctgcgcgagaaattcgggaccgagattcgcggctacatggcggcgctcggcgagatcgacgtgccgttcgtcgactgggcccatgtgcgtgagaatccgttcttcgtgccgaatgcgcagatcgtgccggaactcgaaacctatatggacgcactgcgtaaagacggcgattccatcggcgcgcgcatcaacgtcgtggcttccggcgtgccggttgggcttggcgagccgctgttcgatcgtctcgacgcggacattgcgcacgcgatgatgggtatcaatgcggtgaagggcgtcgagatcggcgcgggcttcgccagcgtcgcgcaacgcggttcggtgcatggcgacgaattgacgccggaaggcttcgtcggcaaccacgcgggcggcgtgctcggcggtatttcgaccgggcaggacatcacggtgtccatcgcgatcaagccgacctcgagcatccgcacgccgcgtcgttcgatcaacaaggcggggcagccggccatcgtcgaaacgttcgggcgccatgacccgtgcgtcggcattcgcgctacgccgatcgccgaatccatgctcgcgctggtattgatcgaccacgcgctgcgtcaccgcgcgcaatgcggcgatgtcgccgtcagcacgccgaagatcgccgcgagcgcgtcgtaaa

SEQ ID NO: 287554 - DNA, 289 bp, Unknown
  Bacterial polypeptide expressing nucleotide sequence isolated from the Sargasso Sea
attttaaaaaaaggtaaaaaaacaatttttaaaagcaacaatgctggaggaattttaggcggtatatcaactgggcaagatataattgtttcattcgctgtgaaacccacctcatctattcttaaaaaaagaaaaactattgataaaaaaggaagaaatacttctatttctgtaaaaggtagacatgatccatgtgtgggtatacgagctgtaccgattggagaggcaatgatgcactgtgtgttgttagaccactatcttatgaataaagctcaatgcggtgattaat

SEQ ID NO: 287555 - DNA, 1084 bp, Unknown
  Bacterial polypeptide expressing nucleotide sequence isolated from the Sargasso Sea
atgtcatttaatacttttggaaagctatttcgtttcacaacttggggagagtctcatggacctgcaattggttgtattgttgatggttgtcctccaaacataactcttaaagagcaagatattcaaatagaattagacaaaagaaaaccaggacaatctaaatttacaactcagagaaaagaggatgataaagttcaaatattgtcaggagtatttgagggtaaaactacaggaacacctatttctctcataatctacaacaaagatatgagatccaaagattatagtaatattaaagataagttcagaccaggtcatgcagattttacttattttaaaaaatatggaattagagactatagaggtggtggcagatcttctgctagagaaactgcagcacgagttgcggccggtgcaatagcaaaagttgtacttcaaaaaaaattaggtaaaaaatttaaagtaattggtgcagtaactcagctaggaattcttggatgtgatacaaatcaatggaacgataaagtaatttcaaaaaatccatttttttgtccagataaatcaatgattaaattatgggaaaaatatttacttggtgtaagaaaatcaggatcctcatgtggagcagtgattgaaataagagcaagaggtatcccagttggtttaggtgctccaatttattcaaaattggatactgacatagcttcaggtctaatgagtattaatgcagttaaaggtgtaaatataggtgcaggaatgaactcagcacaattaagtggagaacaaaattcagatgaaatttcttcaaaaggaaataaattaaaattcaattcaaataaagcgggtggaattcttggtggaatttctacgggccaagaaattattgcatcttttgctgtcaaaccaacatcgtcaattttaactagtagaaaaactataaataaatttgggaaaaatacttcaatatctgttaaaggtagacatgatccttgtgtaggaattagagctgtaccaattggtgaagctatggtgaactgtgttttacttgaccactacttaatgaataaagctcaatgtagttagc

SEQ ID NO: 287556 - DNA, 521 bp, Unknown
  Bacterial polypeptide expressing nucleotide sequence isolated from the Sargasso Sea
tatgtctggaaacacttttggaacaatctttaaattaacgacttttggcgagagtcatgggttggctatgggggctattatagatggctgtcctccaaatattgagttaaatgaaaaaatgattcaaatggaactagatcgaagaaagcccggacaatctaaacatgtcacacaaagaaaagaaccagatgaaattgaaatactatctggagtttttgagggcaaaacaacaggtacaccaattggactattaataagaaataaagatcaaaaatcaaaagattatgaggatattaaagataaattcaggcccggccatgctgattttacttaccttaaaaagtatggaactagagattatagaggtggtggaagggctagtgcgagagaaacagtaatgagagtagccgggggtgcaatagctaaaagaatactatcttctatggaagtaaaaatatctggaggagttgttcagataggttcaataaaagcagattccattgatcttgctggtatatcaa

SEQ ID NO: 287557 - DNA, 1072 bp, Unknown
  Bacterial polypeptide expressing nucleotide sequence isolated from the Sargasso Sea
tatgtcaggtaatagttttggaacaatttttaaagttacaacatttggtgaaagccatggtgtagcaatgggtgcaattatagacggctgccctcctaatattgaaatatccgaaaaagatattcagaaagaactagataagagaaagcctggacagtctgcatatgtcactcaacgtaatgaatctgatgctgttgaaatcttatcgggtgtatttgaagggaagacaactggtactccgattggcctagttgttaaaaatcaagatcagagatctaaagattatgaaaatatcaaagataaatttagaccaggacacgcagattttacatactttaaaaaatatggaattagagattatagaggtggtggaagagcaagtgcccgagagactgtaatgagagtggcagcaggtgcaatagctaagaagactttactaatgtttgggatagaagtatttggcggagtggtgcaaataggacaaatttgtgccgatagtattaatcttgatgacgtgtacagcaacagctttttttttactgataaaagcaagatttctgaacttgagcagttttttaaaaatctgatggaagcacaggattctattggtgcaaagattttgataaaggtaaagggtgtaggtcctggtcttggagcaccagtattctcaaagcttgatgctgaactagcaaaagctgtaatgagcgttaatgcagtaaaggcttttgagattggagtaggtgcagatgttgtgacaatgcgcggatctgaaaacaatgatgaaataagcaaagaaggttttaaaaccaataattcgggtggaattcttgggggtatttcaaacggtgaggatattgatgtatttgcctcaattaaaccaacctcaagtatttcaaaaaactctaaaactgtcgatattaagaatgaagaagttgatatagcgataaaaggaaggcatgacccttgtgtaggtttaagggctaccccaattcttgaatcaatggttgcaattaccgttctagatcagcacttaatagatagagctcaatgtggagatgttaaaagagactga

SEQ ID NO: 287558 - DNA, 1084 bp, Unknown
  Bacterial polypeptide expressing nucleotide sequence isolated from the Sargasso Sea
catgggagatagtttcggtaaaatattccgcataactacttggggagaatctcacggtgcaggagtgggagttgtaattgacggctgcccatctggattaccgctcaatgaggatgactttcaatatgagctagatagaagaaaacccggacaaagtaaaattactactcaacgcaaggaaagcgatattgcaaaaattctgtccggagtatttgagggaagaactacgggagcatcaatttcagttatggtatctaacgaagacgcaaaacctcacgcgtatgagcacctaaaagaattatatcgcccaagtcatgcagatttcacctacgaaaaaaaatatggcattagagactggaggggaggtggacgtgcaagcgctcgcgaaactgttggaagagtcgcagcaggaacaatagcaaaaaaacttttatttcactggggcaacattcagacaattgcctgggtagaacaaatccatgatgttaaatcctcagtggacaaaaaaatagtcggcgttaaacagattgaagctagcatcgttcgttgtccggattcacaagcttcagatgaaatgattgaacttattcataaagctcgtaagtcaggtgacagtgtagggggaattataagggcagttgtacgtaatgtgcctgcaggattaggtgagccggtatttgacaaactgaccgccgatctggctaagggacttatgtcactccctgcaactcgaggtgtggagtttggtctaggttttgattcagtcaagcttaaaggatcagaacataatgattcttttgtgatgcgtgaaggcgttattagaactaatacaaatcgttccggaggtatacagggtgggatctcgaatggggaagatatagatttgcgggttacattcaaaccaacagccactataaactatgaacaggatactgttactcgcgatggtaaagcaacaaaacttaaagccaaaggtcgacatgacccctgtgttttaccgagggcagtcccgatggtagaggcaatgattaatcttgtattaactgatcattatttgcgccagcagaaaaactttcttcaataa

SEQ ID NO: 287559 - DNA, 871 bp, Unknown
  Bacterial polypeptide expressing nucleotide sequence isolated from the Sargasso Sea
catgtcaggcaatgcgtttggaaaaatttttaaaattatgacttttggtgaaagtcacggcactgctatgggttgtattttagatggttgtcctccagaaatagaaatatcagaagaagatattcagcttgaattggatagaagaaagcctggtcaatcagatgtaaccactcagagacaggaagacgatgctgtaaagatattatctggagtttttgaaggaaaaacccttgggacaccaataggaatgataatttacaacaaagatcaacaatctaaagattattctaatattaaagatgtcttcagacctaatcatgcagatattacatatcaagcaaagtatggtcacagagattatagaggtggcggaagagcaagcgcaagagagacagcaaattgggtcgcagcaggtgcgattgctaaaaggattcttaaaaaagaaggagttaaagtatatggttttgtttctgcaataggaaaagtaagggctgaatcaatcaattataaagatatagataataaatacttcttttgtgatgaatctaaattatctgacttggattcaatgtttgatgatttaattaaagagggtaattctgttggtgcaaagttaggagttattgttaagaattgtcctgtaggtttaggtgatccagtttttgaaaagttggatgcaaatttagcaaaagcaataatgacaattaatgctgtaaagtcagtatctgttggcaatgttgatgatctacttaatctaaaaggctcagaagcaagagatgaaataacaacgtcaggttttttatcaaataattcaggcgggatattaggtgggatatctaatggtgacgatataagcctcagttttattatt

SEQ ID NO: 287560 - DNA, 1059 bp, Unknown
  Bacterial polypeptide expressing nucleotide sequence isolated from the Sargasso Sea
ttcgttttacaacttggggtgaatctcatggacctgcaataggatgcgtggttgatggttgtcctccaaatataaatattagcgaaaaagatattcaagttgagcttaataagagaaaaccaggacaatcaaaatttacaacacaaagaaaagaagatgacaatgtaaatatcctttcaggtgtttttgagggaaaaactacaggaactcctatttcgatgattatttataataaagatatgagatcaagggactacgagacaattaaaaataaatttagacctggtcacgcagattttacatattttaagaaatatggaattagagactatagaggcggaggaagacaatctgctagagaaactgctgcaagagtagcagctggtgcaatagcaaaaaaagttttacaaaataaaattggaaaaaaatataaagtcacaggagcggttacacaattaggaatacttggttgtgatacaaaaaaatggaacgataaatttatttcaaaaaatccatttttttgtcctgataaatcaattgtaaaactttgggaaaaatatttattaagtataagaaaagcaggttcatcatgtggagcaataattgaagtaagggctagaggcgttcccattggtctgggtgcaccaatatattcaaaactagatatggatttagcttctgcaatgatgagtataaatgcagttaaaggagtaaatataggatctgggatgaattctgcgcaattaactggtgagcaaaattccgatgaaatatctcaaagaaataaaaaaacaaattttaaatcaaataatgctgggggaattctaggtggtatatcatcaggacaagatataattgtatcttttgcggtaaaaccaacttcttcaattcttacttccagaaaaactatagataaatttggaaaaaatacttcaatatctgttaaaggaagacatgatccttgtgtaggtataagagctgttccaataggagaagctatgatgcattgtgttttattagatcactatttgatgaatagtgcacaatgtaaaagttaat

SEQ ID NO: 287561 - DNA, 439 bp, Unknown
  Bacterial polypeptide expressing nucleotide sequence isolated from the Sargasso Sea
atgacttctaattcaataggaaaaatctttaattttactacatggggagaaagccatggcaaagctattggttgtgttgtcgatggagttccatcaaacataaatttaactgaaaaagatatccaaccctatttagataaaagaaaacctggtcagtcaaaatttacaactcaaagaaaagaagatgataaagttgaaatactatctggaacttttgagggaaaaacaacaggtcatcctatttctctaattatctacaatcaagatcagagatcaaaagattatggtgatatcaaaagtaaatttagaccaggtcatgcagattatacatattggaaaaaatatggcataagagattataggggtggtggtagatctagtgctagagaaactgcgatggagagtagcagcaggggcaatagcaagaaaaaatcataaa

SEQ ID NO: 287562 - DNA, 262 bp, Unknown
  Bacterial polypeptide expressing nucleotide sequence isolated from the Sargasso Sea
atgtcgcacaacacattcggacacatgttccgcgtcaccacctggggcgagagccacgggccggcgcttggctgcgtcatcgatggctgcccgcccggcattgcgttcacgctttccgacatccagacctatctagaccgccgcaagcccggccagtcgcgcttcgtcacccagcgccgcgaggccgatgaggtgaaggtgctttccggcgtcctaccgcaggaggatggcgtcacctacatcaccaccggcacgccgatct

SEQ ID NO: 287563 - DNA, 363 bp, Unknown
  Bacterial polypeptide expressing nucleotide sequence isolated from the Sargasso Sea
gagttgagattggcgctggattctctgtagtgaatcaaaaaggcagcgagcatagagatgagattgatactgatggctttaaacagaataactctggcggcacattaggcggtatctcaagcgggcaggatatttttgcaagcattgctttgaagcctacatccagcattatcaagccggctgagacaatcgataaaacaggtgaaaagactgaaattgtaaccaaaggaaggcatgatccttgtgtaggccttagggcaacacccataggcgaagccatgctggcaattgttttaatggatcattttttgagaaatcgagcccaaaatgctgatgtctcaatagaagaaaaaggcgaataaa

SEQ ID NO: 287564 - DNA, 784 bp, Unknown
  Bacterial polypeptide expressing nucleotide sequence isolated from the Sargasso Sea
atgggtagcagttttggtaaaattttccgtgtcactacttttggagaatctcatggaggcgctgttggagttattcttgatggatgtcctccaaagttaaaaataaatattgatctcatacaaaatgaattagataggcgaagacctggtcagagcaacattacaactccaagaaacgaagatgataaattagagatattgagtggtttaaaggaaggaataacacttggaacccctattgcaatgttggttcgcaataaagatcaaagaccaggagattatagtaatttagaacaagtattcaggccatctcacgcagatggcacatatcatctgaagtatggaattcaggctggttctggaggaggtagagcctcagctagagaaaccataggaagagttgctgcaggtgctatcgcaaaacaattattaaaaaacttgtttaatactgaaattctttcttgggtaaaacgtatacatgatattgactctcaggtaaataaaaataaacttactcaaagtaaaatagattcaaatattgttagatgtccagatgataaggtggcttcaaaaatgattaaaagaataaaagaattgcagcaagatggggattcttgtggaggtgttattgaatgtttagtgaaaaatgttccatcaggattaggtatgcctgtctttgataaattggaagctgatcttgcaaaggctttgatgtcattacctgctactaaggggtttgaaataggttctggtttcttgggaacttatttaagaggaagtgaac

SEQ ID NO: 287565 - DNA, 1096 bp, Unknown
  Bacterial polypeptide expressing nucleotide sequence isolated from the Sargasso Sea
gatgtctggaaacagtattggtcaaaattttgtggtgactacctttggtgaaagtcacggtgtggcgctcgggtgtattattgatggttgcccaccagggctcgaactcaccgaagctgatatgcagcatgatttagaccgccgtcgtcctggtacatcccgttataccaccgctcgccgtgagcctgatgaagtacggatcttatccggtgtgtttgaaggcaaaaccacaggcacctccattgggcttctgatcgaaaacaccgatcagcgcagccaagattactccaatatcaaagatttattccgcccaggacatgccgattatacctatcagcaaaagtatggcctgcgtgattaccgtggcggcggtcgctcatcggcccgcgaaaccgctatgcgggtcgctgcgggtgctgtggcgaaaaagtatttaaaacaagtgcatggcattagtatccaaggttatatgtcgcaacttgggccgattagcgccgagaccctcgattttagtcaaatcgagcagaacgcctttttcttccccgatgcgagtaagctcgaggcgctggatgaatatatgcgcgagctgaaaaaatccggtgattccattggcgccaaaatctctgtagtagcgacgggtgttcccgtgggactgggcgaacccgtgtttgacaggctcgatgccgacatcgcccatgccttaatgggcatcaacgcggtaaaaggcgttgaaatcggtgatggttttggcgttgtcacgcaaaagggctcggaagggcgcgatttaatgtcgccactgggttttgaatcaaatcatgccggtggcatacttggcggcatttcatcgggccaacccattgtcgcccatattgcattaaaacccacctcgagtatcagtgtgccgggccaaagcatgacggcccaaggggaaatggcggaagtggtgactaaaggtcgtcacgacccctgtgtcgggatccgcgcggtaccgatcgccgaagctatgctggcgattgtgttgatggatcatctgttaagacacagagctcaaaatcaggatgttcgcagtcatacaccgatcctcggcatgagatag

SEQ ID NO: 287566 - DNA, 1087 bp, Unknown
  Bacterial polypeptide expressing nucleotide sequence isolated from the Sargasso Sea
tatgtcatttaacacatttggaaagatatttcgattcactacatggggagagtctcatggtccagccataggctgtgtagtggatggttgtcctcctaacgtaagtataaatgaggctgatatccaaaaagaattaaataaaagaaaacctgggcagtctaagtttacaacccaaagaaaagaagacgataaagtaaatattttgtctggagtttttgaaggtaaaacaacgggcactccaatatcgatgattatttataataaggatatgagatctagggattatgaaacaataaaaaataaatttcgtcctggtcatgctgatttcacatatttcaaaaaatatggaattagagattatagaggtggcggtagacaatcagctagagaaaccgcttctagagtagcagccggagcaatagcaaaaaaagttttagaaaaaaaaattggaaaaaaatattatgttaaaggagcagttactcaattaggaattcttggttgtgatataaaaaaatgggatgataggtttatatcaaaaaatccttttttctgcccagataaatcaattttaaaactttgggaaaaatacttattaagtattagaaaagctgggtcctcttgtggagcaataattgaggtaagagcaaggggtgttccagtaggtttgggagctcctatttactcaaaattggatatggatcttgcatcagcgatgatgagtataaatgcagttaagggggttaatattggatctggaatgaactcagcacaattaagaggagaacaaaattcagatgagatatctcagtcaggtaataaaacgaagtttgacagtaacaatgctggcggaatacttggggggatttcctccggtcaagaaattactgtatcttttgctgtgaaaccaacttcatcaattttaaaaagtagaaaaacaatagatcgatttggcaaaaatacgtctatctctgtaaaaggtaggcatgatccttgtgtaggtataagggcagttccaattggagaagccatgatgcattgtgtattactggatcattatttgatgcataatgctcaatgcaatagttaa

SEQ ID NO: 287567 - DNA, 1084 bp, Unknown
  Bacterial polypeptide expressing nucleotide sequence isolated from the Sargasso Sea
catgtcacataatacatttggcaaattatttcgttttaccacttggggagagtcccacggtgaagctattggctgtgtaattgatggatgccctccaatgattccacttaatgagaaagatattcaaaaatatttggataagagaaagcctggaacctctcgttttgtaactcagagaaaagaagatgataaggtttctattctctctggggtttttgagggaaaaacaactggtacaccgattttactcctaatctggaataaggatcaaaaatctaaagattatactgaaataaagaataaatttagacctggccatgcagacattacttactttctaaaatacggaatgagagactaccgcggaggcggtcgctcatcagctcgagaaacagctagtcgtgttgcagcaggagcggtagccagaaaagttatcagtcatctttcaaagaaaaagatattgatacaaggggcagtaacgcaaattgggaagatgagcataaaccctagacattttaaatggaatgaagttcgtaaaaatagtttcttttgtcctgacaaaaagatcatatcgacatgggaagagtatctagatgttacacgtaaaaatggaacttctttaggagcaagaatactcgtaaatgtaaagaatgttccttcaggacttggtgaacctatatacggcaaattagatgctgaattagcatctgcaatgatgagcatcaacgctattaaaggagttgagattggtttaggaaatgagtctgttgaaatcactggtgatgaaaattcagatgaaatacgagctaacggtaagaaaatttccttttcatcgaataattctggtggcattttaggaggtatttcaagcggtcaagatatcaatataagtattgcggtgaaaccaacatcttcaatcttaaaaacaaaaaagacgattaataatagattaaataatacaaccatatccacaaaaggaaggcacgatccatgtgtaggtttaagggcagttcctattgctgaagcaatgacagcatgtgttttagctgatcatatcatgcgtaacaaagctcagtgtggctaa

SEQ ID NO: 287568 - DNA, 988 bp, Unknown
  Bacterial polypeptide expressing nucleotide sequence isolated from the Sargasso Sea
gctgccctccaatattgagttaaatgaagaaatgattcaaatggaactagatcgaagaaagcccggacaatctaaacatgttacacaaagaaaagaaccagatgaaattgaaatactatctggagtttttgagggcaaaacaacaggcacaccaattggactattaataagaaataaagatcaaaaatcaaaagattatgaggatattaaagataaattgagacccggccatgctgattttacttaccttaaaaagtatggaactagagattatagaggtggtggaagagctagtgcgagagaaacagtaatgagggtagccggaggtgcaatagcgaaaagaatactatcttctatggaggtaaaaatttctggaggagttgttcaaataggttcaataaaagctgattccatcgatcttgctgaaatatcaaataatagtttttctttcgctgatagttcaaaaattaatgaattagaagaattctttgataagttaagaaaagaacaagactcaataggagcaaagatacttataagggtagaagggcttatgcctggggttggatcacctgtattctcaaaacttgatgcagaattagctaaatctatgatgggagtaaatgctgtaaaagccgttgagttaggttctggggttggagtagtagagatgaaaggttctgagaacagagatttaataaaaaaagatggttttgaaactaataattcaggaggcatcctaggcggaatatcaaatggcgacgatattgatatatttgtatctttaaaaccgacttctagtatttcacaaaaaacaaaaacagttgatacagaaaataaagaagttgatttacaagttaagggcaggcatgatccatgtgttgggctaagagcaacaccaattctagaagcaatggcagcaatgtgcatactagatcagatattgttagatagagggcaatgcttcaatgttgatagagacctttga

SEQ ID NO: 287569 - DNA, 1084 bp, Unknown
  Bacterial polypeptide expressing nucleotide sequence isolated from the Sargasso Sea
atgtcttttaatacttttggaaaaatttttaggttcactacctggggagaatctcacggaccggctataggctgtatagttgacggttgtccaccaaatatacctatttcagagaaagaaattcaaaaggacatggataagagaaggcctgggcaatcaaaatttacaactcagagaaaagaaagtgataaagtttctattttatcaggggtctttcaaggaaagtctacgggaactcctatatcaatgatcatatataatgaggataaaagatcaagagattatgagtcaatcaaagataagtttagaccgggccatgctgactttacttattttaaaaagtacggaataagagattatagaggtggtggtcgtcaatcagctagagaaacagctagccgagttgctgctggagctatagctaaaattgttcttaaaaaaataattggtaaaaaatttagtattattggtgcggtaacacaattaggaataatgggttgcaatacttctaaatggaaagatagtgaaataagaaaaaatcctttcttttgtccagacaggtcatcagtaaatttatgggaaaaatatttattagggataagaaaatcaggttcatcttgtggagctgttatagaacttagagcaagaggtgttccagtaggattaggggctccaatatattcaaaattagatgcagatatagcctctgcactaatgagtattaatgctgtaaagggagttaatattggtgctggtatgggttcagcttacttaactggagaagaaaattctgacgaaataagaggtggtgcaaataaaatcaagtttaaaagtaacaaagctggaggaatcttaggcggtatatcatccggacaagatattatagcatcgtttgccgtaaagcctacatcttcaattttaaatagtcgggaaaccataaataaaaaaggtgagaatactaaaatttctgttaaaggcagacatgatccatgtgtaggaataagagctgttccaattggtgaagctatgttggcttgtgttatattagatcactttatgatgaataaagcccagtgtgattaat

SEQ ID NO: 287570 - DNA, 688 bp, Unknown
  Bacterial polypeptide expressing nucleotide sequence isolated from the Sargasso Sea
tatgtcatttaatacttttggaaaaaattttcgatttacaacatggggggaatctcatggggaagctattggatgtataattgatggctgccctcctctaataccacttaaggaaaaggatattcagaaatatttagatatgagaaagccaggaaaaaatagatttgttacacaaagaagagaagatgataaagtttcaattttatctggtgtatttgagggaaaaacaactggaactccgataatgctgttaatttggaacaaagatcagaaatcaaaagactacagcgatataaaaaataaatttagacctggacatgctgacctaacatattttttgaaatatggaataagagattatagaggtggaggtcgttcttccgcaagagaaactgcgagtagagtagctgctggcgctgtcgcaagaaaagtaattggacatatattaaaaaaagatattttaattcaaggtgcagttacacaagttggaaagctcacaattaatcaaagaaatttcaattggaatgacgtaaagaaaaattcatttttctgtcctgataaaaaaatagttaaagtttgggaagagtacctagatgaaactagaaaaaaaggatcatcattgggtgcaaaattattagtaaatgctaaaaatgttcccggccggacttggagaaccagtatatggtaa

SEQ ID NO: 287571 - DNA, 1087 bp, Unknown
  Bacterial polypeptide expressing nucleotide sequence isolated from the Sargasso Sea
atgtcatttaatacatttggaaagttatttcgtttcactacttggggagagtcccatggtcctgcaatagggtgtatagtggatggttgtccccccaatattccaataaaagagcaagatatacaaaaagagctaaataaaagaaaacctggacagtcaaaatttactactcaaagaaaggaagatgataaagtccaaatactatctggaatttttgaaggtaaaactaccggaacaccaatttcactaataatttataacaaagacatgaagtcaagagattacgaaacaataaaaaataagtttagaccaggtcatgcagattttacttattttaaaaaatatgggattagagattacagaggtggaggaagacaatcggctagagaaactgcttctcgagttgcagcaggagcaatcgcaaaaaaagtattacaaaataaattaggaaaaaaatttaaagtagtaggtggagttactcaactaggaattttaagttgtgatttaaaaaagtggaatgataatgaaataagaaaaaatccatttttttgtccagataaaaatatagttaaactttggaaaaaatatttattaagtataagaaagtctggatcttcatgtggtgcgattattgaggtaagagccagaggtattccgactggattaggtgctcccatttattcaaaactagatatggatattgcttcagctatgatgagtataaatgcagtaaaaggtgttaatattgggtcaggaatgaattcagctgtgctaactggtgaagaaaactctgatgagatttttcaaaaaggaaaaaaaattcaatttaattctaataatgccggaggtattttaggaggaatatcaactggtcaagaaattatagtttcatttgctgtaaaacctacttcttcaattttaaatagtagaaaaacaataaataaatttggaaaaaatacatcaatatctgtgaaaggaagacatgatccatgtgttggaataagagctgtaccagttggagaagctatgcttaactgtgttctgcttgaccactatcttctaaacaaagctcaatgtagtgattagt

SEQ ID NO: 287572 - DNA, 460 bp, Unknown
  Bacterial polypeptide expressing nucleotide sequence isolated from the Sargasso Sea
gatgattgaattgagagctaaaggtattcctttaggattaggcgctccaatatactcaaaacttgatgctgatattgcgtcggctttgatgagtataaatgcagttaaatctgttaatattggagcaggtagtgatgtagcaagtttaacaggtgaattaaactcagatgaaatgagaataaaaaaaggtaaaacaaaatttaaaacaaataaagccggaggtatcttgggcggaatatcatctggtcaggatatcatctgctcatttgcagttaaaccaacgtcatcgatattaaactcaagacaaactattgataaaaaaggaaagaacactaatatttctgtgcgtggaagacacgatccatgtgttggtataagagcagtgcctattggtgaagcaatgttagcttgtgttttattagatcattatttaatgaacaaagctcaatgtgggagttaa

SEQ ID NO: 287573 - DNA, 634 bp, Unknown
  Bacterial polypeptide expressing nucleotide sequence isolated from the Sargasso Sea
ttctgtgaatggatttgtttcagagataggctcgattaaagcaaactcttttgattataaaaaaacatctaataaatactttttttgcgatgaatcaaagttaagtgatttagataaaatgtttgctgacttaattgataaaggtgactctgttggagcaaggctaggtattgttgtagagaattgtccagtaggtctaggagatccagtatttgagaagttagatgctaacctagccaaagcaattatgacaattaatgcagttaagtctatatctgttggaaatgctgatgatattttaagcttgaaaggttccgaagcaagagatgaaataacctcttcaggatattcatcaaataattcaggcggtatcttaggtggcatatcaaatggagatgatataaacctaagttttattattaaaccaacatctagcatcaaaactaaaggcaaaactgttaatactgatggcaaagaagttaatatcgaggtaacaggaagacatgatccatgtgttggaattagagcggtgccaattgctgaggctatggttagtctggtattggtagatcatttactaataaatagagcacaatgcgcagatgttgaacaaaaattaccatttacagaataa

SEQ ID NO: 287574 - DNA, 456 bp, Unknown
  Bacterial polypeptide expressing nucleotide sequence isolated from the Sargasso Sea
taattgaaattagagcaagaggtatacccgcaggacttggggctccaatttattcaaaattagatactgatatagcttcaggtctaatgagtataaatgctgtcaaaggagtaaatataggagctggaatgaatgctgcacaattaagtggggagcaaaactcagatgaaatttctcaaaaaggaaaaaaaatgaagtttgactctaataatgctggtggaattttaggtgggatatcttctggacaggaaattattgcatcttttgctgttaagcctacttcttcaattttatcaactagaaaaaccattaataaatttggaaaaaatactactatttcagttaaaggtagacacgatccttgtgttggtattagagcagtgccgattggagaagctatgatgaattgcgttttattagatcattatctaatgaacaaagctcaatgtggttaag

SEQ ID NO: 287575 - DNA, 383 bp, Unknown
  Bacterial polypeptide expressing nucleotide sequence isolated from the Sargasso Sea
aggtgcaatgatgagtatcaacgctgttaaaggggttgaaataggagctggtaatgaggctgttgaattatcaggagatgaaaactccgacgaaataagagctaataaaaataaaaaaattatcttttcttctaataactctggcggaatcttaggtggtatatcaagtggccaggatttaaatttatcaataacaattaaaccaacatcgtcaattttgaaggcaaaaaaaacaattaataataaatttcaaaatacgtcgatttcaacaaaaggtcgtcacgatccatgtgtaggtttgagagctgtccctattgctgaagctatgatggcgtgtgttctagcagatcatatattgcgtaacagagcacagtgtggctaaa

SEQ ID NO: 287576 - DNA, 1066 bp, Unknown
  Bacterial polypeptide expressing nucleotide sequence isolated from the Sargasso Sea
atggctggaaattcttttggaaacatatttacattaacaacttttggagaatctcatggtcctgctcttggaggaattattgatggttgtcctgcaggattaaaaattaacttaaacaaggttaatgatgatttaaataggaggagacccggtcagtcagaaattgttactcaaagaaaagaagcagattcagttgaatttctttctggtatattcaaggataaaacaacaggcactcctataggatttataatcaaaaacagagatcataaatctaaagactataaacatataatgaattcctataggccttcacatgctgattttgtttatgataaaaaatatggatttagagattatagaggaggaggtcgaagctcagcaagagagactgttgttagagtagttgctggatcaattgcaaaacaactaattaaacccgtaaaaattaatgcatttgtatcttcagtaggagatatttcaatggatttagatttttcaaaaataaattttaataatactgaaaaatcaattgttagatgtcctgagccaaaaactgcaaaaaaaatggaggatctaatcaagaaaacaagaaaagctggagatacagttggaggagtggtatcatgtgtcattagaaatacaccaattggtttaggagaacctgtttttaataaactccattctgaacttggaagagcaatgctttctattaatgcagtaaaaggattcgaatttggaagtgggtttgaaggttcaaaaatgaaaggtagtgaacataatgacatttttacaaaagaagggaagactaagacaaatttatctggaggaattcaaggaggtatttcaaatggaatggatatttactttaatgttgcttttaagccagtctcaacaataatgagagaccaggaaacaatcaacagtaagggaaaaactataaaaattaaagggaaaggaaggcatgatccatgtgttgtcccaagagcagttccaattgttgaggcaatgtcagcaattgtaatagctgatttctatttgctaaatagactatcaaaaatctaat

SEQ ID NO: 287577 - DNA, 1084 bp, Unknown
  Bacterial polypeptide expressing nucleotide sequence isolated from the Sargasso Sea
catgtcaggcaatacgtttggaaaaatatttaaaattacgacttttggtgagagtcatggcactgctatgggctgtattttagatggttgtccgcctcaaattgagctaaaaaaagaggatattcagtatgaattagatagaagaaagcctggtcaatcagatgtaactacacaaagaaaagaagatgacgctgtagagattttgtctggagtttttgaaggaaaaaccctcggcacaccgataggaatgataatttacaataaagatcaaaaatctaaagactactcgaatataaaagatgtttttagaccaaatcatgcagacattacttatcaagcaaaatatggtcatagagattacagaggtggtggaagagcaagtgctagagaaactgcaaactgggtagctgctggagcaattgctaaaaagattcttaaaaacgaaggtgtttcagtaaatggttttgtatcagaaataggaaaagtgaaggctgattcaattaatcataaaaatataaataataaatacttttttagtgatgaatcaaaattgtctgaactagattcaatgttcaaagacttaattgaagagggtaattctgtaggtgcaaagctaggagttattgttgagaactgtccagttggattgggagatccagttttcgagaagttagatgctaatttagcaaaagcaataatgactattaacgcagtaaagtcagtatcaattggcaatgcagatgatctattgagccttaaaggttcagaagcaagggatgaaattacgacatcaggctttacttcaaataattcaggaggaatattaggcggtatatctaacggagatgatataagcctaagttttatcataaagccaacatcaagtattaaaacaaaaggaaaaactgtaaataaagaaggtaatgaggttgatatagaggttactggaagacatgatccatgtgtcggcatcagagctgttccaattgccgaggctatggttagtttggttttagtagatcatttattaatcaataaagctcaatgtgctgatgttgaacagaatcttccatttagtgagtaa

SEQ ID NO: 287578 - DNA, 859 bp, Unknown
  Bacterial polypeptide expressing nucleotide sequence isolated from the Sargasso Sea
aacaggtactccgatctcaatgataatttacaataaagatatgagatcaagagattacgaaacaataaaaaataaatttagacctggtcatgctgactatacatattttaaaaaatatggaataagagattataggggtggtggaagacaatctgctagagaaactgcttcaagagtagcagctggagcgattgcaaaaaaagtattagagaataaattaggaaataaatataaagttgttggtgccgtaacacagataggaattctaggttgtgatactagtaaatgggacgaaaaatttatttctaaaaatccttttttctgtcctgataaatcaataataaaactttgggaaaaatacttattgagtattagaaaatcaggttcttcatgtggagcaattattcaagtaagagccaagggtgttccaattggactaggtgctccaatttattctaaattagatatggatttagctgcagctatgatgagtattaatgcagttaaaggtgtaaatattgggtcaggcatgaactctgcccaacttactggggaacaaaattctgatgaaattatacaaaaaggtaagaaaactaattttaaatcaaataatgctggaggaattcttggtggtatttcatctgggcaagatataattgtgtcatttgctgttaaaccaacctcttctattctctcatcaagaaaaacaattgataaatttggaaagaatacatctatttctgttaaaggcagacacgatccatgtgttggtattagagcagtaccaattggagaatcaatgatgcactgcgtgttattagatcactatctaatgaatgttgcacagtgcaaaagttag

SEQ ID NO: 287579 - DNA, 1084 bp, Unknown
  Bacterial polypeptide expressing nucleotide sequence isolated from the Sargasso Sea
atgtcaggcaatacgtttggaaaaatatttaaaattacgacttttggtgagagtcatggtacagctatgggttgtattttagatggttgtccgcctcaaattgagcttacaaaagaagatattcagcatgaattagatagaagaaagcctggtcaatcagatgtaactacacaaagaaaggaaaacgacgctgtagagattttgtcaggagtttttgaaggaaaaacccttggaacacctataggaatgattatttataacaaagatcaaaaatctaaggattattcaaatatcaaagatgtttttagaccaaatcatgccgatattacttatcaagcaaaatatggacatagagattacagaggcggcggaagagcgagtgctagagaaactgtaaattgggtagctgctggagcaattgctaaaaagattcttaaaaaagagggtgtttcagtaaatggtttcgtttctgaaataggaaaagtaaaagctgatgcaattaatcataaagatataaataataaatactttttttgtgatgaatcaaagctttctgatttagatttaatgtttaatgatttaattgaagagggtaattcagttggtgcaaagttaggcgttgttgttgaaaattgtccggttgggcttggtgatccggtttttgagaagctagatgctaatcttgcaaaagcaataatgacgattaacgcagttaaatctgtgtctattggtaatgcagaagatctcttaagccttaaaggatctgaagctagagatgaaataacctcttctggatattcttcaaataattcaggtggaattttaggtgggatatcaaatggggataatataagtttaagctttatcatcaagccaacatccagtattaaaacaaaaggcaagacagtaaacaaagatggcaaagaagttgatatagaagtctctggaagacatgatccatgtgttggtattagagctgttccaattgctgaggccatggtaagtcttgtgctagtagatcatttgttaatcaacagagcgcaatgtggtgaagttgatcaggaactaccatttagtgaataaa

SEQ ID NO: 287580 - DNA, 832 bp, Unknown
  Bacterial polypeptide expressing nucleotide sequence isolated from the Sargasso Sea
atgtcttttaactctttcggaaaagttttaaaatttactacttttggagaaagccatggtccatctattggatgtgttatcgatggagtgccaccaaacttgaaaattgatgaaaaaattattcaaccctatttagacagaagaaaacctggtacaagtaaattcgtaactcaaagaagagaagatgacagagtgaaaatactgtcaggtgtttttgagggcaaatcaacaggcactcctattgcaatgattattgataatattgaccataggagcaaagactacactgaaataaagaaaaagtttagaccaggtcatgctgattacacttataacaaaaaatatggaataagagattttagaggcggaggaagatcttctgctagagaaacagctatgagagtgactgctggagctattgctgacattattttaaaaagttacttcaaagattttctaatacaaggatgcgttaagcaaattggaccacacaaaatagaaaaaaatcaaatcaactgggaatttagcaaaactaaccctttgttttgtccgaataaacaagctttaaaagtttgggaagactttttagaaaaggtaagaaaagaaggctcttctgctggcgctattatccagctaaaagcttcaggaataccacctggaatagggtctcctgtttattcaaaactggatagcgagatagcgtctggtttaatgtctataaatgctgttaaaggagtagaaataggttcaggatttaacttggttgatattgatggaacaaaagccagcgatgaaatcaatattgatgaaaataataatgttacttttaagt

SEQ ID NO: 287581 - DNA, 622 bp, Unknown
  Bacterial polypeptide expressing nucleotide sequence isolated from the Sargasso Sea
tatgtcaggaaatacttttggaaaaatttttactctcacaacctttggagagagccatgggaaagccctagggtgcattatagatggatgtccacctggcattgacttatccgagagtgatattcaaattgatttggatagaaggaagcctgggcagtctaagtatacaactcaacgcaaagagagcgataaagttgagatattatctggaacttttgaaggaaaaacaactggaacaccaataagtttaataattttcaatgaggaccagcgttcaaaagattatggtgaaatcaaagataaatttagaccaggacatgcagactacacatatagcaagaaatatggtttcagagactacagaggtgcaggacgatcttcggcgcgtgagactgtcgctagagttgccggaggagcggtagcaaaaaaagtcctcaaggatatgataggtttagatatatttggctatgtttctcaaataggcgaacataagccaagtaaaatatctaaaaatgatattgagtcgaaccctttcttttttcctgataagtctatgatatcgacattagaagattatataaatgcaattcgaaaatctggtgattcgattggtgctgaggtt

SEQ ID NO: 287582 - DNA, 658 bp, Unknown
  Bacterial polypeptide expressing nucleotide sequence isolated from the Sargasso Sea
cttggatgaaaaattaaatataaaaataaggggttatctatctcagataggagctttgaagattacttccattgattttgatgagataaacaacaacccttttttctgccctgatggatctattgtttctgatatagagcatttgatagatactttgagaaaagaaggggattccactggagctaaaattgaagtgtccgtcataaacctacctgttggattaggtgagcctgtatttgataaattggaagctgatcttgcaaaagccttgatgagtatcaacgccgttaaaggattcgaagttggaaggggttttggattggttgattctaaaggatctgaatcaagagatgagatgtctcctgaaggctatttaaccaataattccggtgggatatctggagggattagcactggccaagaaattaaattatccattgcattaaaaccaacttccagcataactaaagaaggtcaaactatcgatagtacaggagagtcgaaatcgatccaggtaaaaggtagacatgatccgtgtgtcggggttagagctacacccatcgctgaagctatgacagcacttgtactcatggatcactatttgaggaacagagctcaaaatgcagacgttaagagcgaaataccagatttaagctag

SEQ ID NO: 287583 - DNA, 547 bp, Unknown
  Bacterial polypeptide expressing nucleotide sequence isolated from the Sargasso Sea
ccattattttgccccgataaatcaatattaaaactatgggaaaaatatttgcttggtataagaaaatctggatcttcctgtggagcaattattgaaattagagctagaggtataccagtaggtttaggagcgccaatttattctaaactagatatggatttagcttcagcaatgatgagtataaatgctgtaaagggggttaacattggatcaggcatgaattcagcgcttttaacaggtgaagaaaattctgatgaaatagttcaaaaaggtaaatctccaatatttaaatctaataacgcaggaggaattcttgggggaatttcaagtggacaagaaattatagtttcattcgctgtaaaaccaacttcatcaatattaagttcaagaaaaactatagataaatttggaaaaaatacttccatttctgttaagggaagacatgatccttgtgttggaataagagctgttccaattggcgaagccatgatacattgtgtcctactagatcactttttaatgaataaagctcagtgtggaaaataaa

SEQ ID NO: 287584 - DNA, 1102 bp, Unknown
  Bacterial polypeptide expressing nucleotide sequence isolated from the Sargasso Sea
atgtccggcaataccctcggcacgcttttcactgtcacgaccttcggcgaatcgcacggtcccgcgatcggctgcgtgatcgacggctgcccgccgggaatggggctgaccgaagccgacatccaggtcgagctcgatcgccgcaagcccggcacgtcgcgtcacgtgacgcaacgtcaggaggccgacgaggtcgagatcctgtcgggcgtgttcgaaggcgtgacgaccggtacgccgatcgcgctgctgatccgcaacaccgaccagcgcagcaaggactacggcaacatcgtcgaaaccttccgtcccggccacgccgactacacctactggcagaaatacggcatccgcgactaccgtggcggcggccgctcgtccgcacgcctgaccgcgccgatcgtcggcgcgggtgcggtcgcgaagaagtggctacgcgagcgcttcggcgtcgaggtgcgcggctacatgagcggcctcggcgagatcgacgtgccgttcgtcgactggtcgcacgtgcacgagaatccgttcttctcgccgaatgcggcggtcgtgccggagctcgaggcgtacatggatgcgctgcgcaaggatggcgattcgatcggcgcgcgcatcgacgtcgtcgcgtcgggcgtgccggtcggctggggcgagccggtgttcgaccgtctcgatgcggacatcgccaaggcgatgatgagcatcaacgcggtgaagggcgtcgagattggcgcgggcttcgacagcgtcgcgcagcgcggctcggtgcacggcgatgagctgacgccggccggcttcgtcggcaaccatgcgggcggcgtgctcggcgggatttcgacggggcaggacatcaccgtgtcgatcgcgatcaagccgacgtcgagcatccgcacgccgcgccgctcgatcacgaaggccggcgaggaagcgacggtggaaacgttcggccgccacgatccgtgcgtcggcattcgcgcgacgccgattgccgagtcgatgctcgcgctggtgctgatcgatcatgcgctgcgccatcgcgcacagtgcggggacgtcgagacgtcgacgccgaagatcgcgggcagcgcgacctgac

SEQ ID NO: 287585 - DNA, 967 bp, Unknown
  Bacterial polypeptide expressing nucleotide sequence isolated from the Sargasso Sea
atgtcttttaatacttttggaaaaatatttagatttacgacttggggtgagtcacatggtccagctattggctgtattatcgacggttgtcctccaaatatcccaatttctgagaaggaaatacagatagatatggatcgtagaagacctggaaacactaagtttgtatctcaaaggaaagagtcggataaaatagaaattttgtctggtgtgtttgatggaaagtctacgggaactcctatttcaatattaataagaaacgaagataaaagatctagagattatgagtcgataaaaaataagtttagaccaggccatgctgatttcacatattttaaaaaatatggaataagagattttagaggaggaggcagacagtctgcaagagaaacagcctcaagagttgctgctggtgctatagctagaatagtattaaaaaatttattaggaaaaaagtttagtatttacggtgctgttatacaattaggattaatgggctgtgatagaaaaaattggaataataaagaaataagaaaaaacccatttttttgccctgataaaaaatcagtaaaactttgggaaaaatatttgatggcagtaagaaaatctggttcatcatgtggtgctataattgagctaagagcaaatggtatacctgcaggacttggtgcaccaatttactctaaacttgatactgacatagcaggtgctttaatgagtattaatgccgttaaaggagtaaatatcggtgcaggcatgggtgctgcatatttatcaggggaagaaaattctgatgaaatgagatctaaatctggaaaggctaaatttaaaagtaataatgctggaggaatacttggtggtatttcctcagggcaggaaataattgcttcatttgctgtaaaaccaacttcgtcaataattaatagtagagaaacaattgataaaaaaggtaaaaatacaaaaatat

SEQ ID NO: 287586 - DNA, 865 bp, Unknown
  Bacterial polypeptide expressing nucleotide sequence isolated from the Sargasso Sea
aatgtcaggaaattcgtatggaaaatcttttgttgtgaccacttttggtgagagtcatggggttgctcttggctgcattatcgatgggtgtcctccaggattggagctcaatgctgaagatattcagaaggatttggataaaagaaagccgggaagctccaaatatactactcaaagaaaagaagatgactccgtagaaatactatctggtgtttttgaaggcaagacaactggtacgcctataggtttattgattaggaataaagatcagaaatcaaaagattatgatgatttaaaagatgtatttagaccttctcatgcagattacacttacacaaagaagtatggttttagagatcatagaggaggcgggagatcttctgccagggaaacgactatgagagtagctgctggtgcaatcgcaaaaaaatatttaaaagaatcagtaggagtaagtattaaaggttacttatcacagattggtaacattaaaattaaacagatagatctttcagaagtagacaagaacccattcttttgtccggacactcaaatagtggaacgcatagaaactttaattgatgaattaaggtctgaaggggattctgtaggagcaagaatagagatcatggcttcaaatttacctgtaggacttggagaaccagtttttgacaaacttgatgcagatatcgcaaaaggactcatgagtattaacgctgtaaaaggcgttgaaatagggaatggatttgatttggtaagtgctagagggtcagatagtagagatgaaatcacacctgaaggctttaaaactaattcctctggaggcatagcgggtggtataagtaccggccaagagataatagct

SEQ ID NO: 287587 - DNA, 469 bp, Unknown
  Bacterial polypeptide expressing nucleotide sequence isolated from the Sargasso Sea
ttgtggagcaataatgaagttagagcaagaggagttcctttgggacttggagccccaatatactcaaaattagatatggatcttgcagcagccatgatgagcattaatgctgtaaagggtgtaaatattggatcaggaatgaactctgcaatgttaactggtgaggaaaactctgatgaaattttgaaaaaaaaaggtaaaactagtttcaaatcaaataatgcaggaggaattcttggaggaatatctactggacaagaaataaatgtatcatttgcagtaaaaccaacttcatctattttgtcatcgaggaaaacaatcgacagatttggtaagaatacaacaatatctgtaaaaggaagacacgatccatgtgttggaattagagcagttccaataggagaagcgatgatgcattgtgtaattcttgatcactatttaatgaatacagcacaaaataaaatttaat

SEQ ID NO: 287588 - DNA, 1072 bp, Unknown
  Bacterial polypeptide expressing nucleotide sequence isolated from the Sargasso Sea
aatgtcatctaattcaattggaaaaattttctccttttcaacgtggggagaaagtcacggtaaagcaataggatgtgtaattgatggcgttccatcaaatattgagcttagtgaaaatgatatacagccatatcttaacctaagaaaacctggacaatcaaagtacactactcaaagaaaagaagatgataaagtagaaattttgtctggagtttttgagggtaaaacaacgggtcatccaatatcactaattatttacaacaatgatcaaagatcaaaagattactcagaaataaaagataaattccgacctggtcatgctgattttacatattggaaaaaatatggcatccgagattacagaggtggaggaagatctagtgctagagaaactgcaatgcgagttgcagctggggctgttgcaagaaaagtaatttggaaaaaaattaataataaagttaaaatcacgggcgcacttattcaaattggtaaatcaaaaattaattatgataattggaatgaaagtaatattcatgaaaatgattttttctgcccagatgaaaaaattatacctatatggcaagatcttattactcaagctagaaaagatggttcatcattaggagcaataattgaagttcgagcatctggcgtaccagcaggactaggagaaccaatttatgataaactagactcagatatcgcgaaagcgctaatgacaataaatgcagttaaaggtgtagaaataggaaatggctttggtagcgtaaatgaagatggaaaaacaaatgtagacgagatgagcatcaaagatggaaagcctgcatttctaagtaataacaatggagggatacttggaggtattagttctggacaagatataatatgccgttttgttgtaaagccaacaagttcaatttcaactgaaagaaaaacaatagatattaatttaaaagaaacaacaatttcaactaaaggccgtcacgatccatgtgttggcataagagctgttcctgtcggtgaagcaatgattgcgacgacaatcgcagatcatattcttcgtttcttataa

SEQ ID NO: 287589 - DNA, 514 bp, Unknown
  Bacterial polypeptide expressing nucleotide sequence isolated from the Sargasso Sea
atgggaaaaatatttattggggtatcagaaaagcaggatcttcatgctggagctataatagaagtaagagctagaggtgttcctgttggtctaggtgctccaatatattcaaaactcgatatggatttagcgtcagctatgatgagtattaatgctgttaaaggagttaatattggatctggtatgaattcagctcaattatctggtgagcaaaattcagatgaaatgtctaaaaaaggtaaaaaaacaaaattttattcaaataatgcaggaggaattttgggtggaatttctagtggccaagaaattgtagtctcgtttgctgttaaaccaacttcttcaattttgagccaaagaaaaactatagacaaatttggaaaaaacacttcaatatcagttaaaggtagacatgacccttgtgttggtattagagcagtaccaataggtgaagcaatgatgcattgtgtaattttagatcattatcttttaaataaagctcagtgtggaaattaat

SEQ ID NO: 287590 - DNA, 862 bp, Unknown
  Bacterial polypeptide expressing nucleotide sequence isolated from the Sargasso Sea
cttgggaactcccatagcattgttaatcaaaaatgaagatcagatttcaaaagattattcaaatattaaagatacatttaggccaaatcatgctgacctcacatatcaaggaaagtatggtattagagattacagaggtgggggcagatcaagtgcaagagagacagcaatgcgagttgctgcgggagcagttgctaagaagtatttaaatacacatggaattataactaagggctttgtatcgcaaatcggaagtatttctgctgatacagttgatcttgaatttgtaaataaaaataaattcttctttcctgatagatcaaaaattagctcacttgaagagttttttgaagaactcatcaaagaaggcgactcaataggtgccaagctaaatattaaagttcaaaactgcccagttggccttggagaacctgtttttgataaattaaatgctgatttagcaaaagccataatgagtattaatgccgtaaaatcggtttctattggcaactctgacaagattccattttcaaaaggatctgagctaagagatgaaattaccaagaccggatttgattcaaataattctggtggaatccttggtggaatttcaaatggtgatgatattgatataagttttttaattaaacccacatctagcataagtaaagctaccacatccatagataaagatggaaatgaggttgagcttgaaattaaaggaagacatgatccttgtgttggaattcgagcagtaccaattgcagaggcaatggtgaaccttgttttaattgaccatcttcttagaaaccaggcacagtgcggtgatgttgatcaaaaactcccatttgtaacggaataa

SEQ ID NO: 287591 - DNA, 245 bp, Unknown
  Bacterial polypeptide expressing nucleotide sequence isolated from the Sargasso Sea
tggagatgacataagcctaagttttatcatcaagccaacctcaagcattaaaacaaaaggtaaaacagtaaataaagatggtgaggaagttgatattgaagtaactggaagacatgacccatgtgtaggtataagagcagttcctattgccgaagccatggtgagtcttgtgctggccgattatttattgattaatcgagcacagaatgccgaagttaagcaggaattaccgtttagtgaataaa

SEQ ID NO: 287592 - DNA, 1087 bp, Unknown
  Bacterial polypeptide expressing nucleotide sequence isolated from the Sargasso Sea
tatgtcatttaatacctttgggaaaatatttagattcactacgtggggagagtctcatggaccagcaattggatgtgtagtcgatggttgcccacccaatatcaaaataaatattgacgaaattcagaaagatttaaataaaagaaaacctggtcaatcaaaatttacaactcaaagaaaagaagatgatagagttgaaattttatcaggtatttttgaaggtaaaacaactggaactccaatttcaatgataatttataataaagatatgagatctaaagactatggaaatattaaaaataaatttaggccaggacatgcagattttacctattttaaaaaatatggaattagagattatagaggaggaggaagacaatctgcaagagagacagcctctagggttgcagcaggaggtatagcaaaacaaatattaaaatttattctaggaaaaaaatatgatgttgttggaggagtaactcaattaggaatcttaggatctaatccaaaaaattggaacgaaaaatttatcaaaaaaaatcaattattttgtccagataaatctgtgctaaagctttgggaaaaatatttacttagtataagaaaagcaggatcatcttgtggtgcaattattgaaattagagctaagggagtacctgtaggattaggggcgccaatttattcaaaattagatatggaccttgcatcagctatgatgagcatcaatgctgtaaagggagtaaacataggatctggaatgaattctgctcaattgacaggtgaagaaaattcagatgaaattaatcaaagaggaaaatctacaaaatttaattcgaacaatgctggcggtattttgggcggtatatcaagtggtcaagatataattgtatcatttgcagtcaaaccgacttcatcaatattatctactagaaaaacaattgataagtttgggaaaaatacaactatatctgttaaaggccgacatgatccttgcgtagggataagagccgttcctataggagaggccatgatgcattgtgtaatacttgatcactacttgctaaataaagctcaatgtggaaactaa

SEQ ID NO: 287593 - DNA, 331 bp, Unknown
  Bacterial polypeptide expressing nucleotide sequence isolated from the Sargasso Sea
atgaactcggcccaacttactggtgaacaaaattctgatgagatttctcaaaaaggaaaaaaaactagttttaaatcaaataacgcaggtggaattcttggaggaatatcaactggacaaaatatagttctttcatttgcagtaaaaccaacttcttcaattcttaattcaaggaaaactattgacaagtttggaaaaaatacatctatatctgtgaaaggaagacacgacccttgtgttggcattagagcagttccaataggcgaagcaatgatgcattgtgtaattttagaccattatttaatgcacaatgcccaatgcaaaagttaat

SEQ ID NO: 287594 - DNA, 784 bp, Unknown
  Bacterial polypeptide expressing nucleotide sequence isolated from the Sargasso Sea
atgtcatttaatacatttggaaagatatttcgtttcacaacttggggagaatcccatggacccgctataggatgtgttattgatgggtgtcctccaaatataagtataaaagaaaaagatatacagaatgaattaaataaaagaagacctggtcaatcaaaatttacgactcaaagaaaagaggacgataaaataaatattttatctggtgtatttgagggtaaaactactggtacacctatatcattgctaatttataataaagatatgagatcaagagattatgaaacaataaaaaataaatttagacctggtcatgctgattttacatattttaaaaaatatggaataagagattacagaggtgggggtcggcagtcagctagggaaacagctgctagagtagctgcgggagctgtagcaaaaatggttttagaaaaaaaaattgggaaaaaatataaagtcacaggaggagttacacagctaggaattcttggttgtaatttaaaaaattggaatgacaattttatttctaaaaatccttttttctgtcctgacaagtcaattgtaaaaatatgggaaaagtatttgttaagcataagaaaagcaggttcatcttgtggagcaataattgagataagagctaaaggagtccccttaggattgggagctccaatttactcaaaattagacatggatttagctgctgcaatgatgagcattaatgcagtaaaaggtgtaaatattggttcagggaatgaactcggcccaacttactggtgaa

SEQ ID NO: 287595 - DNA, 313 bp, Unknown
  Bacterial polypeptide expressing nucleotide sequence isolated from the Sargasso Sea
aatagtgtctatgaaactggaatttctaatgtcgatgaaatgaaaattaaaaacaaaaaacctatatttctatcaaataacaatgggggtgttcttggtggcataactactggtcaagaactaataactagatttgtagtaaaaccaacaagttcaatattatcaacaaaaaaaacaattaatactaaattaaaagaaacaacaatttcaactaaaggtcgtcatgatccatgtgttggtattagagcagtccccgtaggtgaagcaatgattgctagtacaattgcagatcattgtttaagatttctttaat

SEQ ID NO: 287596 - DNA, 603 bp, Unknown
  Bacterial polypeptide expressing nucleotide sequence isolated from the Sargasso Sea
aatgtcttttaatacttttggaaaaatatttagatttactacatggggtgagtcacatggtccagctataggctgtattattgacggttgtccgccaaatatcccaatttctgagaaagagatacaggtagacatggacagaagaaggccgggaaataccaagtttgtttcacaacgaaaagagtcagataaaattgaaattttgtctggtatatttaatggcaaatcaactggtacgccaatttcaatattaataaaaaatgaagataaaagatcaagagattatgagtctataaagaataaatttagaccaggtcatgctgattttacgtattttaaaaaatatggaattagagattttcgaggtggtggaagacagtcagcaagagaaactgcttcgagagtggcggctggcgcaatagctagaatagtattaaaaaatttattaggtaaaaaatttagtgtttatggcgctgttattcagttaggtttaatgagttgcgatagaaaaaattggaacaataaagagataagaaaaaatccatttttttgcccagataaaaaatctgtaaaactatgggaaaaatatctaatagcagtaag

SEQ ID NO: 287597 - DNA, 257 bp, Unknown
  Bacterial polypeptide expressing nucleotide sequence isolated from the Sargasso Sea
tggaattacaaatggtgatttgatagagctggagtttattgtcaagccaacttctagtatcaaatctaaaggtcaaaccatcaatacagctggtgaagaggtaaaggtagaggtcactggtaggcatgatccttgtgttggtattagagcggtgccgatagcagaagcaatgattaatttagttctaatggatcacttgcttagaaatcaggcccaatgcggaaaagtagatcaatctagtccgtttaagaattaat

SEQ ID NO: 287598 - DNA, 1177 bp, Unknown
  Bacterial polypeptide expressing nucleotide sequence isolated from the Sargasso Sea
aatgattagatttttaacttcaggcgagagtcatgggccagagctaacggggataattgagggattaccttcaggttttcttgttacaaaagaatacatagacagtttccttcaacgcagacaaaaaagtttggggtctggtggaagaatgaatattgaatccgatcaggtagagatttcttcggggataattaataatctcacaactggtggaccaattacattaaaaataaagaacaacgattggaaaaattggaaagataaagatattgatccatatgtagttcctagacctggtcatgctgacctagttggaactgcaaagtatgatgcaaaggatattcgcctaattcttgaaagatcaagtgccagggaaactgcaatgagatgtgcaattggagcaatagcttcacaaatacttgaaaattttgacatacatatttgtggatatgtttcaggaattggatcactggagtatttatataaaggaacagatggcattaaaaatctgcaaaataaagttacagaatcttcagtgtcgtgtccagatgacaaaatttccaaagaaatggaaaatgaaataaaacttgcaagaaaaaagaaggatactcttggaggttctattaccacaattgcaacaggcgtacctccaacactgggtagtttcgttcattgggatagaaaattagatgcaaatatggcgcgtatttttatgtctatacaaagtgtaaaagcagtagaaattggtaatgggatagaagtatctaaaaattatggaactgaggttcaagatcagtatttccttgaccaggaaaacattaaaaaagaatcaaataacttaggaggttttgaaggagggatgacaaatggggaggatatagttgtaaaagcttacttaaaaccgattagcacaactttgactccgatcaaaagtattaatttatcaactaaaaatgaaacagagacagtatatgaacgatctgatacctgtgccgttccaagagctgtccccatatttgagagcgcaatggcattagaaattcttaagaatttattaataaaaactgggggagatagcaaaaaagaaataacaaaaaactttgaaaacatttcaaagctgcatttagatgagtttgatctagataataaaacctggaacatgaaatatgaaacataa

SEQ ID NO: 287599 - DNA, 458 bp, Unknown
  Bacterial polypeptide expressing nucleotide sequence isolated from the Sargasso Sea
tatgtcatttaatacttttggaaaaaattttcgatttacaacatggggggaatctcatggggatgctattggatgtgtgattgatggttgtcctcctctaataccacttaaggaaaaggatattcagaaatatttagatatgagaaagccaggaaaaaatagatttgtcacacaaagaagagaagatgataaagtttcaattttgtctggtgtatttgagggaaaaacaactggaactccgataatgctgttaatttggaacaaagaccaaaaatcaaaagactacagcgatataaaaaataaatttagacctggacatgctgacctaacatattttttgaaatatggaataagagattatagaggtggaggtcgttcttccgcaagagaaactgcgagtagagtagctgctggcgctgtcgcaagaaaggtaattggacatatattaaaaaaagata

SEQ ID NO: 287600 - DNA, 1087 bp, Unknown
  Bacterial polypeptide expressing nucleotide sequence isolated from the Sargasso Sea
atgtcatttaatacttttggaaagttatttaggtttaccacttggggagaatcacatggtccggcaataggatgcgttgtagatggctgccctccaaatattccaataaaagaaagtgatatacaaaaagaacttaataagagaaaaccaggacaatctaaatttacaactcaaagaaaagaggacgacaaaattaatattttatctggtgtttttgagggtagaacaactggaactccaatttccctaataatttataataaagatatgagatctagagactatgagacaataaagaataaatttagaccaggacatgcagattatacttatttcaaaaaatacggtatccgggattacagaggtggtggaagacaatctgctcgcgagactgcggctagagttgcggcgggtgctattgcaaaagttgttttgaaaagtaaaattggaaagaagtatcaagctgttggtgctgttacacaattagggatattaggatgtgacttaaagaaatggaaagacaaaacaatttctagtaacccatttttttgtcctgataaaactgtgattaaactttgggaaaaatatttacttgggataagaaaagctggatcatcttgtggagcaataattgaagttagagcaagaggagttcctttgggacttggagcgccaatatactcaaaattagatatggatcttgcggcagcaatgatgagcattaatgctgtaaagggtgtaaatattggatcaggaatgaactctgcaatgttaactggtgaggaaaactctgatgaaattttgaaaaaaaaaggtaaaactagtttcaaatcaaataatgcaggaggaattcttggaggaatatctactggacaagaaataaatgtttcatttgcagtaaaaccaacatcatctattttgtcatcgaggaaaacaatcgatagatttgggaagaatacgacaatatctgtaaaaggaagacacgacccatgtgttggaattagagcggttccaataggagaggcgatgatgcattgtgtaattcttgatcactatttaatgaatgcagctcaaaataaaatttaat

SEQ ID NO: 287601 - DNA, 1084 bp, Unknown
  Bacterial polypeptide expressing nucleotide sequence isolated from the Sargasso Sea
catgtcacataattcttttggaaatttattaaagtttactacttggggagaaagtcatggagaggctataggttgtgtcgttgatggttttccagcaggaatacctattaacacaaaatatattcaaacaagactagatttaagaaaaccaggtcagtcaaaatttacaacacaaagaaaagagaaagatgaagttaatatactctctggagtttttaacggtaaaagcactggcgctccgatatcaatgataatttataactctgaccaaagaagcaaggactattcagaaataaaaaataaatttcgacctggtcatgccgattacacctattttatgaagtataaaaattacgattatagaggtggaggaaggtcaagtgctagggaaactgcgatgagagttgctgcaggtgctctttcagagttacttctaaaaaaaatttcaaaaaataaaataaatgttacaagtgctgtaattcaaataggtaatgagaaaatagaaaactcaacttggaataataattttatttacaataatccttttttctcaccgaataagtctgtccttaaaaagtgggaagatctaatacttactcatcgaaaaaaaggttcttctcttggcgctgtaattgaagttagagtctcaaattgtcctgtaggtataggagagcctatatatcaaaaacttgactctgagttatcaaaagcgattatgagcattaatgctgtaaaaggtatagagtttggaactggctttgatttagtaaactatgatggcactaatggatctgatcaaattaactttaaaaataaaaaaattaaatttcatactaaccatgctggaggaatattaggtgggatttcttcaggacaagatattatttttagatatattgttaaacctacaagctcagtattaagtgaaaaaaatactgttacaaagaattttaaaaacactaaaatcaaaactaaaggacgtcatgatccttgtgtaggcattagagcagtaccagtgggaatagctatgaccaattttgttattgcagatttgttactaattcacaaatcaaaatcactttaa

SEQ ID NO: 287602 - DNA, 1075 bp, Unknown
  Bacterial polypeptide expressing nucleotide sequence isolated from the Sargasso Sea
atgtctggaaatacttttggaacaatttttaaactaacaacattcggtgaaagccatgggttggctatgggagcaatagttgatggatgtcctccgaatattgaattaaatgaagaaattatccaggcagagttagacagaagaaaacctggacaatctaaacatgttacacaaagaaaagagccagatagagttgaaatattatctggagtcttcgaaggcaaaacaacagggactccaattggtcttttaatcaagaatactgatcaaaaatcaaaagattatgaagatattaaagacaaattgagaccaggacatgctgattacacttattttaaaaagtatggaattagagactatagaggtggaggaagagcaagtgcaagagaaactgtaatgcgtgttgctggaggggcaatagctaagaagattttatcttctatgaaaataaaaatttctggaggtgtggttcaaattggttcagtaaaggctaaatcaattgatctttctgctgttctagataatagcttttcttttgttgatagttcaaagattaacgaattagaagacttttttaataagttaaggaaagagcaagactcaataggggcaaagattcttataagaatagaaggtcttatgcctggaattggctcaccagtattctcaaaactcgatgctgaattagctaaatctatgatgggtgtaaatgctgtaaaagctgttgaattaggctctggtactaaagttgtagaaatgaaaggttcagagaatagggacctgataaagaaagatggttttgagactaataattcagggggaatcttgggtggaatatcaaatggagacgatattgatatattcgtatcattaaaaccaacttcaagtatttcacaaagcacaaaaacagttgatacagaaaataatgaagttgatttacaagttaagggtagacatgatccatgcgttgggcttagagcaacaccaattctagaggcaatggcagcaatgtgtattctagatcagatactgctagatagagggcaatgctccaatgttgatagagacctttgaa

SEQ ID NO: 287603 - DNA, 475 bp, Unknown
  Bacterial polypeptide expressing nucleotide sequence isolated from the Sargasso Sea
gatgggcgacagtttcggacaccttttccgcatcacaacttggggagaatcccatggcggcggcgttggagtagtgattgatggttgccctgccggattggaaatcagtgaatcggaaattcagtatgaaatggaccgtcgtcgtccaggccagagtaaaatcactacacagcgcaaggaaagcgattctgtacggattctttccgggatcttcgagggaaaaactactggaaccgctatttcgatcatggtcgaaaatcaggacgcccgcccacaagcctatgaacatctgaaagacctctatcggccaagccacgcggattatacctacgaagccaaatatggattccgtaattggatgggtggaggaagagccagtgcccgtgaaaccatcggcagggttgctgccggagccctcgccaagaaacttctgaaacaatggaatggaacccaaaccctcgcatgggtcgaacag

SEQ ID NO: 287604 - DNA, 520 bp, Unknown
  Bacterial polypeptide expressing nucleotide sequence isolated from the Sargasso Sea
gaccgccgtgaaatgggctgattttttagatgacgtccgtaaaaaaggttcatccgccggtgcagttgttgaaattgaaattaatggtattcctgctgggcttggtgaaccaatatatggaaaattagacagtgacctagctaatgcgatgatgtcgataaatgcagtaaagggtgtggaaataggagatggctttgatttggtcacaacaccaggtgagttagcttcagatgaaatcagaatatccgacggggaacccgtttttttgacaaataaagccggcggaattttgggtggtatatctaccggccaacccattatcgtgcgatttgcaataaagcctaccagctctattcttactccgagacgctcaatagataaatttggaaatgatgtggaagtcagaacaaagggaagacatgatccgtgtgtggggatacgcgcggttcccgtcggcgaagcaatggcggcctgcgtactagcagaccacgttctcagacatcaggcacaatgcttttaa

SEQ ID NO: 287605 - DNA, 1084 bp, Unknown
  Bacterial polypeptide expressing nucleotide sequence isolated from the Sargasso Sea
tatgtctcataatacattcggaagtatttttaagtttactacatggggtgagtctcatggcaaggctattggatgtgtggttgacggaactcctccaatgattgagttgttagaaaaagatattcaattatggctagataaaagaagaccaggacaaaatcaatacacaagcccaagaaatgaacctgaccaagttgaaatactatccggagtttatgagaaggaaggaatccaatatacaactggaacacctatttctatggtgatttacaataaagaccaaaaatctcgtgattatgatgatacaaaagataaatttagaccaggtcatgcagattacacatatttaagcaaatacgggattagagaccctcgagggggtggacgccaatctgctcgagaaactgctatgagagttgctgccggagcaattgcaagaaagattattcctgaaatcgaaataaaaggagcactcgttcaattaggagatttaaaaatcgataaaaccaaatgggatgatgattttataaatgaaaatcctttttggtgtcctgataaaagttcaattaatagttgggaagataaaattaattctcttgtagatgagggagatagttgtggagcaattattgaaattatagctaaaaatgttccagttggattgggtgcaccagtttatggaaaacttgactcggatttaggttctgcaattatgagtataaacgcagttaaaggtgttgaaattggaaacggttttgacgctgtaaacttaaaaggtagtgaaaacggtgatgagatgcgaatgaaaaataataaaccagctttcctatctaataattcaggaggtattcttggaggaatatcttcgggacaagatattattgtaagatttgctgttaagccaacctcgtctatcagaaaaaagagaaaaacaattgataaaactcaaaaagatacagaaataaccactaagggaagacatgatccttgcgtaggtattagagcagtgcctgttggagaagcaatggttgcatgtgttttggctgatcatttcttaagaaatagagctcagattggaaattaa

SEQ ID NO: 287606 - DNA, 1084 bp, Unknown
  Bacterial polypeptide expressing nucleotide sequence isolated from the Sargasso Sea
atgtcaggcaatgcgtttggaaaaatttttaaaattatgacttttggtgaaagtcacggcacagctatgggttgtattttagatggttgtccaccagaaatagaaatatcagaagaagatattcagcttgaattggatagaagaaagcctggtcaatcagatgtaaccactcagagacaggaagacgatgctgttcagatattatctggagtttttgaaggaaaaacccttgggactccaataggaatgataatttacaacaaagatcaacaatctaaagattattctaatattaaagatgtcttcaggcctaatcatgcagatattacatatcaagcaaagtacggtcatagagattacagaggtggcggaagagctagtgcaagagagacagcaaattgggtcgcagcaggtgcgattgctaaaaagattcttaaaaaagaaggagttgaagtaaatggttttgtttctgcaataggaaaagtaagagctgaatcaatcaattataaagatatagataataaatacttcttttgtgatgaatctaaattaactgacttggattcaatgtttgataatttaattaaagagggtaattctgttggtgcaaagttaggcgttattgttaagaattgtcctgtaggtttaggtgatccagtttttgaaaagctggatgcaaatttagcaaaagcaataatgacaatcaatgctgtaaagtcagtatctgttggtaatgttgatgatctacttaatctaaaaggctcagaagcaagagatgaaataacaacgtcaggtttttcatcaaataattcaggcgggatattaggtggtatatctaatggtgacgatataagcctaagttttattattaagccaacatcaagcataaaaacaaagggtaaaactatcgataaagatggtaaagaggttgatatagaagttactggaagacatgatccatgtgtgggcataagagcggtaccaattgctgaggctatggttagcttagtcttagtggatcatttcttaattaataaagcacaatgtgctgatgttaagcaaaatcttccatttagcgaataaa

SEQ ID NO: 287607 - DNA, 751 bp, Unknown
  Bacterial polypeptide expressing nucleotide sequence isolated from the Sargasso Sea
atgggcagcagcttcggcgacctcttccggatcagcaccttcggtgaatcccacggcggaggggtgggtgtcatcgttgagggctgtccaccacggctcaacctcagcgtcgagtcgattcaggccgaactggaccgacgcaagccaggccaaagccacatcaccacaccgcgcaaggaagcggaccaggtggaaattctcagtggcctgctggatggcgaaaccacccttggcaccccgattgccatggtcgtgcggaacaaggaccaacggcccggggattacaaggacatggcggtcgcctttcggccctcccatgccgatgccacctaccaggcgaagtatggaatccaggcccgcagcggtggtggacgtgcatcagcccgggaaaccatcggccgtgtcgctgcaggtgcgatcgccaaacaactgttgaaacaagcagccggaactgaaatcctggcctgggtgaagcggatccacactatcgaagcctccggcatcgacccacagcaggttcagctgagtgatgtggaggccaacattgttcggtgtcccgagccagcgatcgccgagcggatgattgagcgcatcgaagccattggccgcgagggtgattcctgcggcggggtgatcgaatgcgtggtgcgtcatcccgccattggtctgggcatgccagtgttcgacaaactcgaagccgacctcgccaaagctgtgatgtcgttgccggccaccaaaggatttgaaattg

SEQ ID NO: 287608 - DNA, 868 bp, Unknown
  Bacterial polypeptide expressing nucleotide sequence isolated from the Sargasso Sea
ggtaaaacaacaggaactccaatatcaatgattatatataataaagatatgagatctagagattatgaaacaataaaaaataagtttaggcctggtcatgcagattatacgtattttaaaaaatatggaataagagattatagaggtggaggaagacaatccgcaagagaaacagcaacaagagtagcggcaggagcaatagcaaaaaaagttttagaagcaaaattaggaaaaaaattcaatgttgtgggtgctgtaactcaattaggaattttaggatgtgacttaaataattggagagataaggaaatttcaaaaaatcctcttttttgtccagataaatctgtattgaaattatgggaaaaatatttattaagtattagaaaagcgggttcttcatgcggggctataatagaagtaagagccagaggtgtgcctgttggtctaggagcaccaatatattcaaaacttgatatggatttagctgctgcaatgatgagtattaatgcagtaaaaggagttaacataggatctggcatgaattcagctcaattaactggtgaacaaaattcagatgaaatatctaaaaaaggaaaaacaacaaacttttattcaaataacgcagggggtattttaggtggaatttctagtggtcaagaaatagtagtttcttttgcagttaaaccaacttcttctattttaagccaaagaaaaactatagataaatttggaaaaaatacatcaatatcagttactggtagacatgatccttgcgtaggaatcagagcagttccaataggagaagccatgatgcattgcgtaatcttggatcattaccttttaaataaggctcaatgtggcaattaat

SEQ ID NO: 287609 - DNA, 1087 bp, Unknown
  Bacterial polypeptide expressing nucleotide sequence isolated from the Sargasso Sea
atgtcatttaatacttttggaaagttatttagatttactacttggggagagtctcatggtcctgcaattgggtgtgttgtggacggatgcccaccaaatgttccaataaaggaaagtgatattcaaaaagaacttaataaacgaaaaccaggtcaatctaaattcacaacacaaagaaaagaggatgacaaaattaatattttatctggtgtttttgagggaaaaactactggaactccgatatctttaataatttataacaaagacatgagatctagagattatgagacaataaagaacaaatttcgaccaggacatgcagattacacttattttaaaaagtatggaattcgggattatagaggaggtggaagacaatcagcccgtgagactgcagcaagagttgcagcaggggcaattgcaaaagtagttttgaaaaataagattggtgctaaatatcaagcagtcggtgcagttatacaattaggaattttagggtgtgatataaacaaatggaaagacaaaactatatccacaaatccatttttttgtcctgacaaatctgtaattaagctctgggaaaaatatttactcggcataagaaaagctggttcatcttgtggagcaataattgagataagagcaagaggagtacctttaggacttggagcgccaatatattccaaattagatatggatttagcagctgcgatgatgagcattaatgctgtaaagggggtaaatattggatcaggaatggattcagctatgctaactggggaagaaaactctgatgagattttacaaagaaaaggtaaaactagttttaaatcaaataatgctggtggaattttgggtggaatttcaacaggtcaagaaataaaaatttcatttgctgttaaaccaacatcatcgattttatcatctagaaaaacgattgataagttcggcaaaaatacaacaatatctgttaaaggaagacatgacccttgtgtaggaattagagcagtcccaataggagaagctatgatgcattgtgtaatacttgatcactatttaatgaacactgctcaaaacaaaatttaat

SEQ ID NO: 287610 - DNA, 1183 bp, Unknown
  Bacterial polypeptide expressing nucleotide sequence isolated from the Sargasso Sea
atgaaaattagatatcttactgctggcgaaagtcatggaccagaactcactgcaattttagaaggtattccatctaatttcataatcacaaaagaatacattgatagttttttatccagaagacaaaagagccttggttctggaggaaggatgaacattgaaaaagatgaggtattaatttcttctggagtagtcaacaacaaaaccactggtggcccaattgctttaaaaattatcaatagagattggaataactggaaagataaagaagtagaaccttttgtagtaccacgtccaggacatgctgacctagttggcacattaaaatataaccacgaagatatacggatcgcgttggaaagagcaagtgctcgtgaaacagcaataagatgtgctgttggagctatagcccaccaaatccttgatcagttaaatatttcgataattggttttgtttcatccataggaaagcaagaacttgatgtatcaaaatttataaccgatacagatttgaaagattccatttataattcagaagtttcatgtccagatgaagagacaagtaaattaatgattgatgaaataaagtctgcaaggaagaaaaaagatactttaggaggttcaataacttgcgtagctaaaaattttccacccgcttgtggtagttatgtacattttgatcgcaaacttgatgcaattatttcttcgtcaatgatgtcagtacaaagtgtaaaggcggttgaaataggagatggatttgattcttccaaaaaatttggaacagaagtacaggatcaaattgttttaaatgaaaaaaaagttgagagaattacaaataatttaggtggtttcgaaggtggaatgacaacaggcgaacctattgttgttacaagttatttaaaaccgattagcacaactttgacaccaataaaaagtgtaaaccttgtagaacaagcagaaacagaaacaaattatgaaagatctgatacttgtgcagttccaagagcagtaccaatatttgaaagtgtattctcaattgatttattaaattcactgttagaaaagactggtggagactcaaaggaagaaattcattcacgagttgtgaaacttcaagaatttactattgatgatatttcactttcaaataaaaattggaacatgaaatatgaaaatgaataaa

SEQ ID NO: 287611 - DNA, 1013 bp, Unknown
  Bacterial polypeptide expressing nucleotide sequence isolated from the Sargasso Sea
ctgtgtaattgatggttgtcctcccaatatctccatatctgaaaaagatatacaaaaagatatggacaggcgaagaccaggacaatccaaatttactactcaaagaaaagagtcggataaagtgaatattctctcaggagtatttgagggaaaaacaactggaacaccaatctctattataattcacaatgaagataaaaaatcaagagattatgagtctataaaaaacaaatttaggcctggacatgctgattatacttattttaaaaaatatggcatcagagattttagaggtggtggaagacagtctgcaagagaaacagcttgcagagtagcggctggagctgttgcgaaaatagttttaaaaaaaattataggggtaaagttcaatataattggagcagtaactcaattaggactaatgtcgtgtgataaacaaaattggaaagactctgaaattagaaaaaatccttttttctgccctgataaacaatctataaaattgtgggaaaaatatcttttggctgtaaggaaagctggctcttcctgcggagctgttattgaattaagagcatctggagttccaattggtttaggtgctcctatttactcaaaattagatactgatattgccgcagctcttatgagtataaatgctgttaagggtgtaaatattggatcggggatgaattctgcttttttaagtggtgaagaaaactctgatgagattaagaaaattggtggtaaagttaaattcaaaaccaatcatgctggcggaattttaggtggaatttcttctggtcaaaatattgttgcatcttttgcagttaaaccgacctcgtcaattttaactagtcgagaaactatagataaaaaaggcaagaatacaaaaatttccgttaaaggtaggcatgatccttgtgtaggaatcagggcagttcctataggagaagcgatgataagctgtgttattctcgatcatcttttaatgcatcgagcacagtgtggttaac

SEQ ID NO: 287612 - DNA, 1084 bp, Unknown
  Bacterial polypeptide expressing nucleotide sequence isolated from the Sargasso Sea
atgggcagcagtttcggccatctcttccgcatcagcacgtttggggaatcccacggtggcggtgtcggcgtgatcgtcgatggttgtccgccacagttagccatcgacttgggagccgtccaagccgagctggaccggcgcaaacccggccaaagcaagatcaccacaccacgaaaagaggacgaccgggttgaggtgctcagcggactgctcgatggggtgagcctcggcactccgatcgccatggtggtgcgcaacaaagatcagcgacccggcgactacaaggaaatgcaggtggccttccgcccctcccacgccgatgccacctaccaaagcaagtacggcatccaggcccgcagtggcggcggcagggcctcagctcgagaaacgatcggtcgtgtggccgccggggccgttgccaagcagatgctgaaacaactgcatggcacagaagttctggcctgggtcaaacgcattcacaccttggaagcgagcatcgatccagcccagcccactctggaagctgtggaggccaacatcgttcgctgccctgacgacgcgatggcgcagcaaatgatcgagcgcattgagtcaatcgggcgcgatggtgactcctgcggcggggtcatcgaatgcgtggtgcgccagccaccagcagggctgggaatgccagtcttcgacaagcttgaagccgatctcgccaaggccgtgatgtcgctacctgcgaccaaaggctttgagatcggctcgggttttgccggcaccaccctcctcggcagtcaacacaacgacgctttcctacccaccacagacgggagcctgcacaccgccaccaacaattccggtgggatccagggtggaatcagcaatggggagccaatcgtggtgcgggtcgctttcaagccaaccgccacgatccgcaaagaacaacaaaccatcaccgctagcggtgatgccacaaccctggccgccaagggacgacatgatccgtgcgtgctgcccagggccgtgcccatggtggaagccatggtggccctggtgctcgctgatcatgctctacgccaacgcggccagtgcggttgag

SEQ ID NO: 287613 - DNA, 613 bp, Unknown
  Bacterial polypeptide expressing nucleotide sequence isolated from the Sargasso Sea
cggccctcacaaaatagatagaaataattgggattgggatcaggtagatcaaaatcctttttggtcaccagataaaaatatggcttcacactgggcaaattttttagatgaagtccgaaaaaaaggttcttcagcgggagcggtcgtcgaaattgtagttacaggggttcctgctgggctgggcgaacctatatatgggaaactagatagtgatctagctagtgccatgatgtcgataaacgcagtgaagggcgtagaaattggagatggctttgatttagtatcaacacccggcgagttagcttctgatgaaattaggatgttagatggacaacctgactttttaaccaataaggctggcggaattttagggggaatatcaaccggtcaacccattattgtaaggtttgccataaaacccacgagttccattcttaccccgaggcgctcaatagatagatttgacaatgaggtagaagtccgaacgaaggggcggcacgacccatgtgtaggtatacgagcagtacccgttggtgaagcaatggcagcatgcgttatagctgaccacgttcttagacatcaggcgcaatgtctatcgaattccacgctttaa

SEQ ID NO: 287614 - DNA, 1087 bp, Unknown
  Bacterial polypeptide expressing nucleotide sequence isolated from the Sargasso Sea
atggctggcaatacaattggaaaattatttactgtgacaacatccggggagagtcatggccctggattatcagctattattgatggatgccctccaggacttgccatcagtgaaaaggatattcagaaagaattgaataagaggagacccggtcaatctaggtttacatcccaaagaaaagaaacagatgaagtgagcattatgtctggtgtttttgagggattgacaacaggcacaccaatcaatttagttgttcaaaatgtagaccaaaagtccaaagactacagtgcgattaaagataaattcagaccgggacatgccgactatacttattttcataaatacggcatcagggattatagaggcggaggcagatcttctgctcgtgagacagtgatgagagtcgcagcaggtgcaattgcaagaaaatacctgttcgaaaaagttggaatagaaatatttggttttttagggcaattgggacccattcatcttgaaatgaaagacagagaattcattgaaacaaacccatttttctgtggggatcccgataagatttcagagctagaatcgtatatggatcaactgaggaaagagggcgattcgattggtgcgaggattaacttgatggcaacaaatgtcccagttggattgggcgaaccagtttttgacaaactggaagcagatatcgctcatggactaatgagcatcaatgcagtcaaaggcgttgagattggtgctggattctctgtcgtgaatcaaaaaggcagtgaacacagagatgagatcgataccgatggcttcaagcagaataattcaggcggtaccttgggaggcatcacaagcggacaagatatttttgcaagcattgctctgaaacctacgtcgagcatcattaaaccggctgatacaatcgataagacaggcgaaaagacagaaattgtaactaaaggaaggcatgacccatgtgttggccttagggcaactcccattggagaagccatgttggcaattgttttaatggaccattttttgagaaatcgtgcccaaaattctgacgtctcatttgaagacaaaggcgattaaa

SEQ ID NO: 287615 - DNA, 303 bp, Unknown
  Bacterial polypeptide expressing nucleotide sequence isolated from the Sargasso Sea
aatgtcaggaaattcgtttggaaaatcttttgttgtgaccacttttggtgagagtcatggggttgcacttggctgcattattgatggttgccccccaggattagagattaaagctgaagatatacaaaaggacttagataagagaaaaccaggtagttctaaatatacaacccaaaggaaagaagatgattctgtcgagattctttcaggtgtttttgaaggcaagacaacaggaactcctattgccttaataattaagaataaggatcagaaatctaaggattatgacaaactaaaggatgt

SEQ ID NO: 287616 - DNA, 913 bp, Unknown
  Bacterial polypeptide expressing nucleotide sequence isolated from the Sargasso Sea
atgagtagtagttttggaaaaatttttcgtgttagtacttttggagaatcacatggtggtgcagtaggagttatccttgatggatgtccacctaagttaaaaatagatataaatctgatacaaaatgaattagataggcgcagacctggccaaagtgacattacaacacccagaaatgaagaagataaaattgaaatattaagtgggataaaggaagggttaacacttggaactccaatagcaatgttggtaagaaataaggatcaaagaccaggagattataataatttggagcaggtatttagaccttctcatgcagatggtacatatcatctgaaatatggaattcaggcaagttctggcggtggaagagcctctgctagagaaacaattgggagagtagctgctggtgctgtagcaaaacaattattaaaaaccttctgtaacactgaaatactatcttgggtaaagcgtatacatgatattgattctgatataaataaagagaagatttctctcaaaaaaatagattctaatattgttagatgtcctgatgaaaaggtatcaacagaaatgatcgagagaattaaggaattaaagcgtcaaggagactcttgcggcggtgttattgaatgtctagtaagaaatgttccctctggtcttggaatgcctgtttttgataaattagaagctgatttagcaaaggctttgatgtctttgcctgccacgaaaggctttgaaataggttcaggtttctctggaacttatttaaaaggaagcgaacataatgatgccttcatcaagtctgatgatattagtaagttaagaacaacatcaaacaattcaggaggtatacaaggcggaataagtaatggtgaaaatatcgagatgaagatagctttaaacctacagc

SEQ ID NO: 287617 - DNA, 611 bp, Unknown
  Bacterial polypeptide expressing nucleotide sequence isolated from the Sargasso Sea
aattgcagatcaaattgattttaaagagatcaataacaatgctttcttttttcctgacaaaacaaaattgaaatccctagaagatcttattgcctctttgagagaagcaggagattctgtcggtgcaaaaataaaaattaatgtgaataacgttccagcaggtttaggagaaccagtatttgataagttggatgctgatttggctcacgggttaatgagtattaatgcagttaaaggagttgaattagggctaggatttgatgtcgtttcaaaaaaaggaagcgaacatagagatgagatagatcgagatggatttgcttctaacaacgcaggcggaattttgggcggtatttcttcaggccagccaatagatattgcaattgctttaaaacctacatcgagtatcagcactgaaggtaaaactgtcgataaatctggaaaagaaacaactgttcaatcaattggtcgccacgatccgtgtgttggcctgagagctgtcccaatagctgagtccatggttgcaataattttattggatcattatctgagaaatcgtgctcaaaataatgacgtagaaaactcatcttatacgattcctacaagtgaataac

SEQ ID NO: 287618 - DNA, 1084 bp, Unknown
  Bacterial polypeptide expressing nucleotide sequence isolated from the Sargasso Sea
atgtcatttaacacttttggaaagctatttcgtttcacaacttggggtgaatctcacggtactgctattggctgcatagttgacggttgtcctccaaacataaatctagaggaaaaaggtattcaattagaattagacaaaagaaaacctgggcaatcaaaatttaccacacaaagaaaagaagacgataaggttcaaatactttcaggtgtatttgaaggaaaaacgactggcacaccaatttctatgattatttataataaagacatgagatctaaagattatggaaatataaaagataaatttagaccaggtcatgcggactttacctatttcaaaaaatatggaattagagattatagaggcggaggaagatcttcagctagagaaacagcttcaagagttgcggctggtgctatagctaaactagtacttcaaaaaaaattaggaaaaaaatttaaagttataggtgctgtaactcaattaggaatcttaggatgtgatacgtcacaatggaatgataaaattatttcaaaaaatccattcttttgtccagataagtccatgattaaattatgggaaaaatatttacttggtgtaagaaaatcagggtcatcatgtggagctgtaatagaggttagagcaagaggtattcctgcgggtcttggtgcgcctatttattcaaaattagattctgatattgcatcagcttttatgagcattaatgcagttaaaggagtaaatgttggtgctggaatgaattctgcacaactaagtggcgagcaaaactctgatgaaatatcatcaaaaaataataaattaaaatttaactctaataatgcaggcgggatcttaggaggaatttcttctgggcaagaaataatagcatcctttgcagttaaacccacatcatcaattttaactacaagaaaaacgattaataaatttggaaaaaataccacaatatctgttaaagggagacatgacccttgtgtaggaataagagctgttccagttggagaagctatgatgaattgtgttttattagaccactatctaatgaatcaagctcagtgtaggtaag

SEQ ID NO: 287619 - DNA, 1018 bp, Unknown
  Bacterial polypeptide expressing nucleotide sequence isolated from the Sargasso Sea
tgcataattgatggatgtccacctaattttgaaataaaaaatgaagatattcagatggagcttgatagaagaaagcctggccaatcagatgttactacccagaggaaagaagacgataaagttgaaattatgtcaggagtttttgaaggaaaaacccttggaactcccatagcattattgatcaaaaatgaagatcagatttcaaaagattattcaaatatcaaagatacatttaggccaaatcatgctgacctcacatatcaaggaaagtacggtattagagattacagaggtggcggcagatcaagtgcaagagagacagcaatgagagttgctgcgggagcagttgctaagaagtatttaaatacacatggaattataactaagggctttgtatcacaaatcggcagtatttctgctgatacagttgatcttgaatttgtaaatgaaaataaatttttctttcctgatagatcaaaaattagctcacttgaagagttttttgaagaactcatcaaagagggcgactcaataggcgccaagctaaatattaaagttcaaaactgcccggttggccttggagaacctgtttttgataaattaaatgctgatttggcaaaagctataatgagtatcaatgctgtaaaatctgtttctattggtaactccgacaagattccactttctaaaggatctgagctaagagatgaaattactaagaccggattcaattcaaataattcaggtggaattcttggcggaatttcaaatggcgatgatattgatataagtttcttaattaaacccacatcaagcataagtaaagctaccacatccatagataaagatgggaatgaggttgagcttgaaattaaaggaagacatgatccttgtgttggaattcgagcagtgccaattgcagaggcaatggtgaaccttgttttaattgaccatcttctcagaaatcaggcacagtgcggcaatattgatcaaaagctcccatttgtaacggaataat

SEQ ID NO: 287620 - DNA, 736 bp, Unknown
  Bacterial polypeptide expressing nucleotide sequence isolated from the Sargasso Sea
ggggggcggcagatcttccgcagagaaaccacaatgagggttgctgctggttcaattgcaaaaaaatatttgaaggaattagttggaatagacattaaagggtatttatctcagataggaaatataaaaattaagaagattgatttatctgaagtagataataatcctttcttctgcccagatcctgagataattgaaaatatagaaaatctgatagatgaattaaggtctgaaggtgactctgtgggtgcaagaatagagattatggcatctaatttaccagtaggactcggcgaaccagtttttgataagctagatgctgatatagctaaaggccttatgagtattaatgctgttaaaggtgtagaaataggtagtggatttgatttagttagcgcaaaagggtcagagagtagagacgaaattactccagaaggttttaagacaaattcttccggaggtatagctggaggaataagttctggacaagaaataatagcaggaatagcactaaagcctacttctagtattgtaaaagagggagatacggtagacacttcaggcaaggcaaccaaggttaaagttacgggacgtcatgatccctgtgtgggtatcagggctactcctattgctgaagcaatgatggctttagtgttgatggatcacttcttaagaaacagagcacaaaatgctgatgtagtatctgaaactccagacatcccatctaaaaaataat

SEQ ID NO: 287621 - DNA, 336 bp, Unknown
  Bacterial polypeptide expressing nucleotide sequence isolated from the Sargasso Sea
taagtcttaaaggttcagaagcaagggatgagataacagcatcaggttttacttcaaataattcaggaggaatattaggcggtatatctaacggagatgatataagcctaagttttatcataaaaccaacatcaagcattaaaacaaaaggaaaaactgtaaataaagaaggtaatgaggttgatatagaggttactggaagacatgatccatgtgtcggcatcagagcagtgccaattgccgaggctatggttagtttagttttagtggatcatttattaatcaataaagctcaatgtgctgatgttgaacaaaatcttccatttagtgagtaaa

SEQ ID NO: 287622 - DNA, 559 bp, Unknown
  Bacterial polypeptide expressing nucleotide sequence isolated from the Sargasso Sea
cgaccctagcgcagtcgaatctattgcggaattaattgactctcttagacgcgagggagattctattggtgctgaagtaaccgttatggccacggggatgcctatcggattgggtgagcccgtgttcgataagctggactcagatttggcttcggctctcatgagcattaatgcggtcaaaggtgttgggattggtgatggtttttcggtcgtgaatcaacgcggcagcgaacatcgagatgaaatgacgaaatacggattcctttcaaatcatgccggaggaacattgggaggaatttcatctggtcaagatttgttagtgaaaatggccttaaagcccactagtagcatcgtcactcccggtagaagcatcgacaagatcggagatgagatcgaggtcgttacgaaaggccgtcatgatccttgcgtgggaattagggcgacccctataggagaggcaatggtagccatggttttaatggatcactacttacgatatcggggtcagattgatcatttcaatcttggtgaactacaagtaactgagagtaccgattaa

SEQ ID NO: 287623 - DNA, 1064 bp, Unknown
  Bacterial polypeptide expressing nucleotide sequence isolated from the Sargasso Sea
aaagctatttcgttttactacttggggggagtctcacggtccagcaataggttgtatcgtagatggatgcccgcctaatatctacataaaagagcaagatattcaaaaagaattgaataaaagaaaaccaggacaatctaaatttaccactcaaagaaaagaagatgataaagttaagatattatctggtgtctttcagggaaaaactactggaacacccatatctatgattatttataataaagatatgagatcaaaagattatggaaatattaaagataagtttagaccaggacacgcggacctaacttatttcaaaaaatacggaattagagactacagaggaggaggaaggtcttctgctagagaaactgcttcgcgggttgcagctggtgcaattgctaaaatagttttacaaaaaaaattaggaaaaaattttcaagtaattggtgctgtcacacaattaggaatattaggatgtgatactaatgagtggaacgataaaataattaataaaaatccttttttctgccctgataaatcaatgataaaaatttgggaaaaatatttactaggtgttagaaaatctggatcttcatgtggggcaataatagaaataagagcaagaggtgtacctgctggacttggtgctccaatttactcaaaattagactctgacattgcatcaggtttaatgagtataaatgctgttaaaggagtaaacattggctctggaatgaattcagcacaattaagcggagaacaaaattcagatgaaatttctcaatcaggtaaaaaattaaaattcaatagtaataatgctggtggaattttaggtggtatatctagtggtcaagaaattattgcatcctttgctgtaaaaccaacttcgtcaattttaacaagcagaaagacaattaataaatttggaaaaaatactactatttctgttagaggaagacatgacccatgtgttggaataagggcagttccagttggagaagcaatgatgaattgtgttttattagatcactatctgatgcacaaagcacaatgtggctagt

SEQ ID NO: 287624 - DNA, 1081 bp, Unknown
  Bacterial polypeptide expressing nucleotide sequence isolated from the Sargasso Sea
gaattctttcggaagctcttttattgtgaccacttttggtgaaagtcatggagtagcccttggctgtatcgttgatggctgtccacctggattagagctttgtgaagaagatattcagaaggaattagataaaagaaaacctggatcctcaaagtatacaactcaaagaaaagaagatgacaaagtagaaatattgtctggtgttttcgagggtaaaacaactggaacacctataggtttgctcattagaaataaggatcaaaaatctaaggactatgatcaactcaaagatgtttttaggccttctcatgcagattatgtttattcaaaaaaatatggaataagagaccacagaggaggaggaagatcgtcagctagagagactgctatgcgagtagcagcaggagcaatagctaaaaaatacttaagcgaaaaactggatataaaaatcataggatacttatctcaaataggttctattaccatatctaattttgattcttcacaaattagtctcaatcctttcttttgtccagatcctgaagttttgacttctatcgaagatttaattgataaactcaggaaagacggtgactcagtgggggcaaaaatagaagtctcagtcactaatatgcctataggtttaggagaacctgtttttgataagcttgaagcagacttagcaaaaggccttatgagtattaatgctgttaaaggttttgagataggaaaaggctttgatctcatacattcaaaaggttcggaatcgagggatgaaatgacttcagagggttatttgtcaaataactcaggtggaatttcaggaggaataagtaccggccaagaaataaaactctctatcgccttgaagcctacttcaagtatcaacaaagaaggcaagaccatagattcggggggtgaatccaaaaagattcaagtcaaaggaagacatgatccctgtgtaggggttagagcaacaccaatagccgaggctatgactgcgttagttataatggaccactttttgaggaacagagctcaaaatgctgatgtcataactgaaatccctgatatctcataa

SEQ ID NO: 287625 - DNA, 956 bp, Unknown
  Bacterial polypeptide expressing nucleotide sequence isolated from the Sargasso Sea
tatccaggcagaattagacagaagaaaacctggacaatctaaacatgtcacacaaagaaaagaaccagatagagttgaaatattatctggagttttcgaaggcaaaacaacagggactccaattggccttttaatcaaaaacactgatcaaaaatcaaaagattatgaagatatcaaagacaagttgagaccaggacatgctgattacacttactttaaaaagtatggaattagagactatagaggtggcggaagagcaagtgcgagagaaactgtaatgcgtgttgctggaggagcaatagctaaaaagattttatcttctatgaaaataaaaatttctggaggtgtggttcaaattggctcagtaaaggctaaatcaattgatctttctactgtttcagataatagcttttcttttgctgacagttcaaaaattaatgaattagaagacttctttgataagttaaggaaagagcaagactcaataggagcaaagattcttgtaagaatagaaggtcttatgcctggaattggctcaccagtattctcaaaactcgatgctgaattagctaaatccatgatgggtgtaaatgctgtaaaagctgttgaattaggctctggtactaaagttgtagaaatgaaaggttcagagaatagagacctgataaagaaagatggttttgagactaataattcaggaggaatattaggcggaatatcaaatggagacgatattgatatattcgtatcattaaaaccgacttcaagcatttcacaaagcacaaaaacagttgatacagaaaataatgaagttgatttacaagttaagggtaggcatgatccatgcgttgggcttagagcaacaccaattctagaagcaatggcagcaatgtgtattctagatcagatactcctagatagagggcaatgctccaatgttgatagagacctttgaa

SEQ ID NO: 287626 - DNA, 925 bp, Unknown
  Bacterial polypeptide expressing nucleotide sequence isolated from the Sargasso Sea
aaatttactactcaaagaaaagaggatgataaagtaaatattttgtcaggggtgtttgaaggtagatcaaccggaacaccaatttctctcgtcatttacaataaagatatgagatcaagggactatgaaactattaagaataagttccgacctggtcatgcagactacacttattttaaaaagtacggaataagagattatagaggtggaggtagacagtccgcaagagaaactgcctcaagagtggcggcaggagcaatagctaagaaagttttagaaactaaacttggtaaaaaattcaaggtggtaggagctgtaacacaactaggtattttaggttgcgatgtcagcaaatggaatgataattatattaaaaaaaatcaattattttgtcctgataaatcaataataaaattatgggaaaaatatttactgagtgtgaggaaatctggctcttcttgtggagcaattattgaagtaagagcaaggggtgttcctcctggtctaggcgcaccaatatactctaaattagatatggacttagcagctgcaatgatgagtataaatgctgtcaaaggagtaaatataggatcgggaatgaattctgctcaattatctggtgaacaaaattctgatgaaatatttaacaaaggaaaaaaaactaattttaattcaaacaatgcaggtggaatattaggtggaatttcatcaggacaagaaatagtagtctcattcgctgtcaaaccaacttcttctattttgtcttcaagaaaaaccattgataaatttggaaaaaatacatcaatatcagttaaagggcgtcatgatccttgtgtgggaataagagcggttcctattggagaagcaatgatgaattgtgttttattagatcattacttaatgcataaggctcaatgtaaataaa

SEQ ID NO: 287627 - DNA, 1129 bp, Unknown
  Bacterial polypeptide expressing nucleotide sequence isolated from the Sargasso Sea
ttgattcataatttaaacaaaataatctatatagtatattttatgtcatttaatacatttggaaagatatttcggttcaccacttggggtgagtcacatggtcctgctataggttgtgtagtagatggctgccctcccaatataaatataaatgagcaagatattcaaaaagaattaaataaaagaaaacctgggcaatctaaatttacaacgcaaagaaaagaggatgacaaagtaaatatactttcaggtatttttaatggtaaaacaacaggtacaccaatttcaatgataatctataacaaagatatgaggtctagggactatgaaactataaaaaataaatttagacctggtcatgctgattatacgtattttaaaaagtatggaatcagagattacagaggtggtggaagacagtctgcaagagaaactgcctcaagagttgctgcaggagcaatagctaaaaaagttttagaaaaaaaaattggatcaaaatataatttaataggtgctgtcactcaattaggtatacttggttgtaatgtaaaaaaatggaatgataaatttatatcaaagaacccttttttttgtcctgataaatcaattgtaaaattatgggaaaaatatttattgagcataagaaaagcgggatcttcttgtggggcaattattgaattaagagcaagaggtgttcctgtaggcttgggcgcccctatttattcaaaattagatatggatctagcttcagcaatgatgagtataaatgcagttaagggggttaacattggatctggtatgaattctgcacaattaactggagagcaaaattcagatgagatttctcaaaaaggtagcaaagctaaatttgcatcaaacaacgctggtggcattctaggcgggatatcttcaggtcaagaaataattgtttcatttgcagttaaacctacttcatccattttaactagcagaaaaacaatcaatacatttggtaaaaatacttcaatatctgtaaaaggtagacatgatccatgtgttggtataagagctgtgccaattggcgaagctatgatgcactgcgttttattagaccactatttaatgaatcaggctcagtgtagttattaat

SEQ ID NO: 287628 - DNA, 5246 bp, Unknown
  Bacterial polypeptide expressing nucleotide sequence isolated from the Sargasso Sea
tgatgtagaatctccagagggttatgttagtgttgttggtggtggtgtcttacaagaaacaggaacacttgatgattcggatgtaacaacagacacgattattttagaggaaacttcaactgagtctattgtcttccctcaaattatattagagggtggagcagaaagagatgtatttagtggtaatggactgacaagaacttttaatattaacaatacatctactctaactgatactcttaccttgtttattgacggtgtgaaaatcgaacagacagacaaggctggtaacgcatactggagtgtagaggatactccctatctggttcttaatggaacagacagttcatcaaccgatgcaggcgacaatattttattagaggttgacgatgcaccgcaaactggttcggttattacattagaacaacaaacaataacattctcagaacttccaatagatcgaactccaaaggtaggagtaaacatagaagttcgtggagacaacgtaaatcatcttttacttgatggcactaccagacgttcttttattatattagacggaacagataatagcggaggtgcgtttggtaatacgagaagtaactttgaagagaatcttattttaaaccaaactgattctagtgggtcagatgaaggcgacaatattttattagaagatagtggtgatactgattttgataatgctggtgattttattttgtctaatggaggtgaggtattacccgataagtttactacatcatccgatttaattgttctagagcatggttctttcagttcatctgaagcaaactcaataaggaaggcttatgtaagtaatagtggaacaggatatacggatctcccaactgttaccgtaacttcaacatctggtagtagtgctaaactacttgcatccacaagtgatattggtgcgattgatgaggtatctataaccgatgctggattaagtctttcatcatctaatcctccagacattgttccaagagcccactttatagttaaggatgttacaggaacatttgttgctggtaatactttaaccacacatgagggaacagtcaagggttgggattcatcaaccaatgtattggatttagagtttgaaaatgttgtacgaatagatggagaacaacagagtggttctgtcaatcaaggtattgcgtttgaagaagggacaagagatcttaacacacatcaaagtggtattgtccatataattttagaggacgcaatagatgtagcggatacttcaacggactctattattcttgatgctactgcgataactgagtctacactgtttgatgtaaattcatataaaacacgattaaaagttagggtggttgaaaataccttacaaacaatttcagtttcaactgaggatgctgctttagggacaaaaatattttctattgatggatcttataatgaaaaggattttactgctgaactattacaattagagaggggtagagtttattattttgatttatcagatacttcattatataatgtagacagcaccaaaaatcatgaactagtgtttgcagagttgtctaatagattgaaaggtgatggttctacaacaacatttacacttaaaaattctgttatagaaaaaccagttgcatttgtaactcaaaacagcacatcatttccagcaaatgtaagaagtcattttgataatgtgacagcatctactggatacacaacaagtggtaacacaattacatttacgacagctccaagttcgggaaatcatgttttaatctttacaaaatatacaactggtgtaacgacctcagaggattatattgaaattggtggaggaatttatgatgacacaactgaagctggtcgtgcgttcattcaattagagttagactctgaagcaccagacctatactattactgtgttaatcatggcccaagaatgggtggtagaataagttcattaacaaaggcagatcttattgttgacgagggttctaaagttacactcgatggtgaaagtattggcccaagtcctcaaggtattttattagagaacggttctcaagacgttgctattacttactcgttacttttagaggctgagagtggaagtatacttcttaatggaactgattctaatggtttgaataatggggataatattattcttaatgaaccaactaatcgttctgatccctttagtattgtatttgaagattcctttatacgaagtgcagaggaattatcaaataaaattttaatagatttaaatgcagaagatagaagtaatcatggaactgcaatagcacttgaatctggagagggtgattcattaattcttgaagatcaatttcttaatgattctatcagtaaaattataatgaatacctctttatcggactatgatagtactttagataatctcgtaaaattaggaaaagcaaccaagaagtctgatggtactttagattttagtgttaaactagttttagaaaatggtaaagaaccaatagtattaaacggaacggacgcatctggagctaatgctgatgattcaatattatttgaggatgcaatcaatcaagaggacagagattttcatactgataacgctatcgcacaccttttggttaatgaagaatttagttttatcaatgatacagaagatgctggaggaaccagtgttctaatgacggaagagacagacaaaacaaataatatttttaatattattttgaatggaacagatgattcttcgtcaaatgctggagataatatattaacagaaatagaaggagatgagctacgacaagaagaattttattctcttggtatgagagttcccacttccaaatttgaacttgaagcttttaaattagaacctatccaacatgaaaatgaaaatatattactggaatcaaataggacaagtgatacagaaatattttatgttcttttggatggaacggacagttcatcaaccaatgcaggcagtaaactaatatctgaagcttcttcattctcacatgattttgcgaccattgaacccagaattattttagatggaactgactccgatggaagtgatagtagaggtggattattatttgagaatgaagacgttagttttgaagaaattgttttaaatggttctgatagttcttcaacggatgctggagataatttagtattagaaactggaatagattttagtaatggtaatgttactattacggactcagggggtgcatctgcaaccattgttaaagcagacatcgcaacagttaccagcgcagtcaacacatcttctacctctgtaactggatactctggcataagaagtttgatgggtgaagatttaaaccgtattcaagattcgtattattatcaggattattcttatgaggttcaagtcggtcaatcgttatcaacttatattaatgaattaaagaaagcggttcatcccacagggttcttaccttttggtaaggtatcaattgcatcttcaatatctgcagcaatatctacaacagctgctggtatttctgattatacaggtgacactgatacattctcaccagaactcgcatccgttcttcaaacactgtttagtcaaactgtacaaagtagattacaagttacacccacaacgtatggtataggacaaagtgatgatcagattgtattagagaatggtatagcagctggtgataatcttgttcttgatgcgagtgcagcatcaactgatgagggttcaaatattttattagaatttagaacctctgatcttgataccataatgttagaaacagacgaacaagttcttttagaaacaggtagtttcattatactagaggaatttagtgatgttggaatagaccttgaggacggagcacttgaagcaattctttatgaatcaggtagagtaagttcagagacaactaattatgcctatgatggtggtggacgagttatggcagaatcgtcaaatgctccaagtgcagacgcagaccgatttctagtcagagaaattactactaagatttctactgcaccaacttcaagagcctccagaaaccttttattgcatcttgcaaaatatccttttggtactgtcgattcgattcagttggaaacttcaaccgcaaaccagacatcgttccttgctcttgacggtgagataccactcgcacaggaaacaacctttattattctggagtctggtgagaatgtatttttagaacagcctagtgatgagggtcaacgtatagttgcagagatggacacatgggcatttccaattggatttaaggtaagtgaaaatgaaaggattgtattggaatatgaaaatgaatttgtagaaaccataccgttatcagagataggtgatttcagatttgaagatattcttgcgatagataaaattataatggatgaaaatcctgttgaccaagataatgcaaacgcagttgagaacactggtattctcatggagaactttggacagcttcttcttaatggaacagatagttcatcaaccaatgctgaaagttttcttgcacaggagacaaccaagaacaataggtttacattagaggaatctggtttacttattgttgaagaaaactctactcactccattatagataatcttatatcagaaagtgctcttgaagaaactatagtgctagaagattttttcaattcaagaaatacttttggtatcaggttggaacaagattcatataatgaagatgtaattatattagatggtacagactccaactctacaaatgcaggcattaagttagaactggaagagtattttcaatcgggacaagagactagaccggctagaatactcctagaagattttgagcacctgatgatggaaactggtgattttgtaggaatggaaaatgaaactgtaactgtttttacaggagactttaagacatctgcaattcaactagaaaccacaaatataatatcaagtaaaggtcaaatacctctgggtaattggacactaaatagttcaacgagtccagttggatatcaaccagtggttcacgcatcagagattaaagttcgatctactggtgaaattgcgttggaggactcaacggatacaactcatgggtttttggtattgaatggaacagatagctcatcaacaaatgcgggcgataacatagattgcgaaggtgcaacaggaattactgcataac

SEQ ID NO: 287629 - DNA, 790 bp, Unknown
  Bacterial polypeptide expressing nucleotide sequence isolated from the Sargasso Sea
aatgaccatagatgaatcaaaagtgtttcaactcaatggcgacgcgctcactggacctgaagtcgttgcaattgctcgtgaacatctccctgtcacgattggtgacgatgcgaagcaagcaattgcacattcaagagccatagtagagtctcgatttaaatctggcattccaacttatggcatcaatactggatttggcgcactttcgacaaaagtaatatcaaaagacgagtgcgcagcacttcaatttaaccttcttcgttctcatgcagcatcagtgggtgaaccactagaagaagaaattgttcgaggcatgatgggcttgctcgctgcaagtctttgcagaggtaaaagtgggatcagagaagtagtcgtcacaacactcgtttcaatgctcaacaacaatgttgttccagtcattccatcacgtggttcggttggcgcatctggtgacttatctccacttgcacacttagctttagttctttgcggtgaaggcgaggcgttcgtagatggcgaacgaatgagtggagaagaagcattagaaacgtatggcatcgaaaagatagttccccaagaaaaagagggacttgcactcatcaatggaacgcacctcatgtgtgctactgcggcacttgcattaagcgacattgcatcaatttgtgaacatgcggttatcgcaacagcaatgtcaatcgatgctgcaaaagcgacagacacttttttagatgatcgaatccatgctgcaagaggccaaagcggacaacgaactgtcgctaaacaatcgcaa

SEQ ID NO: 287630 - DNA, 1408 bp, Unknown
  Bacterial polypeptide expressing nucleotide sequence isolated from the Sargasso Sea
atgacagaaaacggcttccgcgtcgaagcggatcttttaggtaagcgaagcattccgagtgaggcctactacggcgtccatacgctgcgcgcgaaggagaatttcgacatttccggccgcacgattgcatcgctgccgttcctcgtgatggcgctcgccgcggtgaaggaggccgcggccgacgcgaactgcgagctcgggctgctgccgcggccgcttcgcgatgcgatcgccgctgcgtgcgtcgagatccgcgaagggcgcctgcacgaccagttcgtcgtcgacatcatccagggcggggccggcacgtcgaccaacatgaacgcgaacgaggtgatctgcaaccgcgcactcgagatcatggggcacgcgcgcggcgagtacgaatacctgcatccgaacgagcacgtgaacctcgcgcagagcaccaacgacgtctatccgaccgcgattcgcgtcgcgacctgcttcgcggtcgaacacctgctcgaagcgatggcgcgcctgcgcgatgcgttcgcggagcgggccgacgcgtttgccggcttgctgaagctcggccgcacgcaactgcaggatgcggtgccgatgacgctcggccaggagttctcgacctacgcggtgatgctgacggaagacatcgcgcgcctgcaggaagccggctggctgatccgcgagatcaatctcggcgcgaccgcgatcggcacggggatcaccgcgcatccgcagtacgcggagaaggcgctcgcggcgctgcggcgcattaccgggctcgacctgagcaccgcgccgaacctgatcgaagcgacgcaggattgcggcgcgttcgtgcaggtgtcgggcgtgctcaagcggatcgccgtgaagctgtcgaagatctgcaacgacttgcggctgctgtcgagcggcccgcgcgccgggttcggcgagatcaacctgccgcccgtgcaggccggctcgtcgatcatgcccggcaaggtgaatccagtgatccctgaggtcgtgaaccaggttgcgttcgaggtgttcggcaacgacctgaccgtgaccttcgcggccgaggccgggcagcttcagttgaacgcattcgagccggtgatcgccagcgcgctgtttcgcagcttcagtcatctgacggccgcctgcacgacgctcgcgcagcgttgcgtgagcgggatcaccgcgaatcccgagcggctgcgcgaaacgatggagcgctcggtcgcgctcgcgaccgcactgaacccgtacatcggctacaagcgcgcgaccgccgtggcggccgaggcgcacgcgaccggcaagtcgatccgcgaggtcgtactggagcgcgagtggatgaccgatgcgcagctcgacgaagcgctgcagcccgaagcgttgatccggccgcgcgtgctttgac

SEQ ID NO: 287631 - DNA, 799 bp, Unknown
  Bacterial polypeptide expressing nucleotide sequence isolated from the Sargasso Sea
ccacgagcagttcgtggtcgacatgattcagggcggcgccggcacctcgaccaacatgaacgccaacgaggtcatcgccaacatcgctttggaggccatgggctttgagaagggccagtaccagcacctgcacccgaacaacgacgtgaacatggcgcagtcgaccaacgacgcctacccgaccgccatccgcctcggcctgctgctcggtcacgacagcctgctcggtgcgctggacaagctgatccagtcgttcgccgccaagggtctggagttcggccacgtgctgaagatgggtcgcacccagctgcaggacgccgtgccgatgaccctcggccaggaattccgcgccttcgccaccaccctcggtgaagacctgcagcacttgaaactgctggcgccgaccctgctcaccgaagtcaacctgggcggtaccgcgatcggcaccggcatcaacgccgacccgaaataccaggccctagcggtcaagcgcctggcgatcatcagcggtcacccgctgactccggctgtcgacctgatcgaagccaccagcgacatgggcgccttcgtgctgttctccggcatgctcaagcgcaccgcggtcaaactgtcgaagatctgcaacgacctgcgtctgctctccagtggcccgcgtaccggcatcaacgagatcaacctgccggcgcgtcagccgggcagctcgatcatgccgggcaaggtcaacccggtgatccccgaggcggtcaaccaggtggccttcgaggttatcggtaacgacctggccctgaccatggcggcc

SEQ ID NO: 287632 - DNA, 979 bp, Unknown
  Bacterial polypeptide expressing nucleotide sequence isolated from the Sargasso Sea
ggcaccaaaagaagtttccaacgatctctactacggtgtgcataccctgcgcgccgttgagaacttcaagatcagcactcagaagatttctgacgttccggaattcgtccgcggcatggtactgaccaagaaggccgccgccctggcgaacggcgaactgggtaccatccgtcctgaaattgctgacaagatcgtagaagcctgcgacctgatgctgaacaccggcaaatgcttcgaccagttcccggtcgacgtttaccagggtggtgccggcacctccgtcaacatgaacaccaacgaagtactggccaacatcgccctcgaaatcatgggtctggccaagggccgttacgacgtcatcaaccccaatgaccacgtcaacaagtgccagtccaccaacgatgcctaccccaccggtttccgcgtggccgtggtcaacagcaccgacaccaccctgtttgccctggaagcgctgatcgccgccttcgatgccaaggccgccgagttcaagggcatcctgaagatgggtcgtacccagctgcaagatgcggtaccgatgaccctgggtcaggagttccatgccttcgccgtcaccctgcgcgaagagatcaagtccatcaagcgttgccaggagctgctgctggaggtgaacctgggcgccaccgccatcggtaccggcctgaacaccccgcccgagtactccgccctggccatcaagcgcctggccgagatcaccggtcgtgcctatgttccggctgaagatctgatcgaagcgacctccgactgcggcgcctacgtgatgctgcacggtgccatcaagcgcatggcgatgaagctctccaagatctgtaacgatctgcgtctgctctcctccggcccgcgcaccgcactcaaagagatcaacctgccggaaatgcaggctggctcctccatcatgccggccaaggtcaacccggtcattccggaagtggtcaaccag

SEQ ID NO: 287633 - DNA, 847 bp, Unknown
  Bacterial polypeptide expressing nucleotide sequence isolated from the Sargasso Sea
ggtaaatgcatggaccagttcccggttgatgtgttccagggcggcgcagggacgtccgtcaacatgaacaccaatgaagtgctggccaatattggccttgagctgatgggccatcagaaaggtgaataccagtatctgaacccgaacgaccacgttaacaaatgccagtccaccaacgatgcctacccgaccggtttccgtatcgcggtttatgcgtccctgctgaaattaaccgacgccatcaaccagttgggtgacggtttccagaataaagccgtcgaattccaggatgtcctgaaaatgggtcgtacccagctgcaggacgccgtgccgatgacgctcggccaggagttccacgcgtttaatgttctgctgaatgaagaaatcaaaagcattctgcgcaccggagagctgctgctcgaagttaacctcggcgccaccgccatcggtacgcgcctgaatacgccggatggctaccagcagttggcggtacaaaaactggcggaagtcagcggcctgccggtgattccggcggaagatctgattgaagccacctccgactgcggtgcctacgtgatggtacacagctcgctgaagcgtctggcggtgaaactgtccaaaatctgtaacgacctgcgcctgctctcttccggcccgcgcgcgggtctgaacgaaatcaacctgccggagctgcaggcgggttcctcgatcatgccggcgaaagttaacccggtcgtcccggaagtggtcaaccaggtctgcttcaaggtgattggcaacgacaccacggtgaccatggcctcggaagccggtcagctgcagctgaacgtgatggagccggttattg

SEQ ID NO: 287634 - DNA, 1420 bp, Unknown
  Bacterial polypeptide expressing nucleotide sequence isolated from the Sargasso Sea
gatgatttccgtcatgtcctctgctgcatcattccgtaccgaaaaagacctgcttggcgtactcgaagtaccggctcaagcgtattacggcatccagaccctgcgagcggtgaataacttccgcctctcgggcgttccgatttcgcattacccgaaattggtggtcggtctggcaatggtcaagcaagcggccgctgacgccaaccgcgagttgggccagctcagcgaagccaagcacgctgccatcagcgaagcctgtgctcgtctgatccgcggcgatttccacgaagagttcgtggtggacatgattcaaggcggcgccggcacttcaaccaacatgaatgccaacgaagtcatcgccaacatcgcgctggaggccatgggtcaccagaagggcgaataccagtacctgcaccccaacaacgacgtgaacatggcgcagtcgaccaacgacgcctacccgaccgcgatccgcctgggtctgctgttgggccatgacgcgctgctggccagcctcgacagcctgatccaggcgttcgccgccaaaggcgccgagttcagccatgtgctgaaaatgggccgcacccagttacaagacgccgtgccgatgaccctcggccaggaattccgcgccttcgccaccaccctgggtgaagacctggcccgcctgaaaaccctggcgccagagctgctgaccgaagtgaacctgggcggcaccgcgatcggtaccggcatcaacgccgacccgcgctaccaggccctggccgtacaacgcctggccaccatcagcggccagccgctggtaccggcagccgacctgatcgaagccacctccgacatgggcgccttcgtactgttctccggcatgctcaagcgtaccgccgtgaagctgtccaagatctgcaacgacctgcgcctgctgtccagcggcccacgcaccggcatcaacgagatcaacctgccggctcgccagcctggcagctcgatcatgcccggcaaggtcaacccggtgatcccggaagcggtcaaccaggtagcgttccaggtcatcggtaacgacctggccctgaccatggcagccgaaggcggccaactgcagttgaacgtgatggagccgctgatcgccttcaagatcttcgactcgatccgcctgttgcaacgcgccatggacatgctgcgcgagcactgcatcgtcggcatcaccgccaacgaagcacgctgccgcgaactggtggagcattccatcggcctggtcaccgcgctgaacccgtacatcggctatgaaaacgccacccgcattgcgcgtatcgctcttgaaagcgggcgcggcgtgctggaactggtgcgtgaagaaggcttgctcgacgacgcaatgctcgacgacatcctgcgcccggaaaacatgatcgctccacgcttg

SEQ ID NO: 287635 - DNA, 745 bp, Unknown
  Bacterial polypeptide expressing nucleotide sequence isolated from the Sargasso Sea
atgaagactcgaaccacgcccgtccacacggatttcctcggcgccacgcaggccgcacgcctggtggcgcaggtcggcgtcgccgcctgcctggccggcctggccgatgccatcgagcaagacttcgcgcgctggcccgatttcgagaaatcggcccgcctcgcccaccattcgcccggcggcgtgatcgagctcatgcccgtgtccgatgcgctggactacgccttcaagtacgtcaatggccatccagacaacgccgaccgggacctgcccacggtgatggcattcggcgccctggccgacgtggccacgggcctgccggtcttcctgtccgacctgacgctggccacggcgctgcgcaccgccgccacctcggcgctggccgcgcgccggctggcgcggccgggctgccgcagcatggcgctgatcggcgcaggatcgcagtccgaattccaggccctggccttcacccacctgctgggcgtggagcggctgcgcatcttcgacatcgacgtccaggccatgcgcaagctggtggacaacctgggccatgcaggcattgccgcccagcgcatcacctgctgcaccagcagcgcccaggcgctggaaggcgccgacatcgtcaccacggtcacggccgccaagcgccgcgcctgcgtgatcgccgatgccgatgtgcgccccggcacccacatcaatgccgtcggcggcgattgccccggcaagaccgaactgcccgtggagt

SEQ ID NO: 287636 - DNA, 1081 bp, Unknown
  Bacterial polypeptide expressing nucleotide sequence isolated from the Sargasso Sea
catgacccgcttcctcgacgttcccgccaccgcccgactgatcgccaaaaccggcgtcacgaccttcctcagcgagctcgtcgacacgctgcgcgccgattacctgcagtgggccgatttcgacaagtcgccgcgcgtcgcgtgccactcgcgcgacggcgtgatcgaactgatgcccgtcgcgaacgcgtcgctgttcgcgttcaagtacgtgaacggccaccccgtcaacgccgcgcgcgggatgcacacggtgatggcgttcggcgcgctcgccgaagtcgataccggctacccgctgctgctcgccgaactcacgctgaccaccgcgctgcgcacggccgccacgtcggtgctcgccgcgcaagccctcgcccgccccgattcgcgcacgatggcgctgatcggcaacggcgcgcagagcgaattccaggcgatcgcgttccacacgctgctcggcatcgacgaaatccgcgtgttcgacgtcgatccgcgcgcgaccgacaagctcgtgcagaacctcgccgcgtaccccacgttgcgcgtggtgcgcgccgcgtcgaccgccgacgccgtgcgcggcgccgacatcgtgacgaccgtcaccgccgacaaggcgtacgcgacgatcgtcacggccgacatgatcgaacccggcatgcacctgaacgccgtgggcggcgattgcccgggcaagaccgaactcgaggcgggcgtgctgcaggcgggccgcgtgttcgtcgaattcgagccgcaatcgcgcatcgagggcgagatccagcagatgccggccgacttccccgtcaccgagctgtggcgcgtgctgcagggcgagacgaccggccgcgaacgcgcggacgaagtcacggtgttcgactcggtcggcttcgcgctcgaggattactcggcgctgcgctacctgtatgcgctcgcgcagcagcacaacgcgggcgtcgagatcgcgctgattccgccggccgtcgacccgaagaacctgttcgcgctgatcgacgacccggccgcgatcgcgctgggtcacgcggcgtacgcgaccgaagccgtcgccgcgctcgcacgctga

SEQ ID NO: 287637 - DNA, 552 bp, Unknown
  Bacterial polypeptide expressing nucleotide sequence isolated from the Sargasso Sea
taacaggatttggcatgtgatgcaggggtgtgtgcgaagaggactggaatcggagcaatcatttcttcccggtggactccacttaaggcgaagggcgagaaacctcttccgtgaattggatcaggaacgcgatcagggataccgtgagatgatggattgggtcagtctctatgccattgcagtgaatgaggaaaatgcagcaggaggaagagtggtcactgctcctaccaatggagctgcaggagtgattccggcggtgatgcattattgtctcgatacccgaaatgattttaacgaagcagctgtcgcggattttttactcactgccactggaatcggaattttatttaaagaaggagcctcgatttccgcagccgaagtgggttgtcagggagaaatcggggttgcctgttcaatggctgcagcagggcttgcttccgtaatgggagggactccgaagcaggtggccaatgccgcagaaataggaatggaacataacctgggactgacctgtgatcccgtgggaggactggttcagattccctgcattga

SEQ ID NO: 287638 - DNA, 544 bp, Unknown
  Bacterial polypeptide expressing nucleotide sequence isolated from the Sargasso Sea
aatgcatctaggagcacgcattgttactagccctacaaatggtgcatcaggaattataccagctactctaaaatattatgtaaaatttattaagaattctaatgacaatggaatcataaactttttaacaacagcttctgctatagcaatcttgtttaaaaataatgcatctatatcaggagctgaagttggttgtcaaggtgaggtcggagtagcatgttctatggctgcggccggattaacaagcgctctaggtggaaatattaaccaaattgaaaatgctgcagaaattgccatggaacataatttgggcttaacatgcgaccctgtaaagggattagtacaaataccttgtattgaacgaaattcaatgggagcaataaaggctattaatgcatcaagattggcattaagtggctctggagttcacaacgtttcattagatcaagtaattaaaactatgaatgaaacaggtaaatctatgaatactatttttaaagaaacttctttaggcggcttagctgtaaatgttattgaatgttga

SEQ ID NO: 287639 - DNA, 797 bp, Unknown
  Bacterial polypeptide expressing nucleotide sequence isolated from the Sargasso Sea
tgaaagaacaggaatgacctgccgtgaattgatgtggataaatgagcagacttggcgcactgaatccgaaatttgggatggattattagatatatggggtgtgatgcaggaatgcacgcagagaggtatggcctctgcagaaaccattcttccaggagggttgaatgtacgtcggcgtgctcccgcattatacaaagaattaatagaaaaaccagactcatcaccttcagaggttatggactgggtaagtttatttgctatagcagtcaatgaagaaaatgctgcaggaggtaggatggttacagcaccgacaaatggaggaggaggggttataccagctgtaatgcattactgcaatcgtttcagaacagatttcaatgaagacaaagttataagttttctactaacagcaggagcaataggcattttattcaaagaaggagcttctatttccgctgcagaagttggatgccagggtgaagttggagttgcatgttctatggcagctgctggactcgctgcagtgatggactgttctccgagtcaaattgccaatgccgcagaaattggcatggaacataatcttggactgacctgtgaccctgtaggaggtttggttcaaataccctgcattgaacgaaatacaatgggcgcaataaaggccatcaatgcagcaaggcttgccaagagaggcgacggtaatcatattatttcactggatagagtaattgctacaatgcataaaacaggaaaggatatgctccacagttacaaggagacctcattgggcggtcttg

SEQ ID NO: 287640 - DNA, 726 bp, Unknown
  Bacterial polypeptide expressing nucleotide sequence isolated from the Sargasso Sea
ggcatgtgatgcaggggtgtgtacgaagaggactggaatcggagcaatcatttcttcccggtggactccacctaaggcgaagggcgagaaatctcttccgtggattggaccaggaacgcgatcagggacaccgcgagatgatggattgggtcagtctgtatgccattgcagtgaatgaggaaaatgcagcaggaggaagagtggtcactgctcctaccaatggtgctgcaggagtgattccagcggtgatgcattattgtctcgacacacgaaatgattttaatgaagcagctgttgcggattttttactcactgccactggaatcggaattttatttaaggaaggagcctcgatttccgcagccgaagtaggttgtcagggagaaatcggggtcgcctgttcaatggcagctgcagggcttgcttccgtaatgggagggaccccgaagcaggttgccaatgctgctgaaatagggatggaacacaatctgggactgacctgtgatccggtgggaggactggttcagattccctgcattgaacgcaataccatgggagcagtgaaagccattaatgctgccaggcttgcaatgcgtggtgatggggagcataaaatttctcttgaccacgtgatctcaaccatgcaaagaaccggtgcggatatgctgcaccagtataaggaaacatcactgggaggacttgctgtcagcaccattgagtgttgat

SEQ ID NO: 287641 - DNA, 913 bp, Unknown
  Bacterial polypeptide expressing nucleotide sequence isolated from the Sargasso Sea
cgtggacgcctgctgcttgcgcagggtcagcacgaagtggatttcccgcagaatgacgggatgcgttttcacaacggcaacctgccgctgcatgaaaacggaatgcagatccatgcgtataatggcgaaaccgtcatttatagcaaaacctactactcaatcggcggtggattcatcgttgatgaagaacattttggtcaggatgcctcgggcgaggtcagcgtgccttatccgttcaaatccgctactgaaatgctggaatattgcaacagcaccggcctgtctctctctggcatggcaatgcagaacgaacttgcgctgcacagtaaaaaagagattgaagagtactttggccacgtctggcaaaccatgcaggcatgtatcgatcgtggcatgaacaccgaaggtgtgttgccgggcccgctgcgcgttcctcgccgtgcttcagccctgcgtcgtatgctggtttccagcgataagctgtctaacgatccaatgaacgtgatcgactgggtgaacatgtttgcgttggccgttaacgaagaaaacgccgcgggcggtcgcgtagtgacagcgccaaccaacggtgcctgcggtatcgtgcctgcggtactggcctattacgatcatttcattgagtccgttagcccggatatctatacccgctatttcctggcggccggtgcgattggcgcgttgtacaaaatgaacgcctctatctctggtgcagaagtaggttgtcagggtgaagtgggcgtagcctgctccatggctgccgcgggtctggctgaactgttaggcgcaagcccggagcaggtgtgtgttgctgctgaaatcggcatggaacataacctcggtttaacctgcgatccggttgccggtcaggtacaggttccgtgcattgagcgtaacg

SEQ ID NO: 287642 - DNA, 841 bp, Unknown
  Bacterial polypeptide expressing nucleotide sequence isolated from the Sargasso Sea
cttttattcggttggtggaggattcgttctggaagaaacggagatggaaaacagttccagtgaaaactcgattcgggttccctaccctttttcgagtgcatcagaattgttgcaacattgtgaaaaccagtcgatgagtatcgccgatctggttctcactaatgaaaaaacttggcatcacgaagataaaattcaggaaggaattaacaggatttggcatgtgatgcagggttgtgtgcgaagaggactggaatcggagcaatcatttcttccaggtggactccacctaaggcgaagggcgagaaatctcttccgtgaattggaccaggaacgcgatcacggacaccgtgagatgatggattgggtcagtctctatgccattgcagtgaatgaggaaaatgcagcaggaggaagagtggtcactgctcctaccaatggagctgcaggagtgattccggcggtgatgcattattgcctcgacacccgaaatgattttaatgaatcagctgtcgcggattttttactcactgccactggaatcggaattttatttaaggaaggtgcctcgatttccgcagccgaagtgggttgtcagggagaaatcggggtcgcctgttcaatggccgcagcagggcttgcttctgtgatgggagggaccccgaagcaggtggccaatgccgcagaaataggaatggaacataacctgggactgacctgtgatccggtgggaggcctggttcagattccctgtattgaacgcaataccatgggagcagtgaaagccatcaatgctgccaggcttgccatgcgtggtgatggggagcataaaatttctcttgac

SEQ ID NO: 287643 - DNA, 837 bp, Unknown
  Bacterial polypeptide expressing nucleotide sequence isolated from the Sargasso Sea
gcaaacaacctcatctttcataaagacgaacaacttcctcaccattctaacggtatgcgtttttctttaatgggtcatccacaaaaaactttgttcagccaagtcttttattcggttggtggaggattcgttctggaagaaacggagatggaaaactgttccagtgaaaactcgattcgagttccctaccctttttcgagtgcttcagatttgttgcaacattgtgaaaaccattcgatgagtattgccgatctggttctcaataacgaaaaaacatggcatcacgaagatcaaattcaggaaggaattaacaagatttggcatgtgatgcaagggtgtgtgcgaagaggactggaatcagagcaaaaatttcttcctggtggactccacctaaggcgaagggcgagaaatctcttccgtgaattggaccaggaacgcgatcagggacatcgtgagatgatggattgggtcagtctctatgccattgcagtgaatgaggaaaatgcagcaggaggaagagtggtcactgctcctaccaatggagctgcaggagtgattccggcggtgatgcattattgtctcgacacccgaaatgatttcaacgaatcagctgtcgcggattttttactcactgccactggaatcggaattttatttaaggaaggtgcctcgatttccgcagccgaagtgggttgtcagggagaaatcggggtcgcctgttcaatggccgcagcaggacttgcttccgtaatgggagggacccctaagcaggtggccaatgccgctgaaatagggatggaacacaacctgggactgacctgtgatccggtgggagga

SEQ ID NO: 287644 - DNA, 1378 bp, Unknown
  Bacterial polypeptide expressing nucleotide sequence isolated from the Sargasso Sea
atgattagcgtattcgatatgttcaagatcggcattggcccttcgagttcacacactgttggccccatgaaagcgggcaaaatttttatgcagcaccttgctgattcgggccagattgcccaagtggatgaattaagagccgaactctttggttccctcggccaaaccggcaagggccacggcacaggtaaggcggtcattttaggcttgatgggtgaagatcctgaaaccgtcgataccgacagcatcgatggcattcttgagcaagtgtctaaaaatgagaccctcaccctcagctgcggcaaagtagtcaagtttacccgtgaagacggcattacctaccacagacgtaaaacccttcccgcccatgcgaacgccatgacgttatatgcctacagcaaaggcgaatgtatttttgagcgcacttactactctgtcggtggcggatttatcttagatgaagatgaaatcaaccaacgtaatgcctcaccagcatcgcaaattgaatcagcaccttatgattttaacagcagcgcccaattactcgaactttgtactgaacatggcttaagcatttcatccttaatgatggccaacgaacttagccttgccagtgaagaagaggtcaaagccaagctgtggaatatctggcaaaccatgaaaacctgtatcgaaagaggttatcagaaggaaggtattctgcctggcggcttaaagctgcgtcgccgcgcgccagcactctatcgtcgcctcaaagccgaaggccgtaacaacgtcgatccattaaccgcaatggattgggtcgatttattcgccctctcggtaaacgagcaaaacgcagcaggcgatcgcgttgtgactgcaccaacaaacggcgccgcaggtattattcctgccgtgctttgttactacgataccttcgtgcaagaagtcgatatcgacgtttgtgcccgttacctgttaaccgccgctgcaattggtatcttgtataagaaaaatgcctcgatctcaggcgctgaagttggctgtcaaggtgaagtcggcgtagcctgctcaatggcggctggcgccttaaccgagattatgggcggcacagtcgaacatgttgagaacgcagctgaaattggtatggaacataacctaggcctaacctgcgaccccgtaggtggcctagtacaagtgccctgtattgaacgtaatgcaatgggcgcaatcaaggccattaacgcctcacgtatggcgctgcgcggcgacggtaaccacaaggtatcactggataaagtgattaaaaccatgatggatacaggtaaagatatgcgcagtaaatacaaagaaaccgccaaaggtggccttgcggtgaacattgttgagtgttaat

SEQ ID NO: 287645 - DNA, 1207 bp, Unknown
  Bacterial polypeptide expressing nucleotide sequence isolated from the Sargasso Sea
cctgacgggtgttggacatgggaccgataaagcaataattatgggccttgaaggagaaacacccgaagaggttgatcctgaaagtgtggatcttcgatttcatcagatttgcagagatgaaaaaatcaatttgctggggaataggatggtccctttctcaaccgcaaacaacctcatctttcataaagacgaacagcttccccatcattctaacggtatgcgtttttctttaatgggtcatccacaaaaatctttgttcagtcaaatcttttattcggttggtggaggattcgttctggaagaaacggagatggaaaacagttccagtaaaaactcgattcgagttccctaccctttttcgagtgcgtcagcattgttgcaacattgtgaaaaccagtcgatgagtatcgccgatctggttctcactaatgaaaaaacttggcatcacgaagataaaattcaggaagggattaacaaaatttggcatgtgatgcaggggtgtgtgcgaagaggactggaatcggagcaatcatttcttccaggtggactccacctaaggcgaagggcgagaaatctcttccgtgaattggaccaggaacgcgatcagggacaccgtgagatgatggattgggtcagtctgtatgccattgctgtgaatgaggaaaatgcagcaggaggaagagtggtcactgctcctaccaatggagctgcaggggtgattccggcggtgatgcattattgtctcgacacccgaaatgattttaatgaagcagctgtcgcggattttttactcactgccactggaatcggaattttatttaaagaaggtgcatcgatttccgcagccgaagtgggttgtcagggagaaatcggggttgcctgttcaatggccgcagcagggcttgcttccgtgatgggagggacccggaagcaggtggccaatgccgcagaaataggaatggaacataacctgggactgacctgtgatccggtgggaggactggttcagattccctgcattgaacgcaataccatgggagcagtgaaagccatcaatgctgccaggcttgccatgcgtggtgatggggagcataaaatttctctggaccacgtgatctcaaccatgcaacgaaccggtgccgatatgctgcaccattataaggaaacatcactgggaggacttgctgtcagcaccattgagtgctga

SEQ ID NO: 287646 - DNA, 1390 bp, Unknown
  Bacterial polypeptide expressing nucleotide sequence isolated from the Sargasso Sea
atggcagtcagcgtctttgacctcttcaagatcggtatcggtccgtccagctcgcatacggtcgggccgatgcgcgcggcgctgatgttcgtccagggcctcgagcgtgacgggcaactcgacgccacggcccacgtgaaggtcgagctgtacggctcgctcggcgcgaccggcaagggccacggcaccgatcgcggcgtgatgctcggcctgctcggcgacgcgcccgacaccgtcgatccggacacgatcgacgcgcggctggaagacgtccgcaaatcgaagcagctcgcgctgctcggcacgcatccggtgccgttcgtgctgaaggagaacatcgcgttctaccgccaggcgctgcccgagcacccgaacggcatgaaactgcgtgcgtccgacgcgagcggcaacgtgctggtcgagcgcacctacctgtcggtcggcggcggcttcgtcgtgacggccggcgcaccgaacacgaaggtgctgagcgcggccgagcagatgacccacccgttccgcaccggtgccgagctgctcgcgctgaccgagtcgaccggcaagtcgatcgcgcagctgatgtgggaaaacgagcgcgcgtggcacaccgaggaagagacgcgcgacggcctgctgaagatctgggccgtgatgcagtcgtgcgtgtcgcgcggctgcggaatcggcaacccggacgccgacggcaacctgcccggcccgttccaggtcaagcgccgcgcgccgcagctgtaccgcacgctgacgggcagcccggagcgcgcgctgcaggacccgctgtcgatgatcgactggatcaacctgtacgcgatcgcggtcaacgaggaaaacgcggccggcggccgcgtcgtcaccgcgccgaccaacggcgcggccggcatcatcccggccgtgctgcactactacacgcgcttcacgcccggcgcgaacgaacagggcgtgatcgacttcctgctgacggctgccgcgatcggcattctttacaagctgaatgcgtcgatctccggtgcggaagtcggctgccagggcgaagtgggcgtcgcgtgctcgatggcggccggcgcgcttgcggccgtgctcggcggcacgccgcaacaggtcgagaacgcggccgaaatcggcatggaacacaacctcggcctcacctgcgacccggtcggcgggatggtgcagatcccgtgcatcgagcgcaacgcgatggcgtcggtgaaggcggtcaacgccgcgcgcatggcattgcgcggcgacggctcgcactacgtgtcgctcgactccgtgatcaagacgatgcgcgagacgggcgccgacatgaagacgaagtacaaggaaacgtcgcgcggcgggctggcggtgaatatcgtcgagtgctgat

SEQ ID NO: 287647 - DNA, 1384 bp, Unknown
  Bacterial polypeptide expressing nucleotide sequence isolated from the Sargasso Sea
catgatcagtgtcttcgacctgttttccatcgggatcggtccctcttcttctcataccgtggggccgatgcgcgcctcctacgcctttgtcaacgcgctcaagcagcagggagtgctgcccagcaccgaacgggtagaagtggagtgctacggctcgctcggccagaccggcaagggccatggcaccggcaaggccatcatcctgggactggccggtttcgaacccgagtcggtggacatcgaagccatccccgcctttttgaccgaggtagagcgcagccagtcgctgctgctggcgggtgaacagccgagccagtttgcccgcagcggcgccatcatcttcaaccggcgcaagaccctgcccgcccactccaacggcatgaccctgcgcgccttcgccggggaacagctgctgtttagccagacctactactccatcggtggcggtttcattatcgaagagagccacttcgccaacgccaaggaggaggctgcccgctttgatgcggcccaccccatcccctacccgttcgagagcggcgcccagttgctggcccactgccaggagagcggcctctccatctccggggtgatgctggccaacgagaaggtgtttcgcaccgaagccgagatcaaggcgggcctgcgcaagatctggcaggccatgcagggctgcgtcgagcgtggctgtcgcagcgagggggtgctgcccggcggcctcaaggtgaaacggcgagcccccgcgctctatcgccagctcagctgcgagaccaatttcaacaaggatccgctgatggtgatggagtgggtggatctgttcgcactggccgtcaacgaggagaacgccgccggcggccgggtggtgaccgcccccaccaacggcgccgccggcatcatccccgccgtgctgcattattacgatcgcttcgtgcgcaaggtggatgacgaactgctgctgagctacttcctcgccgccgccgccatcggcatcctctacaagaagaacgcatcgctctccggcgccgaggtgggctgccagggcgaggtgggcgtcgcgtgctccatggcggcgggggcgctgaccgagatcctgggcggcagcccggcgattgtcgaaaacgccgccgagatcggcatggaacacaacctggggctcacctgcgatccggtgggtggtcaggtgcaggtgccctgcatcgagcgcaacgccatgggcgcggtcaaggcgatcaacgccgcgcgcctggccctgcgcggtaccggcgagcacaaggtgtcgctggacaaggtgatcaagaccatgtgggaaaccggcaacgacatgaagaccaaatacaaggaaaccgcccgcggcggcctggcggttaacattaccgagtgttaa

SEQ ID NO: 287648 - DNA, 1378 bp, Unknown
  Bacterial polypeptide expressing nucleotide sequence isolated from the Sargasso Sea
atgattagcgtattcgatatgttcaagatcggcattggcccttcgagttcacacactgttggcccaatgaaagcgggcaaaatttttatgcagcaccttgctgatgcgggccagattgcccaagtggatgaattacgtgccgaactctttggttccctcggtcaaacaggcaagggccacggcacgggtaaagccgttattttaggcttaatgggtgaagatcctgaaaccgtcgacaccgacagcatcgatggtattcttgagcaagtgtctaaaaatgagaccctcaccctcagctgcggcaaagtagtcaagtttacccgtgaagacggcattacctaccacagacgtaaaacccttcccgcccatgccaacgccatgacgctgtatgcctacagcaaaggcgaatgtatttttgagcgcacttactactctgtcggtggtggatttatcttagacgaagatgaaatccatcagcgcaatgcctcaccagcatcacaaattgaatcagcgccttacgattttaatagcagcgcccaattactggatttatgtactgagcatggcctgagcatttcttccctgatgatggccaacgagcttagcctcgccagcgaagaagaagtcaaagccaagctgtggaatatctggcaaaccatgaaaacctgtatcgaacgaggttatcagaaggaaggtattctgcctggcggcttaaaactgcgtcgccgcgcaccagcactctatcgtcgcctcaaagccgaaggccgtaacaatgtggatccgttaaccgcaatggattgggtcgatttattcgccctctcggtcaacgagcaaaacgcagccggcgatcgcgtcgtcaccgcaccaacaaacggcgccgcaggcatcattcctgccgtgctttgttactacgataccttcgtgcaagaagtcgatatcgacgtttgcgcccgttacctgctaaccgctgctgcgattggtatcttgtacaagaaaaacgcttcgatttcgggcgcagaagttggctgtcagggcgaagtcggcgtggcctgctcaatggcggctggcgcattgaccgagatcatgggcggcacagtcgaacatgttgaaaacgcggccgaaatcggtatggaacataacttaggcttgacctgcgatccggttggcggactagtacaagtcccttgtattgaacgtaatgcgatgggtgcaatcaaggcgattaacgcatcacgcatggcgctgcgcggcgacggtaaccacaaggtatcactggataaagtgattaaaaccatgatggatactggtaaagatatgcgcagcaaatacaaagaaaccgccaaaggcggcctcgcagtaaacattgtagagtgttaat

SEQ ID NO: 287649 - DNA, 1378 bp, Unknown
  Bacterial polypeptide expressing nucleotide sequence isolated from the Sargasso Sea
catgattagcgtattcgatatgttcaagatcggcattggcccttcgagttcacacactgttggcccaatgaaagcgggcaaaatttttatgcagcaccttgctgatgcgggccagattgcccaagtggatgaattacgtgccgaactctttggatccctcggtcaaacaggcaagggccacggcacgggtaaagcggtgattttaggcttaatgggtgaagatcctgaaaccgtcgacaccgacagcatcgatggcattcttgagcaagtgtctaaaaatgagaccctcaccctcagctgcggcaaagtagtcaagtttacccgtgaagacggcattacctaccacagacgtaaaaccctccccgcccatgccaacgccatgacgctgtatgcctacagcaaaggcgaatgtatttttgagcgcacttactactctgtcggtggtggatttatcttagacgaagatgaaatccatcaacgcaatgcctcaccagcatcacaaattgaatcagcgccttacgattttaatagcagcgcccaattactggatttatgtactgagtatggcctaagcatttcttccctaatgatggccaacgagcttagcctcgctagcgaagaagaagtcaaagccaagctgtggaatatctggcaaaccatgaaaacctgtatcgaacgaggttatcagaaggaaggtattctgcctggcggcttaaaactgcgtcgccgcgcaccagcactctaccgtcgtcttaaagccgaaggtcgtaacaacgtggatccgttaaccgcaatggattgggtcgatttattcgccctctcggtaaacgagcaaaacgctgcaggcgatcgcgttgtcaccgcaccgacaaacggcgccgcgggcattattccagccgtgctttgttactacgataccttcgtgcaagaagtcgatatcgatgtctgcgcccgttacctgttaaccgctgctgcgattgggattttatacaagaaaaatgcctcgatttcgggcgcagaagtcggctgtcagggcgaggttggcgtagcctgctcaatggcggctggcgcgttaaccgagatcatgggcggcacagtggaacatgttgagaacgcagctgaaatcggtatggaacataacctaggcctgacctgcgaccccgtaggcggcctagtacaagtcccttgtattgaacgtaatgcgatgggtgcaatcaaggcgattaacgcatcacgcatggcgctacgcggcgacggtaaccacaaggtatcactggataaagtgattaaaaccatgatggatacaggtaaagatatgcgcagcaaatacaaagaaaccgccaaaggcggcctcgcagtgaacattgtcgagtgttaa

SEQ ID NO: 287650 - DNA, 1372 bp, Unknown
  Bacterial polypeptide expressing nucleotide sequence isolated from the Sargasso Sea
catgatcagcgtttttgatatcttcaaaatcggtgttggcccctcctcttcccacactgtcggcccgatgaaagctgccaaacagttcgtggatgaactgcgtgcaggcggcaagatccgtgacatcacccggatccaggtcgatgtctacggctcactctcctggaccggcaaaggtcaccacaccgataccgctatcatcatgggtctggcaggcaacctgccggaaaatgtcgacatcgacggcatccccgagttcatctcccgcgtcgagcagaccggtcgtctgcccatcggcctgcactgccacaccgtcagcttcccgcgcgacgccatggtgttccatgacgaagccctgccgctgcatgaaaacggcatgaagctgaccgccttcatcgaagacgcagccgtctacagcaagacctactactccatcggcggtggcttcatcgttgacgaagagaacttcggcaaggctgacagcggcgacatgtccgtcagctacccgttcaagagcgctgccgagcttatcgcccactgcagccagaccggcctctccatctccgccctgatgatggagaacgagaagtgcttcaataccccggaagagatctacaagaaacttggcaagatctggaccaccatgcgtgaagggatcgagcgcggctgccgcaccgaaggcgttctcgccggcccgctgcgcgtaccgcgccgcgccgcgccgctctatcgtcagctgaccaccaacgagaacctctccaacgatccgatgaacatcgtggactgggtcaacatgttcgccctggcggtgagcgaagagaacgcggccggtggccgtgtggtgaccgcgccgaccaacggtgccgccggcatcatcccggccgtgctggcctactacgacaagttcatccagccggttggccgcgacgactacacccgtttctacctggccgccgccgccgttggcatgctctacaagatgaacgcctccatctccggcgccgaagtcggctgccagggtgaagtgggcgtctcctgctccatggccgccgccggtctgaccgagttgatgggcggcagcccggagcacgtctgtgaagccgccgagatcggcatggaacacaacctgggtctgacctgtgacccggttgccggtcaggtgcaggtgccctgcatcgagcgcaacgccatcgccgccatgaaagcggtcaacgcctcccgcatggcgctgcgtcgcacctccaagccgcgcgtctcgctggacaaggtgatcgagaccatgtacatcaccggcaaggacatggactccaagtatcgtgaaacttcccgcggtggcctggccatcaaggtgatgcaagtcgcctgcgagtaa

SEQ ID NO: 287651 - DNA, 1030 bp, Unknown
  Bacterial polypeptide expressing nucleotide sequence isolated from the Sargasso Sea
cctgcccatctccggttcgatcaaggcccgtggcggcatctacgaggtgctcaagcatgccgaggacctggcactggctgccgggctgctcagcctcgaggacgattacgcctgcctcgacagcgatgcgatgcgcgccttcttcggtggctatcaggtagccgtcggctctaccggcaacttggggctgtccatcggcatcatcagtgcacgtctgggctttcaggccaccgtgcatatgtccgccgatgcgcgccaatggaagaaggacaagctgcgcgcccatggcgtgaccgtggtcgagtacgccagcgattacagcgttgcggtggagcaggggcggcgtcaggccgaggctgatccgcgctgccatttcgtcgatgacgagaattccaggcacctgttcctcggctatgcagtggccggcgagcgtctcaagcagcaactggtggcagccagcgttgtggtcgatgccgagcatccgctgttcgtctatctgccttgtggcgtgggcggcgggccgggtggtgtggcgttcggcctgaagctggcgttcggcgacgcggtgcactgtctgttcgccgaaccgacgcattcaccgtgcatgctgctcggcgtgcacaccggccggcatgaggagctggcagtgcaggatttcggcatcgacaaccgcacggctgccgacgggcttgccgtgggtcggccatccggtttcgtcggccgcgccatgcagcgcctgatcgatggttattacacggtcagcgatgaacagatgttccgctacctggcgttgctggagcagaccgagggccagcgcctggaaccttcggctctggccggcatgccgggtgtgctgcgcgtgcttggcgagcagcagggctatcgccagcgcatgggcctcactcctcaacgcatggcgcaggcgacccatctggtctgggcgaccggcggcagcatggtgccgcaggcggagatggacagctacctggcgcgtggccggcaactgttgcagggttcgggcgaggattga

SEQ ID NO: 287652 - DNA, 727 bp, Unknown
  Bacterial polypeptide expressing nucleotide sequence isolated from the Sargasso Sea
ctgcgcagccacggcgtgacggtagtggagtacgaagaagattacggcgtggcggttgaacaaggtcgtaaggcggcagagtccgatccgaactgtttctttatcgatgatgaaaattcccgcacgctgttcttaggctatgcggtcgccggtcagcgtctgaaagcgcagtttgcccagcaggggcgcgtggtggatgccgatcatcctctgtttgtctacctaccgtgcggtgtcggtggcggccctggcggcgtggcatttggcctgaagctggcattcggcgataacgtgcactgcttcttcgctgaaccgactcattcaccgtgcatgctgctggggatttacaccgggctgcacgataccatttccgtacaggacatcggtatcgacaacctgacggcggcggatgggctggcggtgggtcgcgcctcgggctttgttggccgggcgatggagcgtctgctcgacggtctgtacaccctggacgatcagacaatgtacgatatgctgggctggctggcgcaggaagaaggcattcgtcttgagccgtcggcgctggcaggcatggctggccctcagcacgtttgcgcctccacggattaccagcagatgcatggcttcagcgcggatcagctcaataacgccacccatctggtgtgggcaaccggcggcggcatggtgccggaaaccgagatggcgcaatacctggcgaaagggcgctaat

SEQ ID NO: 287653 - DNA, 1314 bp, Unknown
  Bacterial polypeptide expressing nucleotide sequence isolated from the Sargasso Sea
cacaactcacccagcagtttccgctgctgcaatccctgatcgcgctggaaccggtcagctggttcaaccccaaggccaccaccctggtggaaggtctgccccatgtgggactggatggccgcgatgtggcggatgcctccgcccgcctggcccgcttcgccccctatctgtgcgaagccttccccgagacccgcgccagcaagggtattatcgaatccgacatcgccgccatcccggcgatgctgcgcgccctgaatgcccgttacggggtcaaggtgagcggccggctgctgctgaaaaaagacagccatctgcccatctccggctctatcaaggcccgcggaggcatctacgaggtactgacccatgccgaacagctggccatcaaggccggcctgctctgcgaagaggacgactatcgcaagctgttcacggacgagttccgccacttcttcagccagtacagcatcgcggtgggctccaccggcaacctcggcatgtccatcggcatcatgagcgcccgcctcggctttcgcgtcaccgtccacatgtcggccgatgcgcgggagtggaagaagcgcaagttgcgcgaacatggtgccatcgtggtggaatacgccgaggattacggggtcgcggtggagcagggccgcaaggaggccgagcgcgatcccacctgcttcttcatcgatgacgagaactcacgcaccctgttcctcggctacgcggtagccggtgagcgggtgaaaaagcagtttgatgaaatggggattgtggtggacgccgaccatccgctgtttgtctacctgccttgcggtgtcggtggcggccccggcggggtggcctttggcctcaagctcgcgttcggtgaccacgttcactgcctgttcgccgagccgacccactccccctgcatgctgctcggggtccacaccggcttgcacgatgccattgcggtgcaagaccttggcatcgacaacctcactgcggccgacggcctcgccgtggggcgcgcttccggctttgtcggccgcgccatggagcggctgctggccggtttctacaccctgagcgatcaggagatgtatgacctgctgggactcttggcccgcgctgagcagatcaagctggagccctcggcgctggccggcatggcaggcccgtggcgcgtcgcggccaaccttgcgtggcaggccggtcaggggctggatgccgccagaatggcccgggccacccacctggtatgggccaccggcggtggcatggtgcccgccgaggagatggaaaagtacctggtcagcgcccgctgctgat

SEQ ID NO: 287654 - DNA, 907 bp, Unknown
  Bacterial polypeptide expressing nucleotide sequence isolated from the Sargasso Sea
tatgaatgattattttgaaaaaatacttcaagctgaagtctatgaagtagcaaaaaaaacgcccttagaaaaagctcataatttaagtaatacacttaataatgaagtttttctaaaaagagaagatctgcaagatgtattctcattcaaagtaagaggtgcatataacaaaatgagtaagcttaccaattcccagctttctcagggagtcattacttcaagtgctggtaatcatgctcaaggtgttgctcttagtgctctcaagctaaattgccaagcgacaatattaatgcccattacaacacctcttgtaaaagttaatgctgtgaaaaagttaaaagcaaaagttatattatttggtgataattatgatgaaacgtataaagaagcaataagaattagcaaagaaagaaatttatgcttcattcatccttttgatgatccagatgtaatagcaggacaaggaactatagctattgaacttgaacagcaactaaaggaaaaaccctatgcaatttatattgctgttggtggtggaggattgatatcaggaatatctttatatattaaaaagatatggcctgaagtaaaaataattggggtagagcctgaagatgcagatgctatgacaaaatctttggaagaatcaaaaattgtggaattatcttctgttggtcaatttgcagatggagtggcggttaaaaaaattggtaaaaatacttttgatattggcagaaaatatatagataagatgattaccgttaatactgatgaaatatgtgcagctataaaagatgtttttgaggatactagatcaatactagagcccgcaggtgcattatcaattgcaggaatgaaaaaagatattttaaattcgaatcattcaaatagaaaaatggttgcgatt

SEQ ID NO: 287655 - DNA, 802 bp, Unknown
  Bacterial polypeptide expressing nucleotide sequence isolated from the Sargasso Sea
ttgagattaaaaattaaaaaaacaggaaattttaagaattcaaagaaatatttaaagctaattcctgaggcatcagttgtatatgacgttgcaatagattcaccaactactcatgcagttaatctttctataaaagaaaataataacatttatctaaaaagagaagatctccagcctatattttcctttaagaataggggtgcatataacaagatagtcaatctttcagataaaaagaaatctttaggtatcattgcagcctctgcaggcaatcatgctcaaggtgttgctttggcctgtaagaagctaaacataaagtgtaatatcgttatgcctgtaacggcacctgaaaataaactaaataatgtaaaaagactaggagccaaagtaacgcttcatggtgagaatcttgctcatgcattagtcaaagctgcaaaaatgtcaaaaaaaaataaatatacttttgttcatccgtttgatgatccattcacaatagcaggccaaggcactattggaaaagaaattttagatgatgagattgattatgatgtaatttttgtgcctgttggtggtggaggcttgttagcagggatttctgcctgggtaaaacaacataagaaaaaaataaagattattggtgttgaggttaatgattccgcttgtttaacggaagcacttaaatctaataaacgtgtaatgttagaaagggtggggctatttgcagatggagttgctgtatctcaagttggcaagaacaatttagatgtcattaaagaatgtgtagatgaagtaatgacagtaa

SEQ ID NO: 287656 - DNA, 436 bp, Unknown
  Bacterial polypeptide expressing nucleotide sequence isolated from the Sargasso Sea
atggaagattattttaaaaaagtacttgaggctcaagtctacgaagttgctaaaaagacacctttagaaaaagcaaataatttaagtaagacacttaataataatatttatctaaaaagagaagatcttcaagatgttttttcatttaaaataagaggtgcttttaataaaatgagaaaactagccaaatctcagctagcaaatggagtaatcacatcaagtgctggtaatcatgctcaaggagtagcactaagcgccctgaaattaaattgtagtgcaacaattttgatgccaaccaccacaccattagtaaaaataaaagctgttaaaaatctaaaagcaaaagttatattatttggagataattatgatgaaacatataaggaagcattacgaataagtgaagaaaagaatttatgctttattcatccttttg

SEQ ID NO: 287657 - DNA, 661 bp, Unknown
  Bacterial polypeptide expressing nucleotide sequence isolated from the Sargasso Sea
atgaatgattattttgaaaaaatacttcaagctgaagtctatgaagtagcaaaaaaaacacccctagataaagctcataatttgagtaataaacttaaaaatgaaatttacttaaaaagagaagatcttcaagaagtattttcatttaaaataagaggtgcatataacaaaatgagtaagctcaataactcacagcttgctcagggagttattacatctagtgctggaaatcatgctcaaggtgtggcattgagtgctctcaagctaaattgccaagcaactattttaatgcccataacgacacctcaagttaaaatcaacgcagtaaaaaatttaaaagcaaaagttatattacatggagataattatgatgaaacttatagagaggcaatacggattagccaagaaagaaatttatgttttattcatccctttgatgatccagacgtaatcgcaggacaaggcactatagctattgaacttgaacaacaattaaatgaaaaaccatatgcaatttatgttgctgtaggtggtggtggattaatagcagggatatcattatatataaaaaaaatatggcctactgtaaaaataattggagtagagcctgaagacgcaaatgccatgtcaaagtcttggaagaatcaaaaattgtggaatt

SEQ ID NO: 287658 - DNA, 304 bp, Unknown
  Bacterial polypeptide expressing nucleotide sequence isolated from the Sargasso Sea
ctgcggaatattctcaccgcggacgtgtacgatgtcgcgatcgagtctcccttggagctcacgccgagattgagcgaacggatcggggcgaacatttacctcaagcgggaggatttgcagccggtgttttcgttcaagcttcgcggggcgtacaataagatgaaacagttgacggaagaggagcgagcgagaggcgtcatcacgtcttccgcgggtaatcacgcgcagggcgtcgcgctctcgggacaaaagttgggatgcaaggcgatcatcgcgatgccggtgacgacgccggcgattaaag

SEQ ID NO: 287659 - DNA, 764 bp, Unknown
  Bacterial polypeptide expressing nucleotide sequence isolated from the Sargasso Sea
cataatttaagttatacacttaataatgaagtttttctaaaaagagaagatcttcaggatgtattttcattcaaaataagaggtgcatataacaaaatgagtaagctcactaattcacagctttctcagggagtaattacttctagtgctggtaatcatgctcaaggggttgcacttagtgcccttaagttaaattgcgaagcaactatattaatgcccattaccacgcctctagtaaaagtaaatgcagtaaaaaatttaaaagcaaaagttatattatatggcgataactatgatgaaacttataaagaggcaataaggattggcaaagaaagaaatttatgctttattcatccctttgatgatccagaagtaatcgctggacaaggaactatagctatagaacttgaacagcagcttaaggaaaaaccttatgcaatttatattgcggtaggtggtggaggattgatatcagggatatctttgtaccttaaaaaagtatggcctgaagtaaaaataattggtgtagaaccagaagatgctgacgctatgacgaaatctttggaagaagaaaaaattgtggaactatcttctgtaggtcaatttgcagatggagtagcggttaaaaaaattggtaaaaatacttttgatattggtagaaaatatatagataaaatgattagggttaatactgatgaaatctgtgctgctataaaagatgtttttgaggatactagatcaatactagagccagcaggtgcctt

SEQ ID NO: 287660 - DNA, 324 bp, Unknown
  Bacterial polypeptide expressing nucleotide sequence isolated from the Sargasso Sea
attgagacttaaaataaaaaaaacaggtaattataggaactctaaaaagtacctcaaaatgattaatgaagcatctgtatatgatgtttcaataaattcacctactacctatgccgcaaatctttctatgaaagaaggaaatgaaatttatttaaaacgagaagatcttcagcctattttttcttttaagaatagaggagcctttaataagatcgtcaacttatctgaagataaaaaatctcgcggaataatcgcagcatcagcgggaaatcatgcacaaggcgttgccttagcttgtaaaaagttaagaataaagtgcactat

SEQ ID NO: 287661 - DNA, 730 bp, Unknown
  Bacterial polypeptide expressing nucleotide sequence isolated from the Sargasso Sea
aatgtttgaagaatacaaaaagttaattgaagaagcgggaaagcgtatctataccgttgccaagcgtacagatctgactcatgccccacagcttacacaacgttttggtaataatatctggttaaagcgcgaagatcagcaacctgtgttttcctataagctacgtggtgcttacaatatgatcgcctcattgactgacgatgaacgacagcgcggtgttattactgcgtctgccggtaatcatgcgcaaggtgtcgcaatggcagcgcaaggcttagatatgaaagctgttatcgtgatgccgaaaacaacacctgatattaaagtcagctctgctaagcgtatgaatgcagatgttgttttgcatggtaatacttatgatgaagcaaaagaccatgtgtttaaactgtctgaagaaacaggcatgtgttatatcccaccttttgatcatcctttggttattgccggacaagcaactgttgctgttgagttattggaacagcatccaaacaaacctaatgtgatttttgtgcctgttggtggtggtggacttattgccggtatcgccgtttatataaaagaaaattatccagatattaaaatcatcggtgtcgaacatgatgaggcgccaagtatgcatgcatcatttgcagcaaatgaacgcgttgttttagaacaaatcggtatttttgctgacggcgctgctgtgatagaggttggcgaagaaaac

SEQ ID NO: 287662 - DNA, 916 bp, Unknown
  Bacterial polypeptide expressing nucleotide sequence isolated from the Sargasso Sea
aattaaaaaaacaggaaattttaagaattcaaagaaatatttaaagctaattcttgaggcatcagttgtgtatgacgttgcaatagattcaccaactactcatgcagttaatctttctataaaagaaaacaataacatttatctaaaaagagaagatcttcaacctatattttcctttaagaataggggtgcatataacaagatagtcaatctttcagataaaaagaaatctttaggtatcattgcagcctctgcaggcaatcatgctcaaggtgtcgctttggcctgtaagaagctaaacataaaatgtaatattgttatgcctgtaacggcacctgaaaacaagctaaataatgtaaaaagactaggagccaaagtcacgcttcatggtgagaatcttgctcatgcattagtcaaagcttcaaaaatgtcaaaacaaaataaatatacttttgttcatccgtttgatgaccctttcacaatagcaggccaaggcactattggaaaagaaattttagatgatgagattgattatgatgtaatttttgtgcctgttggtggcggaggcttgttagcagggatttctgcctgggttaaacaacataagaaaaaaatgaagattattggtgttgaggttaatgattccgcttgtttaatgcaagcacttaaatctaataaacgtgtaatgttagaaagagttgggctatttgcagatggagtcgctgtatctcaagttggcaagaacaatttagatgtcattaaagaatgtgtagatgaagtaatgacagtaaatattgatgaggtttgtgctgctgtaaaagatatttttgaagatacaagagttttatctgaaccatctggcgcagttgctcttgctggcttaaaaaaatactcaaaaagagttaagcataaaaat

SEQ ID NO: 287663 - DNA, 721 bp, Unknown
  Bacterial polypeptide expressing nucleotide sequence isolated from the Sargasso Sea
aatgagtaagctaactaaattacagcttgcacaaggagttattacatcgagtgctggtaatcatgctcaaggggtagcaatgagtgctctcaagttaaattgccaagcaacaatattgatgcctattacgacaccaatagtaaaagttaacgcagtaaagaatttaaaagctaaagttatattatttggggataattatgatgaaacttataaagaggcaataaggattagccaacaaaaaaatttatgttttattcatccttttgatgatccagatgtaatagcaggacaaggaactatagctattgaactagaacaacaattaaaagataaaccttatgcaatttatattgctgttggtggtggcggattgatttcaggaatatctttatacattaaaaaaatatggccagaagtaaaaataattggagtagagcctgaagacgcagatgccatgtcaaaatccttggaagaatcaaaaattgttgaattatcttctgtaggacagtttgcagatggagtcgcggtgaaaaaagttggtaataatacttttgaaattggaagaaaatatattgataagatgattagggttaacacagatgaaatatgtgctgcaataaaagatgtttttgaagatactagatcaatactagagccagcaggagctttatcaattgctggaatgaaaaaagatattttaaattcgaatcattcaaaataa

SEQ ID NO: 287664 - DNA, 813 bp, Unknown
  Bacterial polypeptide expressing nucleotide sequence isolated from the Sargasso Sea
aagtctatgaagttgcaaaaaaaacaccactagagaaagctcataatttaagtaatacacttaataatgaagtttttctaaaaagagaagatcttcaggatgtattttcattcaaaataagaggtgcatataacaaaatgagtaagctcactaaatcacagcttgctaagggagtaattacttctagtgctggtaatcatgctcaaggggttgcacttagtgcccttaagttaaattgcgaagcaactatattaatgcccattaccacacctctagtaaaagttaatgcagtaaaaaaattaaaaggaaaagttatattatatggcgataactatgatgaaacttataaagaggcaataaggattagccaagaaagaaatttatgctttatccatccatttgatgatccagaagtaatagctggacaaggaactatagctatagaacttgaacagcagcttaaggaaaaaccttatgcaatttatattgctgtaggtggtgggggattgatatcaggtatatccttataccttaaaaaagtatggcctgaagtaaaaataattggtgtagaaccagaagatgcagacgccatgacaaaatctttggaagaagaaaaaattgtggaactatcttctgtaggtcaatttgcagatggagtggcggttaaaaaaattggtaaaaatacttttgatattggtagaaaatatatagataagatgattagggttaatactgatgaaatctgtgctgctataaaagatgtttttgaggatactagatcgatactagagcccgcaggtccttatcaatagc

SEQ ID NO: 287665 - DNA, 829 bp, Unknown
  Bacterial polypeptide expressing nucleotide sequence isolated from the Sargasso Sea
atgaatgattattttgaaaaaatacttcaagctgaggtctatgaagttgcaaaaaaaacaccactagagaaagctcataatttaagtaatacacttaataatgaagtttttctaaaaagagaagatcttcaagatgtattttcattcaaaataagaggtgcatataacaaaatgagtaagctcactaattcgcagcttgctcagggagtaattacttctagtgctggtaatcatgctcaaggggttgcacttagtgctcttaagttaaattgccaagcaaccatattaatgcccattaccacacctctagtaaaagttaatgcagtaaaaaaattaaaagcaaaagttatattatatggcgataactatgatgaaacctacaaagaggcaataaggattagccaagaaagaaatttatgctttattcatccatttgatgatccagaagtaatagcaggacaaggaactatagctatagaacttcaacagcagcttaaggaaaaaccttatgcaatttatattgctgtaggtggtggtggattgatatcagggatatctttatatgttaaaaaaatatggcctgaagtaaaaataattggagtagaaccagaagatgctgacgccatgacgaaatctttggaaaaagaaaaaattgtggaactatcttcggtaggtcaatttgcagatggagtagcggttaaaaaaattggtaaaaatacttttgatattggtagaaaatacatagataagatgattagggttaacaccgacgaaatctgtgctgctataaaagatgtttttgaggatactagatcaatactagagccag

SEQ ID NO: 287666 - DNA, 1675 bp, Unknown
  Bacterial polypeptide expressing nucleotide sequence isolated from the Sargasso Sea
atgttatctctcgcatcgtcgcaaacggagcaggctgaggcgcagccctctcaagttcaggcctctcaagttcagtccgataaggcgcagtcggccacttctgccttagaaaagagtcagcttgcgcaaagttacttgcaaaaaatcctgctgtcgtcggtttatgacgttgcgaaagtgacgccactctccagccttaacaaactctcagcgcgtttgggttgccaagtatttttaaagcgtgaggatatgcaacctgtgcattcctttaagctgcgcggcgcctataaccgcattgctcagttgagccaagccgaatgtcaacgcggcgtggtgtgcgcctcggcgggcaaccatgcccaaggcgtggccatgtcggcggccagtcgtggtgtggatgcggtgattgtgatgcccgaaactacgccagatattaaagtcgatgcggtgcgccgtttgggtggcaacgtggtgttgcacggtcaagccttcgatcaggccaatggctttgcgatggagatggccgagcaggaaggtcgggtgtatatcgcccccttcgatgacgaagccgtgatcgcaggccaaggcactatcgcccaagaaatgttgcaacagcagcgcgaccttgaagtggtatttgtgcccgtgggcggcggtggcttaattgctgggattgcggcctattacaaggcggtgatgccacaggtcaaaatcgttggggttgagcctgaagatgcggcctgcttaaaagcggcgatggaggcgggcgagcctgtcacactcccacaagttggtttgtttgccgatggggtcgcggttaaacgtatcggcactgagccatttcgcttagccaagctgtttgtggatgaagtagtgacggtaacgtccgacgaaatctgcgccgccgttaaagatatttttgaagatacccgcgccattgccgagcccgcgggcgctttatcccttgcagggcttaaaaaatatgtcagcatcaatgccacaggcgagagtggtaagggtgagaaagtcgcggcgattttaagtggcgcgaatgtgaacttccacagcctgcgatatgtgtcggagcgctgcgaactgggcgagcaaaaagaagccgtgctggcggttaaagtgcccgagcgtcccggcagcttcctgcgtttttgtgagttgctcgaaaagcgggtgatgaccgaatttaactatcgctttagcagccgcgatatggcggtggtgtttgcgggtattcgtttgactaaaggccatggcgaattagagcagatcatcaataccttagaagataacggcttcgaggtgcaggacttatccggtgacgaaaccgcgaaattgcatgtgcgttatatggtcggcggtcatccgcctgagccattagaagagcgcctatttagcttcgagtttcccgagcatccgggcgcgctgctgaagtttttaaccaccctgcagagcaagtggaatatcagtttgttccattaccgtaatcacggtgcggcctttggccgagtgctggcggggtttgaagtccccgagggtgatgccttgccatttcagcagtttttaactgagctgggatttgtctatcaagaagagacgcaaagccctgcttatcagctgtttttgaatgccggaaaaggaaaaaagagcctgcctttgtgat

SEQ ID NO: 287667 - DNA, 1549 bp, Unknown
  Bacterial polypeptide expressing nucleotide sequence isolated from the Sargasso Sea
atgcgacttaaaataaaaaaatcaggttcttataaattttcaaaaaaatatttaggtttaatctctaaatctaaagtttacgatgttgctgacaagaccccaataacttttgctggaaatttatctagcaagttaaaaaatgatgtttatttgaagcgtgaagatatgcaaccaattttttcattcaaaattagaggtgcttataacaagattgcaaatttaagttctcaacagcaaaaaatgggagttataactgcatcagctggaaatcatgcacaaggggttgcaaatgcatgtaagaaattaaaagtaccatgtttgatagtaatgccagtaacagcgcctgagataaaagtaaaatccgttaaaagatttggctccaaggttttattgcatggagataattttgatcaggcctcaaaaaaagcaaggcaaattgcaagggagcaaaggtttgaatttatcgaagcttttgatgatccgctcactatagcgggccagggcaccattggaaaagaaattttagaagaaaacaaagacttagatgtcatttttgtacctgttgggggaggtggtttgttggcaggcgtaggcgcatgggttgctcaaaataaaaaagatatcaaaatttatggtgttgaggttgaagactcggcttgtttggttgaggcaattaagtctaataaaagagtaagacttcgggaagtaggattgtttgccgatggggttgctgtagagcaaattggtaaaaataattttgatgtaattagggagtgtgttgatggagtaattactgtaagcattgatgaactttgcgctgcagttaaagatatatttgaagacacaagagttctttctgagccagcgggcgctcttgcattggcaggattaaaaaaatatgcaactaaaattactaataaacgtttactggctattagtagtggagcaaatgttaactttgaaagacttagttatatagtagagagatctgaggttggagaaaatagggagaaacttcttagcattaaaattccagagcgtcctggaagttttttaaagttatgtaaagtctttggtcgatctcagattacagagtttaattacagatttgctaataagatggacgcacatgtcttagttggaattaaaactgaaaatgaagatgcatttaaaaaaattaagactatgctgacaaaaaataaatttaaattttctgatttaacaagaaatcaaatttctaatgatcatcttagacacatggttggaggtcataagagcatcatttcggaaagagattctgaaagattatataggtgtcaatttccagtaaggcctggagccttaatggggtttcttaaggattttggttcaaaatggaatatttctttattccattacagaaatcttggggcagcatttgccaatgttctaattggcattgaagataaaagcaaatctgctaatgcgttagaaaagcatcttaaatcattggattatagtttcattgaagaaactgataataaggcatacattgatttcttaagataat

SEQ ID NO: 287668 - DNA, 913 bp, Unknown
  Bacterial polypeptide expressing nucleotide sequence isolated from the Sargasso Sea
attgagattaaaaataaaaaagactggtaaatttaagcattctaagaagtatatcaagttaatcaataatgcttctgtatatgatgttgcaatagattctccaacaacctttgcaagcaacctttcagctaaaggaaataatgatatatatttaaagagagaagatctacagcctatattttcatttaaaaatagaggcgcttataacaaaatatcaaatttatcaaaaaaacaaagatctcttggaattatagctgcatctgctggaaatcatgctcagggtgtagcgcttgcatgtaagaagctaaatattaaatgcaatatagtaatgcccgtcactgctccagaaaataaactaaattctgttaaaaggcttggagcaaaaataacacttcatggagaaaatcttgctgaagctcttgtaaaagctgacgagatttccaaaaaatataactacacattcgttcatccttttgatgatccatacaccatcgctggtcaagggacaattggtaaagaaattcttcaggatgatattaaatatgatgcaatttttgttcctgttgggggaggtgggttgctagccggtatatctgcttggatcagacaaaatgataagaaaataaaaataattggagttgaagttgatgattcagcatgtttaacagaagctctaaaatcaaacaaaagagtattgttgaaaaaagtaggattatttgcagatggcgtagctgtttctcaagtcggaaagcacaatctagatgttataaaagagtgtgtagacgaagtgatgacagtcaatattgatgaggtttgtgcagctgttaaggatatctttgaagatactagagttttatctgagccatctggtgcagtagccttggcaggcttaaagatatatcaaaaaaaataa

SEQ ID NO: 287669 - DNA, 1488 bp, Unknown
  Bacterial polypeptide expressing nucleotide sequence isolated from the Sargasso Sea
gatgaccgactatctccagcggatcctgcgggctcgcgtctatgacgtcgcgcgggagacgccgcttgactctgccccaaacctcagtcgacgactcggcaatgaagtgctgctgaagcgcgaagacctgcaaccggtgttctcgttcaagcttcgcggtgcatacaaccgcatggcccagctcacgccggaggaactcagtcgtggcgtgatcgcctccagcgctggaaaccatgcccagggtgtggccctcagtgccaaaaaactcggctgccgcgccgtcatcgtgatgcccgccaccacacccgaggtgaaggtgagggccgtgcgcacccttggaggggaagtcgtgctccatggggagacctacgacgaatgttcagcagaagcgagacaacgctgcgctgatgagggactcacctacatccatccctttgacgacccggaagtgatcgccggtcagggaaccatcggtctggagatcatgcggcagagccctgaaccaccggatgccatttatgtggcggtcggcggcggcggactgattgccggaattgcggcttacgtcaaacagctgtggcccagcacggagatcgtcggcgtggaaccgcttgatgcggacgccatgacccagtcgttagagcagggagaacgggttgagctggcccaggtgggcctgttcgccgacggcgttgcggtccgcagagtgggagagcacacctttgccctggcccagcaatttgttgaccgcatggtgcgggtcgacaccgatgcgatctgtgccgccatcaaggacgtgtttgaagacacgcgctccatccttgaaccggcaggtgcacttgccgtggctgggctgaagcaggatgtggccgattgtcagatggcggaccgccgactggtggcggtggcctgcggcgccaacatgaactttgatcgcctgaggttcatcgccgaacgctccgagctgggagaggaacgtgaggcgatgttggcggtggagatccccgagcaaccgggaagcctcagaaccctgtgtgatctcctgcgcagccgcagcctcaccgaattcagttatcggatgagtgagggggaatcagcccacattttcatcggcgtgcaggtgaacggagcacaggatcgtcaccatctcgtggatggactccagcaagagggcttctcctgtcttgatctcagcgacaacgaactgtccaaggttcacctccgtcacatggttggcggtcgtcttccatccacgtcgaaggacggttgcgctgggggctgccttgaactgctgtaccgctttgaatttccagaaagaccgggggcactgatgcgcttcgtcagcgctctcaatcccggttggagcatcagcatcttccactaccggaaccatggagctgacgtgggtcggatcgtggtgggtgtgctgataccggtggacgaacagccgcagtggacggccttcctcaatgagcttgggtaccccta

SEQ ID NO: 287670 - DNA, 1522 bp, Unknown
  Bacterial polypeptide expressing nucleotide sequence isolated from the Sargasso Sea
atgttcgaggaatacaaaaaattaattaaggaagctagccagcgagtttacgcagttgcaaaactcactgatcttgactatgccactcaactttctttgcgccacaacaacaaaatatggctgaaacgcgaagatcagcagtcggtattctcctataagataagaggcgcttacaacttaatcgcctccttatcaaaaagcgagcgagatcgaggagtgattgcggcctcggcaggaaaccatgctcagggcgtggcgcttgcagcaaaacaccttaatttgaaatcaattattgttatgcctaaaacaacgcctgaaatcaaaattgactcagtaaaaagaatggatgcagaggttatcttgtttggtaatacatatgatgatgctaaagagcatgcattagaactctcatctgaaaaaggaatgtattatgtttctccatatgatcatcctttagttatctcgggacaggcaacagttggagttgaattattggatcaacatccaaataagccagatattatttttgttcctgttggcggcggcggtttagttgcgggaattgctgcttatgtaaaaacgatagatcccaatataaaaattattggtgttgaaccggatgaggcaccatgcatgcatgatgcacttaaatcgggggagctaatagaattagatcatattggtatttttgctgatggcgctgcagttaagcaagcaggggaagagtgttatcggattgcaaaggaccttgttgatgaaatactgctagttagtgttgatgaaatatgtgcagctgttaaagatattttcgaggacacaagatcaattcctgagcctgcaggcgcattggcacttgctgggctaaagcagtatgtagcaaacaataatatagaggataaagaattagtaacgattttcagtggagcgaatgttaattttgatcgtttaagacatatagcagagctttcagctttgggtgaaaatagagaggcgcttatttctataatgatacctgaacgtcctggtagttttcgtaagttatgccgtgatttgggttctcgtttaattaccgagtttaattatcgttatgcggatgataacgaagcccatatttttgtgggcgtgcaattgaaaaatggtgttgacgaaaaaaacatactaatgaaacaactcgaagagaagggttacaatgttgtcgatttaagtgataacgcgattgctaaaatgcatatcagatatatggttggaggtcacgcaccacaagctgaaaacgaacttatatatcgttttgaatttccggaaagatctggagcgttgttacattttttaagtgagatgggcgaagactggaacattagcttatttcattataggaatcatggtgcagcatatggtcgtgtacttatgggttttcaagttcataatgagcaaaaagaaaactttcaaaattttattaataaacttggtatcccatactgggatgaaactaaaaatcctgcttatataaagttcttaagctgag

SEQ ID NO: 287671 - DNA, 1528 bp, Unknown
  Bacterial polypeptide expressing nucleotide sequence isolated from the Sargasso Sea
gatgtcattaaaaatacttaaatctattgttaacaaaattgaaaaaacatgtgtctatgacattgccataagaactcctctcgagaaggcatcaaacttatctcgaaagttggataataacatttttatcaaaagagaagatttacagccaatattctcatttaagctcagaggcgcctatgtaaaaatcaaaaacctcatagataagaagaaaatcaaatcaataattgctgcatctgctggcaatcatgctcaaggagttgccatgtctgccttaaagcttggtataaaggctattattgtgatgcccaaaacaacgccacttataaaagttgatgccgtgaagctactaaaagcaaaagtaattctacatggtgactcatatgatgacgcatattcgtatgctgttaaaaaatctaaaatggatcaattagattttattcatccatatgatgatgaagatgtcatttcaggtcaaggcactatggcaatggagattcttcaacaagttgacaataagcctgattatatattcgttcctgtcggtggtggcggtttgttggcagggatagtaacatacttttctgttcacagccctaagacaaagattattacagttgaacctgaagattctgactgttataaccaagctttcataaaacgtaaaagagtcgttttaaaagatgtaggtatttttgcggacggtgttgcagtaaagcaaattggaaaacttccgtttgcactcacaaaaaaatatgttgattcatcattgcttgttactacggatgaaatttgcgcctcaattaaagatttatatgatgaaacgagaactattgccgagccggctggagcgctatcacttgccggtattaaaaagtatttatccactcataatatctctaataaaaacatcatatgtatattttgtggcgccaatatgaattttgacagattaaggcatgtttcagagcgtgcagatcttggggagcttaatgagatgttagttggagttgagatacctgaagttccaggaagttttaaaaaattctgttccgttataggcaagagatctattacagaatttaattatagatattccgacacattgaaagcgaatgtttttgcaggaataaaaatatccgatggaaaagacgaaaagaaaaatgtattgaaaaagcttaaattaaatggttataaagtgaaagattttacagataatgagatggctaaactgcatatcagatatatggtgggaggttcatcaaatactagccatacagaatttgtatttcgattcatattccctgaaaagcctggagagttactaaattttctcaactcaatcggtagtgcatggaatataagcttatttcattatagaaaccatggtgcagattttggaagagtattaataggctttcaagttaatagactcgagcatgctaaattattgaaacacttgaaaagtcttaattataatttccacgaagaatcgtctaatactgcatacaaattattcttacaataa

SEQ ID NO: 287672 - DNA, 742 bp, Unknown
  Bacterial polypeptide expressing nucleotide sequence isolated from the Sargasso Sea
ttgagattaaaaattaaaaaaacaggaaattttaagaattcaaagaaatatttaaagctaattcctgaggcatcagttgtgtatgacgttgcaatagattcaccaactactcatgcagttaatctttctataaaagaaaacaataacatttatctaaaaagagaagatcttcaacctatattttcctttaagaataggggtgcatataacaagatagtcaatctttcagataaaaagaaatctttaggtatcattgcagcctctgcaggcaatcatgcgcaaggcgttgctttggcctgtaagaagctaaacataaaatgtaatattgttatgcctgtaacggcacctgaaaacaaactaaacaatgtaaaaagattaggagccaaagtaacgcttcatggtgagaatcttgctcatgcattagtcaaagcttcaaaaatgtcaaaacaaaataaatatacttttgttcatccgtttgatgaccctttcacaatagcaggtcaaggcactattggaaaagaaattttagatgatgagattgattatgatgtaatttttgtgcctgttggtggcggaggcttgttagcagggatttctgcctgggttaaacaacataagaaaaaaataaaaattattggtgttgaggttaatgattccgcttgtttaacggaagcacttaaatctaataaacgtgtaatgttagaaagagttgggctatttgcagatggagtcgctgtatctc

SEQ ID NO: 287673 - DNA, 1660 bp, Unknown
  Bacterial polypeptide expressing nucleotide sequence isolated from the Sargasso Sea
tatgttatctctcgcatcgtcgcaaacggagcaggctgagacgcaggcctctcaagttcagcccgataaggcgcaatcggtcacttctgccttagaaaagagtcagcttgcgcaaagctacctgcaaaaaatcctgctgtcgtcggtttatgatgttgcgaaagtgacaccactctcgagtctcaataaactctcggcgcgtttaggctgccaagtgtttttaaagcgcgaagatatgcaaccagtgcattccttcaagctgcgcggcgcctataaccgcatcgcccagttgagccaagccgaatgccaacgcggcgtggtgtgcgcctcggcgggtaaccacgcccaaggcgtggccatgtcggcggccagtcgtggtgtggatgcagtgattgtgatgcccgaaactacgccggatattaaagtcgatgctgtgcgccgtttaggtggcaacgtggtattgcacggccaagccttcgatcaagccaatggctttgcgatggcgctggccaaagaagagggccgagtctatatcgcgccctttgatgatgaagccgttatcgcaggccaaggcactatcgcccaagaaatgctgcaacagcagcgcgaccttgaagtggtatttgtgcccgtgggcggcggcggtttaattgctgggattgctgcctattacaaggcggtgatgccacaggtcaaaattgttggcgttgagcctgaagatgcggcctgcttaaaggcggcgatggaagcgggcgagccggtgacgctggcgcaagtcggtttatttgccgatggtgtggcggttaaacgtatcggcaccgagccatttcgcttagctaagtggtttgtggatgaagtggtgacggtcacgtccgacgaaatctgcgcagcagtgaaagatatttttgaggatacccgcgccattgccgaacctgcgggtgccttatcccttgctgggcttaaaaaatatgtcagcaccaatgcctcaggcgagagtggtaagggtgaaaaagtcgcggcgattttaagtggcgcgaatgtgaacttccacagcctgcggtatgtgtcggagcgctgcgagctgggtgagcaaaaagaagcggtgctggcggttaaagtgcccgagcgtcccggtagcttcctgcgtttttgtgagctgctcgaaaagcgggtgatgaccgaatttaactaccgttttagcagccgcgatatggcggtggtgtttgcgggtattcgcctaaccaaaggtcagggtgagctagaacaaattatcaataccttagaagaccatggctttgaagtgcaggacttatccggtgacgaaaccgcgaaattgcatgtgcgttatatggtcggtggtcatccgccagagccattagaggagcgcctatttagcttcgagtttcccgagcatcccggtgcgctgctgaagtttttaaccaccttgcagagcaagtggaatatcagtttattccattaccgtaatcacggcgcagcctttggccgagtgctggcggggtttgaagtgcccgagggtgatgccttgccgtttcagcagtttttaactgagctgggatttgtctatcaagaagagacccaaagtcctgcttatcagctgtttttgaatgccggaaaaggaaaaaacaacctgcctttgtaa

SEQ ID NO: 287674 - DNA, 1147 bp, Unknown
  Bacterial polypeptide expressing nucleotide sequence isolated from the Sargasso Sea
gatgaccgactacctgcagcggatcctgcgtgcccgcgtctacgacgtggcgcgggaaacccctttggatcccgcacccaatctgagccgccggctgaacaacacggtctggctgaagcgtgaggatctccagccggtgttctcgttcaagctgcgcggcgcctataaccgcatggcgcagctcagcagagacgagctcacgcgcggtgtgattgcctccagtgccgggaatcatgcccagggcgtcgccctgagtgcccagcgacttggctgtcgggccgtgatcgtgatgccaagcaccacacccgaggtgaaagtgcgcgccgtgcgggccctgggtggtgacgtggtcctccatggcgagacctacgacgagtgctccgcggaggcgcagcgacgctgcaaggccgaggggctcaccttcattcaccccttcgacgatccggaagtgatcgcaggccagggaacgatcggcatggagatcatgcgccaggccgagcagccacccaacacgatctatgtctccgtggggggtggtggcctgatcgcaggcatcgccgcctacgtcaaacggctgtggccggaaacagaggtgatcggcgtggagccggtcgatgccgatgccttgagccgctccctcgagcaaggccagcgggtggaactggaacaggtggggctgtttgccgatggcgtcgccgtgaggaaggtgggcgaacacacctttgccctggcccaacagttcgttgatcgcatggtgcgggtcgacaccgatgccatctgtgccgcaatcaaggacgtctttgaagacacccgttccatcctggagcctgccggtgccctggcagttgccgggctgaaacaggacgttgccgagcgccatctggcggggcgcaatctggtggcagtggcctgcggggccaatatgaattttgaccgcctgcgcttcatcgcggaacgagctgagctcggggaagagcgggaagcaatgcttgccgtggagattcccgagtcaccaggcagcctaaggcggctatgcgaactgctgcgggagcgcagcctcacggaattcagctaccgcatgaccgatggcgcttcggcgcagatcttcatcggtgtgcaggtcaacgatgaaaacgaccgtgcctca

SEQ ID NO: 287675 - DNA, 1543 bp, Unknown
  Bacterial polypeptide expressing nucleotide sequence isolated from the Sargasso Sea
tatgaatgattattttgaaaaaatacttcaagctgaagtctatgaagtagcaaaaaaaacgcccctagagaaagctcataatttaagtaatacacttaataatgaagtttttctaaaaagagaagatcttcaagatgtattttcattcaaagtaagaggtgcatataacaaaatgagtaagctcaccaattctcagctttctcagggagtaattacttcaagtgctggtaatcatgctcaaggtgttgctcttagtgctctcaagctgcattgccaagcgacaatattaatgcccattacaacacctcttgtaaaagttaatgctgtgaaaaagttaaaagcaaaagttatattatttggtgataattatgatgaaacttaccaagaagcaataaggattagtaaagaaagtgatttatgttttattcatccttttgatgatccagatgtaatagcaggacaaggaactatagctattgaacttgaacagcaattaaaggaaaaaccctatgcaatttatattgctgttggtggtggaggattgatatcaggaatatccttatatattaaaaaaatatggcctgaagtaaaaataattggtgtagagcctgaagatgcagacgctatgacaaaatcactggaagaatcaaaaattgtggaattatcttctgttggtcaatttgcagatggagtggcggttaaaaaaattggtaaaaacacttttgatattggcagaaaatatatagataagatgattacagttaatactgatgaaatatgtgctgctataaaagatgtttttgaggatactagatcaatactagagcctgcaggagcattatcaattgcagggatgaaaaaagatattttaaattcgaatcattcaaatagaaaaatggttgcgattgcatgtggtgcaaatatgaattttgagcgacttagatttgtcgcagaaagagcagaacttggtgagtgtaaagaagtaatgatggctgttcaaattcctgaacgcgctggaagtttaattgatttttgtaagttgcttgataatagaaatttaactgaatttagctacaggatgtcgaattctaagaatgcccagatctttgtaggagttcaagtctatggattaaatgataaaaaaaatcttttaaatgtttttagaaattcggagtactcatttattgacataagtgatgatgaattatccaaaaatcatctaagacatatggtaggtggaagattaccaaagaattttaaagaaatgggtaatagaaactttgttgagcttttatacagatttgagtttcctgaaaggcctggcgcattaataaactttttaaataatatgaaatctaattggtctataagcgtatttcactataggaattatggagctgatgttgggaaaattgttattggagttttaatcgataaaaatgagattttagattggaataaatttgtaagaattctaggttataaattttgggatgaaactcaaaacgatacatatagattattccttggtgcatcagattaa

SEQ ID NO: 287676 - DNA, 1519 bp, Unknown
  Bacterial polypeptide expressing nucleotide sequence isolated from the Sargasso Sea
gtcggtttatgacgttgcgaaagtgacgccactctccagccttaacaaactctcagcgcgtttgggttgccaagtatttttaaagcgtgaggatatgcaacctgtgcattcctttaagctgcgcggcgcctataaccgcattgctcagttgagccaagccgaatgtcaacgcggcgtggtgtgcgcctcggcgggcaaccatgcccaaggcgtggccatgtcggcggccagtcgtggtgtggatgcggtgattgtgatgcccgaaactacgccagatattaaagtcgatgcggtgcgccgtttgggtggcaacgtggtgttgcacggtcaagccttcgatcaggccaatggctttgcgatggagatggccgagcaggaaggtcgggtgtatatcgcccccttcgatgacgaagccgtgatcgcaggccaaggcactatcgcccaagaaatgttgcaacagcagcgcgaccttgaagtggtatttgtgcccgtgggcggcggtggcttaattgctgggattgcggcctattacaaggcggtgatgccacaggtcaaaatcgttggcgttgagcctgaagatgcggcctgcttaaaagcggcgatggaggcgggcgagcctgtcacactcccacaagttggtttgtttgccgatggggtcgcggttaaacgtatcggcactgagccatttcgcttagccaagcagtttgtggatgaagtggtgacggtaacgtccgacgaaatctgcgccgccgttaaagatatttttgaagatacccgcgccattgccgagcccgcgggtgctttatcccttgcagggcttaaaaaatacgtcagcaccaatgctgcaggcgagagtggtaagggtgagaaggtcgcggcgattttaagtggcgcgaatgtgaacttccacagcctgcgttatgtgtcggagcgttgcgagttaggtgagcaaaaagaagccgtgctggcggttaaagtgcccgagcgtcccggcagcttcctgcgtttttgtgagttgctcgaaaagcgggtgatgaccgaatttaactatcgctttagcagccgcgatatggcagtggtgtttgcgggtattcgcctaaccaaaggccatggcgaattggagcagatcatcaataccttagaagataatggctttgaggtgcaggacttatccggtgacgaaaccgcgaaattgcatgtgcgttatatggtcggcggtcatccaccagagccgttagaggagcgcctatttagcttcgagtttcccgagcatccgggggcgctgctgaagtttttaaccaccctgcagagcaagtggaatatcagtttattccattaccgtaatcacggcgcggcatttgggcgggtgctggcggggtttgaagtccccgagggcgatgccttgccatttcagcagtttttaactgagctgggatttgtctatcaagaagagacgcaaagccctgcttatcagctgtttttgaatgctggaaaaggaaaaaagaacctgcctttgtaa

SEQ ID NO: 287677 - DNA, 1525 bp, Unknown
  Bacterial polypeptide expressing nucleotide sequence isolated from the Sargasso Sea
atggcatcccacgattacctgaagaaaatcctcaccgcgcgcgtctacgacgtcgcgatcgagacggaactcgaatccgcccgcaacctgtcggcccggctgcgcaacgccgtttacctgaagcgcgaggacaaccagccggtgttctcgttcaagctgcgcggcgcgtacaacaagatggcgcacattccggcggaagcgctcgcgcgcggcgtgattacggcgtcggccggcaatcacgcgcagggtgtcgcgttctcggcggcccggatgggcgtcaaggccgtgatcgtcgtgccggtcacgacgccgcaggtgaaggtcgatgcggtgcgtgcgcacggcggcccgagcgtggaggtgatccaggccggcgagtcgtacagcgacgcgtatgcacacgcggtcaaggtgcaggaagagcgcggcctcacgttcgtccacccgttcgacgatccgtacgtgatcgccggccagggcacgatcgcgatggaaatcctccgccagcatcagggcccgatccacgcgatcttcgtgccgatcggcggcggcgggctcgcgtccggcgtcgcggcctacgtgaaggcggtgcgcccggagatcaaggtgatcggcgtgcaggccgaggattcgtgcgcgatggcgcaatcgctggaagccggcaagcgtgtcgagctgagcgaggtcggcctgttcgcggacggcaccgccgtgaagctggtcggcgaagaaaccttccggctctgcagcgaatacctcgacggcgtcgtgacggtgaacaccgacgcactgtgcgcggcgatcaaggacgtcttccaggatacgcgcagcgtgctcgagccgtccggcgcgctcgcggtcgcgggcgcgaagctctacgcggaacgcgaaggcatcgagaaccagacgctcgtcgcggtcacgtccggcgcgaacatgaacttcgaccggatgcgcttcgtcgccgagcgcgcggaagtgggtgaagcgcgcgaagccgtgttcgcggtcacgatccccgaggagcgcggcagcttcaagcgcttctgctcgctcgtcggcgaccgcaacgtcaccgagttcaactaccggatcgccgatgcgcaggccgcgcacatcttcgtcggcgtgcagatcaagcgccgcggcgaatcggccgagatcgccgcgaacttcgaatcgcacggcttccagaccgtcgacctgacgcacgacgagctgtcgaaggaacacatccgctacatggtgggcggccgttcgccgctcgcgctcgacgagcgcctgttccgcttcgaattcccggaacggccgggcgcgctgatgaagttcctgtcgtcgatggcgccggactggaacatcagcctgttccactaccgtaaccagggcgcggactacagctcgatcctcgtcgggctgcaggtgccgcaggccgatcacgccgaattcgaacgcttcctcgcggcactcggttatccgtatgtcgaggagagcgccaacccggcttaccgcctcttcctgtcgtaaa

SEQ ID NO: 287678 - DNA, 1309 bp, Unknown
  Bacterial polypeptide expressing nucleotide sequence isolated from the Sargasso Sea
catgccgcaacgctatatcaagaagatactcgatgcgcgcgtctacgacgtggccatcgaaacacccctgactgaagcccgtagtctttccaagcgctttggcaacaatattatgctcaagcgtgaagaccttcagccggtgttttccttcaagattcgcggcgcctacaaccggattgctcagttgtcggaagaacaaaaggccaagggggttatctgcgcttctgccggcaatcatgcccagggcgtggctctggccgcaaagaagctgggcatcaaagccgttattgtgatgccgcagacgacgccggagatcaaggtacgctcagttcgtgaccacggcgccagagtggttctcaagggcgatgcttttgatgaggcggcagcccacgcacaggagctgatccagaaacacggctacacctacatccctccctacgacgacccggatgtgatcgccggtcagggcactgtagccatggaaatcatgtggcagttcagcaagccgattcatgccatcttcatctgtgtcggtggcggcgggctgattgccggcatggcggcctatatcaagtatctgcgcccggaaatcaaagtgattggtgtggagccggaagactccaactgtctgcaggcggccatgaaggccggtgagcgtgtggtgctggatgaggtgggcatcttcgccgatggcgtggcggtcaaacagatcggtgagtatccctgggaaatctgcaaggatcacgtggatgaagtgatcacagtgtccacggatgagatctgtgcggccatcaaggatgtgtttgaagatactcgctccattgccgaaccggcaggtgctctgggtgtagcgggtatcaagaagtacatcgcgagggaaaagatcgaggatgaaaacctgatcgccactctcagtggtgccaatatgaacttcgaccgactgcgctatgtgtccgagcgcaccgaagtgggagagaggcgcgaggcgattctggcggtaacgatcccggagaaaccgggcgcgttcaaaacgttcatcaatgcgctgcacaagcgcagcatcaccgagttcaactaccgctatgcggatgctcagaacgccaccattttcgtggggatccagattgccgctggcggacatggccgggaggaactggtgcaggatcttcgggaaagcgggtactcggtggtcgaccttaccgacagcgacctggccaagcagcatattcgccatatggtcgggggccatgcaccgacgattaccaatgaaaaggtgttccagtttgaatttcccgagcgcccgggagct

SEQ ID NO: 287679 - DNA, 1552 bp, Unknown
  Bacterial polypeptide expressing nucleotide sequence isolated from the Sargasso Sea
ttgagacttaaaataaaaaaaacaggtaattataggaactctaaaaagtatcttaaaatgattaatgaagcatctgtatatgatgtttcaataaattcacctactacctatgccgcaaatctttctatgaaagaggggaatgaaatttatttaaaacgagaagatcttcagcctattttttcttttaagaatagaggagcctttaataaaattgttaacttatctgaagataaaaaatctcgtggaataatagcagcatcagcaggaaatcatgcccaaggtgtagccttagcttgcaggaagttaaaaataaaatgtactattgtgatgccggtaaccgcaccagaaaacaaattaaatgcagtaaaaaggcttggagcaaaaataattttgcatggcgaaaatttaggagatgctctcgctcatacagataagattaataaaaaacataaatatacttttgtacatcctttcgatgatccatttaccatagcagggcaaggaacagtaggacgggaaatacttgaggatgaaattgactacgatgctgtcttcgtaccagttggcggaggaggccttttggctggtatatcagcttggataagacaaaataaaaagaaaattaaaataattggtgttgaagtaaatgattcggcttgtcttacagaagcattaattcaaaataaaagagtttatctaaaaaaagttggattatttgcagacggagttgctgtttcgcaagtaggaaaaaataaccttgatgttattaaagaatgcgttgatgaagtaatgactgttaatatcgatgaagtctgcgctgctgtaaaagatatttttgaagataccagagtattgtctgagccatcaggagctgttgctttagcaggtcttaagagttactcaaaaagaatgaagaataagaatctacttgcagtgagctcaggtgcaaatgttaattttcaaaaacttggatttattgttgaaagatctgaaattggagaaaaccgcgaaaaaattctcagcattaaaattccagaagaacctggaagttttttaaagcttgcaaaggctattgggaaattaccagtcaccgaatttaattatagaaagtcagataataaagatgcgtatgtattagtaggaataagaactcaatctgaaaatagctttgagaagttgaaggcaaaactaaaaaaacttaaatataaatttagtgattacacctctaatgaaatttcaaatgatcatttaagacatatggttggcggcagaggaggccaatcaaatatatctgaaaaaaatgaaagaatttttaacggagaatttccagaaaagccaggagcattattagagttcttagagagttttggaaatcattggaatatttcactattccactatagaaatattggatctgcgtatggaaatatccttataggaattgaagatacacacaaaaacaagtccgcacttttaaaacatttacataaatgtggaacagcctttaaagaagagagcaataataaggcttatttagatttcttgaagtaag

SEQ ID NO: 287680 - DNA, 1552 bp, Unknown
  Bacterial polypeptide expressing nucleotide sequence isolated from the Sargasso Sea
attgagattaaaaataaacaaaactggcagttttagatattctaaaaaatatttaaaaatgatcgaagaggcatcagtctatgatgttgctattgattctcctaccacgcatgctattaatttatccttaaaagaaaataataatatttatttaaaacgagaagatctgcagcctatattttcatttaagaataggggtgcatataacaaaattataaacctatcggacaagcaaaaatctttaggtattattgctgcatctgctggaaatcatgctcagggagttgctcttgcgtgcaaaaagttaaaaataaaatgcaacattgttatgcccttaacagcaccagaaaataaactcaattctgttaaaaggttaggagcaaaggttacactctttggtgagaatctggcagaagcactagtaaaagctgatgaaattggaaagaaaaagaaattaacttttgtacatccgtttgatgatccatttacaatcgctggtcaaggtacagtaggaaaagaaattttagaggatgaaaatggttatgatgctatttttgttcctgttggtggaggagggcttcttgctggtatagcagcatgggtaagacagcatgacaaaaaagttaagattattggagttgaggtggacgactcagcatgtctaacagaagccttaattcaaaaaaagcgaataaaacttaaaaaagttggactatttgctgatggagtagctgtttcacaagttggtaaaaataatttagaagttatcaaagaatgtgttgatgaggttatgacagtaaatattgacgaagtatgcgcagctgtaaaagatatatttgaagatacaagggtgttatcagaaccttcaggtgcggtagcattggctgggctaaaaaaacgatctaaaagattgaataataagaatttattggcagtgagctcaggtgcaaatattaattttcaaaaactgggctatatagttgaaagatctgagcttggtgaaaatagagaaaagattttaagcatcaaaatccctgaaaaaccaggaagttttttgaaaattgcaaaagtatttggaaaactttccgtaactgaatttaattatagaaaagcagacaaaaaagatgcatatgttttggttggcattagaacaacatccgaagatagctttagcaaattaaaactcaaattgaagaaactcaaatataagttcagcgattatacaaataataaaatctcaaatgatcatttaaggcatatggtaggtggaagagctagctcaagtggctctaccaatatcaatgaaagaatctttaatggcgaattccctgagaaacctggcgcattagtaaatttcttggaaaaatttggaactaaatggaacatatccttatttcattacaggaatataggatctgcttatggaaatattttgattggaatcgaagataataaaaaagataagtcaatcttaatcaagcacttagataagtgtggaactatttttaaagaagaaagtaataataaggcttatctagatttcttgaaatag

SEQ ID NO: 287681 - DNA, 678 bp, Unknown
  Bacterial polypeptide expressing nucleotide sequence isolated from the Sargasso Sea
tatggcggattcacaacctctatccggtgctcctgagggcgctgaatatctcagagcggtactgcgtgcgccggtatacgaagcggcacaggtaacgccgctacagaaaatggaaaagctctcttcgcgcctcgataacgtcattctggtgaagcgcgaagaccgtcaacccgttcatagcttcaagctacgcggtgcctatgccatgatggcgggcttgaccgaagagcaaaaagcgcatggggtcatcaccgcatcggcgggtaatcatgctcagggtgtcgcgttctcttctgcgcgattaggcgtgaaggcgctgattgtcatgccaacggctaccgccgatatcaaagtcgatgccgttcgcggcttcggcggagaagtgctgctgcacggcgcgaattttgatgaagccaaagccaaagcgattgaactgtcgcagcagcagggttttacctgggttccaccgtttgatcatccgatggtgattgccgggcagggcacgctggcgctggagctgctccagcaggacgctcatctcgatcgcgtattcgtgcctgttggtggtggcggattagcggcaggtgttgcggtgctgattaaacagctgatgccgcaaatcaaagtgattgccgtggaagcggaagattcggcctgcctgaaggcggcgctggatgc

SEQ ID NO: 287682 - DNA, 1507 bp, Unknown
  Bacterial polypeptide expressing nucleotide sequence isolated from the Sargasso Sea
ctgaagaaaatcctgaccgcgcgcgtctacgacgtggcccgcgagaccgaactcgaacgcgcgccgaacctgtcggcgcggctgtccaatccggtttatctgaagcgcgaggacaaccagccggtgttctccttcaaggtgcgcggcgcctacaacaagatggcgcacatcccggcggacgcgctcgagcgcggcgtgattaccgcatcggcgggcaatcatgcgcagggcgtggcgctgtcggcggcgcgcatgggcgtgaaggcaatcatcgtagtgccggtgaccaccccgcaggtgaaggtcgacgccgtgcgcgcgcatggcggcgcgacggtcgaagtcgtgcagttcggcgagtcctatagcgatgcctacgggcatgcggtgaaactgcaggaggaacgcggcctgaccttcgttcacccgttcgacgatccgtatgtgatcgccggccagggcacggtcgcgatggagattctcagccagcatcagggcccgatccacgcgatcttcgtgccgatcggcggcggcggactcgcggcaggcgtcgcggcatacgtgaaatcggtgcgcccggagatcagggtgatcggcgtgcagaccgacgactcgtgcgcgatggccgcctcgctgaaagctggggaacgggtcacattgaacgaagtcgggctgttctcggacggcacggccgtcaagctggtgggcgacgagaccttccgactgtgccgcgattatctcgacgacgtgctgcttgtgaataccgatgcgctgtgcgcggcgatcaaggacgtgttccaggacacccgcagcgtgctggagccggccggcgcgctggccgtggcgggcgccaaacagtatgccgagcgcgcgggccttgaaaaccagacgctgatcgcgatcacgtcgggcgcgaacatgaacttcgaccgcatgcgtttcgtggccgagcgcgccgaagtcggcgaggcgcgcgaagcggtgttcgccgtgacgattcccgaagagcgcggcagcttccgccgcttctgcgagctggtgggcacgcgcagcgtcaccgagttcaattaccggattgcggatgccaactccgcccatatctttgtcggcgtgcagatccgcaaccgtagcgagtcggcgcagatcgccggcgcgttcgaagcacacggcttcgccaccgtcgatctgactttcgacgaactgtcgaagcagcacatccgctacatggtcggcggccgctcgccgctggcgcatgacgaacgcctgttccgcttcgaatttccggagcgtccgggtgcgctgatgaagttcctgtcgtcgatggcgccgaactggaatatcagcctgttccactaccgcaatcagggcgcggactacagttcgatcctggtcggcatccaggtgccggagagcgagaaccgcgagttcgaccgctttctcgcgacgctgggttatccgtactgggaagagacgcagaatccggcgtaccgatttttcctcgcgtaag

SEQ ID NO: 287683 - DNA, 1189 bp, Unknown
  Bacterial polypeptide expressing nucleotide sequence isolated from the Sargasso Sea
cgcgcatggcggcgcgacggtcgaagtcgtgcagttcggcgagtcctatagcgatgcgtacgggcatgcggtgaagctgcaggaggaacgcgccctgaccttcgttcacccgttcgacgatccgtatgtgatcgccggccagggcacggtcgcgatggagattcttagccagcatcagggcccgatccacgcgatcttcgtgccgatcggcggcggcggactcgcggcaggcgtcgcggcatacgtgaaatcggtacgcccggagatcagggtgatcggcgtgcagaccgacgactcgtgcgcgatggccgcctcgctgaaagcgggcgaacgggtcacgttgaacgaagtcgggctgttttcggacggcacggccgtcaagctggtgggcgaggaaaccttccgcctgtgccgcgattatctcgacgacgtgctgcttgtgaataccgatgcgctgtgcgcggcgatcaaggacgtgttccaggacacccgcagcgtgctggaaccggccggcgcgctggccgtggcgggcgccaaacagtatgccgagcgcgagggccttgaaaaccagacgctgatcgcgatcacgtcaggcgcgaacatgaacttcgaccgcatgcgtttcgtggccgagcgcgccgaagtcggcgaggcgcgcgaagcggtgttcgcggtgacgattcccgaagagcgcggcagcttccgccgcttctgcgagctggtgggcacgcgcagcgtcaccgagttcaactaccggattgcggatgccaactccgcccatatctttgtcggcgtacagatccgcaaccgcagcgagtcggcgcagatcgccggcgcgttcgaagcgcatggttttgccaccgtcgatctgaccttcgacgaactgtcgaagcagcacatccgctacatggtcggcggccgctcgccgctggcgcatgacgaacgcctgttccgcttcgagtttccggagcgtccgggtgcgctgatgaagttcctgtcgtcgatggcgccgaactggaatatcagtctgttccactaccgcaatcagggcgcggactacagttcgatcctggtcggcatccaggtgccggagagcgagaaccgcgagttcgaccgctttctcgcgacgctgggttatccgtactgggaagagacgcagaaccccgtgtaccgcttgttcctcgcatga

SEQ ID NO: 287684 - DNA, 247 bp, Unknown
  Bacterial polypeptide expressing nucleotide sequence isolated from the Sargasso Sea
gatgaaaaacttaactctgattccaggtcagctgagtctggcgcagctacgcgaggtgttccaacagccgctgaccatcactctcgacgagcaggcttttgccgccattaacgagagcgtcgcctgcgttaacgccattctggccgaaggacgcaccgcctacggcattaacaccggttttggcctgctggcgtcaacgcgcatctctacggacgatctggaaaacctgcagcgttctctggtgctg

SEQ ID NO: 287685 - DNA, 400 bp, Unknown
  Bacterial polypeptide expressing nucleotide sequence isolated from the Sargasso Sea
caagtatgggtggataacgaaatatttgaaacagcagaaattcttgaaaaaaataatctgaagcctttggttttaggtccaaaagaaggattgggactcatcaacggtactcagtttattttggctcatgctataaaaggtttagaaaagtttgaatatcttctggatcttgcggatcttgccgctgcgatgagtctggaagcttacagaggttcagcaagcccgtttaaaaaagagcttcacgaaataaggccatttgaaggaagtaaaaaagtagccgcaagaatgcttaatttcttaaaagattcagacaatcttaaagcgcatgaaggatgtgaaagagttcaggatccttattcaatgagatgtgttccacaagtgcacggcgcaagcagaaatg

SEQ ID NO: 287686 - DNA, 303 bp, Unknown
  Bacterial polypeptide expressing nucleotide sequence isolated from the Sargasso Sea
actgcggccatgtccaggatccctactccctgcgctgcagcccccaggtttgggagcctgctggaccaaatgcggtttgccgcacatcagctccgcgtcgaagccaacgctgtgaccgacaatccccttgtttttcccgaagagggagagatcctctcgggaggaaacttccatgcagagccggtggcaatgatcgccgacaatctggcccttgccattgcggaaatcggagcactttcggagaggcggatctcgcttttgaccgatccgggattcagcaaactccccgcgtttttaagtgaa

SEQ ID NO: 287687 - DNA, 811 bp, Unknown
  Bacterial polypeptide expressing nucleotide sequence isolated from the Sargasso Sea
gttaatgaactaagaaataatctttatcaaatatgggtggctaaagagcttagaagagtatttgttggttttgatcaaaccgatcaacctccagacattcaaaatgattataatatacgctgtatccctcaaattctagcggcgattcttgctcaaattgaatcttctagagcagtattagaacgcgaacttaatgctgtaacagataaccctcttattgttttaaatcaagaaattaaaaataaaaatggcgcacttaaatttactgataaagaaggtaatgtgaataaatttaaagttctttcttgtggaaactttcatgctggtccaattgcagctgaacatgcaaatttaactgtacaaattactcaactagggcatttattggatgcacaagctcagtatattctggaccctaaaaataatcatggatttccagcatacttgacaccgaacccaggcctcaattcagggtttatgattctgcagtacaccatggcatcactactatctttagtgcaaaaccctagcttaccatttcaatcaaatcagatatctggaaatggaaccgaaaatttaacatctttgggctggacccaatttctgagccttaatgaaacaatcgataacattgatcagatgatgactatttatactacaatacttattcaagcgtggcaccttaaagatcacgccagtatttctaaggatcatccgattagaattgtgatggaaaaactgactgaaaatctaaatgaaatattcccaatagaatatgataaagacatgcgtcttacaaagatttataacg

SEQ ID NO: 287688 - DNA, 825 bp, Unknown
  Bacterial polypeptide expressing nucleotide sequence isolated from the Sargasso Sea
aaagctatggtgttaaagaaattttcatacggtgaagataaacttacttttgagttatcaatggaaatattgaatggtagtttagattgtcatataggggaggaagcattaaaaaaaataaataattccaggaaaaacattgagagtattttgaaatctggcgataagatctacggagttaacactggaataggaacactttgtagtacgatcatttcaaatgaagattcaagcttgttgcaagagaatttgttaaaaagtcatgcagttggagtaggtaaaaacatccctttggaaatttctaaattaatgctaatactaaaagttcattcattatgtaaaggattttctggaattagaattgatgtaatagaaagaatttgttggcatattgaaaaagatattatcccagctgttccatcacaaggatcggttggagcctcaggtgatttagctcctttggctcatttatttttgcctttaattggagaaggagaagtattatataaggggaaacaactctcaactaaaaaagttttagatcaagaaaacaaattgcctttaaagctaaaagaaaaggaaggtcttgctctaataaatgggacacaatttatttctgcatttacatgtttttcattggctaagtttaaaaattgtttaattaatgcagatattatttctgcatttaccatagaggcaacaaaaagttctataaaaccatttagcaataaaattcaaaatttaagaccttacaatggatcctctattgtaataaatagaattaatgaattattattggattctcaaaatattacaatctcaccc

SEQ ID NO: 287689 - DNA, 274 bp, Unknown
  Bacterial polypeptide expressing nucleotide sequence isolated from the Sargasso Sea
gctacgtttgccgcgaggcggttacaagacatggcaaataatacacaaggtgttttggctatagagtggcttgcatcagtacagggcttggaatttagaaaaccgctaagcccgtgtgaaaaagtattaaaggcaaaaaatttactacgcgaatatgtgacctactacgataaagatcgctattttgcacccgatatagaacaaactaacgccctattgagcgaaggtaaattgtgcgactttattgaccacaacccactcccttcttattaaa

SEQ ID NO: 287690 - DNA, 790 bp, Unknown
  Bacterial polypeptide expressing nucleotide sequence isolated from the Sargasso Sea
aatggaaggctatgtcatttcagataagttcacgacttgggacgatttagagcatttaattgcatttcccaagcctctccgtctttctagcctttcaagaaaatcaattaaagattctaatcaaatactatctaaaattcttcgctcaaagaaagttgtatatggtgtaaatactggtttcggtaagttaagtcacgtcaaaattgacccatcaaaactaaagcaattgcagttaaacttgattaggtcgcatgcaacgggagttggaaagccatttgaccacagcataaccaggcttacgatgacattaaaacttatgacttggtcaaaaggatatagtggtgttcgaccaaagcttgcaacgttattgctaaaaatgataaacaaaggcattttacctattattccaaggcagggatccgtaggagcttcaggtgatttagctcctctttctcatattggttgcgctttaattggagagggtaccgtctatttccaagatagaataatgccaagcatgaaagcccttaaggaagcaaatcttaaacctatagaattagaggcaaaagaaggattgagcctaatcaatggcactcaagtttcaacagcgattggtgttaaagcactatacaaagcatgtagattgcttcgaacagcggatattatatcagctctgagtgtcgaggcgagtttgtctacaagggcagtatttaaaccagctatccacaggttaaaaaaacacaaaggtcaaactgtatcggcaaaaaatatttatagcattcttaagcaa

SEQ ID NO: 287691 - DNA, 353 bp, Unknown
  Bacterial polypeptide expressing nucleotide sequence isolated from the Sargasso Sea
agaaaataaagttttctgtcatcctgctagtgtagacagtattccaacatctacagataaagaagatcatgtatctatgggagttacagccggtcttaaactttggaaggttctagagaatgttaaagcatgccttgcaattgaaatcctttgcaacacacaagcccttgagtttcaaaggccatataaatcaacacccgcactagaaagtgtgtataatttagtccgtgaaaccgttcctcctattgaggaagatcgtgtcttttataatgatattcaaaacattttaaaccttgtggaaaaaaacaatataattacagcagttgaaaataatataggagaattaaagtaat

SEQ ID NO: 287692 - DNA, 1495 bp, Unknown
  Bacterial polypeptide expressing nucleotide sequence isolated from the Sargasso Sea
catgacggtattccgttcggcccggccgctcgactggcggcagattgcggcggtggcggccggcgcgccgctcgcgttgaccgacgagtcgcgcgggcgtgtcgtcgcggcgcgcgaactcgtcgacgcgatcgtcgcgcgcggcattcgcgcgtatggcgtcaacacgggcgtcggtgcgctgtgcgacgtgatcgtctcgcccgcgcagcagggtacgctgtcgcgcaacatcctgatgagccacgcggtcggcgtgggcgcgccgctcggcgcggcggaaacgcgcgcgatcatcgcggccgcgatcaacaactacgcgcacgggcattccggcgtgcgggccgacatcgtcgaccagctggtcgcgctgctcgaacacgattgcctgccggaagtgccggcgcacgggtcggtcggctacctgacccacatggcgcacgtcgcgctcgtctgcatcgggcacggccacgcgcgtcatcgcggcgaacgcgtgcgcggtgacgaagcgctgcgccgcatcggccgcgagccgctggcgctcggtgcgaaggaggggctgagcctggtcaacggcacgccgtgcgtgacggggctcgccgcgctcgcgctcgcccgcgcggagcggctgctcgactgggccgactggatcgcggcgacgagtttcgagaatctcggcggccagctcgccgcgttcgatccggcctcgctggcgttgcgcatttcgcccggcatcgggcacgtcggcgcgcgcctgcgcgcgatgctcgccgacagcgcgatgctcgccgcggcgaacgggcggcatacgcaggatccgctcagcctgcgcacgattccgcacgtgcacggcgcggcgcgcgacgtgctggcggtcacggcggaagtcgtcgaccgcgagctcgcgtccgtgaccgacaatccgatcgtcgcgggcacgcgcgacgcgccgaccgtgcattcgcaggcgcatgcggtcggcgcgggcatcgcgctcgcgatggacagcctcgcggccgcgatggcgcaggtcgcggcgattgccgagcggcggctcgaccggctcgtcaatccgctcgtgagcgggctgccggcctttctcgcggcgccgggcggcacgtgttccgggttcatgatcgcgcagtacacggcggtcgcgctggtggcgcagaaccagcggctcgccgcgcccgcgagcctcgacggcggcatcacgtcgggcctgcaggaggatcacctgtgccacgcgacgccggctgcgctgaaggcactcgacatcatcgagaacaccacgcgtgtgctcgcgatcgagttgctggccgccgcgcaggcgtacgatctgcaggaaaacgaagcatcgcgggcggcgccgaccgacgcgctgcggcgttacgtgcgcgaacgcgtgccggcgtaccacgacgaccggccgctcgccgacgacatcgcgagcgcggccgccatcgtcgcgggcgtaccgccgtcgctggtgtga

SEQ ID NO: 287693 - DNA, 1135 bp, Unknown
  Bacterial polypeptide expressing nucleotide sequence isolated from the Sargasso Sea
ttaatggagtctctacttgtttctactaaaaaatacaccttcaccgatttccgtcctttataccttggcccaataaaagtttctttatcacgagaatcagaaaaaaatataataagatctcataaatatctttttgataatctagataccgataaattaatttatggggtaaatactggctttggtaaccttagccatattcagattgattccggtgatattgataaattacaggtcaatcttattcgtagccatgcatcaggagttggatcaccattgcgtccggggattgttcgcgctatactatttttgaaattactaactttcgcaaaaggctatagtggtgtaagtatagatcttgtaaaaaaaattatccaatttttaaataaagatttattacctgttatacccgaaaaaggctccgtaggagctagcggcgatttagctcctttgggtcatatggcacttgcattaattggcgaaggagaggtgtttttcaaagggaatagagaaaaaactctaactgctttaaaaaaagcacgagttaaaccactatccttgaaaccaaaagaagggataagccttatcaatgggactcaagtctctaccgctattgcaatcaaagcattattagatgggcatcgactattaatttctgcagacatagctggtgctctctcagtagaaaatagtttttctagtcataaagtatttcaaaaaaaaattcatgatctaaagcaacatccaggacaaaagattagcgctcgtaatatttataaattattgagtaaaagtgaaatcgtgcgatcccacagtaattgtggcaaagttcaagatccctatagctttcgctgtataccacatgtacatggtgccagcagagatattttttcaaacgcagccaatattattaatgatgaaattaatagcgttagtgataatccattaattttagattccaaaacaattgtaagctcaggacattttcatgctgagcatgtcgcaatggcattagattcacttgcattctccttttctgaacttggtgcaatttctgaaagaagaattcattattttatgaaaggtgttcaggataaaatccctccatttgtatcaaaaaatcctggtttggatt

SEQ ID NO: 287694 - DNA, 243 bp, Unknown
  Bacterial polypeptide expressing nucleotide sequence isolated from the Sargasso Sea
gctgaccgttccgacttgcgcaacctcaacaggggaacccactatcgtgaagaccgttaatctgattccgggtcaggtgacactggatcaactccgggagattgggaaggagccagccaaggtgtcgctccctgaagacgcctggcaccaggttcgccagagccacaacgccttgaacgcggttgtgcagcgcggcgcgccggcctacgggattaacacgggctttggcaaactcgcgaaaac

SEQ ID NO: 287695 - DNA, 1673 bp, Unknown
  Bacterial polypeptide expressing nucleotide sequence isolated from the Sargasso Sea
gtacacgtcgagcggcgtgcgtctgcggctggtgtcgctgcgcgtgctcgacgtgcagccgtggagcggtcccgttggcggcgcgacggtggtgagcgtgcgtgcatatgggacgtggcctggcggtctgcgctgccggtttggcgagtcgagcgcctcagctgggtggagcggcggcgcgtcgcgcctgcgctgcctgacgccatcgagcggcggcgtgagcggctgggttggcgtgcagctttctagcttccacggcgcgctctcgagcggcggcagcttctactaccacccgctgctgacggcgagcgtggctgctcctgcgctcggtccggagcgcggtggcactcgcgtgacggtgctgggcggcggcttccgcgacgcgtacacgctgcgctgcgggtttggcagcgctgcggcgccggtgctcgctcggtacgtcgacgagtcgcagctcgagtgctcgagtccggtgcatgcggctggtagcgcggcggtgctgctctctatgaacggtcagcagtactcgccgagcggcgtgtcgtacacgtaccagtctgcggcatcggtgagctacatctcgcctgcgacggtggtctctgagggcggtacgcctgtgacggtgcacggcggcggcttctcgtctgcgtctgagtcgctcggcgtgctgacgtgccgcattggcggctcggtgcgtcgcgcggtgtgggcgagcgagagcgcgatcgtgtgcaacgcgacgcgtgcgccagctggcgaggcgcggctcgaggtgagcaacaacgcgcgcgagtacacgtcgagcggcgtgcgtctgcgtctggtgtcgctgcgcgtgctcgacgtgcagccgtggagcggtcccgttggcggcgcgacggtggtgagcgtgcgtgcatatgggacgtggcctggcggtctgcgctgccggtttggcgagtcgagcgcctcagctgggtggagcggcggcgcgtcgcgcctgcgctgcctgacgccatcgagcggcggcgtgagcggctgggttggcgtgcagctttctagcttccacggcgcgctctcgagcggcggcagcttctactaccacccggcgctgacggcgagcgtggctgctcctgcgctcggtccggagcgcggtggcactcgcgtgacggtgctgggcggcggcttccgcgacgcgtacacgctgcgctgcgggtttggcagcgctgcggcgccggtgctcgctcggtacgtcgacgagtcgcagctcgagtgctcgactccggtgcatgcggctggtagcgcggcggtgctgctctctatgaacggtcagcagtactcgccgagcggcgtgtcgtacacgtaccagtctgcggcatcggtgagctacatctcgccttcgacggtgctctctgagggcggtacgcctgtgacggtgcacggcggcggcttctcgtctgcgtctgagtcgctcggcgtgctgacgtgccgtatcggcggcgcagtgcgtcgcgcggtgtgggcgagcgagagcgcgatcgtgtgcaacgcgacgcgtgcagctgctggcgaggcgcggctcgaggtgagcaacaacgcgcgcgagtacacgtcgagcggcgtgcgtctgcgtctggtgtcgctgcgcgtgctcgacgtgcagccgtggagcggtcctgttggcggcgcgacgg

SEQ ID NO: 287696 - DNA, 776 bp, Unknown
  Bacterial polypeptide expressing nucleotide sequence isolated from the Sargasso Sea
aatgagtagtatcaaactcgatggttcgaccctctcgccaaccgaggtttcactagtttcaaacggtgaaaaggtagaagtggctagtgattcatggatatctatcaaaaattcacgtgcggttgttgaaggaataatcgaacgcggggaaactgtttatggaattaatacaggatttggggcactagtaaatactcgaatatcaccagaagatttggaatctttacaggtgaatctaatcaggtcgcatgcttgtgccataggagaaaaaatgtcaaaacaagacactagggcaatgatgtgcataagagtcaattcacttatcaagggtttttcagggattcaaccaatagttattgaacaaataatatcatacctgaatgaagatgtaattccagtcataccacgtattggtagccttggcgcatctggagatttagcacctctatctcatatggcattagcattgattggagaaggtagtgtatggggtgatgacggagagatatgtcaaacaaagcaattgctcgaacaaagaggcttaattcctgtgtctttagctgctaaagatggtttgtcattaatcaacggtactgcacaaatgtgtgcgtttttagtaaattcagaacagaaaatttctaatttgttacttatggctgatttgattgcttgtacttcaatggaagcgagagagtgttcgattaatccaatggacaagcgagttcatgatgctcgacctcatcctggtcaatcattggtagcagaacgtatcaccc

SEQ ID NO: 287697 - DNA, 253 bp, Unknown
  Bacterial polypeptide expressing nucleotide sequence isolated from the Sargasso Sea
gatgatccccggcaccgtaaccctctccacgttggagcagatctggcgcaatggcatccccgcacgtctggcagcctctgcccgcgctggtgtcgaagcggcagccgcgatggtggccgaggctgcggcaggtgaggcgcctgtctatggcatcaacaccggatttggcaaactagcttcgaccaagatcgcatccgaagataccgcaacacttcagcggaacctgatcctcagccattcctgcggcgtcggt

SEQ ID NO: 287698 - DNA, 409 bp, Unknown
  Bacterial polypeptide expressing nucleotide sequence isolated from the Sargasso Sea
ggtgaaggagaagtatattataagggaaagaaaattcgatcttcagatatgcttaataaggagaagatgataccattaaatattaaagaaaaagaggggcttgctcttattaatggaactcagtttatatgtgcttttacttgctatgcattagatagatttagaaattgtcttgagaatgcagatattatatctgcaataagcgttgaaggtacaatgggctctgatattccatttagtaaagaattgaatgaactaagaccatacaatggagcttcaattgtgtcagataaaattagagaattacttgaagattcagaagttattgattcaaataaaaattctggaaaagttcaagacccttattctataaggtgcatacctcaagttcatggtgcaagttgggatt

SEQ ID NO: 287699 - DNA, 274 bp, Unknown
  Bacterial polypeptide expressing nucleotide sequence isolated from the Sargasso Sea
tatgaatgtgactgcgctaaacctgattccaggccaactgagcctcgcccaactgcgtgccatctaccagcagccagtaaccctcagcctggatgacagcgcctcggcccagatcgaagccagcgttgcctgcgtggagcagattctcgccgagaaccgcaccgcctacggcatcaacaccggttttggcctgttggcatcgacccgcatcgccagcgaagacctggaaaacctccagcgttccctggtgctgtcccacgccgccggcgtcggt

SEQ ID NO: 287700 - DNA, 413 bp, Unknown
  Bacterial polypeptide expressing nucleotide sequence isolated from the Sargasso Sea
tttgacatttcaactcactccgggttcagcaactttagaacaattggagcgcatttggcgggaagggctggcagttagtctcggggaagatgcccgtacggctattgatgcggccgcgcatgcggtgaaaaaagccgctgctggtgatgctgcagtctacggtgtaaacaccggctttggaaagcttgcctcggtccggatcaaaccagcggatacagctaagcttcaacgcaatctaattctaagtcactgttgtggtgtgggtgaacttctggatgtaaaaacaacgcggctcatgatggtactgaagctcttgtccgtcgggcgtggtgcatccggtatccgatgggaaactatcgagctgttacagaatctttttgctagcggaattactccattgatacccaccccag

SEQ ID NO: 287701 - DNA, 396 bp, Unknown
  Bacterial polypeptide expressing nucleotide sequence isolated from the Sargasso Sea
taaactccggtttcatgatcgccgaggtcacgaccgcggcgctgatgagcgagaacaagcatctggctaacccctgcgtgaccgattccacgccgacctctgctaaccaggaagatcatgtatcgatggcggcccacggcgcgctgcgtctggcgaagatgacggcgaacctctcggtgatcctcggtgtggaaatgctctgcgccgcgcagggtgtggaggcgcgcgcgccgctcaaaacctcggcccggttgcaggatttgctgaccatgctgcgcggtgaaatccccagcctgggcgaagatcgctacctcgcgcctgagatcgaagccgccagcgccatggtgcgcgccggtcgcgtggctcaggccgcaggcgtggaggtcgcggtatgat

SEQ ID NO: 287702 - DNA, 707 bp, Unknown
  Bacterial polypeptide expressing nucleotide sequence isolated from the Sargasso Sea
aatgggaaactcaaagcaaaataaagagcttactttaactggtgaaaacctcacaattgaaagtttatacgaggcaagcctttctcctcatacagaagtaaaaattaaaatctctgatctagcaaaggagaaaatggcaagatccagggcctatgtccacgaagttgttaaaaaaggccaacccgtatatggaataaacacagggtttggagccttatcaagtaagtttattccagaagaagacctcgcaactcttcaagtaaacctcatcagatctcactgtacagggattggcgagcctttttcagaaaagtttgtaagggccattatgattcttcgaacaaattgcctctgttcgggcttttctggaataaacccagaaattgttaatttactcaaagacttcataaacattggaattgttccaattattcctcaaaagggttcagtaggagcttctggtgatttagctccacttgcccatttggccctagcactcattggtgaaggcgaagttatttataaaggtgaaaaaagacaatcaattgatgtcttaaaagaagttaatttaaaacctgcagttcttggacctaaagatgggttggctttaataaatggaactgccatcatggctgcattaggtgcaatggctgtctacgagtcaaaaaacttgattaaactttcagatattgcatgcgcattaactg

SEQ ID NO: 287703 - DNA, 730 bp, Unknown
  Bacterial polypeptide expressing nucleotide sequence isolated from the Sargasso Sea
catggaaactgttgtcattgatggagataatctaactcttgagatggtcaaggccgtatcactgggctccatggaagcatctctttcatctgattcaagagagaggatgcaggcttctagaaaggccgtagaagacatcttggactcaggagaagttgtttacgggataaatacaggattcggcgcgctttcatctgtccgcatagaagacagccagttagaggaactacaatccaacctcgtgagaagtcatgcatgtggaatcggcgaaataatggacccggagattgttctaatgatgatgactattcgggcaaactctcttgcaaagggagtatctggaatcaggccatctgtggtggacacgcttcttgggatggttaactcaagaatagcaccatccatccccagaataggatcattgggagcttcaggagacttagctccactctcccatatgacaatgggaatgatgggcgagggcgagtgcctcgtgcaagtctctggcaaatgggtctccaaggattcccgaactgcattagaggaagcaggattggaaccagttaaactgcaggcaaaagagggactctccctaattaatgggacaagtcaaatgtgtgcatatctcacacaaactgtactaaacatggagatcttgtgtctcactgcagacgcatccatcgcatgttcagtggaggcaattagaggttctcacaagccgttcgatagg

SEQ ID NO: 287704 - DNA, 331 bp, Unknown
  Bacterial polypeptide expressing nucleotide sequence isolated from the Sargasso Sea
catccagccagtgttgactcaattccgacatctgcaaatcaggaagatcatgtgagtatggcaacacatgctgcatatagattgattaatatgaatgaaaatttatcgtatatactcgcaattgagttgttgagcgcctcacagggcattgagtttcacaagccactaaaaacgtccagtattttgcagaaggctcttgcagaagtacgaactttttcagagccaatagaagatgacagatctctcgcaaatgagatagaggcgctgtctggagctttaattcaaggccatgtttttgggcaaagttataaaatattcaatgtccaataat

SEQ ID NO: 287705 - DNA, 1528 bp, Unknown
  Bacterial polypeptide expressing nucleotide sequence isolated from the Sargasso Sea
atggaaaccctacgtgtttcaacgaaacaattaacctaccgtgattgcgagccattttttgaaggaccggttcgcgtttctctcactaaagaagcctcaaccaatatagaaagatcccacaatagattattatcgatcttagaaaaaaaagaaacgatttacggagtaaatacaggttttggcaatttaagtcatattgccattgaggagagggatcaaaaacagttacaggtcaatttagttagaagtcatgcagcaggcagtggggagccacttgaactaggtatcgttcgtacagttctttttttaaaattactgacctttgcacgtggttatagtggcgtgagtctatctctagctaaaaagataattcaatttataaataaggatattatcccactaatacctgaaaaaggttctgtaggcgctagtggagatcttgctccattaggccatatggctcttgcactgattggcgaaggaaaggttttttataaagggaaaaaatatgattcgaagatcgcactaaaagaagccaaggtcaagccactagtacttggtccaaaagagggtattagtcttataaatggaacgcaagtatctacagcgttagccattaaaggttgtttgaatggagaaatactattaaagaccgcagacattgcaggagctttatcagttgagaatagtttttctagtcgcaaagtctttcgatcagaggtccatatcattaagaaacacaaaggacagctcgcttgtgcaaaaaatgtttataaaatgttaaacggcagtgatatcgtacgttctcatagtaattgtggtagagttcaggatccatacagttttcgctgtataccccatattcacggggcgtgtagagattcatttatgaatgctgctgaaatggttaataatgagatcaatagtgttagtgataatcctttaataatggaatcaggaaatgttgttagctcagggcactttcacgctgaacatattgctcaggcaatggatatacttgcaattgctttttcagaacttggagcagtttcagagcgcaggacccatttttttatgaaaggagttggagaaaagataccacctttcgttgcctcagaccccgggattgaatctggatatatgatcgcacatgtcactgcaacagcccttgcatcagagaataaaactttggcccatcctgcgagtattgactcattgcctacctctggaggccaagaggatcatgtcagtatggctccttgggcaggtctgaagttactaagtatacaaaataacctcagtaatatcctggcaatagagctgatggtggctggtgcagctaataagcatatatcttatgacctaaggtctggaaagggtactgctccggtcataaaatttctaaataaaaattgttcatacagcgatggagatagatatttatcgccggagataaaaaaagtttctgattcaattttatcaggatatatattaaacatagttttaaaaaatttaactctggagtaga

SEQ ID NO: 287706 - DNA, 1525 bp, Unknown
  Bacterial polypeptide expressing nucleotide sequence isolated from the Sargasso Sea
atgtcagccctatctatttcaaaaaaatcctctacattagaatattttttaccatgtcttaatgggccagttaaggttcgcttagattctaattctagtaaatcaatacaaaaatctcacaaaacattttcacacttattaaaaaatggtgaaaaaatatatggtgttacaactggctttggagatttaagttcaatacctattgatgtaaatgatcagaggaagctgcagttaaaccttataagatcacatgcaacaggagtaggtaaatcatttgatcctggtataacaagaataattatgttattaaaattattaaactggtctaaaggtgtaagcggagtaagaacaaaattagtccagttacttaaaaattttttaaatcatgatattttacctgaaataccaagacagggttctgtaggtgctagcggtgatcttgcaccacttgcacatatggcattacctttaattggagaaggtctggttaattttcaaggacggattatgcctgctatgttagcaatgaaagaagttggacttgaaccaattactctagagcctaaggaaggtttgagcttaattaatggtacacaagtttcaacagcaattgcaataaaagcttgtattgatgctgaaaatattttgaaggtagcagacctttctggagctatgtctgttgaagcgtcattgtcttctcgaagtgtgttcaaatctgaaattcataaactaaagggtcatcctggacaaagaattgtagcctcaaatgtttggaatctccttgataaaagtcaaattgtattatcacataaaaattgtgatcgacttcaagatccttatagttttcgatgtataccacaagttcatggaataagtagagaaaattataaatgcgtcaaagaaattgtagaaaacgaagctaatagtgtcagtgataatccgctaattatgccaaatggaaaaatactgaattctggtcattttcatgctgaatctatcgcgcaagcaatggataatttagcaatagcaatagctgaagttggttctatcgctgaaagacggattcattactttatgaaaggagtcgatgattatattcctccatttattgcttctaatcctggtttagaatcgggttttatgactgcgcatgtaactgcagcaagtcttgtttctgaaaataaggtactaactcacccagcaagtgttgatagtatttcaacttctggaggtcaggaagattttgtaagtatggcaccgtgggcaggtaggaagtgtttgcgagtaattgataatgttagaaatattttatctattgaattacttgcttctactactgtaaatgagttatttcatgcccctttgaaggtggcaaaatcttttttacctgttattaagctaatgaaaaaatatgtgcactactctaagactgatagacctttgcacggtgatattaaatcgatcaatgatcttataaaatctagagaaattcttaaatgtattaaaaattatgagatttattaac

SEQ ID NO: 287707 - DNA, 583 bp, Unknown
  Bacterial polypeptide expressing nucleotide sequence isolated from the Sargasso Sea
atggtgaccattaccctgaaggaagggcaactgagtcttgcggaaatgcgcgcagcgttgaaaacccctcttcaggtgaaactggatccgggatgcctcagccgcatcgagacttctgcaaagactgtcgattcggtattgaaacaggaccaaaccgtctacggcatcaataccggtttcggctctctggctcagaccaagatcgcaagggacaaattggcggaacttcagcagaatctcatcctttcccatgccagtggcaccggtcccctgctggacgatagagtggtaaggctgatcctggtgctcaaactgaacagcctgatccgtggattttctggaatccgcatgaaaaccgtggaatatctgctggcgcttctggaaaccgatgccatgccctgcattcctgccaagggttccgtcggagcatccggagatcttgcaccgctggcacacctgagcatggttttgcttggcgaaggcgaggcgcggatcaatggagaatacattactgcttgggaacttttgagaaaactgagacttgaacctttggaactgcaaccgaaggaagggctggccctgc

SEQ ID NO: 287708 - DNA, 2158 bp, Unknown
  Bacterial polypeptide expressing nucleotide sequence isolated from the Sargasso Sea
cttggtggtggcttccgcgacgcatacacgcttcgttgcgcgtttggcagcgtgactgcgcctgtgctcgcccgttacgtcgacgagtcgcagctcgagtgctcgtctcctgtgcacgcgcctggtatcgtggacgttctctcatcgatgaacggtcagcagtacgctcgtagcggcgcctcttacacgtaccagccggctgcatctgtgagctacatctctccaacttcggtgttatcagagggcggtacgccattgacggtgtatggcgcaggcttctcgtctgcatctgagtcgctcggtttgctgacatgtcgcatcggcgtgtcagtacgccgtgccgtatgggcgagctcgtctgcgatcgtgtgcaacgcgactcgggctccagttggcgagtctcgtatcgaggtgagcaacaacgctcgtgagtacacctcttctggcgttcgcgtgcgtcttgtgtctgttcgcatcgtggacgttcagccatggagcggtccggttggtggtgcgacagttgtgagcgtccggtcatacggcgtgtggcctggtggcgtgcgttgccgttttggcgattcgtcgttgtccgttggctggagcggcggcgcgtctcgtcttcgttgcctgacgcctgcgagcagcggcgatgcgagcgggtgggttggcgtgcagctttcgagcttccatggcgccctctcgagtggcggcagcttctactaccacgcgtcgctgacggcgagcggcgctacgccgtctattggtcctgagcgcggcggcacccgcgtgagcttgcttggtggtggcttccgcgacgcatacacgcttcgttgcgcgtttggcagcgtgactgcgcctgtgctcgcccgttacgtcgacgagtcgcagctcgagtgctcgtctcctgtgcacgcgcctggtatcgtggatgttctcttatcgatgaacggtcagcagtacgctcgtagcggcgcctcttacacgtaccagccggctgcatctgtgagctacatctctccaacttcggtgttatcggagggcggtacgccattgacggtgcacggcgcaggcttctcgtctgcatctgagtcgctcggtttgctgacatgtcgcatcggcgtgtcagtacgccgtgccgtatgggcgagctcgtctgcgatcgtgtgcaacgcgactcgggctccagttggcgagtctcgtatcgaggtgagcaacaacgctcgtgagtacacctcttctggcgttcgcgtgcgtcttgtgtctgttcgcatcgtggacgttcagccatggagcggtccggttggtggtgcaacagttgtgagcgtccggtcatacggcgtgtggcctggtggcgtgcgttgccgttttggcgattcgtcgttgtccgttggctggagcggcggcgcgtctcgtcttcgttgcctgacgcctgcgagcggcggcgatgcgagcgggtgggttggcgtgcagctttcgagcttccacggcgccctctcgagtggcggcagcttctactaccacgcgtcgctgacggcgagcgcgacggcgccgtctctcggtcctgagcgcggcggtacccgcgtgagtttgcttggtggtggcttccgcgacgcatacacgcttcgttgcgcgtttggcagcgtgactgcgcctgtgctcgcccgttacgtcgacgagtcgcagctcgagtgctcgtctcctgtgcacgcgcctggtatcgtggatgttctcttatcgatgaacggtcagcagtacgctcgtagcggcgcctcttacacgtaccagccggctgcatctgtgagctacatctctccaacttcggtgttatcggagggcggtacgccattgacggtgcacggcgcaggcttctcgtctgcatctgagtctcttggtttgctgacatgtcgcatcggcgtgtcggtacgccgtgccgtatgggcgagctcgtctgcgatcgtgtgcaacgcgactcgggctccagttggcgagtctcgtatcgaggtgagcaacaacgctcgtgagtacacctcttctggcgttcgcgtgcgtcttgtgtctgttcgcatcgtggacgttcagccatggagcggtccggttggtggtgcaacagttgtgagcgtccggtcatacggcgtgtggcctggtggcgtgcgttgcc

SEQ ID NO: 287709 - DNA, 631 bp, Unknown
  Bacterial polypeptide expressing nucleotide sequence isolated from the Sargasso Sea
ttgattagggaaacaaggagaattctagagatagaaatcaacagcgctacagacaaccctctagtgtttgtcgaggataacggagcatcaataatcagcgggggcaatttccacggtcaaaacctggctctagctagtgacgctattgccgtagcttgccacgagcttgctagtatttctgaaagaaggattaatcagatccttgacccaaattggagtggacagaaagccttcctcgccggcaatgagggattagaaagcggattaatgattgttcagtacgtagcagcggcaatcatatcggaactacatattctctccagtccagctacaattagcaatgtccctgttagcatgggcaaggaagatcatgtttcaatgggcgccacgggagcacataggtcactacaatcgtcaattctattgtcccaggttttagcgaatgaattcatctgctctacagaggccttagaggccatagaagaattaccggggataggagtcagaaagctagtcagttgggtccgttcccatgtcgatagactggatggtgacagatcaatgacaagtgaatgcgaacaactatcagaatcgattctagacggcggattaactgaaattttcgggtgaa

SEQ ID NO: 287710 - DNA, 697 bp, Unknown
  Bacterial polypeptide expressing nucleotide sequence isolated from the Sargasso Sea
ccatacagcttacgctgccagcctcaggtaatgggtgcctgtttagcccaaatccgctttgctgcttcagtattgttagtcgaagccaatggcgtgacagacaacccgctggtgtttgcagctgaagatgacattatctctggtgggaacttccacgccgagccagtagctatggcggccgataatctggctttggctattgctgaaattggctctatttctgagcgccgtatggcgcttttaatcgactcgcatctaagcaagttaccggcctttttagtgaataacggcggtgtaaacagcggctttatgattgctcaggtcacagctgcagctttagcttcagagaataaatctctggcacatccggcttctgtcgacagcttacctacctcagctaatcaggaagaccatgtgtctatggccacttttgcagcccgtcgtttagcagatatggcagaaaataccttaggcgtattggcagttgaatatctggcagcagctcagggtatggacttccgtgcgccacttaaaggtgctgcagccgtggaacaggcaaaggctctgctacgtaaagaagtcagcttttatgatgtcgatcgctactttgcacctgatatcgaaaaagcagctgaactgttacgtcacggccgtttaaattctttattaccggctaatttattaagcagtttttaaa

SEQ ID NO: 287711 - DNA, 983 bp, Unknown
  Bacterial polypeptide expressing nucleotide sequence isolated from the Sargasso Sea
catgtcagattctcgcttttcttctacgataattgacgaccaacatagtgaccgctctaccatctaccacgttgatggcgttaagcatttaaaactcatcccaggcaccttgaccctagaccagctaagagaagtgtatcgaagccctatacagttatctttagatgaatcggcaatacctgcaattaatgcggcagaacaggcggtacttaacgttataaaagaaaatcgcacggtttatggcataaataccgggtttggtctgttggctaacacacgtataaacgtggacgaactggaattattacagcgcagcatagtgttgtcgcacgctgcgggtaccggtgatttcatgcaagaagatacggtacgcctactaatgctgttaaaaataaactcactggctcggggttattcaggtatcaggttaagtgttattaacgcattgattaaactgtttaacgcgcaggtgtacccggctatacctgagaaaggctcggttggtgccagtggagacttagcaccgctagcccatatgagcgttgtgcttttaggcgagggggaagcctttcacaaaggtaagcgaattaacgcgactgaggctcttaatattgctgggttggcacctattgcccttgcgccaaaagaaggcttggcacttttaaacggcacgcaggcgtcgacagctttcgcacttcaggggttgttttatacagaaaatgcgctctacagtgccatcggtatcggtgcgctaacggtagaggccgcgttaggttcacgcgtaccatttgatgcgcgcatccataaagtacgcggccataaaagccaaagcgatgtagccgaggcatttagacgcttgcttgctagttcagagattggtcgttctcatcaaggctgtgaaaaagtacaagacccttattctctgcgctgtcagcctcaggtcatgggcgcgagcttacagcaaatgcgatacgctcaagaga

SEQ ID NO: 287712 - DNA, 293 bp, Unknown
  Bacterial polypeptide expressing nucleotide sequence isolated from the Sargasso Sea
ggaggatcatgtctccatggccaccttcgctggccgtcgactggcggacatggccgagaacacccgcggcattctggcggtggaactgctggcggcagcgcaagggctggattttcgtgctcccctgcgcagcaccgagctcatcgagctggccaagggccggctgcgggaagaggtcagcttctacgacaaggacaggtacttcgcgccggacatcgaggccgccgccgccctgctgggccgcgccagctacaacgacctgctcccggccggcgtgttgccgagcctctgag

SEQ ID NO: 287713 - DNA, 652 bp, Unknown
  Bacterial polypeptide expressing nucleotide sequence isolated from the Sargasso Sea
ctggaccaaatgcggtttgccgcacatcagctccgcgtcgaagccaacgctgtgaccgacaatccccttgtttttcccgaagagggagagatcctctcgggaggaaacttccatgcagagccggtggcaatgatcgccgacaatctggcccttgccattgcggaaatcggagcactttcggagaggcggatctcgcttttgaccgatccgggattcagcaaactccccgcgtttttaagtgaagatccgggactgcattcaggattcatggtcgcccagatcacttctgcctcattggccagcgaaaacaaaagtcttgcccatcctgcctcggtggacagcctgccgacttcggcaaaccaggaggatcacgtcagcatggccaccttcgccgcccggagacttggggaaatgtcagaaaacacggcaaaaatcctgggcatcgaattgcttgcagcctgccagggcatcgacttccgtagaccgttgaaaacatcgtatcttcttgaagaagcacaccagatggtgcgtcaacgggttccccatctcgaccaggatcgccccctggcccctgacatcgaggacgcgtcggtgatcatccgacgcggtttgtttaacggatggatgagacctcaactgctgagcgactgaa

SEQ ID NO: 287714 - DNA, 841 bp, Unknown
  Bacterial polypeptide expressing nucleotide sequence isolated from the Sargasso Sea
agggaaggggaagctttttataaaggagagagaattagtgcagcccaagcccttgaaatagccggtatgcagcccattgcgctggcacccaaagaaggcttagcgctgttaaacggtacgcaagcatcaactgcttttgcactccaggggctgttttatactgaaaatgcgcttcatagtgctattggtattggtgcgcttactgttgaggccgcgttaggttctcgcgtgccgttcgatgcgcggatccacgaagtgcgtggccacaaaagccagagcgatgtggcgactgcgtttagaacattgctagacacctcagagattggtcattcacatcaacgatgtgaaaaagtgcaagacccgtactctctgcgttgccagccacaggtaatgggagcgtgtttacagcaaatgcgctatgcccaagggattttggtggttgaagctaatggagtaagcgacaacccgttggtttttgttgaaaataatgatgacgctgatacgccaactggcgatattctatctggcggtaactttcatgcggaaaccgtggcaatggcggcagatatgctggctattgcactatctgaaattggcgcactgtcggagcgcagaatgtcgctaatgattgatacgcatttgagtggtttgccaccgttcctggttgaaaatggtggggtaaactcgggcttcatgattgcgcaggttacctgtgcggcgcttgctagtgaaaacaaaaccctggcgcaccccgcatctatcgattcgttgcctacgtctgcgaaccaagaagaccacgtgtctatggctaccttcgccgcgaggcacttacgagatattt

SEQ ID NO: 287715 - DNA, 758 bp, Unknown
  Bacterial polypeptide expressing nucleotide sequence isolated from the Sargasso Sea
ttcaggtgtaaaatggacaaccataaagcaaattgaacaaattataaattctgggatagtcccagaaatacctcatcagggttctgttggtgcgtcaggtgatctagctccattagcccatatggctgctgtaatgattggcgagggtttcgctttttataatggtgaaaagctttctggttttgaggcactaaaaagggctggaattgaacctattactcttggcccaaaagagggtctagctcttttaaatggtacccaattttcgacagcctgcgcacttgcaagtttattagatgcttggaggtctgtactaaactctatcgtcatttcttcgctttcgacagacgcaataatgggttctacaagcccactcttaccacaaatacatgaattaagagggcataagggtcaaatttttgttgccagtaaaatgagagagttgatggatggaagtgttattcgggaaagtcacagagaaaatgaccaaagagttcaagatccatactgtataagatgccaaccacaagttttgggagcaagtttagatatattaaagaatgcttcagttactattgatatcgaaacaaaagctgtaacagataaccctcttgttttagttgatgaaaataagattgtttcaggcggtaactttcatgcagagcctatcggttttgcagcggatcaaatagcattagcgttagctgaaattgggtcaatttctcaaaggagaatagccttaatggttgatcccacct

SEQ ID NO: 287716 - DNA, 855 bp, Unknown
  Bacterial polypeptide expressing nucleotide sequence isolated from the Sargasso Sea
ggcgcacttacattggaagcaattaagggcagcataacaccgttcgatgagcgtatccatgaggcgagaggtcagaaggggcagattgatgtagcgaaagagttaagtaagcttattgatggcagcgagatactaaaatcacacgcgaattgtgaccgtattcaagatccctattctgttcgatgtcagcctcaggtcatgggtgcttgcttggactcaattagatatattgcatctattctatcaatcgaggcaaatgctgtaactgataaccctttagtttttgcagatgataatgaaattatttcaggtggcaattttcacgcagagccagtggcactcgttgctgaccaactggctgtggcaatagctgaaatggggtctatctcagaaagaaggagcgctttgcttgttgactctaatttgagcggacttccacctttccttatcaaaaaaagtggtttaaattctggttttatgatccaccaagtaactgcagccgcattggtctctgaaaataagctttttgctcatccagccagtgttgattcaattccgacatctgcaaatcaggaagatcatgtgagtatggcaacacatgctgcatatagattgatgaatatgaatgaaaatttatcgtatatactcgcaattgagttgttgagcgcctcacagggcattgagtttcacaagccactaaaaacgtccagtcttttgcagaaggctcttgcagaagtacgaactttttcagagccaatagaagatgacagatctctcgcaaatgagatagaggcgctgtctggagctttaattaaaggcccatgtttttgggcaagagttataaaatattcaatg

SEQ ID NO: 287717 - DNA, 607 bp, Unknown
  Bacterial polypeptide expressing nucleotide sequence isolated from the Sargasso Sea
ggtatccgacaacccgctggtgttcgccgccgaaggcgaggttatttccggtggcaacttccacgcagaacccgtggccatggccgccgacaatatcgccctggccatcgccgagatcggctcgctgtccgagcgccgcgtctcgctgatgatggacaagcacatgtcgcaactgccgccgttcctggtggccaacggcggggtcaactccggcttcatgatcgcccaggtcaccgctgcggccctggccagcgagaacaaggcactgtcccacccgcacagcgtcgacagtctgccgacgtcggccaaccaggaagaccacgtttccatggcaccggctgccggcaaacgcttgtgggacatggccgccaacacccgtggcgtgctggccgtggaatggctcggcgcctgccagggcctggacttccgtgaagggctgaagagcaccccagcgttggaacaggcgcgtcaggcgctgcgcgccaaggtgccgtattacgtcgaggaccgcttcttcgccccggacatcgccgccgccgatgctctgctcgccgagcgcgtgctgacgccgctgctgccggccggcatgctgccttcggtggggtga

SEQ ID NO: 287718 - DNA, 568 bp, Unknown
  Bacterial polypeptide expressing nucleotide sequence isolated from the Sargasso Sea
atggaacttcttattcaacccggcaaacttacgctagctgatctccgcaaagcatatttaaatccgatcaaagttaagttagatgacagcgcatcggatgcgatcaatgccagtgtcgcttgcgtcgaaaaaatcgtaaatgaagggcgtactgcctacggtatcaacactggttttggtttacttgcatcgactaaaattgcacctgaagatttagaaaaactacaacgctctttggttctttcgcatgcagctggtgttggtgaagcactggatgatgcgatggtacgtttaattatgctgctcaaagcaaatagcttggcgcgtggtttttcaggtattcgccgtaaagtgattgatgccattcttgcattgattaatgcagaagtttatccgcatatcccattaaaaggttctgttggtgcttctggtgatttagcacctttggcacatatgtcgttggtattacttggtgaaagtaaagcacgttacaaaggtgaatggttgcctgcggttgaagctttgaaaaaagcaggtttagagccgatttcaacttgctgcaaaagaa

SEQ ID NO: 287719 - DNA, 868 bp, Unknown
  Bacterial polypeptide expressing nucleotide sequence isolated from the Sargasso Sea
tcttaaaagggttggtatagagccaattactttaggtccaaaagagggtttagctctgttaaatggcactcaattttcgacagcttgtgcactagcaaatttattagacgcttggaggtcagtacttaactccatagtcatttcttcactttcgacagacgcaattatgggctctacaagcccacttttgccacaaatacacgaattgagagggcataaaggtcaaatttttgtagccagtaaaatgagggagctgatggatggaagtgttattcgtgaaagtcacagagaaaatgatcaaagagttcaagatccatactgtatcagatgccaaccacaagttttgggagcaagtttagatattttaaagaatgctgcagttactattgatatcgaaacaaaagcagtaacagataaccctcttgttttattcgatgaaaataagattgtttcaggtggtaactttcatgcagagcctatcggtttctcagcagatcaaatagcattagcattagctgaaattggatcaatttctcaaaggaggatagccttaatggttgatccaaccctaagctatgatttaccgccttttttgacagatgacgcaggtttaaattcaggcttcatgatagctgaagtaacgtctgcagctttaatgagtgaaaataagcatcttgcaaatccttgtgttacagactcaacaccaacttcagcaaaccaggaagaccatgtttcaatgtctgctcatggtgcatatagattatttaaaatgaataaaaacttaaattcaatttttggaattgaattattatgtgcagcgcaaggggtagagacgcggaagcctttaaaaacttcccggattgcttca

SEQ ID NO: 287720 - DNA, 691 bp, Unknown
  Bacterial polypeptide expressing nucleotide sequence isolated from the Sargasso Sea
ctactctctgcgctgccagccccaggttttgggagcctgcctggaccagatgcgctttgccgcacaacagctccgcattgaagccaacgcggtgaccgacaatccccttgtttttcccgaagagggagagatcctctcgggaggaaactttcatgcggagccggtggcaatgatcgccgacaatctggcccttgccattgccgaaatcggagcactttcggaacgtcggatctcgcttttgaccgatccgggattcagcaaactccccgcgtttttaagtgaagatccgggactgcattcaggattcatggtcgcccagatcacttctgcctcattggccagtgaaaacaagagccttgcccatcctgcctcggtggacagcctgccgacttcggcaaaccaggaggatcatgtcagcatggccaccttcgccgcccggaggcttggggaaatgtcagaaaacacggcaaaaatcctgggcatcgaactgcttgcggcctgccagggcatcgacttccgtagaccgttgacaacatcgtatcttcttgaagaagcacaccagatggtccgtcaacgggttccccatctcgaccaggatcgccccctggcccctgacatcgaggacgcgtcggtgatcatccgccgcggtttgtttaacggatggatgagacctcaactgctgagcgactga

SEQ ID NO: 287721 - DNA, 647 bp, Unknown
  Bacterial polypeptide expressing nucleotide sequence isolated from the Sargasso Sea
agttactattgatatcgaaacaaaagctgtaacagataaccctcttgttttagtcgatcaaaataagattgtttcaggtggtaactttcatgcagagcctatcggttttgcagcagatcaaatagcattagcgttagctgaaattggatcaatttctcaaaggagaatagccttaatggttgatccaaccctaagctatgatttgccaccttttttgacagatgacgcaggtttaaattcaggcttcatgattgctgaggttacttctgcagccctaatgagtgaaaataagcaccttgcaaatccttgtgttacagactcaacacctacttcagctaaccaggaagaccatgtttcaatgtctgctcatggtgcatacagattatttaaaatgaataaaaacttaaattcaatttttggaattgaattattatgtgcagcgcaaggggtagagagccgtcaacctttaaaaacttctccattgcttcagaatgcagttgatgaactaagaaaagatgtgccgcgtttgaatgaggataggtttgtagctaatgatattaacaatgtttctaatctgttagataaaaaaaatatacttaagagttcaaagcttgatcttccaatttcaactttttttaatttgtaaa

SEQ ID NO: 287722 - DNA, 629 bp, Unknown
  Bacterial polypeptide expressing nucleotide sequence isolated from the Sargasso Sea
catgaccaccctgaacctgaaacccggccaactgaccctggccgacctgcgcgccgcctaccaggcgcccgtgcacctgaccctggacgccagcgcccatcaggccatcgacgccagtgttgcctgcgtcaaccagatcatcgccgagggccgcaccgcctacggcatcaacaccggtttcggcctgctggcctcgacccgcatcgccaacgacgacctggaaaagctgcagcgctcgctggtgctgtcccacgccgccggcatcggcgagccgctgagcgatgccatggtgcggctgatcatgctgctgaagatcaacagcctggcgcgtggcttttccggcatccgccgccaggtaatcgacgcgctgatcgccctggtcaacgccgaggtctacccgcatatcccgctcaaaggctcggtcggtgcgtccggcgacctggcgccgctggcgcatatgtcgctggtgctgctcggcgaaagccaggcgcggcacaagggccagtggctgccggccaccgaggcgctggccatcgccggcctggagccgatgaccctggccgccaaggaaggactggcgctgctcaacggcacccaggtatccaccgcctacgcgctgcgcggcctgt

SEQ ID NO: 287723 - DNA, 870 bp, Unknown
  Bacterial polypeptide expressing nucleotide sequence isolated from the Sargasso Sea
aaaatgttatcaattcagacatgtgcattgaacttggaaaaaatgcgcaaaatgccattattgattgtcgaaattatttagaaaataaaattgctacttcaaaagaacttcactatggaataaatactggatttggtgccttatgtaatactgctatatccaatgaagatttagcgaaacttcagcgaaaccttgttctatctcatgcatgtggtatggggaaatttattccaaaaagaattgttcgattgatgatgctcttaaaaattattagtttatctcatggacattctggcatccaaaaagaaacagtagatcgtcttatttttctttataatgaaaaaataacaccattagtttttgaacaaggaagcttaggggcatctggggatcttgctcctctagctcatctttctttgccacttattggagaaggagatgtgatttttaaagaaaaaagagtatcctgcatatctgtccttaaactatacgataaaaaacctttagttcttggcgcaaaagaaggacttgctttattaaatggcacacaatttatgtgtgcatttgctatagacagcataattaaatccaataaattatggcacaattggaacaaaattgcttctttatctctggatgcatatgcctgtaaatctgaatcctttttacctcatccaaatgaaataagaaaacaatctgggcaaattcaaactgctaaagaaatctcttctatcttaaacggaagcaacttatttgccaataaaaaagaacatgttcaagacccatattcttttcgatgcatcccacaagttcatggagcaacaaaagacagtcttaatcactttgagaccgttatgaaaatgagataaa

SEQ ID NO: 287724 - DNA, 601 bp, Unknown
  Bacterial polypeptide expressing nucleotide sequence isolated from the Sargasso Sea
atcgcgctggcaccgaaagaggggctggccctgctcaacggcacccaggcgagcaccgccttcgcgctggaaggcttgttccacgccgaggatctctacgccggtgccatcaccatcggcgccatgagcgtggaggccgcccttggcagccgccggccgttcgatgcccgcatccatgcggtgcgcggtcagcgtggccagatcgacgcggccgcctgctaccgtcacctgctggtggatggcagcgagatcggcatgtcccatcacaactgcgagaaggtgcaggatccctactccctgcgctgccaaccgcaggtgatgggtgcctgcctgacccagatccgccaggcggccgaggtgttggtgtgcgaggccaacgcggtctccgacaacccgctggtgtttgccgaggatgaagacatcctctccggcggcaacttccacgcagaacccgtggccttcgccgccgacaacctggcgctggccatcgccgagatagggtcgctgtccgagcggcgcatggcgctgctgatcgactcgcggatgtccggtttgccggccttcctggtcacaacggcggcgtcaactccggcttcatgat

SEQ ID NO: 287725 - DNA, 687 bp, Unknown
  Bacterial polypeptide expressing nucleotide sequence isolated from the Sargasso Sea
ccctgcgctgccagccccaggttttgggagcctgcctggaccaaatgcgctttgccgcacaacagctccgcgtcgaagccaacgcggtgaccgacaatccccttgtttttcccgaagagggagagatcctctcgggaggaaacttccatgcagaaccggtggcaatgatcgccgacaatctggcccttgccattgcggaaatcggagcactttcggaacgtcggatctcgcttttgaccgatccggggttcagcaaactccccgcttttttaagtgaagatccgggactgcattcaggattcatggtcgcccaaatcacttctgcctcattggccagtgaaaacaaaagccttgcccatcctgcctcggtggacagcctgccgacttcggcaaaccaggaggatcatgtcagcatggccaccttcgccgcccggaggcttggggaaatgtcagaaaacacggcaaaaatcctgggtatcgaactgcttgcggcctgccagggcatcgacttccgtagaccgttgacaacatcatatcttcttgaagaagcgcaccagatggtgcgtcaacgggttccccatctcgacaaggatcgccccctggcccctgacatcgaggacgcgtcggtgatcatccgacgcggtttgtttaacggatggatgagacctcaactgttgagcgactgaa

SEQ ID NO: 287726 - DNA, 663 bp, Unknown
  Bacterial polypeptide expressing nucleotide sequence isolated from the Sargasso Sea
tgggagcctgcctggaccagatgcgctttgccgcacaacagctccgcatcgaagccaacgcggtgaccgacaatccccttgtttttcctgaagagggagagatcctctcgggaggaaacttccatgcagagccggtggcaatgatcgctgacaatctggcccttgccattgccgaaatcggagcactttcggaacgtcggatctcgcttttgaccgatccgggattcagcaaactccccgcgtttttaagtgaagatccgggactgcattcaggattcatggtcgcccaaatcacttcggcctcattggcctgtgaaaacaaaagtcttgcccatcctgcctcggtggacagcttgccgacttcggcaaaccaggaggatcatgtcagcatggccaccttcgccgcccggaggcttggggaaatgtcagaaaacacggcaaaaatcctgggtatcgaactgcttgcatcctgccagggcatcgacttccgtagaccgttgacaacatcgtatcttcttgaagaagcgcaccagatggtgcgtcaacgggttccccatctcgatcgggatcgccccctggcccctgacatcgaggacgcgtcggtgatcatccgccgcggtatgtttaacggatggatgagacctcaactgctgatcgactgaa

SEQ ID NO: 287727 - DNA, 928 bp, Unknown
  Bacterial polypeptide expressing nucleotide sequence isolated from the Sargasso Sea
gtatcatttgggcgcggtgcttctggtgttcgctggaacattgtagaattactcgaaaagatgttagagaaaggagtgatgcctgtaatcccagcacaggggtcagttggtgcttctggagatttagcaccactagcacacatgaccgcagctatgattggagaaggcaaatccgaatataatggtactatttttcatggtgctgatgcattaactgaagcaggattgtttccaattactcttgggccaaaggaaggattagctttcataaacggtacccagttttcaactgcttttgctctagctggcctttttgaagcctggcatgcagcgcaaaactcaataatcacgtctgcaatgtcgacagatgctatcatgggttccacagcaccaacacaaccggagattcatgccttacgtggtcatcgcgggcagtgcgaagtagctaatagcatgagagttcttctagctggatcagaaatacgtgagagccatatcgaaggagatagtagagttcaggatccctattgcattcgttgccaaccacaagtgacaggtgcagctatggatgtgctacgtcaggcttctaacaccctggaaattgaagctaatgcagcaactgataatccacttgtaatagcaaaatccaatcgcattgtttcggggggtaattttcatgctgaaccagttggatttgctgctgatatgatcgcacttgctatagctgaagttggtgcaatttctcaacgccgtgtggccctaatggtagatccttcattaaatcataatctcccaccatttttgacaccggagccaggtttgaattcagggctgatgatggcagaagtcactactgctgcactaatgagtgagaacaagcacctagctaccccatgtgtgacagatagcaccccaaaccagtgctaat

SEQ ID NO: 287728 - DNA, 877 bp, Unknown
  Bacterial polypeptide expressing nucleotide sequence isolated from the Sargasso Sea
aatgcgttacctgctggacttagccgatgtagtgggtgccatgagcattgaaggtatgcagggcagtggttcacctttccgtcctgaattgcatcaaatccgtccttttgccggtaatatcgaagtagctgcacggatgcgccgtctgtttaaagactcgcaaaatatggcgtcgcattttggttgtgccagagtgcaggacccttattcactgcgttgtataccgcaagtgcatggcgcgtcacgcaatgcttattaccatttaaaagagctggttgagattgagatgaactcagtcacagacaacccaatcgtcatcagcgctgaagaagccttgtccggcggtggtttccatggtcagcctctggcgatggcactggattacacttcgatagcagcggctgagcttggcaatatttctgaccgccgttgttatttattactggaaggcctgcatggtttaccacgtttgctgaccaaagccggtggtttaaattccggcctgatgatcccgcagtacacgacggcagctttggtgacagaaaacaaatctttgtgtttcccgccatcagccgacagcgtgccgacttcaatgggccaggaagaccatgtgtctatgggcagtatctcgggtcgtaaactgaatcagattttgggcaacctggagaagatcctcgccattgaactgatgtatgcggctcaggctattgagttccgtcgtcctcatacctgttcagatttaattgaagaaaatcatgccattatccgcgccaaagtggccaagttggaagaagatcgtctgttaaagccggacattgatgccatgatccagctggttcgcaatcaggcttttcatgtcgcttttgcagtgaactaa

SEQ ID NO: 287729 - DNA, 1543 bp, Unknown
  Bacterial polypeptide expressing nucleotide sequence isolated from the Sargasso Sea
atgaaatcagtcaatcatttagtattaacgcccggcagtttaagcctggcgcaactgcgtgaaatcagccgccataagctgacactcgaactggcaccagaggcgataaacgacatcaacaccagcgcgcaaatcgtgcaaaaggtgctggatgaaggtcgcaccgtttacggcatcaacacgggttttggtctgctggccaacactaagattgccccggaagatctgcaattgctgcaacgctctatcgtgttatcccacgcggcgggcacgggccagtatatgcaggatgccacagtgcgcttgatgatggtgttaaagatcaactccttaagccgtggtttttctggtatccgtttagaagtgattaacttccttatcagcctagtgaatgccgaggtttatccttgcgtgcctgaaaaaggttctgtgggtgcctctggcgacttagcgccgttagcccatatgtgtctgccgctcctgggtgaaggcgagatgagctaccaagggcagattatttcggccgccgaaggcttagaaatcgccggccttaagccaatcgatttagctgcgaaggaaggcttagccctgctcaacggtactcaggcttctaccgcgctggcgctggaaggcttgttccacgctgaagacttgtttgctgccagctcagtgattggcgcgatgagcgttgaggcggccatgggtagccgcagcccgtttgacccacgcatccatgcggcccgtggtcaaaaaggtcaaatcgattcggcgatggtgttccgtcatctgttgggtgaagagtctgaaatcagcttaagccatgcaaactgtgaaaaggtacaagacccttactcactacgctgccaaccacaggtgctaggcgcttgcttaacgcaaattcgccaagcggcggaagtgttaggcactgaggccaatggcgtgaccgataacccgctggtattccaagatactggcgatattatttccggtggtaacttccacgccgaaccagtcgctatggctgcggataatttggcgattgcgattgccgaattaggcgcgattgcagagcgtcgtatcgcgctgctcatcgactctagcctgtctaaattgccacctttcctagtgaaaaacggcggggtgaactcgggctttatgatcgcccaagtaaccgcggcggcattagcctctgaaaacaaaacttacgcccatccagcctcggtagacagtttaccaacctcggcaaaccaagaagaccatgtgtctatggcgacctttgcggcgcgccgtttgcgggatatgagtgaaaacacccgcggcgtattagcgattgaattgttagctgccgcccaagggttggatttccgcgcgccattagcgccaagtgatgcagtggctaaggccaaagccgagctacgcgaagtggttgcctactacgataaagacagatatttcgcgccggatatcgaagcggcaacggatctgttgtacaccgccagctttaatacttacttgccccaaggcgtattgccgagtctgtaat

SEQ ID NO: 287730 - DNA, 1585 bp, Unknown
  Bacterial polypeptide expressing nucleotide sequence isolated from the Sargasso Sea
catgtcgcattcgtctttttttactgaaaacggtggtgttaagcagcttaatcttgtgccaggtacattgacgttagatcagttacgggaagtacatcgaagccacgttcatttatcgttagatgaaagtgcagtacccgctataaacgccgccgagcaagtagtgcttaatgtcattaaagaaaaccggactgtctatggcatcaataccggctttggtttgttggctaatacccgtattaatgttgatgagttagagctattacagcgcagtattgtgttatcgcacgcggccggtacgggcgactttatgcaagaagatactgtgcgcctgctcatgctgttaaaaattaactccttggcccgtggctattctggcattcgcctcagcgtaatagaagcgctcattaccttgtttaatgcacaggtttatcccgccattcctgaaaaaggctcggtaggcgccagcggcgacttagcgcctttagcacacatgagtgtggtgctgttaggggaaggggaagcgttttataaaggagagagaattagtgcagcccaagcccttgaaattgcgggtatgcagccaattgcgctggcacccaaagaaggcttagcactgttaaacggcacgcaagcctcgacagcgtttgcacttcaggggttgttttatactgaaaatgcgcttcatagtgctattggtattggtgcgcttactgttgaggccgcgttaggttcccgcgtgccgttcgacgcgcggatccacgaagtgcgtggccacaaaagccagagcgatgtggcgactgcgtttagaacattgctagacacctcagagattggccattcacatcaacggtgtgaaaaagtacaagacccatactctctgcgttgccagccacaggtgatgggagcgtgtttacagcaaatgcgctatgcccaagagattttggtggttgaagctaatggagtaagcgacaacccgttggtttttgttgaaaataatgatgacgctgatacgccaactggcgatattctatctggcggaaactttcatgcggaaaccgtggcaatggcggcagatatgctggctattgcactatctgaaattggcgcactgtcggagcgcagaatgtcgttaatgattgatacgcatttaagtggtttgccaccgtttctagttgaaaatggtggggtaaactcgggcttcatgattgcgcaggttacctgtgcggcgcttgctagtgaaaacaaaaccctggcgcaccccgcatctatcgattcgttgcctacgtctgcgaaccaagaagaccacgtgtctatggctaccttcgccgcgaggcgcttacgagatattttcgataacgtggcaggaatattggccattgagtggttagcggcctgccaagggttagattttaggaagccgtttaaaaccagcgaaaagctccaagtgttgatgcagctactaagagaccaagtgccgttttacgacaaagaccgttattttgcgccagacattgaaaaggcaaagcaacttattaagcagcacgaccttatggataagacacagttaaacctgttaggctaa

SEQ ID NO: 287731 - DNA, 997 bp, Unknown
  Bacterial polypeptide expressing nucleotide sequence isolated from the Sargasso Sea
aaaactggggctggaacctttggaattgcagccgaaagaagggctggccctgctcaacggtacccaggtttctaccgccctggcactgcatggactgtttgcctcagagaactgcctcgcttcctcgatcgtcgcgggctccctgagtgtcgaagccagcttgagcagttaccgtccttttgacaaaaggatccatcaagtccgtgggctcaaaggacaaatagacgtcgctgccaacttcaggcaactattaaacgagagtgaaatcaatgcctcccatgaaaactgcggccatgttcaggatccctactccctgcgctgccagccccaggttttgggagcctgcctggaccagatgcgctttgccgcacaacaactccgcgtcgaagccaacgcggtgaccgacaatccccttgtttttcccgaagagggggagatcctctcgggaggaaacttccatgcagagccggtggcaatgatcgccgacaatctggcccttgcaattgccgaaatcggagcactttcggaacgtcggatctcgcttttgaccgatccgggattcagcaaactccccgcgtttttaagtgaagatccgggactgcattcaggattcatggtcgcccaaatcacttctgcttcattggccagtgaaaacaagagccttgcccatcctgcctcggtggacagcctgccgacttcggcaaaccaggaggatcatgtcagcatggccaccttcgccgcccggaggcttggggaaatgtcagaaaacacggcaaaaatcctgggtatcgaactgcttgcggcctgccagggcatcgacttccgtagaccgttaacaacatcatatcttcttgaagaagcacaccagattgtccgtcaacgggttccccatctcgaccaggatcgccccctggcccctgacatcgaggacgcgtcggtgatcatccgccgcggtttgtttaacggatggatgagacctcaactactgagcgactga

SEQ ID NO: 287732 - DNA, 1543 bp, Unknown
  Bacterial polypeptide expressing nucleotide sequence isolated from the Sargasso Sea
atgaaatcagtcaatcatttagtattaacgcctggcagtttaagtctggcgcaactgcgtgaaatcagccgccataagctgacactcgaactggcgccagaggcaattaccgagatcaacaccagcgcgcaaatcgtgcaaaaggtgctggatgaaggtcgcaccgtttacggcatcaacacgggttttggtctgctagccaacactaagattgccccggaagacctgcaattactgcaacgctctatcgtgttatcccatgctgcgggcacgggccaatacatgcaggacgccacagtgcgcctgatgatggtgttaaagatcaactccctaagccgtggcttctcgggtatccgtttagaagtgattaacttccttatcagcctagtgaatgccgaagtttacccctgcgtgcctgaaaaaggttctgtgggcgcctctggcgacttagcgccgttagcccatatgtgtttgccgctgttgggtgaaggcgagatgagctatcaaggacagattatttcggccgccgaaggcttagaaatcgcgggcctcaagccaatcgatttagccgcgaaggaaggcttagccctgctcaacggtactcaggcttctacagcactggcactagaaggcttgttccacgctgaagacttgtttgctgccagctcagtgattggcgccatgagcgtcgaggccgccatgggtagtcgcagcccgtttgacccacgcattcatgcggcccgtggtcagaaaggacaaatcgatgcggccatggtgttccgtcatctgctgggcgaagagtctgaaatcagcttaagccacctcaactgtgagaaggtgcaagacccttactcactgcgctgccaaccacaggtgttaggcgcttgcttaactcaaatccgccaagcggccgaggtattaggcacagaagccaacggcgtgaccgataacccgctggtattccaagatactggcgacattatctctggcggtaacttccacgccgagcctgttgctatggcagccgataatttggcgattgcgattgccgaattaggcgcgattgcagagcgtcgaatcgcgctgcttatcgactctagcttgtctaaactgccacctttcctggttaaaaacggcggggtgaactcgggctttatgatcgcccaagtgacggcggcggcattggcctctgaaaacaaaacctacgcccatccagcatcggtcgacagtttaccaacctcggccaaccaagaagaccatgtgtctatggcgaccttcgctgcccgtcgtttacgggatatgagcgaaaatacccgcggtgtgttagcggttgagttattggcagccgcccaaggcttggacttccgcgcgccgttaatgccaagcaaagcagtggcgcaggcgaaggccgagctgcgcgaagtggttgcctattatgataaagacagatactttgcgccggatatcgatgcggccacggatctgctttataccgccagcttcaatgcttacttgcccctaggtgtgttgccgagtctgtaat

SEQ ID NO: 287733 - DNA, 1030 bp, Unknown
  Bacterial polypeptide expressing nucleotide sequence isolated from the Sargasso Sea
atggtcgaactaactctcacgcccggctcgcttgatttaaatagtctaagaaagattaatgcatcaagtgtacaaataaaccttgaaaaaaatgccgaatctcaaatcgctgccagcgcacaaaccgttcaaaatgtcattaatgagcaacgcacagtgtatggaattaacaccgggtttggcctgcttgctaataccaaaattgctgatgacgagcttgagctacttcagcgttcaattgtgctttctcatgccgctggcattggcgagtacatggacgacagcacagtaagattgatgattacactaaaaataaactcgctttctcgtggcttttcaggcattcgcttacaagtcatcgagttttttatacagttgctaaacagtgaagtttacccatgcgttcctaaaaaaggctctgttggcgcttcaggtgacttagctccacttgcacatatgtgcttacccttgctaagcgaaggccagatgcgccatcagggtaaaataatcagtgcggctgaaggtttgaaaatagcagggcttgaaccgcttacgcttgcagcaaaagaaggtttagcgctgcttaacggtactcaagcgtctaccgcttttgcattacaggggttatttagagcagaagatttatatgcgcaaagctgtgtaataggctctataagtattgaagcagcaatggggagccgcgctccctttgactcacgtattcacgaaattcgtgggcaacgtggtcaaatagataccgcacaagtgtttagagatttgcttgatactcaatcacaaattagcgactcacatgtaaactgtgaaaaagtacaagacccttattgtttacgttgccaacctcaagtattgggtgcgtgtttaacacaaatacgccaagcagctgacgtattgctgtgcgaatcaaatggtgtaaccgacaacccactcgtatttgccgatgtgggcgatattatttctggcggaaactttcacgctgaacctgtcgctatggccgccgacaacctcgctg

SEQ ID NO: 287734 - DNA, 1543 bp, Unknown
  Bacterial polypeptide expressing nucleotide sequence isolated from the Sargasso Sea
tttgacatttcaactcactccaggttcagcaactttagaacaattggagcgcatttggcgggaagggctggtagttagtctcggggaaaatgcccgtacggctattgatgcggccgcgcatgcggtgaaaaaagccgctgctggtgatgctgcagtctacggtgtaaacaccggctttgggaagctcgcctcggtccggatcaagccagcggataccgctaagcttcaacgcaatctaattctaagtcactgttgtggtgtgggtgaacctctggacgtaaaaacaacgcggctcatgatggtactgaagctcttgtccgtcgggcgtggtgcatccggtatccgttgggaaactatcgagctgttacagaaccttttggctagcggaattactccattaataccaacccaaggttcagttggagcctctggtgatctagctccgcttgcccatatggcagcgaccctgattggggaaggagaggctttatttgaaagccagcgcatgaaatcggcaaaagcgcttgagttggctgggctgcaaccggtggttctaggcccaaaggaaggactaggtcttataaacggcacccagttttctacagcttgtgcgttagtgggattattcgaggcgatccgcaatgcagaaaatgctgtagtaatttcctgcctgtctacggatgcaatcatggggtctacagcaccccttgaacctgccatgcataaattaaggggtcatgccgggcagattgacgttgctagtgctatgcgcagtataatgacagggtcggaaatccgtgaaagtcaccgcgatggcgatacacgcgtgcaagatccctattgcatacgatgtcagccgcaagtcactggtgcggcgttggacctcctacgttttgctggacggacattagagattgaagcgaacgcagtttcagataacccattggtgttggccgaagaagataaagttgtctcaggcggaaatttccatgctgagcctgtggcttttgcggcagaccaaatcgcgctagccgtttcggagataggcgccattgcccaacgccgggttgctcttatggttgacccaacacttagctttgatttgccgccgtttctaactcctgaaccaggtatcaattcgggattgatgatcgctgaagtcaccacagccgcactaatgagtgagaacaagcatctcgcaaatccgtgctcaacggattcgacccccacctcagccaatcaggaagatcatgtttcgatggctgcgcatggcgcgcttcgtttggcccgtatgaataataaccttaatgtcattctgggagttgagatgctatgtgcagtgcagggtgtagaattccgtgcgccgttacgcacaagtcggacccttcaaaacgctattgctgtgcttcgcgatcgcatccccgcccttgaagatgacaggttcttgtctggggatctcacaagcgctgcagaactagttaaatctggtgagattgtctgtgtttgtgggattgttggaacactgcttgagagtatgggatag

SEQ ID NO: 287735 - DNA, 652 bp, Unknown
  Bacterial polypeptide expressing nucleotide sequence isolated from the Sargasso Sea
gccggacaaacgctggagattgaggccaatgcggtgactgataatccactggtactggttgaagagggatggattgtatcgggtggcaattttcatgccgagccggttgcatttgcggccgatcagattgcccttgcattggccgaaattgggtcgatttcgcagcggcgtatcgcgttgatggtggatccgtccctgagttttgatttgccgccctttttaactggaaatcccgggcttaattcgggttttatggttgctgagattaccagcgctgctttgatgagcgagaacaagcatcttgccaacccctgctcaactgatagcacgccaacatcggccaatcaggaggatcacgttagtatggcagcgcatggttctcggcggctccataaaatgaatgccaatttgaatatgatcctcggtattgagctagcatgtgggtgccagggtatcggctttcgcgccccgttgaaaactagcccgatattgcaggatgtgattgctcacgtgcgcactagggtcaagccacttgcggaggatcggtacatggcctcggatctgcaaatggcggctttcatgattgctgatggcagcttggttcaagggctgaatatgccagcctatgttcttggccgtttgacagcttgat

SEQ ID NO: 287736 - DNA, 1139 bp, Unknown
  Bacterial polypeptide expressing nucleotide sequence isolated from the Sargasso Sea
aaaaggttcggtaggcgccagcggcgacttagcgcctttagcacacatgagcgttgtgctgttaggggaaggggaagcgttttataaaggagagagaattagtgcggcccaagcccttgaaatagccggtatgcagcccattgcgctggcacccaaagaaggcttagcgctgttaaacggcacgcaagcatcaactgcttttgcacttcaggggctgttttatactgaaaacgcgcttcatagcgctattggtattggtgcgcttactgttgaggccgcgttaggttctcgcgtgccgttcgatgcgcggatccacgaagtgcgtggccacaaaagccagagcgatgtggcggctgcgtttagaacattgctagacacctcagagattggtcattcacatcaaaggtgtgaaaaagtacaagacccgtactctctgcgttgccagccacaggtgatgggagcgtgtttacagcaaatgcgctacgtccaagacattttggtggttgaagccaatggggtaagcgacaacccgttggtttttgttgaaaacaatgatgacgctgatacgccaactggtgatattttgtctggcggtaattttcatgcggaaaccgtggcaatggcggcagatatgctggctattgcactatccgaaattggcgcgctgtcggagcgcagaatgtcgctaatgattgatactcatttaagtggtttgccgccgtttctagttgaaaacggtggggtaaactcgggttttatgattgcgcaggttacctgtgcggcgcttgctagtgaaaacaaaaccctggcgcaccccgcatctatcgattcgttgcctacgtctgcgaaccaggaagaccatgtgtctatggctaccttcgccgcgaggcgcttacgagatattttcgataacgtggcaggaatattggccattgaatggttagccgcctgccaagggttagattttagaaagccgcttaaaaccagtgaaaaactacaggtgttgatgcagctactaagagaccaagtgccgttttacgacaaagaccgttattttgcgccagatattgaaaaggcgaagcaacttattaagcagcacgaccttatggataagacacagttaaacctgttaggctaaa

SEQ ID NO: 287737 - DNA, 1232 bp, Unknown
  Bacterial polypeptide expressing nucleotide sequence isolated from the Sargasso Sea
actgattccaggtcaggtgacactggatcaactccggaagatagggaacgagccggttcaggtatcgctccctgaagacgcctggcaccaggttcgtcacagccgcgactccctgaacgcggttgtgcagcgcggcgcaccggcctatgggattaacacgggctttggcaaactcgcgaagactcaggtggataatgccgatctgtccacgctgcaacataacctgatccgctcgcatgctgtcggcgtgggccagccgcttggtcttgagatcacccgactgatcatggtcctgaaactcttgagcctcgcacggggatattctggtgtccgtccggaggtgattgagcacttcatttcgatggtgtcgcatgacatcctgcccgtgattccggaaaaaggatcagtaggcgcctcgggagatctcgcaccgcttgcccacctgtctctcgcgctgatcggcgaaggagaggtatttttccgaggtaaacgcgtttcgacagcagaggccttgcagtccgcagaattggatccgctggtcctcgaggccaaggaagggcttgcactgctgaacggcacgcaggtgtctgcagcactcgcgattgacggtctattttccgcagaacaaaatcttgccagcgccatggtgatcggagccatctcggtagatgccgcactcggcagttatgtgcctttcgatgctcgcattcacgaggcccgagggcagtcggggcagacgcgggtggcagccatctaccgggtattgcttaacgacagcgaactcaaccggtcgcatgccgactgtgatcgtgttcaggatccttactgtcttcgctgtcagccgcaggtgttgggcgcctgtctcgatcagcttgatcatgccgcgcggattcttttgcgcgaagcaaacgccgtttccgataacccgattctgtgttcagaaacgggtgatgtcctgtcaggcggaaacttccacgcagaacccgtggcattggttgccgacaatattgctctcgcaattgctgagaccggcagtttgtctgagcgacggatcgccatgttggtcgatgccagtatcagtgaactgccgccctttctcacccgaaatgccgggctggaatcgggcttcatgatcgcccatgtcaccgccgcagctctggcatcagaaaacaagagccttgcccaccccgccagcgtggacagtcttcccacatcggcaaaccaggaggatc

SEQ ID NO: 287738 - DNA, 1525 bp, Unknown
  Bacterial polypeptide expressing nucleotide sequence isolated from the Sargasso Sea
catgattacgttgacccccggccacctgaccctcccgcaactgcgccagatcgctcgcgaatccgtgcagctcaagctcgacccggcgagcttcgcgaagatcgacgccggcgcgaaggccgttgccgacatcgccgcgaagggcgagccggcctacggcatcaacacgggcttcggccgcctggccagcacgcacatcccgcacgaccagctcgaactgctgcagaagaacctcgtgctgtcgcacgcggtcggcgtgggcgagccgatggcacgctcgtcggtgcgcctgctgatggcgctgaagctgtcgagcctcggccgcggccactcgggcatccgccgcgaagtgatggacgcgctgatcacgctgttcaacgcggacgtgctgccgctgatcccggtgaagggctcggtcggcgcatcgggcgacctggcaccgctcgcgcacatgtcggccgtgctgctgggcgtcggcgaagtgttcatccgcggcgagcgcgcaagcgcactcgacggcctgcgcgttgccggcctcgcgccgctgacgctgcaggcgaaggaaggcctggcgctgctgaacggcacgcaggcatcgaccgcgctggcgctcgacaacatgttcgcgatcgaagacctgtaccgcaccgcgctcgtcgcaggcgcgttgtcggtcgacgcggctgccggctcggtgaagccgttcgacgcacgcattcatgaactgcgcggccaccagggccagatcgacgcggccgcgtcgtatcgcgacctgctcgaaggctcgccgatcaaccagtcgcaccgcgactgcgacaaggtgcaggacccgtacagcctgcgctgccagccgcaggtgatgggcgcgtgcctggaccagatgcgccatgcggccgacgtgctgctggtcgaagcgaacgccgtgtcggacaacccgctgatcttcccggataccggcgaagtgctgtcgggcggcaacttccacgccgaacccgtcgcgttcgcggccgacaacctcgcgctcgccgcagcggaaatcggcgcgctggccgaacgccgcatcgcgctgctgatcgatgcgacgctgtcgggcctgcccccgttcctcgtgcgggacggcggcgtgaactcgggcttcatgatcgcccacgtgacggcggccgccctcgcgtcggaaaacaagacgctcgcgcacccggcctcggtcgactcgctgccgacctcggcgaaccaggaagaccacgtgtcgatggcgacgttcgccgcacgcaagctcgccgacatcgcggacaacacgaagcacatcctcgcgatcgaactgctggccgccgcacaaggcgtcgacctgcgcgcgccgtaccacacgagcccgaagctggcgccggtgatggaaacgatccgcagcaaggttgcgcactacgagctcgaccactacttcgcaccggatatcgccgtgatcgccaagctggtcggcgagcgcgcgttcgcgaaggtggcgccgttctcgttcgcgtcggaacagtaa

SEQ ID NO: 287739 - DNA, 1417 bp, Unknown
  Bacterial polypeptide expressing nucleotide sequence isolated from the Sargasso Sea
atggtgaccattaccctgaaggaagggcaactgagtcttgcagaaatgcgcgcggcgatgaaaaccccgcttcaggtgaaactggatccggggtgcctcagccgcatcgagacttctgcaaagactgtcgattcggtattggaacaggaccaaaccgtctacggcatcaacaccggtttcggctctctggcacagaccaagatcgcccgggacaaattggtggaacttcagcagaatctcatcctttcccatgccagcggcaccggtccccttctggacgatggagtggtgaggctgatcctggtgctcaaactgaacagcctgatccgcggattttccggaatccgcatgaaaaccgtggaatacctgctggcccttctggaagccgatgccctgccctgcattcctgccaagggttccgttggagcttccggagatcttgcaccgctggcacacctgagcatggttttgcttggcgaaggcgaggcgcggatcgatggagaatacattgccgcttgggaactcttgagaaaactgggactggaacctttggaactgcagccgaaggaagggctggccctgctcaacgggacccaggtttccaccgccctggcattgcatggactgtttgccgcagaggactgcctcgcatcctcgatcgtcgcgggctccctgagtgtcgaagccagcttgagcagttacagtccttttgacgggaggatccatgaagttcgtgggctccagggacaaaaagacgttgccgccaacttcaggcaacttttaaacgagagtgaaatcaatgcctcccatgaaaactgcggccatgtccaggatccctactccctccgctgccagccccaggttttgggagcctgcctggaccaaatgcgctttgccgcacaacagctccgcatcgaagccaacgcggtgaccgacaatccccttgtttttcccgaagagggagagatcctctcgggaggaaacttccatgctgagccggtggcaatgatcgccgacaatctggcccttgccattgctgaagtcggagcactttcggagagtcggatctcgcttttgaccgatccgggattcagcaaactccctgcatttttaagtgaagatccgggactgcattcaggattcatggtcgcccagatcacttctgcctcattggccagcgaaaacaaaagccttgcccatcctgcctcggtggacagccttccgacttcggcaaaccaggaagatcatgtcagcatggccaccttcgccgcccggaggcttggggaaatgtcagaaaacacggcaaaaatcctgggtatcgaactgcttgcggcctgccaaggcatcgacttccgtagaccgttgacaacatcatatcttcttgaagaagcgcaccagatggtgccgtcacggggtc

SEQ ID NO: 287740 - DNA, 1522 bp, Unknown
  Bacterial polypeptide expressing nucleotide sequence isolated from the Sargasso Sea
atgattctgaaacccggctatctgacccttccgcaactgcgccagatcgcacgcgaacacgtcgcgctgcaactcgatcccgccagccacgccgccatcgacgcctgcgccaaagccgtcgccgatatcgccgcgaagggcgagccggcatacggcatcaacacgggttttgggcgcctcgccagcacgcacattccgcacgaccagctcgaactgctgcaacgcaatctggtgttgtcgcacgcggtgggcgtgggtgagccgatgtcgcgtccggtggtgcgcctgctgatcgcgctgaagctctcgagcctgggccgcggccactccggtatccgccgcgaagtgatggaagcactgattacgctgtacaacgccgacgtgctgccggtgattccggtcaagggttcggtcggcgcttcgggcgacctcgcgccgctcgcgcatatgtcggccaccctgctcggcgtcggcgaagtgttcgcgaagggcgaacgcatgccggccaccgaaggcctcgcgctggtcggcctcaagccgctcacgctgcaggcgaaggaaggtctggcgctgctgaacggcacgcaggcctccaccgcgctcgcgctctacaacatgttcgccatcgaagacctgtaccgcaccgcgctggtggcgggcgcgttgtcggtggacgcggcggcgggttcggtcaagccgttcgacgcgcgcattcacgaactgcgcggccatcaaggccagatcgacgcggcagcggcttaccgttcgctgctgcaaggctcggcgatcaatgtttcgcacgccgactgcgacaaggtgcaggacccgtacagcctgcgttgccagccgcaggtgatgggcgcgtgcctggaccagatgcgtcacgcagccgaggtgctgctgctcgaagcgaacgccgtgtccgacaacccgctgattttcccggatacgggcgaagtgctgtcgggcggcaatttccacgctgagccggtggcattcgcggccgacaacctcgcgctggccgtcgctgaaatcggcgcgctggccgaacgccgcatcgcgctgctgatcgacgcgacgctgtcgggtctgccgccgttcctcgtacgcgacggtggcgtgaattcgggcttcatgatcgctcacgtgacggcggccgcgctcgcgtctgaaaacaagacgctcgcgcatccggcgtcggtcgattcgctgcccacttccgcgaatcaggaagaccacgtgtcgatggccacgttcgctgcgcgcaagctcggcgatatcgccgaaaacgtcgcgaacatcctgtcgatcgagttgcttgccgccgcgcagggcgtcgatctgcgcgcgccgcacaagaccagcccgagcctgcagaaagtgatggacgcggtgcgcaaggatgtcgcgcactacgaactcgatcactacttcgcaccggatatcgcggccgtcacgcggctcgtgcagaacggcacgatcgcgaagctgagcccgttctcgtttgcctccgaacagtaaa

SEQ ID NO: 287741 - DNA, 1053 bp, Unknown
  Bacterial polypeptide expressing nucleotide sequence isolated from the Sargasso Sea
tatgaacaccatgacactcacgccgggccatctgagttttatccagctacgtgaaatctggcagcagccggtcaaactgagtctggatgccggggcgatcgatgctattaacgccagcgtcgcctgcgtcaataatattgtcgctgaaggccgtacggcgtatggcattaataccggctttggcctgctggcccagacccgtatcgccacggaagatttgcagaatttgcagcgttcgctggtgctttcccatgcggcaggtgtaggcgaggcgctggacgacgcgatggtgcgtctgattatggtgctgaaaatcaacagcctggcgcgcggtttttccggtattcgcctgagcgtgattgaagcgctgattgcgctggtgaatgccgaggtgtatccgctgatcccggcgaaaggctccgtgggggcatcgggtgacctggcgccgctggcgcatatgtctttgacgctgttgggagaagggaaggcgcgctggcagggggaatggctcccggcgaccgaagcgctgaaaaaggccgggctggagccgataacgctggaggcaaaagaagggctggcgttgctcaacggtacccaggcttcgacggcctttgcgctgcgtgggctaattgaagctcaggaactgtttgcgtctgcaacggtgtgcggggcgctgaccaccgaagccgtgctgggttcccgtcgtccgtttgatgcccgtattcacgccgcgcgagggcagcgtgggcagattgatgccgcaacgctgtatcgtcacgtattgaccgacaccagcgcgctttcgcagtcgcatcataactgtgagaaagtgcaggatccgtattctctgcgctgtcagccacaggtgatgggggcatgtctgacgcaaatgcgccaggtgatggatgttctgctggtggaggccaatgcggtttccgacaacccgctggtatttgccgaagagggggatgtcatttctggcggcaacttccatgctgaaccggtggcgatggcagcagataatctggcgctggcgattgcggaaatcggctc

SEQ ID NO: 287742 - DNA, 977 bp, Unknown
  Bacterial polypeptide expressing nucleotide sequence isolated from the Sargasso Sea
tttgactgagattatatcacctcattctattaatttagattttctagaaaaaatatttagacacaaattagagatagctgttgatccagaattagagacaaacgtcgcaaaatcttatgaaatagttaaaaaatcagctgagggagatttgcctgtttatggagttaatacagggtttggaaagttagcaaacaaaattattccttcagaagatagggaacaactccagaaaaatcttgttcttagccactgtgctggaattggagagcctttgcccgaagacgttacgagattaatgatggtgctaaaaattgtatcgttatcattaggagcttcaggtgtaaaatggtcaaccataaagcaaattgaacgaattataaattctgggatagtcccagaaatacctcatcagggttctgttggtgcgtcaggtgatctagctccattagcccatatggctgctgtaatgattggcgagggtttcgctttttacaatggtgaaaagctttctggttttgaggcactaaaaagggctggaattgaacctattactttaggtccaaaagagggtctagctcttttaaatggtacccaattttcgacagcttgcgcacttgcaagtttatttgatgcttggaggtctgtactaaactctattgtcatttcttcactttcgacagacgcaataatgggttctacaagcccactcttaccacaaatacatgaattaagagggcataagggtcaaatttttgttgccagtaaaatgagagagttgatggatggaagtgttattcgggaaagtcacagagaaaatgatcaaagagttcaagatccatactgtataagatgccaaccacaagttttgggagcaagtttagatatattaaagaatgctgcagttactattgatatcgaaacaaaagctgtaacagataaccctcttgttttagtcgatcaaaataagattgtttcag

SEQ ID NO: 287743 - DNA, 1534 bp, Unknown
  Bacterial polypeptide expressing nucleotide sequence isolated from the Sargasso Sea
atgtttgaattgactattaccccgggcgagctggatcttgccaccctgcgccgcgtcagccgcgagccggtacacgtttcactggatcccgccgccctggcggggatccacgcctccgccgccgtggtcaccaaggtgatcgagcaaaaccgggtggtgtacggcatcaacaccggctttggcctgttggccaacacccgtattccggtggagcagctggacgagctgcagcgctccatcgtgctctctcatgcggcagggattggcgagtacatggatgacgccaccgtgcggctgatgatggtgctcaagctcaactcgctggcgcgcggcttctccggcatccggctggtggtgctggaggccctgatgcggctgatcaacgccgaagtctatccggtggtgccgaagaagggctccgtcggtgcctccggcgatctggcgccgctggcccacatgagctgtctgctgattggggagggcaaggcccgtcacgctggcgagctgatcgacgccgccacggccctgaagattgccggactggagcccatcgcgctggcaccgaaagaggggctggccctgctcaacggcacccaggcgagcaccgccttcgcgctggaaggcttgttccacgccgaggatctctacgccggtgccatcaccatcggcgccatgagcgtggaggccgcccttggcagccgccggccgttcgatgcccgcatccatgcggtgcgcggtcagcgtggccagatcgacgcggccgcctgctaccgtcacctgctggtggatggcagcgagatcggcatgtcccatcacaactgcgagaaggtgcaggatccctactccctgcgctgccaaccgcaggtgatgggtgcctgcctgacccagatccgccaggcggccgaggtgttggtgtgcgaggccaacgcggtctccgacaacccgctggtgtttgccgaggatgaagacatcctctccggcggcaacttccacgcagaacccgtggccttcgccgccgacaacctggcgctggccatcgccgagatagggtcgctgtccgagcggcgcatggcgctgctgatcgactcgcggatgtccggtttgccggccttcctggtcaacaacggcggcgtcaactccggcttcatgatcgcccaggtcacctcggcggcgctcgcctccgagaacaagaccctggcccatccggcctcggtggacagcctgccgacctccgccaaccaggaggatcacgtctccatggccaccttcgccggccgtcgactggcggacatggccgagaacacccgcggcattctggcggtggaactgctggcggcagcgcaagggctggattttcgtgcccccctgcgcagtaccgagctcatcgagctggccaagggcaggctgcgggaagaggtcagcttctacgacaaggacaggtacttcgcaccggacatcgaggcggccgccgccctgctgggccgcgccagctacaacgacctgctcccggccggcgtgctgccgagcctgtaag

SEQ ID NO: 287744 - DNA, 919 bp, Unknown
  Bacterial polypeptide expressing nucleotide sequence isolated from the Sargasso Sea
catgaaaaaatttgtaattaatggccaacaaatttctcttagtcaaatagatgaggtcatcaaagctgatcttcaaattgaaattggtcccgaagcaaggaaaaatatcataaaatgcagagactatttagaaaaaaaaatagcttcttctgaatctcttcattatggaataaatacaggatttggatcactttgtaatgaagttatctctaacgaagatttgtctaaattacaaaggaatttagttctttcacatgcatgtggtatgggtgactttattccagaaaaaatagtccgattgatgattttgctaaaagtaattagcttgtctcacggtcactcaggaattcaagaacaaacaattaaccgtcttgtttttttgtacaatgagaaaattacgcctttggtttttgaacaaggaagtctaggtgcctctggagacctagctccacttgctcatttatctcttccattgattggtgaaggagatgttatatacaaaggcaaaagagttacttgtaaagaagtatttaaggagtttaatattcaacctttggttcttggagcaaaagagggactagctttattaaacggaactcaattcatgtgtgcatttgctattgattgtatcaataggtctttagaattgtggaacaaatggtctaaaatatctgcattatctcttgatgcctataattgtagacctgaatcattttatccgcatccaaatgagataagaaagcaaaatggtcaaattgaaacagcaaaaaatatttctaaaattttaaaaagcagtcaaatttttcatcaggaaaaagaacatgttcaagacccttattcatttagatgtattccacaggtgcatggtgcttcaaaagatactcttgatcattgtgcaggagttatgaaaacgaaataa

SEQ ID NO: 287745 - DNA, 442 bp, Unknown
  Bacterial polypeptide expressing nucleotide sequence isolated from the Sargasso Sea
cggcctgccgccgttcctggtcgagcaaccgggcctgaactcgggcttcatgatcgcgcacgtcacggcagcggcgctggcctcggaaaacaagacgttcgcccacccggccagcgtcgacagcctgccgacctccgccaaccaggaagaccacgtcagcatggcgaccttcgccggccgccgtttgcaggacatggcggagaacaccgccaccatcgtcggcatcgaagcgctggcggcagcgcagggcatcgactttcacaagccgctggcgacgtccgacacgctgcagaaggcacatggctgcatccgcgcgcgcgtggcgtactacggtgaagatcgcctgttcgctcccgacatcgaagccgcccgtcgcctcgtactcgatggcgacctgggtgactcgtgccgcgcgcacgtgggcgaactcgcactcgtctga

SEQ ID NO: 287746 - DNA, 1534 bp, Unknown
  Bacterial polypeptide expressing nucleotide sequence isolated from the Sargasso Sea
aatggaagcacaaattatttcagataaattgattgattggcatgatttaaaacatctgattgtttcacctaagcctgtgcgcctttctcaaagctcaaaaaaattaataaaaacttcaaatgaaactctgaataatattctgaattcagggaagcagatttatggtgtgaatactggatttggcaaactaagctctgtttccatcaatagaaaagatattaaagagttgcagctaaatttggtaagatctcatgcaacgggtgttggcaagccttttgacctaggcataactagaataacaatgctgcttaaattacttacttgggcgaaaggctatagtgggattcgtccaaagctagctattttattaattgatatgcttaatcatgatattcttcccattattccaagacagggctcggtaggcgcatctggagatcttgcgcctttgtcccatctcgcatgctccatgattggagagggaagtgtccattttcaagatagggtcatgcctagcatgattgcactaaaagaagccaatttgaagccaattgatctagattctaaagaagggcttagcttggttaatggcactcaaatttcaacagccattgcgatcaaaaccttgcatgaagctgaaaaactcttattttcagctgatataatttcagcgttatccgtagaggcgagtctgtcaactagagacgtatttaaacccgtaattcataaattgaaaaaacataaaggacagattatttcagctaccaatatttttaatttattaaaaaatagtgaaatagtatcctcacataaaaattgcgatagagttcaagatccgtattccatgagatgtattcctcatattcacggtgctagctgggaaactttttctagtgcagaaaaaataataaataatgaaattaattctgtttcagataatccattaattttttcaaatgggcaggttcatagctcaggccattttcatgcagaaccagtagcacaagctttggactctttatcgattgcgatgtctgagataggagcaatttcagaaagaaggatacattttttcatgaaaggcgcagataataaactcccaatgttcggagctgtaaatggtggtctcgaatcaggatttatgttagcacatgtaactgcagcttctttagcatcagaaaataaaacccttgctcatccatctagcgttgattctctatctacctcagctggacaagaagacattgtaagtatggctccttgggctggaagatcctgcttaagaatactagataatgtacgaatgattttagcgattgagctattagtagcaggtaatataaaccatagatttcatcataaatttaattcaagcgacgggttgcagccattaatgaaactattaaaaaaatcaaaagtattatccaaaacagatagggttttttcaaaagatattgaaattatcagcgaactaataaaaaccgatcaagtttattctgcagtaaataaagtaaataaaataagtagagtataa

SEQ ID NO: 287747 - DNA, 440 bp, Unknown
  Bacterial polypeptide expressing nucleotide sequence isolated from the Sargasso Sea
tgcaccagtaattggtagattgaccaccgagctacgcaaggacgtccagaccgtatggattcataaaggatatgagagttttggtggaggcaataacaatcttttgatctatccagaatggtccatcataaattatgagagacagggaatccttgaagagactttggtgcatgaaggtgcgcactcttcccttgatgcgtaccatgcaaataacccagattggcttttagcacaaaaattagactgtaattttatttcggactatgctaaacagcacccattgcgggaagatattgcagagagctatttaacctacctcgcagtgcgttatcgatctgatcgtatttcaccagaattaaaaacgatgatcgaatcagcaatacccaatagaatcaaatatttcgattcacaaaagtttaatatgtatcccatagagtgac

SEQ ID NO: 287748 - DNA, 493 bp, Unknown
  Bacterial polypeptide expressing nucleotide sequence isolated from the Sargasso Sea
aaatccagagtttggaactgccgatgatgcaaaaatccaagctgaaaaattcgcaccaattattggaaggttaaccacagaacttaggaaggatgtcgaaactgtttggattcacaaaggtatgaaaccatttggcggtggtaataataatttgttgatccatactgattattcctctctacactatgagcagcagggtatacttgaagaaacctttgtgcatgaggcggcccatacctcattagatgcttatcacgctattaatagtgactggatacaggctcaagaggatgattgtagatttatttcagattatgctcaagagcacccaacaagagaggatatagcagaaagttatttaccttattttgccgttagatatcgttcagagagaataacttcaggacttagagatagtatagaatctgcaattccaaatcggattaagtattttgatgcgcagaattttaatatgtatccccttgaacggtaa

SEQ ID NO: 287749 - DNA, 679 bp, Unknown
  Bacterial polypeptide expressing nucleotide sequence isolated from the Sargasso Sea
cttcattcacgcccaccatatgatggtacaattttttattttaaagatgctattaattccagtgatccaactgcctttcaagcaattgtttatgtaggtcaagataatcgcactatgttcgatcgtaggaaaaatgattggattaaaaataaagcatatttatttaaagcaagttatgatgatggcttaacaattgagattcaggttaattctgaatttaaagataacaaagcttctgagtacgcttctcaatatgccaaagtgataggacaattgccaactgttttgcgtaaagatgttcaaaccgtgtggattcataaaggagacaaaccatttggaggaggtaaccaaaatttacttattcatattatccaaggggaaaagtatatcgcagatggaatacttgaagaaacgttagtacatgaagcctgtcatacatctctcgatttagatcatggtaacgcgaaaggctggcgtgtggcgcaaaaagctgatgatgaatttatttctacttatgcaaaagattatccgaaaagagaagatattgctgagagttttttaacttggttagttgttaggcatctttcggatagagtttctgagtctcatgtaaaaaaaatattaaaagctattcctaatcgcattaagtattttgatgaacaagaatttgatatgtatc

SEQ ID NO: 287750 - DNA, 973 bp, Unknown
  Bacterial polypeptide expressing nucleotide sequence isolated from the Sargasso Sea
gctgggcgggttcagcctttatgcgataagcacgatgcttggcaaatcagtattttatgcttatgaccgccaggttattaatcaacaaatccaacgtttcagggcggcaattcctaacagaattaagttgcactatgcggtaaaagccaacccatactggcctgttgtgcagcacatgcgcccgttagtagacggctttgatgtggcatcgcaaaaagaaatgctgctggcgatacaaagcggtatgccggtagtcgatatcagttttgccggcccgggcaaaaccgataccgaacttgccgctgccattacggcaggcgtaacattaaatgtagagtcggccagcgagctgcaacgtatttgctatctggcagagcagcataaggtcataccacaggtagcactgcgggttaacccggcgtttgagcttaaagcttcaggcatgaaaatggccggtggcgctaagccttttggtattgatgaagagcaagtgtttgagctgctaacacaaatagccaccatgccggtgaagttacgtggttttcatattttttgcggatcgcagaatcttaaaactgaagcactgacagaagcgcaccagcttacctttgatctggcagcgaaactggttgccgcttgcccataccggcctgatttgatcaatctgggtggtggttttggtattccatatttccctggcgaaaaacggcttgatttacagcctattggtttatcgctgacacaactactacaacaacatgagcaagccctcgccggtattgagctggtaattgaacttggccggtatctggtggctgaggctggcgtttatgcttgtcaggtggtggataaaaaagtgtcccgtggcactacctatctggtgtgtaacggtggtttacatcaccatctggccaactcaggcaattttggccaagtgatacgcaaaaattatccgggtggctattggcaataa

SEQ ID NO: 287751 - DNA, 641 bp, Unknown
  Bacterial polypeptide expressing nucleotide sequence isolated from the Sargasso Sea
aactccagaagaccccacaacttttgtcagtttatcttatgcaggtaccggaactagacagatgtatgataggaggtcaggatggataacattagaaccctacttattcccagctgaatatgatgatggactaagtattgagattcaagtaaatcctgagtttggaacatgggaaaatgcacaggtatatgctttaaaatatgctgaggtaataggtagactaactacacagctcagaaaagatgtcaagacatcctggattcataggggagatgaaccctttggtggaggtaacaataaccttttaattcatactgactggtccgaaaaaaattacgagaatcaagggatattggaagagacacttgtccatgaggcatctcacacatctcttgattcctatcatgctgaatctgaaggatggttatctgctcaagataaagactgtgaatttatatctacctatgccagagataatccaattagagaggatgtagcagaaagttatttaccatatcttgcaataagatatagatctgatagaatatcagataacttaaagaaaagaatagaagaagcaatacctaataggattaaatactttgatgaacaaaactttaacatgtatccaattcaataaa

SEQ ID NO: 287752 - DNA, 297 bp, Unknown
  Bacterial polypeptide expressing nucleotide sequence isolated from the Sargasso Sea
gtatacttgaggagacctttgtccatgagtcggcccatacctcattagatgcttatcacgctactaatactgattggatgcaagcgcaggaggatgattgtagatttatttcggattatgctcaagagcacccaacaagagaggatatagcagaaagttatttgccttattttgccgttagatatcgttcagagagaataacttcaggacttagagatagtatagaatctgcaattccaaatcggattaagtattttgatgcgcagaactttaatatgtatccccttgaacggtaat

SEQ ID NO: 287753 - DNA, 640 bp, Unknown
  Bacterial polypeptide expressing nucleotide sequence isolated from the Sargasso Sea
ttaaattcttctgatatttcaacttttatttctttagaaagcatttctgataatccaagaactatgtttgaccgcagaaataatggttcatggataactataactccttttttatttgaagctaaattttctgatggcactcaaattgaagttcaggttaataatgaatttgaaaataaaacaaatgcagaaagagtggctttgacatatcttgaagcgattggtagattaccagaattatttagaaaagatgttgaaacagtttggattcataaaggcaatgagaattttggaggagggaataataatatcttaattcatcatgatagaggtttagagcatgaaaaatatggtttgctagaagaaatctttttgcatgaaggggctcatacttctcttgattattatcacagttcatcaagcggttggattgaagcgcaaatcgcagacaatggaaatttcatttctgattatgcaaaagaatatccccaaagagaagatgtggcagaaacgtttcctttatgttttgcacttaaatataaaagagacagattagataatggtattattcagaaaatcgaaaaagctatccctaataggataaagtactgtaataatgtttttgaaaatatgaattaga

SEQ ID NO: 287754 - DNA, 784 bp, Unknown
  Bacterial polypeptide expressing nucleotide sequence isolated from the Sargasso Sea
ttgatttgcttcggctgtgaaaatacttctgataatgatcaagcgcaactttcagatagccagaatcccgagaattgcaatttcgaaacaagcaaccctccttttagcggcaccattttcatagatccagatatcataacgccaaatgacccaacgacctttaccggtttaagctatataggaactggaacacgaacaatgtacgatagaagggatggaggcggatggttgacactggaaccgtacctgtttcgtgccaattatgatgatgccctagagattgaagtgcaggtaaatccagagtttggctccattgaaaacgcccagatccaagccgataaatatgcatctgtgatcggtagactaaccacagaacttagaaaagatgttgagaccgtatggatacataagggatttgaaagtttcggtggcggtaataataaccttttgatctaccccgaatggtctctagagtattatgagaggcaaggaatcttggaagagacccttgtccacgaagcttcgcatagctcactcgattcttattacgccaatgataaagattggctattggctcaaaaattagattgcaacttcatttcagattatgctaaacagcatcctataagagaagatattgcagaaagttatttgacataccttgcggtgcgctatcgatcggatcgaatttcttcagaattaaaaatgaagatcgaatccgcaataccaaatcgaatcaaatattttgataataaaaaatttaatatgcaccccatccgataaa

SEQ ID NO: 287755 - DNA, 1645 bp, Unknown
  Bacterial polypeptide expressing nucleotide sequence isolated from the Sargasso Sea
catggccgtgatccgttccgatcgtcctctcgactgggttcaggtggcggcgatcgccgccggcgaaccgctcgaactttccgctgaagcccgttcgcgtatcgcggcggcgcgcgtgcttgttgaacagatcgtcgagcgcgggattcgcgcgtatggcgtgaataccggcgtcggcgcgttgtgcgatgtgatcgtgtcgccgtccgaacaacgcacgctgtcgcgcaacattctgatgagccacgcggtaggcgtgggcgcgccactcggtgtcgcagaaacgcgcgcgatcatggcggccgccgtcaacaactttgcgcatgggcattcggggattcgcctcgaagttgcggatcgactggtcgcattgctcaatgccgattgcctgccggaagtgccggcgttcggctcggtcggttatctgagccatatggcgcacatcgcgctggtgtgcattggcgagggccatgtgcgctatcgcggcgaacgcctcaaagggcgtgatgcgttgcaactgctcggcctcgaaccgctggtgctcgacgcgaaggaggggctatgcctcgtcaacggcacgccgtgcgtgacgggcctcgccgcgttggcgctggcgcgtgccgcgcgcctgctcgactggaccgatgtggtcgccgcgatgagcttcgagaatctgcgcggccagatcgcggctttcgatgaagactcgctggcgttgcgcatttcgccgggcctgaacctggtgggcgagcggatgcgcaccgcgctggcggacagcggcattctcgccgcggtgatcggccagcgcacgcaagacccgttgagcatgcggaccattccgcatgtgcatggcgccgcgcgcgacgtgctcgccgcgaccgccgacgtggtcaatcgcgaactcgcatcgattaccgataacccgatcgtcgccggcacgccggaagcgccacgcgtctattcgcaggcgcacgcggtgggggcgtcgatcgcactggcgatggacagccttgccaccgcgatcgcgcaagtcgcggcgatggccgagcggcgcctcgatcgcctcgtcaatccgctcgtgagcggcttgccggcgtttcttgcggagccgggcggcacctgttccggcttcatgatcgcgcagtacacggcggcttcgctggtggcgcagaaccggcgcctcgcgatgccggcgagtctcgacggtggtatcacgtccggtttgcaggaggaccacctgtgccatgccacgcctgccgcgctcaaggcgctggagattctcgacaatgccggacgcattgtcgctatcgagttgctggcggcggcacaagcttacgatctgcagagcgtcgacgcatcgcgcgcgccgcacacggacgcgctctggcatcgcgtgcgcggcgtcgtaccgacttaccgcgacgaccggccgctcgcggacgacatggcgattgcgtttcgcatgatcgccgacggaatgccaccgccgctgccaaacccgggtaacattcgccccgggtcgggtgctttgagcggcggcgcgagtcttgctgcgttggcaagcgtgacgagtgtggctgccgcgaacaggctcggcgccgatccggctgccaatgacggcaacgcggccgcccatgcaggttga

SEQ ID NO: 287756 - DNA, 781 bp, Unknown
  Bacterial polypeptide expressing nucleotide sequence isolated from the Sargasso Sea
ttgattttccttagctgtgaaagttctaatgatgatcaagcgcaacttccagatagccataatcctaaggattgtgatttccaaacaagcacccctccttttagcggtaccattttcattgatccagatattatcacgccaaatgacccaacgacttttaccggtttaagttatgttggaaccggaacacgaacaatgtacgatagaagggatggaggcggatgggtgacgctagcgccacacctatttcgtgccaattatgatgatggcctggaaattgaagtacaggtaaatccagagtttggctccattgaaaacgcccagatccaagccgataaatatgcacctgttatcggcagattaaccacagaacttagaaaagatgttgagaccgtatggatacataagggatttgaaagtttcggtggcggtaataacaaccttttgatctaccccgaatggtctttagagtattatgagaggcaagggatcttggaagaaacccttgtgcacgaagcttcgcatagttccctcgatgcttatcacgccaatgataaagattggctattggctcaaaaattagattgcaacttcatttcagattatgccaaacagcatcctataagggaagatattgcagaaagttatttgacctaccttgcggtgcgctatcgatcggatcgaatttcttcagaattaaaaatgaagatcgaatccgcaataccaaatcgaatcaaatattttgataataaaaaatttaatatgcaccccatccaataaa

SEQ ID NO: 287757 - DNA, 978 bp, Unknown
  Bacterial polypeptide expressing nucleotide sequence isolated from the Sargasso Sea
ttttggaaatttgagtcatattgccatattaccagaagatcagaagcaattacagataaatcttattagaagccacgcagccggaactggtgagcccctagatctgggaattgtacgttcagtcctgttcttaaaattactcacttttgcgcatgggtatagtggcgtacggttagctttagctaataaggtaattcaatttattaataaggatattcttccactgatccctgaaaaaggatcagtaggcgcaagtggtgatcttgcaccattaggtcacatggccctttcacttatcggtgagggtaaggttttctataaagggaaaaaatatgatacaagaacagcactgaaaaaagcaaatgtgaaaccgttggtccttggtcccaaggaaggtcttagtcttattaatggtacacaggtatctacagcgttagctattaaggcttgtttagatggcgaaatattaataagaactgcggatatagcaggtgcgctttcagtagaaaatagtttttcaagtcgcaaggtctttaaatctgaaattcatactattaaaaaacacccaggccagatctcatccgcaaaaaacgtctataaaactttaaatggaagcgaggtagtacgttcgcatgataactgtggtagagttcaagatccctatagttttcgctgtataccccatattcatggcgcctgtagggattccttcatgaactcagcaatgatagtgaataacgaaattaatagtgtcagtgataatcctttgatcatggataaaggaaatattgtaagttctggtcacttccatgcagagcatttagcacaagcaatggatacaattgggatagcattttcagaacttggagctatttcagagcgtaggacgcactattttatgaaaggagttggagatagtattccaccttttgttgcatctgatccaggaatagaatctgggtatatgatagtccatgt

SEQ ID NO: 287758 - DNA, 796 bp, Unknown
  Bacterial polypeptide expressing nucleotide sequence isolated from the Sargasso Sea
ctgacagcgacggtatcggatgcgaacggtcagacgcttacgggtgctacggtgacctgggcatcatcgaacacatcggctgcgacggtatcctcatctggtctgatcacggcggtcgcgaacgggagtgccacaattacggcgacgagtggctcagcgagtacaacggcgtcggtgacggtcagccaggtcgcggcctcggtcgcactgagcggcagcaacgtggcgcttgcttccgttggggacaccacgacactgacggcgacggtatcggatgcgaacggtcagacgatcacgggtgcgacggtgacctgggcatcgtcgaacacatcggccgcgacggtatcctcatctggcctgattacggcggtcgcgaacggaagtgcgacggtgacggcgacgagtggctcggcgagtacaacggcgtcggtgacggtcagccaggtggcggcctcggttgcactgagcagcagcagcgtgacgttcgcatcccttacggacaccacgacactgacagcgacggtatcggatgcgaacggtcagacgcttacgggtgcgacggtgacctgggcatcgtcgaacacatcggccgcgacggtatcttcatctggcctgatcacggcggtcgcgaacgggagcgcgacgattacagcgacgagtggttcggcgagtacaacggcgtcggtgacggtcagccaggtcgcggcctcggtcgcactgagcggcagtttaacgctcgcatcgctcggtgcgacgagtcagctgacagcaacggtatcggatgcgaacggtcaga

SEQ ID NO: 287759 - DNA, 1564 bp, Unknown
  Bacterial polypeptide expressing nucleotide sequence isolated from the Sargasso Sea
atgaacaagagtgagaagagaagggtcacctttggcgcgaagccgctgaccatcgaagacgtggtggcgctggccgaagggcgcgccacccccgcactgaatccggatcccgccttcatggcccgcatccagcggggcgccgactttctcgaccggttgctggccgaagagggggtcatctacggagtgaccaccggctacggcgactcggtgacccggccggtgccgaccgagctggtgcctgagctgccgctgcacctgacccgttttcacggctgcgggctgggggcggatctcgagctcgatgccgcccgcgccgtgctggcgacccggctctgctcgctggcgcagggggtctccggggtcagcccggccttgctcgagcggctctgctggctgctggagcaggatctggtgccgcgcattcccgaagaggggtcggtgggcgccagcggcgatctcaccccgctctcctacgtcgccgccgtgctggtgggggagcgtgagcttcatcatgatggtgtgctgcgccccgccgccgaggtctatcgggagctgggggtcacccccctgaccctgcggccgaaagaggggttggcgctgatgaacggcacctcggtgatgacggcgctggcttgcctcgcctacgcccgtaccgactacctgatgcggctggcgacccggatcaccgccctggtgagcgtcgccatggggggcaacgccttccactttgacgagcggctgtttgccgccaagccgcaccccggcatgcagggtatcgcggcctggctgagagaagacctgatggccggcgagctgccgcgccacagcgatcggctgcaggacagatactcgttgcgctgcgccccccatgtcatcggggtggtggccgacagcctgccctggtggcgccagctcatcgagaacgagctcaacagcgccaacgacaacccgctgatcgacggggaagaggagcacgtgatgcacggcggccacttctacggcggccacatcgccatggcgatggacagcatgaaggcggccgtcgccaacctggcggacctgctggatcgccagctggcccagctggtggacagcaagttcaacggcggcctgccgagcaacctctccggcgcgccagaggggcggcagatgatcaaccacggcttcaaggcggtgcagatcggtgtctcggcctggaccgcggaggcgctcaagcagaccatgcccgccagcgtcttctcccgctccaccgagtgccacaaccaggacaaggtgagcatgggcaccatagcggcgcgcgatgcgctgcgggtgctcaccctgaccgaacaggtggcggccgcctgcctgctggcggcggtgcagggtgtggagctgcgcctggcccggcccacccccttcacccgcccgcttggcacggcgctggccgccatggtcgcgcaggtgcgggccgagtttgccccgctgctggaagatcgggggctcgagcccgagctgagggcgctgatcgcccgcattcgccagcgtcactatcccctttatgggccgaaccggaactgag

SEQ ID NO: 287760 - DNA, 799 bp, Unknown
  Bacterial polypeptide expressing nucleotide sequence isolated from the Sargasso Sea
atgagcgagttcctcgaaaagaatccatggaatgcgctgcgccagttcaccaacgcacgcatcgcgttgggccgcgcgggcaacagtttgccgacggcgccactactggcgtttaacctgtcacacgcgcaagcgcgcgacgccgtgcatcatccgcttgatacagacgtgctgcacgaacaactgcgcgcgcaaaacttcagcacgctggatgtgcacagcgccgcgcctgatcgcgagcattatttgcgacggcccgatctcggcaggcggttaagcgatgagagtcgcacagcgcttgtgcaactgaaggctgaatcctccgacgtggtcttcgtgatcgccgacggcctctcggcattcgccgcgtcgaaacagtcgatcccgctgctgcaagccgtctgcgcaaaactggctgactggaagatcggccccgtcgtggtcgcgcgtcaggctcgcgtcgcgcttggtgatgaagttggcgaactgctcaataccagactggttgtgatgctgattggcgagcgtccgggattgagttcgccggatagtcttggcatctacctgacgtacgcgccgaaagtgggttgcagcgatgcgcaacgcaactgtatttcgaacgtgcggcctgaaggtcttaactacgaatcggccgcacacaagttgcactatctgctgacgcatgcccgacgcctgggattgaccggcgtcggcttgaaagacgacagcgatgcactgcttgcgagcgcgccggtaacgcccgcagtcagcagtaatccgaacgaaggcgtcacataaa

SEQ ID NO: 287761 - DNA, 796 bp, Unknown
  Bacterial polypeptide expressing nucleotide sequence isolated from the Sargasso Sea
catgagcgacgccgtcgaaaagaacccgtgggcgcagttgaagtcgttcacgaatgcgcggatcgcgctcggccgcgcgggcaacagcctgccgacggcgccgctgctcgcgttcaacctgtcgcatgcgcaggcgcgcgacgcggtgcaccagccgctcgacgtgggcgcgctgcggcgggagatcgaggcggccggcctgctgccgacgctcggtgtgcagagcgccgcgccggaccgcgatcactatctgcgccggcccgatcttggccgcaagctgtcggacgacagccgcggcctgcttgccggctacggcgcggcgctcgatgatgcgcccgacgtcgtgttcgtggtcggcgacgggctgtcggcgttcgcggccgccaaacaggcgctgccgttgctgcaggccgtgcggccgcggctcgacgcggacggctggcggatcggcccggtggtggtcgcgacgcaggcgcgcgtcgcactcggcgacgagatcggcgagctgctgcgcgcgaaggtcgtcgcgatgctgatcggcgaacggccggggctcagctcgccggacagcctcggcgtgtacctgacgtgggcgccgaaggtcggctgccacgatgcgttgcgcaactgcatctcgaacgtgcggcctgaagggctgccgtacgcgggggccgcgcacaagctgcattacctgatgacgcacgcgcgacggctcgggctgacgggcgtcgggctgaaggacgacagtgatgcgttgctgccgcaggcgcaggcggaacggatcggggcggactga

SEQ ID NO: 287762 - DNA, 834 bp, Unknown
  Bacterial polypeptide expressing nucleotide sequence isolated from the Sargasso Sea
aggagccgactgtgcaaccagaattgcctgacaacccgtggctggaactgcgccgcctgaccccggcgcgtattgccctgggccgcaccggcaccagccttcccaccagcgcccaactggacttccagtttgcccacgcccaggcgcgggacgcggtgcacctgcccttcgatcacgccgggctcagccaccaactggccgaacgtggccgagacagcctgttgttgcacagcgccgccacggaccggcacatctacctgcaacgcccggaccttgggcgacgcctgagcgatgagtcggcgcaaacgctgcgcgactacgccctggcccaacccggtggcgtggacttggccatcgtggtggccgatggcctgtcggcactggccgtgcataaacatacagcgccgtttctggcgcgcctggaagaacagacccacgccgaaggctggtccttgtcaccggtgattctggtggagcaaggccgcgtggcggtggccgatgaaatcgggcagctactgggcgccaagatggtggtgatcctgatcggcgaacgaccggggctcagctcgccggacagcctgggcctgtatttcacctacaaccccaaggtcggcctcaccgatgcctatcgcaactgcatctccaatgtgcggctggagggcttgagttatggcatggcggcccatcgcctgctgtacttgatgcgagaggcgtgtcgccggcagttgtcgggggtcaatctcaaggatgaggcacaggttcagaccctcgaatccgacgacccggacctgatgaagggcaatttcctgctcagcccggcggatgaccgatagc

SEQ ID NO: 287763 - DNA, 415 bp, Unknown
  Bacterial polypeptide expressing nucleotide sequence isolated from the Sargasso Sea
atgacgtcccgaacgctcgacgcgacggttccgggcggttcccggcgaggacgacgacgggtccgcgcgtcgacgacgcgcgcgaccgcgagcgaggagccgaaaaaattgtggggcgggagattcagcgaggcccaggacccgctcatggagaagtttaacgaatcgctgtcctttgaccggcgcatgtggcgggaggacgtcgacgggtcggtcgggtacgcggcggcgttggcgcgcgcgggggtcatcacgggcgatgaacgggacgccatcgtgtctggattgagagacgtggcgaaggagtgggaggctgacgcgttcgaggcgaaagccggggacgaggacattcacacggaaaaggagagacgtttgacggagctcatcggcgacgtcgcgggcaagtgcacacgga

SEQ ID NO: 287764 - DNA, 646 bp, Unknown
  Bacterial polypeptide expressing nucleotide sequence isolated from the Sargasso Sea
gcgaaagaacttttaaggaagtcaaagcaaaatgaaaatttgccaatgcctggttatacccacctgcaaagagcaatgccatcaacatgggggttatggttttcttcttatgtggaagcatttttagatgatgttgagttattggatgcaatcttagattggactaatatcaatcccctgggaacggctgcaggctatggagttaatttacctatcaaaagagagctctcaaccaagaagctaggcttcagaagacctcaagtgaatgctttatatgttcaaaatagcagaggcaaaatggatttagaaattttaggtgctttgaagcaacctttcttggatttaagaaaattatcatgggatttgagcttatttacttcaactgaatttaatttaattgagattggtaaggaatttacaaccggatcttctattatgcccaataagtcaaaccccgataccgtagagataatgagagccaattatgcaaaactggcaggttattatgctgaaattgagaacttgatttcacttccaagcggctatcacagagatttgcagatatctaaaggagcaatcattaatgcatttaatatatgcgaatcttcattttctctggcacctgcattaatcaaatcatggaaag

SEQ ID NO: 287765 - DNA, 432 bp, Unknown
  Bacterial polypeptide expressing nucleotide sequence isolated from the Sargasso Sea
aagaagataaagagccactatttgatagtatcgatacattacgagactgtttgatagcgctcaacggcctgattcctaatctgatagcaaataaagaacagatgcgtgaagcagcggtcgccggttataccaccgccacagatttagccgattatctggtacgcaaacaggtgccttttcgggatgcccacgagcttgtaggaggcgctgtacaacgagccgtcgagctcaaccagccgcttgaagcgctaagcttggagcaattaaatggcgctgtagacggacccatagaggcggatgtatacgacattttgagcttagacggctcgatcgcagcgcgagatcacttcggtggcacggcaccgacccaggtgcgggcccaggctcaagctgcattgttaagcctcaagaaaagtaacgacccgcgctaag

SEQ ID NO: 287766 - DNA, 172 bp, Unknown
  Bacterial polypeptide expressing nucleotide sequence isolated from the Sargasso Sea
cctgcacacgggccgctcgcgcaacgaccaggtcgcgacggcgctcggcgcattcaatttcgtgttgcgcgatgcgctcggcggcggtgtcacgcgctcgctcgcgctcgacgcgcacggcaaatccgtcagttcggcgctgctggcgattgaggtgcccgacccggcgtga

SEQ ID NO: 287767 - DNA, 434 bp, Unknown
  Bacterial polypeptide expressing nucleotide sequence isolated from the Sargasso Sea
tctttcatactttaaagatcttcaagatgataaagaaattatttttaaatcatatgacgttctttttcaaagtttaaaaatatttaatgaaattcttaagaatgtaagtcctaataaaaaaagaatgattgaattagcatattcaggttacattactgcaacagatttagcagattatctagttaagaataattcaatgtcttttagaaaagcttaccaaaaaacagctttgctagtgaatttagctgaaaaaaaaaagaaaaaactaaatgaattatccttggaagacttaaaaaaaatagaacctacattgacaaatgatgtgctaaaagtgtttgatttaaagaattctgttaattccaaaaaatcttatggtggaacatcttttgataatatcaaaaagatgataaaaaaatatagaaaattaaaatgat

SEQ ID NO: 287768 - DNA, 350 bp, Unknown
  Bacterial polypeptide expressing nucleotide sequence isolated from the Sargasso Sea
catgagtaaaaataaaaaccaagcgatatggaagtcaagaattaaaaaaaaaagctcctctctattccaaaaagtgggtagttctataaatatagataaagagctttacaaagaagatattaaagtttctatagtacatgcagaaatgctttttagacaaaaaattatatcttttaaaataaaaaataaaattatctatggtttaagtaaaatagaaagggaaatttctagcaataaatttcaatttaatgaaaagtttgaagatattcatatgaatattgaaaagagattatttgaaattataggtgaagatgctggatatttgcatactgcaagatctagaaatgatc

SEQ ID NO: 287769 - DNA, 919 bp, Unknown
  Bacterial polypeptide expressing nucleotide sequence isolated from the Sargasso Sea
atgagttccaaaagtgacgttttcttggaggaggctcggcttggtccgcgctcgagtatcctaatcgaatgtgaagagatgccgaatttgccacgcctgattcgtcgctttaaagaatacttgcttacagatatcgcccatgcagtcatgttgacagagactggaataatctctccccagcgcggtgcaacattgctttcagggttgattttgatgtgggaaagtgagggcagaggtttcccgtaccttccgaacgtgggttcgtttctggttcaaacggaacattttttaggtgaacacattgacaaggacattgctgggcgacttcagactggacgcagccgaaatgaccagagcgctgaggcagaaagattatatcttcgagatctacttttggatgtaatgaaacatctgatcctcctgcaggaggcaaccctgtcacaagcaacttctcacgctgacagtttaatgccgggctatactcatctgcagcatgcgcaaccgacgacgttcggccaccacttaatgcgttatgcggctgccttcgaccgtgatcttgaccggcttgcaggtgcctttaagcacgtaaatttaggtagtcttggtggggctgctatggcggggacatcgtggcccattgatcggaaaagaactgcaaagcttctgggacatgatggattggccataaattcatctgatgctggtggatttgcccgcgactacattgaaggcacggtcgccgcattatccatcctgatgggaaatttggggcgcctcgctaaagacttatacgtctggagctcatgggagtttggatacatacaggtcgcagatgaactcgttggaacctcgagtattatgccgcaaaagaagaacccgcattcactcgaacgaattaaagcattgtcgggacaggcca

SEQ ID NO: 287770 - DNA, 796 bp, Unknown
  Bacterial polypeptide expressing nucleotide sequence isolated from the Sargasso Sea
aatgatcaagttctcactgcattaagattgtattaccttgatgcaattgatgaaatcgtaaccagtacagaaaaattatgcgaggaaatacgagtattagaaggtaaacagggctcaattaaattacctggaacaactcatatgcaacatgcaatgccgtcatcggtatcgctatggtgtggagcttatatagaagcctttgaagacaatatagaaggaatgattcaggctaagcgtcgttcaaataagaatccacttggtagtgctgctggatatggaacaccaggattaccagttgatagaacattcacaacaaagaaacttggctttgaagtgacacatgagcctgttacagcacctcagttgtctcgcgggaaagcagagtcgcaccttttatttgagctttcactattaatgcaagatttaggaagactttccagtgatcttctgctctattacacccaagagtatagttatattgacctcgcctttgaggttacaactgggtcatcaataatgcctcaaaagagaaatcccgatgtactagaattaataagagcttcttcagctactgtattgtcgtgtttgaatgagagcatgatggtaatgtcgaaacttccatctggttttcagcgtgacctacagaaaattaaagctcctctctttaaagctattgataatacaatagagagtgttgatattatggcttacgtaatatcaaccatgaaatttttaccggaaaatatcaagctcgacgatgacctattcgccgcggaagaagcttacaagcttgttc

SEQ ID NO: 287771 - DNA, 422 bp, Unknown
  Bacterial polypeptide expressing nucleotide sequence isolated from the Sargasso Sea
cgcgctgatcggcgatgccggcaagcgcttgcacacgggccgctcgcgtaacgatcaggtcgcgaccgacatcccgcctgtggctgcgtggcgagatcgaccgcatcggcgggctgctgacggaactgcgcacggccctgctcgacatggcggagaagaacgcctcgaccatcatgccgggcttcacgcacttgcaggtggcgcagccggtcaccttcggccatcacctgctggcctacgtcgaaatgttttcgcgcgacgccgaacgcatgatcgattgccgcaagcgtgtgaatcgcctgccgttgggtgcggcggcgctcgccggcaccagctatccgatcgaccgtcatgcggtggcgaagaccttgggcttcgacggcatctgcgcaaactcgctggatgcggtgtccgatcgtgac

SEQ ID NO: 287772 - DNA, 424 bp, Unknown
  Bacterial polypeptide expressing nucleotide sequence isolated from the Sargasso Sea
agtgacacatgagcctgtcacagcacctcagttgtctcgcgggaaagcagagtcgcaccttttatctgagctttcactattaatgcaagatttaggaagactttccagtgatgttctgctctattacacccaagaatatagttatattgacctcgccgttgaggttacaactgggtcatcaataatgcctcaaaagagaaatctcgatgtactagaattaataagagcgtcttcagctaccgtattgtcgtgtttgaatgagagcatgatggtaatgtcaaaacttccatctggttttcagcgtgatctacagaaaattaaagctcctctctttaaagctattgataatacaatagagagtgttgatattatggcttacgtaatatcaaccatgaaatttttacctgaaaatatcaagctcgac

SEQ ID NO: 287773 - DNA, 616 bp, Unknown
  Bacterial polypeptide expressing nucleotide sequence isolated from the Sargasso Sea
gaactatctgatgatttcacatctccttcaagtgttatgcctcaaaagaaaaatcctgatattttagaattaactcgtggtaaaacatctcaagttataggatatttgacgtcaatcttgactacaactaagggactatcatctggatacagcagagacttgcaacaaataaaatcatcgatatggtcaacatccaaaacgtcaatcactgcattaattatcataaagtcaatgttatctgatcttatagtaaatcaggaaaaaatgcagaaggcaaccgaagaaggatttcttgtggcattagatttagctgaaaatttagttcttgaaaaaattccattccgtacggcacataatatagttggtaatcttgttcaattatcacacaattcaaaaaaattattatctgatcttgatcttgacgaaattgattgtttagacattaaagacattaaaacaaccaaactcttcgaactaattcaaaaaactactatatcttcatctcttaaacaacgaaaatcaaaggggtcctctggaacttcagaacaaatacgaatgattggtcaaagaaccaaaaaactcagcacattaaaaaaatctgtaaaaattcaaaaaa

SEQ ID NO: 287774 - DNA, 839 bp, Unknown
  Bacterial polypeptide expressing nucleotide sequence isolated from the Sargasso Sea
aaataaatacaataaatttcctgcgaaagtttacgtagattctttcttaaaaccggatttatatacttacaaaacagtctttagagatgccctttttcaaattaactatgctcagtgcataatgttgaaagagcaaaaattgatttctgaaaaagaagcaagtgagatattaactaatttatctgaaatagaaaatgaatttgatttcgaaaatttagaatatgactcaagctttgaagatctgttttttttagttgaaaaaattttaataaataaaatcgggattgacacagcaggaaaacttcatacgggtcgttctcgaaacgatatggaacatacaatgtttagaataaaacttcgtgaaaaaataatttccactataaaagattattttatactttgtgatatactgttaaaaagaagtgaaaagggtttatctgagatagttctcttgaatacgcacggtcaaccggcgcaagtttctacattagcacattttttatctgctgttattgagtttagcctaagggatattagtagattattacagtcacttaatttggtaaacttatcaccaatgggttctgcagcaataactacaacgggtttcccattgagcagagaaagaatggctgagctcttgggttttgaaggaatagttaaaaattcatatggggcaattgcaggatgcgactatattacaactgcatattcatcattaaaaataggttcaattaatcttggaagatttgttcaggaattgattacttggactggctttgaggtcagtcaaattaacgtgcctgatggttttgttcaaatatcatcgattatgccac

SEQ ID NO: 287775 - DNA, 541 bp, Unknown
  Bacterial polypeptide expressing nucleotide sequence isolated from the Sargasso Sea
atgcctcagaaaaaaaatcctgatcctctggaatatttaagaggaaaagcaggcggaacatttggaaatttattttcaatgttgacaattttaaaaggattgcctttatcatattttaaagatttacaagatgataaagagatagtttttagatcatttgatactttgaataattctatttctatacttaatgaggttttaaataattttaaaccaaataaaattaaaatgttaaaattagcaagtaaaggttttgttacagccactgatttggcagatcatttagtaaaacatcatggaaaaacctttagggatgcttatcagactactgctatggttgttaattatgctgagaaaaataataagaaattaaatgaattaagcttaaaagagcttcaaaaaattgaaccatgcttaaaaagcaatgttttaaatatttttgacctaaaaaactctgttaactcaaaaaaatcatttggcggaacatcatttaataatataaaaaaaatgatattaaaatataaaaaaatttataaatgat

SEQ ID NO: 287776 - DNA, 354 bp, Unknown
  Bacterial polypeptide expressing nucleotide sequence isolated from the Sargasso Sea
aaatatttgatgaaattttgaaaaatatttcaccaaataaaaaaaagatgtatgaattggcaaatagaggttttgttactgccactgacttagctgattacttagttaaaaatcatgcgatgtcatttagaaaagcctatcaaaaaactgcagaaattgtaaattttgcagaaaagaaaaagaaaaaattaaatgaacttaaaatagaagaattaagaaaaatagaacctaaattaactatggacgttcttaagatttttgatttaaagaaatcaattatttctaaaaaatcatatggaggaacatcttttgaaaatatcaaaaaaatgataattaaatataaaaaagtataat

SEQ ID NO: 287777 - DNA, 445 bp, Unknown
  Bacterial polypeptide expressing nucleotide sequence isolated from the Sargasso Sea
atggataaaaaaatatggaacacttcaggtgtaaaagtatcagacgaaatatcttcatttttagccggtgaagacatagagcttgataattctatttttatatatgatatcgatgcaactatcgctcatattaaaggactccaatcaatcaatattttgaaaaaaaatgaatttaatagacttaataaatcattaaaggagctaagaaagaaattcttagagggctcttttaaactcactaaaaagtatgaagattgccattctgctattgaattttatctaactaaagaattaggagatcttggaaagaaagttcatacaggaagaagtagaaatgaccaagttcttgtagctatgagactatttgcaaaaaataatctgcatgattttaaaaaactaaatcaatctattgctaagatatttttacaaatggcaaataaatata

SEQ ID NO: 287778 - DNA, 238 bp, Unknown
  Bacterial polypeptide expressing nucleotide sequence isolated from the Sargasso Sea
atggcgggtggtgtgaccggtggcgctgcaggcgcatggagtaatcgtttcgaacagggactgcatcccttcatcgaagcgttcaatgcgtccatcggttttgatctgacgctgcttcaggaggatctggacggctccattgcccatgcccggatgctggcgagttgcggggtgattgcagaggaggaggccgttcagctggtggacggtctggagttgatccgaacggaggcagccg

SEQ ID NO: 287779 - DNA, 478 bp, Unknown
  Bacterial polypeptide expressing nucleotide sequence isolated from the Sargasso Sea
ggtaatttattttctatgctcacaattttaaaaggtctacctttatcatattttaaggatctccaagatgataaagaaatagttttcaagtctaatgatactttggttgattgcttaaaaatttttgaggaagtcgtaaaaaactttaggccaaataaagaacaaatgctgaaacacgcttataatggatacattacagcaaccgacttagctgattatcttgttaaaaatcactcaatgtcttttagaaaagcctaccaaaaaacagcagcaatagtaaatttagctgagaaaaagaaaaaaaatcttagcgaattaagtttagatgaacttaagaaagttgaaccaaaacttcaaaatgatgttttaaaagtgtttgatttaaagaattctgttaattctaaaaaatcttatggaggaacatcttttgataatattaaaaaaatgataatgaaatataaaaaactaaatgattaaa

SEQ ID NO: 287780 - DNA, 508 bp, Unknown
  Bacterial polypeptide expressing nucleotide sequence isolated from the Sargasso Sea
catgtggggaggtcgatttaaacaagagcttgatgatgatgcaaaacaattaagttattcgttttcttttgataaccgattattttggtatgatattcaaactaataaagcatacgttaacgcgcttttgaagtctggtgttcttactaatgaagaggctaaaactttacgtgaatcacttcaagggttaatcgataatattagtgagttatcatttgattataattcatatgaagatgttcattcatttgtagaggcattagtagtagaacaatgtggtgatttaggtaaaaaaatgcatactggtaaatctcgtaatgaccaggtcatgacagatataagattgtttttaaaagatgaaattatggatatcttatctgaattggaggctttacttaaagaaatattcggtttagcagataaatataaaaaattagttttccctggcatgactcattttcaacctgctcaacctattttattggggcatcattttcttgcttatttg

SEQ ID NO: 287781 - DNA, 679 bp, Unknown
  Bacterial polypeptide expressing nucleotide sequence isolated from the Sargasso Sea
aaaatgttaggggaattaggatatctaaataataatgaagtaaataaattaataaaaactttaaatcaaataattgatgttcataaaaaaggtgatttcaaaattaatttatcacaagaagattgccatacagcaatagaagattatttaattaatgaacttggggaattggggaagaaagttcatatggctagatccagaaatgatcaagtcttaacagcgctccgtctttattataaaaataaattatttgatattaaaactctaatgaaaatatggattaaagctatttcacaattagctaaagtaaataaaaatattcaatttccaggttatacacatatgcagaaagcgatgccctcaagcatttctctatgggcaagtgcatataaggaagcaatgaaaaatgatatgaaaatacttgactcagtttttgaattagtaaatcaatcaccgctaggttcagctgcaggatacggcttgccaataaagatagatagacaaatgacatcaaaagagatgggtttctcaagtgtacaagagaatccaattcattgtcaacttagtcgaggtaaagatgaaactatactaataagtggtttaagtcaaattttacttactattaatcgtttatcatcagatatcattcaattttctatggaagaattaggttatatct

SEQ ID NO: 287782 - DNA, 79 bp, Unknown
  Bacterial polypeptide expressing nucleotide sequence isolated from the Sargasso Sea
cctatctcgtttgctcactatttactagcttatgttgaaatgttaaaagagataaaaaaagatttcaaaataatttaga

SEQ ID NO: 287783 - DNA, 541 bp, Unknown
  Bacterial polypeptide expressing nucleotide sequence isolated from the Sargasso Sea
cctcaaaagaaaaatcctgatgttgctgagcttataagaggcggctcttcgaagactatagccaacctaatgggcttattatcattaatgaaaaacttaccactttcctataatagagacatgcaggaagacaaagcatttgtctttgatagtttgaattatataaatgatagtttagtacttctttctatagtaattagaggcatgaaagtaaatataaaaaaaatggaagcagaatgtaagcttggccagataacggcaactgatttagctgactatctggtggagaagtctataccttttaggaaagcacatgaaatagcaggaaagatagttgctcatgctgaatcaaatggaatgcaaatattcgaattagaaatctctgaattaagaaaattctctaaattaatctctgaagatgtatattcttatttggacccagtcgagtcaatcaattctagaaacctaataggcggtacggctccttctcaggtgaaaaaagaaataaatgttgcaaaaaaaaacttgtcaacaaggtaat

SEQ ID NO: 287784 - DNA, 775 bp, Unknown
  Bacterial polypeptide expressing nucleotide sequence isolated from the Sargasso Sea
gatggcggatgagatccttctgcctttcgacatttggaccaaccgcgcccattgcatcatgctggaacaatgcgggctgatccaaagcacatatctgaccggcatcctgaaaggattgcgggaactcgaagattcgatcgagaaaggaaccttcaggctgaaaccggagttggaagacgttcataccaacgttgagttatttgtcagcgaagcccagggagcggacgcaggaggacggatgcacatcggcagaagccgtaacgaccagtcagcctgcgatatgcggctttatcttcgcaaccgggctatcaaactgttcggggaggtaaaaagttttgctgaaaccctgctcggtcttgctgaagaacataccgggacggtgatgccgggttttacccattaccaacctgccatgatcaccagttgggggcactggctctgtgcttatgttcaggggctttgcagggatctggaacggctcgtttttaccctcaggctggtcaaccgtaacccgttgggagccgctgccggattcggaagttcctggcccctcaaccgtgaattgaccaccgagttattggggtttgatcgtgtggaaagcaactcactggactgcatcgtttcccgttgggaaaacgaagcccagctggcccatgccttcagcatgttgatgaaccgcctcagcgtcatctcccaggacttgatcattctcagtctgccctacctgaagatggtccgcatcgatgacggattcgtcaccgggtcctcgatcatg

SEQ ID NO: 287785 - DNA, 424 bp, Unknown
  Bacterial polypeptide expressing nucleotide sequence isolated from the Sargasso Sea
agtaaagatttaccaggaagataaagaaccgactttcgatgcatattattcgattgatataattttaaatgttgctaatgaaatgataaagtctgtaaaaataaataaagaaaggatgtatcttgaggcaaataaaggatttacaactgcaacagatttagcggattggatggtaagaaaaattggtttatctttcagagatgcccattataaaactggtaaaattgtttcattggctgagaaagaaaaaaaaatgttgcatcaattaactttagatagtcttaagaaaatagaacctaaaattaataaagatgtatatgatataatattgccagagaagtcaatatttcataagaaatcatatgggggaacctctttaaaaacagttgttgaggcaataaaaagagccaaaaaaagaatatag

SEQ ID NO: 287786 - DNA, 819 bp, Unknown
  Bacterial polypeptide expressing nucleotide sequence isolated from the Sargasso Sea
gcaggtcattattatatggcatactatgagatgtttatgcgtgatactgaacgatttattgaaactagaggaagattaaataaaaatccacttggatcatgtgctatggctggaacttctttcaaaatagacagatttttaaccactaagaaacttggttttgataagccaacaaataattctatagacagtgtctctgacagagatttcgttatagacttcttatactctgcaagtacttgcgcaatgcatttatcaagaatagctgaagagattgttttatggtcttctaatttagtaaatttttgtgaaattaaagatgacatgatgtcaagttcatcaataatgcctcagaaaaaaaaccctgatgcagctgaattagttagagcaaaggcctcattaataaatagcaacttatcttctatgcttggaatcatgaaatcacttcctttatcatatagtaaagatttacaagaagataaaaaattagtttttgatagtagctctaatctccatatatctattaaagtcattactgagatcctaaaaagtttaaagttgaataaaaagaatttacatttatctgcagctcaaggcttctctaatgcaactgaactagctgattggctagtaaaaaatttaaaatattcatttagaaaagctcatacagtgacagctaaaatcgttaattttgctgaaaaaaattctcttaaacttgaagatctaactctagatcaatttagaaaatttgatgcaaaatttagtaacaaagtttttaaagatcttaacattaaaaatgcagttctaagtaaaacaagc

SEQ ID NO: 287787 - DNA, 253 bp, Unknown
  Bacterial polypeptide expressing nucleotide sequence isolated from the Sargasso Sea
aatgagtaaaaaattatggggtggaagatttagtaagtccactgataaaaaagttgaagaatttacatcctcaattggtgtcgataaaaaactttataaaaaagatattgatggttctattgcacatgtaaaaatgttaagaaaacaaaaaattataaaatcttctgatgccacaaaaattataaaaacactatcaaaaatcgagacacaaattgataaaggaaattttgtatatgaagaatcattagaagac

SEQ ID NO: 287788 - DNA, 426 bp, Unknown
  Bacterial polypeptide expressing nucleotide sequence isolated from the Sargasso Sea
aagattttcaagaagataaagaaccaatattcgatactgtagaaacaatatcttcttgccttaaagcaatgactattttaattaatgagggtattgaatttaatattaaaaatctatctgattctgtagaaaaagacttttctaatgctactgatttggcagatcacttagttggtaaaggtgttccttttaggaccgcctatcaagtggttggagaaatagttaaatattgcctagagagaaaaatgttatttaaaaatctcaagattgaagaatttaaaaaatttcatcctgaatttgatgagaatgtttttgtggatcttaaacctcttaatgtcgttaaatcaagaaatagcaagggtggtacaggttttgtgcaagtagcagaagaggtaaataattggcaaaaaaaattgttactttgaa

SEQ ID NO: 287789 - DNA, 679 bp, Unknown
  Bacterial polypeptide expressing nucleotide sequence isolated from the Sargasso Sea
cctgaaactatggatgaaaaaagataatgtattaatttcaaaaaaaataaaaagattgaaaaactctttagtgaagtctgcaaataaaaatattgaaatattgctaccagggcttacacactttcagtctgcacagcctatatctgctggccattattttatggcatactatgaaatgttttcaagagacactactaggtttagggactcattaaaaagacttgatgaaaatccactaggtgttggcgcactcgcaggaactaatttttctataaatcgaaacaaaactactaaaaccttaggcttcaaaaaacctacaagaaactctctagatacagtttcggacagagatttcgttattgatttcttatcaagtgcttcgttactttctatgcacctgtcaaggattgcggaagaagttgcgctttattcttcagatctaattaacttattcaaaattggtgatcaattaatgtctagctcatctataatgccgcaaaaaaagaatccagacggcgctgagcttataagagccaaagcttctattgcaataggcaatctttcgtcaatgctaaatctaatgaagtcactgcctctgacttacagtaaagatcttcaagaagacaaattcttagttacatcaacgagtgagacgttgcatatttgtctagattgtatg

SEQ ID NO: 287790 - DNA, 636 bp, Unknown
  Bacterial polypeptide expressing nucleotide sequence isolated from the Sargasso Sea
gatggcggatgagatccttctgcctttcgacatttggaccaaccgcgcccattgcatcatgctggaacaatgcgggctgatccaaggcacgcatctgaccagcatcctgaacggattgcgggaactcgaagattcgatcgagaaaggaaccttcaggctgaaaccagagttggaagacgttcataccaacgttgaggtatttgtcagcgaagcccagggagcggaagaaggaggacggatgcacatcggcagaagccgtaacgaccagtcagcctgcgatatgcggctttatcttcgcaaccgggctatcaaactgttcggagaggtaaaaaattttgccgaaaccctgctcggtctcgctgaagaacatagcgggacggtgatgccgggttttacccattaccaacctgccatgatcaccagttgggggcactggctctgtgcttatgttcaagggctttgcagggatctggaacggctcggttttactctcaggctggtcaatcgtaacccgttgggagcggctgccggattcggaagttcctggcccctcaaccgtgaattgaccacagaattattggggtttgatcgtgtggaaagcaactcgctggactgcatcgtttcccgatgggaaaa

SEQ ID NO: 287791 - DNA, 358 bp, Unknown
  Bacterial polypeptide expressing nucleotide sequence isolated from the Sargasso Sea
gtttcaataatgccacaaaaaaagaatcctgatgtgttggagctcataagagcaaattatcatattgtcaatggatatggagttcaagtcaaatccctatcagcgaatttgatctctggctataatagggatcttcagctagcaaaaaaaccagtcatcaattcattaaatattactaaaacatcgttggatatgatgacttatatcatagcaaacttgactgccagtaaagaaaattgtttaaatgacttaactgaagatttatttgcaactgatgaagtttataatcttgtcaatgaaggaatcccttttagagatgcataccgaacaattgctaaaaaactttctggtaaataaa

SEQ ID NO: 287792 - DNA, 481 bp, Unknown
  Bacterial polypeptide expressing nucleotide sequence isolated from the Sargasso Sea
atggcaaaagtttggagtaaaagattcgataatacacttgaccctttcattgaaaagtttaatgcttctattggttttgatagaaagcttattttagaagatttagattgctctattgcccatgcaaaaatgctgggtaaaacaaaagttttatccccttctgaaactttgcagattattaatggtttagagaaaataaaagttgagtatttggagggtaaattttctcctgggcccccttctgaagatattcactattgtattgaagaaaaattaattactttaattggtgatactggaaaaaaattacatacaggtagaagtagaaatgatcaagttggtacagatataagattgtggcttagaaaagagattgataatcttgaaattttaataattgatttgcaaaaatccttcttaaatcttgctaaatctaatatttatacactaattcctggatatactcacagcaaagagcaca

SEQ ID NO: 287793 - DNA, 724 bp, Unknown
  Bacterial polypeptide expressing nucleotide sequence isolated from the Sargasso Sea
atggcggatgagatccttctccctttcgacatttggaccaaccgtgcccattgcatcatgctggaacaatgcgggctgatccaaggcacgcatctgaccggcatcctgaacggattgcgggaactcgaagattcgatcgagaaaggaaccttcaggctgaaaccggagctggaagacgttcataccaacgttgaggtatttgtcagcgaagtccagggagcggaagcaggaggacggatgcacatcggcagaagccgtaacgaccagtcagcctgcgatatgcggctttatcttcgcaaccgggctatcgggctcttcggagaggtaaaaagttttgctgaaaccctgctcggtctcgctgaagaacatactgggacggtgatgccgggttttacccattaccaacctgccatgatcaccagttgggggcactggctctgtgcttatgtacaggggctttgcagggatctggaacggctcgattttacgatcaggctggtcaatcgtaaccctttgggagcggctgccggattcggaagttcctggcctctcaaccgagaactgaccaccgagttattggggtttgatcgtgttgaaagcaactcgctggactgcatcgtttcccgttgggaaaatgaagcccagctggcccatgccttcagcatgctgatgaaccgcctcagcgtcatctcccaggacctgatcattctcagtctgccctacc

SEQ ID NO: 287794 - DNA, 541 bp, Unknown
  Bacterial polypeptide expressing nucleotide sequence isolated from the Sargasso Sea
catgaaactttgggataaaggatttaacgttgacaaagcaatagaaaactttactattggaaacgatacagaactcgacatgtatttagctccttttgatgtattgggtaatattgcacacattacaatgcttacggaagtaggtttattggaccaatcggagttaccgactttaaaaaaagaattggccaaaatttatgcatcaactcaggatggatctttccaaattgaaaaaggtatggaagatgtgcactctcaagtagaatctattttaacggataaacttggtgatgtaggaaaaaaaatacacagcgctcgatcaagaaacgaccaagttttagttgatttaaaactatacggaagaaatgaattgatagaaatagccgctcttactaaacagctatttgatgcttttcaagaacaaagtgagacaaataaagatgtattactgcctgggtatacgcatttacaagtcgctatgccttcatcatttggattgtggtttggtgctcatgcagaatcacttgcagatgacatggac

SEQ ID NO: 287795 - DNA, 517 bp, Unknown
  Bacterial polypeptide expressing nucleotide sequence isolated from the Sargasso Sea
gatgaatacttcagaagaaaaatataaacaagagattggaaaacaacaactatgggcaagccgattcaaaaaaagcacagctcctgtaagtaagcaatacaccgattcaactgttattgatagacatatgttttatcaaaatatttggggaagtgaagcacataccatcatgttagccgactgtggagttataacagatgatcatgcaaaaaacattttatcagcgcttcaatcagtaaaagaggatttcaccaatggcgattgggacctaaaattatctgaagaagatgttcagatgaacgtcgaacgttatgttatcgataaagtaggtattgaaaatggtggaagaatgcacacaacaaggtctcgaaacgatcaagttgtattagatacaaaactatatactagagatcaattaagaaacgttcaagaaaaactagctaaactcatcaatacactcttagaacaatcaaaagatcacactgaaacactcgctcccaggatacactcatacaca

SEQ ID NO: 287796 - DNA, 355 bp, Unknown
  Bacterial polypeptide expressing nucleotide sequence isolated from the Sargasso Sea
catggcaaaaaataaaaacaaccagacaatatggagtaccagaattaaaggtaactcttcctcaatttttcaacaagttggaagttctattgatattgataaaaggctttataaagaggatattgctgcctctattgcacatgtagaaatgctgtttaaacaaaagataatttctttcaaagttaaaaataagataatttttggacttaacaaaatagaaaaagaaattttttataaaaaatttgaatttaacaaaaaatatgaagatattcatatgaatattgaaaaaagactttttcaaataataggtgaagaagcaggctatgttcatactggaagatctagaaatgatcaa

SEQ ID NO: 287797 - DNA, 422 bp, Unknown
  Bacterial polypeptide expressing nucleotide sequence isolated from the Sargasso Sea
caaagatcttcaagatgataaagaaattatttttaaatcatatgacgttctttttcaaaatttaaaaatatttaatgaaattcttaagaatataaatcctaataaaaaaagaatgcttgagttagcatactctggttacattactgcaacagatttagcagattatctagttaagaataattcaatgtcttttagaaaagcttaccaaaaaacagctttgctagtgaatttagctgaaaagaaaaagaaaaaactaaatgagttatccttggaagatttaaaaaagatagaaccaacattaacaaaagatgtgctaaaagtgtttgatttaaagaattctgtcaattccaaaaaatcttatggtggaacatcttttgataatatcaaaaagatgataaggaaatatagaaaattaagatgat

SEQ ID NO: 287798 - DNA, 544 bp, Unknown
  Bacterial polypeptide expressing nucleotide sequence isolated from the Sargasso Sea
tatggcaaaagtttggagtaaaaggtttgaaaatgcacttgatccttttattgaaaagtttaatgcctcaattagttttgatagaaagcttattatagaagacttagattgctcgattgctcatgcgaaaatgcttggcaaaactcaagttttatcctcttctgaagctttaaaaattattaatggtctagagtcaataaaagttgcgtatttggagggtaaattctctcctagtccaccttctgaagatattcattattgtatagaagaaaaattgataagtttaattggtgaaactggaaaaaaattacatacaggaagaagtagaaatgatcaagttggaacagatataagaatgtggctgagaaaggagattgacaatattgaaattttaataaccgatttgcaaaaatccttcttaaatcttgcgaaatcaaatatctataccttaattcctggatatacccacatgcaaagagctcaaccattatctttggctcatcatttattgggcttatatagaaatgctccaaagagaccgtga

SEQ ID NO: 287799 - DNA, 385 bp, Unknown
  Bacterial polypeptide expressing nucleotide sequence isolated from the Sargasso Sea
atggctaagctctgggataaaggtattcaatttgataaaaaaatagaatcatttacggtaggcaacgatcatcagttggataatattttgataccgtacgattgcaaagcttctattgctcatgcgaagatgttagctaaaatgggatacatcaataaaaaggaactagttaaaatatctaaaatcttaaacgaaataatagctcttcataaaaaaggtaaattccttattaaagtatctcaagaagattgtcataccgcaattgaagaatatcttgtgaataaaattggcgatgcaggtaaaaaaattcacacagcccgatcgcgcaatgatcaagccctaactgctctaaggctttattacaaagaagaattattaatagtaa

SEQ ID NO: 287800 - DNA, 455 bp, Unknown
  Bacterial polypeptide expressing nucleotide sequence isolated from the Sargasso Sea
tatggcaaaagtgtggagtaaaaggtttgataatgcacttgacccttttattgaaaagtttaatgcctcaattggttttgatagaaagcttatcttagaagatttagattgctcgattgctcatgcaaaaatgcttggaaaaacaaaagttttatcctcttctgaagctttgcaaattattaatggtttagagttaataaaagctgagtatctagagggtaaattttctccaagtccgccttctgaagatattcattattgcatagaagaaaagctgataagtttaattggtgaaactgggaaaaaattacataccggcagaagtagaaatgatcaagttggtacagatataagattgtggctaagaaaagagattgataatattgaaattttaataaccgatttgcaaaaatccttcttaaatcttgcgaaatcgaatgtttataccttaattc

SEQ ID NO: 287801 - DNA, 302 bp, Unknown
  Bacterial polypeptide expressing nucleotide sequence isolated from the Sargasso Sea
aatgaaaaagaatccatcaagaaatgtccatttttctgaaggaccaagtgatcttttagatacaatcaatacatctatcgatattgatcagcgtctctataaagaggatattatgggctcaatagctcatgcaaaaatgcttggtaaacaaaaaataatttctaaaaaggaacaggctgctatagtctcaggactgaaagcaattcaaaaagatattgaaaaaaataaagtagttttttcaaaaaaactagaggatattcatatgaatatagaaagtttattgtttaaaagattgggaaagt

SEQ ID NO: 287802 - DNA, 430 bp, Unknown
  Bacterial polypeptide expressing nucleotide sequence isolated from the Sargasso Sea
atgaaaaagaacaatactgataaagctttttctaagaagttagtaagcgactttagtgtatctttagatttagataaaaggctttataaagaagatattcagctttctattgcctacagtaaagcattaagaaagatagatatattgtcttatagtgaacaaaaaagtatagaaaaggcacttaaaaaaatatatcaagagataaaaaaagataaatttgaatggaggatggatttagaagatattcatatgaatattgagagtagattgcatgatatggttggtccatttgcaggtaaaattcattcaggaaaatctagaaatgatcaggtttcaaccattgaaagaatgtatgtaaaaaatgccatcaatgagtcattaataaaaattgaaaatcttcaaaaagaaattgttttaaaggctgaaaaaa

SEQ ID NO: 287803 - DNA, 451 bp, Unknown
  Bacterial polypeptide expressing nucleotide sequence isolated from the Sargasso Sea
atattgaaaggattgcctctttcgtacttcaaagaccttcaagatgataaggaaattatttttaaatcctatgatgtactctttgaaagtttaaagatatttaatgaaattcttaaaaatataagtcccaataaaaaaagaatgcttgatttagcacactcaggatatatcactgcaacagatttagccgattatcttgttaaaaataattcaatgtcttttcgaaaagcttaccaaaaaacagctttattagtgaatttagctgaaaaaaaaaagaaaaaactaaacgaattatccttgggtgacttaaaaaaaatagaacctacattgacaaacgatgtactaaaagtctttgatttaaagaattctgtaaattccaaaaaatcttatggtggaacatcttttgataatatcaaaaagatgataaaaaaatatagaaaattaaaatgat

SEQ ID NO: 287804 - DNA, 288 bp, Unknown
  Bacterial polypeptide expressing nucleotide sequence isolated from the Sargasso Sea
gatgaaaaaaaacccatccagaaatacccacttaaacagaggtccctctaaattacttgaggctattaatagctcaattgatgtagatcaaagaatgtacaaagaagatattgagggctcaatagctcatgctaaaatgctgggtagacaaaaaattatatccaaaaaagatgaagtaaaaatagtcaatggtcttaaagtaatattaacaaatattcaaaaaggtaaagtaaaattcaaaaaagagttggaagatattcatatgaatgttgagtccatactttttca

SEQ ID NO: 287805 - DNA, 550 bp, Unknown
  Bacterial polypeptide expressing nucleotide sequence isolated from the Sargasso Sea
ataatgccacaaaaaaagaatcctgatatgtgtgagttgttaaggggtaaagtaggaatagttaatggtaatttaatgaacttattaacaataatgaaagcacaacctttagcatacaatagagataatcaggaagataagcatccaatgttttcaactgttaagacagtaatagactcactagaaatttgtaatcttgttttaaaaaatatggtattgaataaaaaaaatgctatgcaagctgctgctagtggttattcaaatgcaacagatttagctgattatttaagtaaaaaaggcataccattcagagatgctcataaaattgttggagaaattgttaatttggccgaaatgaagaaaactagtttagaaaaattagatatgagagaaatgaaaaaagtatgtaataaaatttcaaaagaggtttatgatattttacatatagaaaattcagtcaatttaaagagtacttatggtagcacgtcaaagcaatctataaaaaaacagatatctttggcacataaacttcttaagaaaagagtatgaa

SEQ ID NO: 287806 - DNA, 577 bp, Unknown
  Bacterial polypeptide expressing nucleotide sequence isolated from the Sargasso Sea
ttacgaggaaagtctggaattatttatggtaatttgttctctatgcttacaattttaaaaagtctacctttatcttactacaaagatcttcaagacgataaggaaattgtttttaaatcgaatgatacactgcaaaattgtttaaaaatacttgatgagattcttaaaaattttacgccaaataaaaaacaaatgatagaattagctaacacaggatatttaactgcaactgatcttgcagattatctcgtaaaaaatcactcaatgccatttagaaaagcatacaaagtgactgctaatattgtgaactttgctgaaaaaaagaaaaaaaatctcgatcaattaacgctggctgaacttaaaaaaattgaaccaaaactatcaaatgatgtattaaaagtgtttgatttaaagaattctgtaaattctaagaaatcatatggtggaacatcttttgataatattaaaaaaatgatattgaaatataaaaaaaaaaatgaaaaaaaagattattttagcaataattgtattttctacattgatcgcttgtgggaaaaaaggagacccagtatataaa

SEQ ID NO: 287807 - DNA, 697 bp, Unknown
  Bacterial polypeptide expressing nucleotide sequence isolated from the Sargasso Sea
atcagctgaattttcattcatagaactttctgacgattttacatctccatcaagtgtaatgccacaaaagaaaaatccagatattttagaactaacaagaggaaaaacatctcaagttataggttatctgacatccatcttaactactaccaaaggtttaccatctggatacggaagagatcttcaacaaataaaatcctcaatatggtcaacatcaaaaacatcaatcactgcattgatcatcataaaatcaatgttatctgatcttacagtaaatcaagaaaaaatgcaaaaagcaactgaagaaggatttcttattgccttggacctcgctgaaaatttagttcttgaaaaaataccatttcgtacagcacataacattgttggaaatctagtccaattagcacacaattcaaaaaaattacttactgatttggaattaaatgaaattgaatctcttcgaataaaagagatcaaaacaaacaaactttttgaattgattcaaaaaacgacaatttcttcatctcttaaacaaagaaagtcaaaaggttctgcaggaacctctgaacagacacgaatgattggacagagaaccagaaagcttgtttctctcaaaaaatccgttaaaacccaaaatgataatgtgaaaaaatcactagccgttttggaaaaacgtgttaaaacacttacaaaatag

SEQ ID NO: 287808 - DNA, 553 bp, Unknown
  Bacterial polypeptide expressing nucleotide sequence isolated from the Sargasso Sea
catgccacagaaaaaaaacccagatgtagctgaactaataaggggtaaaactggcggcgtttatggcaatctcatgggtttgttgacacttatgaaaggccttcccttgacatacaatagagatatgcaagaagataaaagcttgatattagactctatagatacctcgttaagctgtttatgcttgttaccaagaatgatagctacaatgactcttaataaaaaaaaatcagcacaaatcgctgccagttctttttctaccgctactgatattgcagaatacttgtcaaaaaaaggcatgccttttagaacatctcatcatgtagttggtgacatagtaaaattctgtgaaaaaaatgataagcaactagtagatttatccatagatgagctccaggctttttctaaattaatagataaggacatttttaaaattctagatcctacaacatgcattcaatcaagaactgggaagggcgaaacatcatcagcctcagtattaagagaatcaaaggccaccctaaaacgtttaaaaaagtatggttttaaataa

SEQ ID NO: 287809 - DNA, 251 bp, Unknown
  Bacterial polypeptide expressing nucleotide sequence isolated from the Sargasso Sea
aatgaaaaaaaatccttcaagaaatgtccatttttcaaaaggacctagtgagattttagatgcaattaatacgtctatagatatcgatcaacgtctgtataaagaagatataactgggtcaatagcgcatgctagaatgctcggtaaacaaaaaataataaataaaaaagaacaaagtgcaatagtctctggacttaaagcaattgaaagagatattaaaaaaaacaaggtcgtattttcaaaaaactcga

SEQ ID NO: 287810 - DNA, 814 bp, Unknown
  Bacterial polypeptide expressing nucleotide sequence isolated from the Sargasso Sea
ctgtggggtggacggttcgaagaaggaatggctcgggagatggtgccgttcaacctgagcctaggtgtagataaacggctgtggcgagaagatattcggggcagcgtggcctgggcgcgagcaataggaaaggcaggagttcttacagataaagaagtcgatgacatagtaggtggactcgacaaggtggcccaacggatcgaggagcgcggactgtctgatgccgccgaagaagacattcactctgtcatcgagcgtatgcttggtgaggaggtcggtgaggtttctggaaagttgcatacaggtcgatcgcgcaatgatcagtcatcgacgggtgtgcgtctctatgggatgacggccgcagatcatgtaatagacctgctcgtcgaatatgctacggcacttcatggtttcgcggagtcggggcgagagatgattatgccgggctatacccaccttcagcaggcacagcccatccgagcggctcaatgggctctgagtcacctagtgcctgttttgagggacatagagcgaatgaaagcggcacgtgccgcggcatcagtgctccctctcgggtctggggcaattgcggggtgcccgttctcgatcgatagagaatcagtaagagctgagttggggttcgaccaaatcagcaaaaattctgtcgacgcagtgtcagaccgggactggatctgcgatttcctttacgcgggcgccatggtgggcgttcatctgtcacgtttgtctgaggacttggttctgttttcaagtgtcgagtttggttttatccgtatatctgacggttttagcactg

SEQ ID NO: 287811 - DNA, 798 bp, Unknown
  Bacterial polypeptide expressing nucleotide sequence isolated from the Sargasso Sea
ctttaggtgttgctgcattggcaggaacaaattttaacattgataggaactatacatcaaaaaaattaaaattcaaaaatccaacaaataattcaattgacactgtctcagatagagattttgtactagattttttgtattcagtatcagtatgttctatacatatttcaagactagctgaagaatttataatatggaattctgatgcttttggaatgctaaaacttaatgataaaattgttactggatcatctattatgcctcaaaaaaaaaatcctgatccattagaatacttaagaggcaaaacaggatatagttttggtaatttgttttcaatgttaactattttaaaaggattaccactttcttatttcaaagacttgcaagatgataaggaattagtattcaaatcatttgatcaaataaaaagttctattttaatactttcagaaatattaaaaaattttactccaaataaaaaaagaatgtatgaattagcaaatattggttttacaacttcaactgacttagcagattaccttgttaaattttacaatttgccttttagaaaagcataccaaataacttctaaaatagtaaattatgcagattcaaaaaaaataaatttaaatgaattaactttttcagagttaaaaaaaatagaacccatgcttaatgaggatgttttaaaagtattcaatttagaaaattcaataaaatctaaaaaatcatatggtggtacatcttttgaaaatgtaaagaaaatgataaaaaagtataaaagggaatcaaaatgaa

SEQ ID NO: 287812 - DNA, 433 bp, Unknown
  Bacterial polypeptide expressing nucleotide sequence isolated from the Sargasso Sea
aacaaagacatgcaagaagacaaagaaggcgctatcgatacggttaatcagtggcatatttgtttatgtattgccagcgaagtgcttgattcactgcagttaaacgaagagcgctgtcgtgttgcggcaacccaagggttctctaacgccactgaacttgccgattatttggtaggtaaaggtgtaccgtttagaacaggccacgatattgcaggacgagttgtgcttcaggccatcgacaaaggctgcgccattgaagatttaccactaagcgacatgcaggctatttgcgataaaattgaagacgacgtatacccggtattacagctagagtacggcgtgaatcaacgcaatatcttgggcggcaccagcaaagaaaccgtgacgaaagcactgtatcaagagctggaagacttggataagcaagggtagc

SEQ ID NO: 287813 - DNA, 847 bp, Unknown
  Bacterial polypeptide expressing nucleotide sequence isolated from the Sargasso Sea
cttttgctcttatcttatgtcttacatagagatgttaaatagagataaaaaaagattttcaaactgtctggaacttttatcagaaaatcctcttggtgtagcagcccttacaggaagttcatttaatataaatagagaaataacaacaaaaaaacttggtttcaaaaaaccaactgagaattcaatagatacagttggtgatagagattttgttttagaatttctatattgtgtcgctatgtgttcaattcatatatctaggatttgtgaagatttaataatatggaactcagatgaatttaactttattaaactttcagataatattgttactggttcttcaataatgcctcaaaaaaaaaatcctgatgcattagagtttttaagaggtaaaacaggtagtgcatttggaaacttatttgcgatgatgactattttaaagggtttaccatcatcatacttcaaagatttacaagatgataaagaattagtatttaaatcagacgaattaattacaaattcattaaatattttaaaagaagttttcaataacataagcgctaacaaagctaagatgttaaaatcggcagataccgggtttattttatcaactgacttggttgattacattgtaaaaaaaaataatttaccttttagaactgcatataatattactgcaaaaattgttaattatgctgaaaaaagaaagaaaaatattaaagaccttagtattgaagatttaaaaaaaattgaaccaagattgactcccgaagtttttgaatatttaaatcttaaaaattcagttaaatctaaaaaaacttatggaggaacttcttttgagatataa

SEQ ID NO: 287814 - DNA, 821 bp, Unknown
  Bacterial polypeptide expressing nucleotide sequence isolated from the Sargasso Sea
aaataattttagcagtctagaagaaaatccactggggtctggtgctatttctggaacatcatttaacattgatcgaaaattcacaactaaaaaattaggatttgaaaatcctacaggtaattctatagatacagtagcagacagagattttgtgttagattttctatatgcatcatcagtatgtgctatgcacatttctagaatatctgaagaatttataatttggaattccgatgcttttaaacttattacattaaatgataaaattgttacaggatcatcaataatgcctcaaaagaaaaatccagatgccttagaatatttgaggggtaaggttagtaattcatatggaaatttattttctatgtttacaattcttaaaggattaccgttatcttattttaaagaccttcaagatgataaaaaaattgtttttgatacatttgataatttatgtaactcaattaaagtattaaacgaggtgttaaaaaatttttcagtaaacaaaaatgaaatgctacttcttgcgggtaaaggttatattactgctactgatttagcggactacttcgttaaaaatctaaattactcatttagaaaatcttatcaattaaccgcaaagatagttaattattgtgaaaaaaataaaatagctttttcagatatatcaattgaacaaataaaaaaaattgaacctaaaataaaagatgatgtaattaaagtttttgatcttaaaaattcagtaaattcaaaaaaatcatatggtggaacctcttttgaaaacgttaagaaaatgataaaaaaatataaaaatgcttaaa

SEQ ID NO: 287815 - DNA, 829 bp, Unknown
  Bacterial polypeptide expressing nucleotide sequence isolated from the Sargasso Sea
atgaaaaataaaactgtttgggcaaatagacttaaaagaaagacatcaccttcttttcaaaaaataggctcatctattggtgtagataaaagactgtatgagcaggatatagctgcgtctattgttcatgctaaaatgctcattaaacaaaagataattaacggcaaagaaggatctaaaattatcaatggtcttaaaaaaattaaatcgcaaattgataaaggaaagtttaaatttcaagaaaaatttgaagatatacatttgaatgtagaaaaaaaattatttgaattaataggtcctccagcgggctctttacacacggctagatcaagaaacgaccaagttgttactgatttcaaattatggattaaaaaattttcaaaagaaactattagtaacattaattctttaatgaagattttaatcaaaaaagcagagagaaatgttgatactgtaatgcctggtttaacacatctaaaaaatgctcaacctatttcttttgcacattatcttctgtcttactttgaaatgtttaaaagagatataaaaagatttaaaaataatattaatcttttagatgagtgcccattaggttcagccgcactagctggcacttcttataagatagatagaaattatacttcaagacttctcggttttaagaaaccaactgataattcaatagactcggtcgctgacagagattttgcagttgattttttatatgcctctgctttatgtgcaatgcatttatctagattagctgaagattttataatttttaattcaaacgcatttaatttgatctcatttgatgacagtatgttaa

SEQ ID NO: 287816 - DNA, 580 bp, Unknown
  Bacterial polypeptide expressing nucleotide sequence isolated from the Sargasso Sea
atgggtaaaaataataacaatcagccaatttggaatactagaataaaaaaggaaaaaacaaaccttttcaaaaaagttggtggatcaataggaatcgataaaagattattcaaagaagatattgaagcttcaattatacatgttgagatgctgtttagacaaaaaattataaattttaaaattaaaaataaaatagtatggggtttgaatagaattaagaatgagattataaaaaaaaaatttatttttgatgaaaagcttgaagacattcatatgaatatagaacacagactttttgaactaattggggaggatgctggttatattcacacagcaagatcaagaaatgatcaagtgattacagattttaaaatttggttaagaaaagctaataaagagattgttaaaaaccttgatgtaacaattaaaaatattttaaaaaaagcagaaaaaaatgttgaaacaattatgcctggtttcacacaccttaaaaatgctcaaccagtttcttttgcccattacttaatggcatacttagaaatgtttaacagagataaaaaaagattgaaaacaatttaga

SEQ ID NO: 287817 - DNA, 676 bp, Unknown
  Bacterial polypeptide expressing nucleotide sequence isolated from the Sargasso Sea
catgacaaaaaataaaaacaaccaggcaatatggaatactcgtataaaacagaatgtatccagcttatttcaaaaggttggtaattcaatagatatcgataaaagactttttaaagaagatataaagggatcaattgctcatgttgaaatgctttttaaacaaaaaataatttcgtttaaaataaaaaataaaattatttatggcttaaacaaaatagataaagaaattacaaaaaataaatttatatttaataaaaaatatgaagatattcatatgaatattgaaaaaagactttttcaaattattggtgaagaggctggatatgttcatactgccagatcgagaaatgatcaagtaattacagattttaagatttggatcaaagaagctactaaggaaataaatactaatattgataaaataataaaaaatacaattaaattagctgaaaaaaatgtagaaactattatgccaggttttacacatttaaaaaatgcacaggctatctctttcgcgcactatctaatgtcatatgttgaaatgttcaatagagataaaaaaagatttttaaataacttagataatttagatgaaaatcctttaggggttgctgcacttgctggtacatcatttaatattgatagaaattatacaacaaaaaaaacttggttttaa

SEQ ID NO: 287818 - DNA, 865 bp, Unknown
  Bacterial polypeptide expressing nucleotide sequence isolated from the Sargasso Sea
tattatgaaatgttaaaaagagacaagaaaagatttgaaaataatattgatcttctagatgaatgcccactgggctcagcagctttatcaggcacctcttataaaatagatagaaaatatacagcaaaaaaacttggttttaaaaaaccaactgaaaattcaattgactcagtttcagatagagattttgcaatcgattttttatattcctcagctatatgtgcaatgcatttatctagattagcggaagattttataatttttaattcagatgcttttaatttaataaattttaatgacagtatgttaactggttcatctatcatgcctcaaaaaaagaatcctgatcctgctgagttaatcagaggaagagttggggtcaattatggaaaattaaattctatgcttacaataatgaaaggtcttcctacatcatattttaaagatctacaggatgacaaaatattagtatttgatggttatgatacattaaaagatagtttaattatgagtgaagaattaataaatgctgttaaacccttaaaagataaaatgttaaaaatggcaaataaaggttttactacagcaactgattttgcagactatcttgctaaagaaaaaaatctaagttttagagagtcttatagtctatctgcaaagctagttaatttagctgaaaaaaataataaaactttggatcaattgtctttagtagatattaaaaaaatatacaaagatgtagacaaaaatgttcttaaaatacttaacgtaaaaaattctatgaattcaaaaaaatcttatggcggcacagcttcaaataacgtggcaatgatgataaaaaaatataaaaaggagataaaatgaa

SEQ ID NO: 287819 - DNA, 490 bp, Unknown
  Bacterial polypeptide expressing nucleotide sequence isolated from the Sargasso Sea
catgtcaaaaaataaaaacaataaagctatttggagcactagaataagaaaaaatactatctcaacatttaaaaaagttgggagttctattaatatagataaaagattatataaagaagacatacagagttctatagttcatactgagatgctttttaaacaaaaaattatctcatttaaaattaaaaataaaattatttggggtttaaataaaatacaaaaagaaattttaaaggggaaatttaaatttagaaatgatttagaggatattcatatgaatatagaaaatagactacatgaaataataggtgaagatgctggatttgttcatacaggtagatcaagaaatgatcaagtagtaacagatcttaagatttggatgaaaaattcaaccataaatctaattaaacttttagaaaatcttaataaagtttttttaaaagtagcaaagaaaaacatagagacaattatgccaggttttactcattaa

SEQ ID NO: 287820 - DNA, 634 bp, Unknown
  Bacterial polypeptide expressing nucleotide sequence isolated from the Sargasso Sea
atgtcccagcccaccgaccgcctttggggcgctcgtttcaagaccggtccgtctgcggcgttggccgcgttgtcgcgttgccctgagcgctattttcgcctgacgccctacgacctggccggctcctgcgcccatgcccgtgagttgcagcgcgctgggttgctggatgagtcggagactttgcgtaccctcgaggccctggaccgcatcggtgaggattttgccgccgggcgcctgcatcccaccctggatgacgaggacgtacacacctttatcgaacgcgtattgaccgagcgcctgggcgccctgggcggcaagttgcgtgccggacgctcgcgcaatgaccagacggccaatgatctgcgcctgttcctgcgcgaccatgcgcgcaccatcgccaacgaggtgctgggtttgcagcaggcgctggttgagcaggccgagcaacatgtgcagagcatctgcccgggcttcacccatttgcagcaggcgcaacccattgtgtttgcccatcacttgctggcccacgcgcagtcgatgctgcgcgatgtgcagcgcctggtggattgggatgcgcgtacggccctgtcgccgttgggcgcggccgctatggcaggttcggcgatagcgcgtc

SEQ ID NO: 287821 - DNA, 583 bp, Unknown
  Bacterial polypeptide expressing nucleotide sequence isolated from the Sargasso Sea
ttcatcaacttgcctgatgagctcgcaacaggtagctccattatgcctcagaaaaaaaatcctgatggagctgaattggtcagaggcaaagcaagtggtattattagtaatttaaatagtttactagttatactaaaaggtcttccattagcttatagtaaagacctacaagatgataagagaatagtttttgcagcttttgatgatatttccttaacgctagaagtaatgacagaaatttggtcaaaaattagttttaatacagatattatggcttctgcagtcaagaattctaatgctactgcaacagattttgcaaattggttagtccaacatctagaattgtcttttagagaagcttatcaattgactggaagaatagtagcctatgctaataaaaacaataagaaacttcatcaattgagtttacaagaattacaaaaatttaataaaaaaattactgaaaacgccagaaaaactctttcaattcatgaaagcataaaaaataaaaaaagttttggaggaacatcaccacaaagggttaaacaatcaattaaatatgctataaaaaaatatctttgat

SEQ ID NO: 287822 - DNA, 589 bp, Unknown
  Bacterial polypeptide expressing nucleotide sequence isolated from the Sargasso Sea
tttagttttattgagtttaaagataaagttttgacaggttcttcgattatgcctcaaaaaaagaatcctgatcctgctgaattaataagaggaagaacggctattaattatggtaatttaaactctatgttaactataatgaaaggattaccaatatcgtattataaagatcttcaagatgataaagaattggtttttgatagctacgatacacttaaagacagtttaatgatggctattgaacttatccaaaatttaaatacaaaaaaaaataatatgagagatatggcacagaaaggatatacaaccgctactgattttgctgattttctctctatgaaaaaaaatttaccttttagaaaaggctatagtatttcatcaaaattggttaattatgctgaaaaaaagaaaattaggttggatcaactttctagaggtgaaataaataaatttgttaaagaggttaacataaatatacctaaaatgtttgatgttgtgaactctatgaattcaaaaacatcttttggcggaacatccgcaaagaatgttaagagaatgattgcaaaatataaaaaagaactgaaatgaa

SEQ ID NO: 287823 - DNA, 568 bp, Unknown
  Bacterial polypeptide expressing nucleotide sequence isolated from the Sargasso Sea
atggataaaaagaataccagttggggaggaagatttactcaatcggtatctgcactagctagtagattttctaactctattgatgttgattctgttcttgcagaaaaagatatcgttggttctattgcatatgcagagtctttgcaagaagcaggagttattaataaatcagagctcatcaagattaaacgcggtcttaatcaaataaaaagagaattagaaactggaaaatttaaatggaatccttcgcttgaagatgttcatatgaatatcgagtcagccctagaaaagaaaattggagattctgcaaaaaaattacacaccggcagatcaagaaatgatcaggtcgtcacagatctaaagctttttcttaaagatgaaaccaaagctattgagaaaaaaattaaagacctacaaaaaaatattttaaataaagctcaaaaacattatgcagatctcatgccgggctttactcatcttcaaatagctcagccggtaaccattggccatcatttgcttgcttactttgaaatgttgcaaagagactctattagattgcaaacaacga

SEQ ID NO: 287824 - DNA, 425 bp, Unknown
  Bacterial polypeptide expressing nucleotide sequence isolated from the Sargasso Sea
catgggaaaaaataaaaacaactatgcagtttggagcacccgtatcaagaaacaaacttctaataattttaaaaaagtagggtcctcaataaacatcgataaacgattgtacaaagaggatatcaggggttctatggttcatacagatatgctttataaacaaaaaattatttctcttaaagttaaagaaaaaattttatggggtttaaacagaattaaaaatgagattgataaaaaaaaatttaaattcgatatttctaaagaggacattcatatgaatattgaaagtagattatttgaattaataggtgatgatgctggttttttgcacacagcaagatcaagaaacgaccaggttttaacagatcttaagatttggatgaagagctctgttagtgaaattgacaagttattaactaaaataa

SEQ ID NO: 287825 - DNA, 604 bp, Unknown
  Bacterial polypeptide expressing nucleotide sequence isolated from the Sargasso Sea
tggtcaaatcaacaatttaattttataaatttaccagatgatctttcaactggtagttcaattatgcctcagaaaaaaaatcctgatggtgcagaacttgtaagaggaaaaacaagtattatcattagtaatttaaattcaatgattaatattattagaggattaccactttcttatagtaaagatttacaagacgataagcaaataacatttaattcttacgacaatgttttcttgtgtattaaagttattaatgaaattttatcaaaatctacattcaacaaaactagaatgaaagagttgattgaaaattcaaatgcaactgctacagatttagctaattggctagtacaaagtcttagatattcatttagagatgcttataatattacaggaaagattgtttctttttgttcaaagcaaaatgtaaatatagattctttatctcttgatgaattaaaaaaatttgacaaaaatataacagctgatgcaaaaaaagtgctatcagctaccaatagtgtgaaatcaaaatcaagttttgggggtacagctcctgaaattactaataaaatgataaaacttgctataaaaaaatacttataat

SEQ ID NO: 287826 - DNA, 532 bp, Unknown
  Bacterial polypeptide expressing nucleotide sequence isolated from the Sargasso Sea
atgagtaaaaataaaaacaaacaaacaatatggaatgcaagaattaaaggtaatacctctaaattattcgagaaagttggaagttctatagatatagataaaaaactttataaagaagacatagcctgttcaattgtccatgttgaaatgttatttagacaaaagataatttcatttcagataaaaaataaaattatttatggtttaaataaaatagaaaaagaaattattaaaaataaatttcaatatcaaaaaaaatatgaagatattcatatgaatattgaaaaaagattatttgaaataattggtgatgatgccggatatgtacatactgcaagatcaagaaacgatcaaattataacagattttaaaaaatggttaataaaatcgacaaatgaaactaataaaaatttagataatattattaaaacaatcttaaaagttgctgaaaaaaatatagaaacaataatgccaggattcacccatttaaaaaacgcccaagcagtatcgtttgcacattacttaatggctt

SEQ ID NO: 287827 - DNA, 856 bp, Unknown
  Bacterial polypeptide expressing nucleotide sequence isolated from the Sargasso Sea
ttaacccagaaattaggggatttaggaaaaaaaattcacaccggaagatcaagaaacgatcaggtattagtagctatgcatctgttcgtaaaaaaagaattgagcgaaattaaaactcaagtaattgaactttttgaactcttacttttattagcggaaaagcacaaagaagatttaattccaggttacacacatttgcaagttgcgatgccatcctcttttggtttatggttttcagcctatgcagaaagtttaatagacgatctttacttttggcaaagcgcattcaaaattgcagatcaaaatccgctaggaagtgctgcaggatatggaagctcctttcctattgatcgtaattttacaacaaacattttacaatttgcacaactcaaagtgaattccgtagcagcacaaatgagcagaggaaagctagaaaaaagtactgcaatggctttatcggctattggcagtacactctctaaatttagtatggatatctgtctttatatgggacaagattttaaatttatttcttttcctgataatctaactacgggatccagtattatgcctcataaaaaaaatccagatctctttgaattagttagggggaagtgcaatgtgattcaaggcctaccaaatcttttatcgctattaacaactaatcttccaagtggatatcatagggagctgcagctatgtaaaggaccaataattgaatcgatacaggaaatgaaagcgtgtttagagatactactgtttagcttacctagtataaaagtaagtaagaatattactgatgataaaaagtatgactacctttttagtgtcgatacactaaatcaggatgtattag

SEQ ID NO: 287828 - DNA, 472 bp, Unknown
  Bacterial polypeptide expressing nucleotide sequence isolated from the Sargasso Sea
tgctcgattgctcatgcgaaaatgcttgccaaaacaaaagttttatcctctgctgaagctttgcaaataattaatggtttagagttaataaaagttgagtacttggagggtaaattttctcctagtctaccttctgaagatatccattattgcatagaagaaaagctaataagtttaattggtgaaactggaaaaaaattacacacaggtagaagtagaaatgatcaagttggtacagatataagattgtggttaagaaaagagattgacaatattgaaattttaataatcgagctacaaaaatcctttttaaatcttgctaaatccaatatttatactttaattcctggatatacccatatgcaaagagctcaaccattatctttggctcatcatttattggcttatatagagatgctcaaaagagacagtgaaaggtataaagaagtacgctcgagagtgaatattctcc

SEQ ID NO: 287829 - DNA, 490 bp, Unknown
  Bacterial polypeptide expressing nucleotide sequence isolated from the Sargasso Sea
atgagtaaaaataaaaacaatctgccaatttggaatactaggataaaaaaaaattcgaataatctttttaaaaaagtaggtggatcactatcgatagataaaagattatttaaagaagatattgaggcatcaattgtgcatgttgatatgttgtttagacaaaagattataaattttaaagttaaaaataaaattgtatggggtttaaatagaattaaaaatgaaattattaaaaaaaaatttatctttaatgacaaactcgaagatattcatatgaatatagagcatagactttttgaattgattggagatgatgcgggatatatacacaccgcaagatcaagaaatgatcaagtagtcacggattttaaaatttggctgaaaaaagcaaacagtgaaatattaaaaaatattgatgtaactattaaaaatattataaaaaaagctgaagctaatattgaaacaattatgcctggctttacacattaaa

SEQ ID NO: 287830 - DNA, 376 bp, Unknown
  Bacterial polypeptide expressing nucleotide sequence isolated from the Sargasso Sea
tctggatgtttaaaagctatgactattttactaaacgaaggaattgagtttaatgttgataagttaatggactctgtaaataatgatttttctaatgctactgatttagcagattatttagtagataagcaagttccttttagaaaggcatatcaaattgtaggagatattgttaagtattgcttaacaaaagatattttatttaaagatttaaaattagcagaatttcaaacatttcatagtgaatttaaagaggatatttttgaaaatcttaatcctgtaaatgtagttaagtttagaaacagcataggtggaacaggatttgatcaagtaaaagcagagttaaataaatggaagaataaattgttaatttaaa

SEQ ID NO: 287831 - DNA, 538 bp, Unknown
  Bacterial polypeptide expressing nucleotide sequence isolated from the Sargasso Sea
atgagaaaaaataaaaacaactatgcagtttggagttcacgtattaagaaacaaacatcaaataatttcaagaaaataggttcctccataaatatagataaacgattgtacagagaagatattaaaggttcaattgtacatacagaaatgctttacaagcaaaaaattatttcactcaaagtaaaagctaaaattttatggggtttgaatagaattaaaaatgaaatagagaagaaaaaattcaaatttgatatttcaaaagaagatattcatatgaatattgaaagtagattatttgaattaattggagatgatgctggatttttacataccgcaagatctagaaatgatcaggttttaacagatctaaaaatttggatgaaaaattctgtaaatgaaattgataaactcgtaattagagtaattaaaagcttaataaataatgcagagaagaatataaaaacagttttgccaggtttcacacacctgaaaaatgctcagcctatttcattagcgcattactttatgtcatgtgtcg

SEQ ID NO: 287832 - DNA, 445 bp, Unknown
  Bacterial polypeptide expressing nucleotide sequence isolated from the Sargasso Sea
catggcaaaaaataaaaacaaccaagcaatctggaccacgcggattaaaaaaaatacatcaagcttatttcaaaaagtcggtaattcaatagatattgataaaagactttataaagaagacattcagggatcaattgctcatgttgagatgctttttaaacaaaaaataatttcattcaaagtaaaaaataaaattatttatgggctaacaaaaattaataaggaaataacaaacaataaatttgagtttaataaaaaatatgaagatattcatatcaatatcgaaaagagactttttcaaattataggtgaagaagctggctacgttcacactgcaagatcaagaaatgatcaggtaattactgattttaaaatttggatgaaaaaatcaaccaacgaaataaataataacattaataaagttattaagagtacaatcaagtta

SEQ ID NO: 287833 - DNA, 616 bp, Unknown
  Bacterial polypeptide expressing nucleotide sequence isolated from the Sargasso Sea
gattttattatatttaattctgaagcttttaattttttaaaatttagcgataaagtacttactggctcgtcaataatgcctcaaaagaaaaaccctgacccagctgaattaattagaggtaaaacagctattaattatggaaaattaaattcgatgctaactattatgaaagggttaccaatttcttattataaggatttacaagatgataaagctcttgtgtttgacagttacgatactttaaaagatacgttgcttatggcaaatgaacttattttaaatcttaacgcaaataaaataaatatgaagcaaatggctcaaaagggttacactacagcgactgattttgcagattatttggtaaagaaaaataattttccttttagagaagcatatgtagcgtcttcaaaacttgtgaattatgcagagaaaaaaaaagtaaggttagatgaactttctttaaaggaaataaataaatttctaaaaggagtaaaagttgataatatcaaaatatttgatgtattgagttcaatgaactccaaaacatcttatgggggaacggcaaccaaaaatattaaaaatatgataagaaaatatagaaaagaactaaaatgaa

SEQ ID NO: 287834 - DNA, 559 bp, Unknown
  Bacterial polypeptide expressing nucleotide sequence isolated from the Sargasso Sea
atggtaaaaaataaaaacaaccaagcaatctggaacatacggataaaaaaaaatgcatcaagtttgtttcaaaaagtcggtaattcaatagatattgataaaagactctataaagaagacatccagggatcaattgctcatgttgaaatgctttttaaacaaaaaataatttcatttaaaataaaaaataaaattatttatggactaacaaaaattgataaggaaatctcaaaaaataaatttcagtttaataaaaaatatgaagatattcatatgaatatagaaaagagactctttcaaattataggtgaagaagctggctatgttcacactgcaagatcaagaaatgatcaagtaattactgattttaaaatttggatgaaaaattcaactaacgacataaataataatattaataaagttattaagagcacaatcaagatagctgaaaaaaatgttgagacaatcatgcctggatttactcatcttaagaatgctcaagctatctcttttgcacattatttaatgtcttatgtagaaatgtttaatagagacaaaa

SEQ ID NO: 287835 - DNA, 451 bp, Unknown
  Bacterial polypeptide expressing nucleotide sequence isolated from the Sargasso Sea
aagggggtaccactcttcatacaataaggattttcaagaagataaagagccaatattcgatactgcagaaacaatatcatcttgtcttaaagcaatgactattttaattaatgagggtattgaatttaatattaaaaatctttctcattctgtagaaaaagacttttctaatgctactgatttggcagattacctagttggtaaaaatgttccttttaggaccgcctatcaagttgttggagaaatagtcaaatattgcctagagagaaaaatgttatttaaaaatctcaagattgaagaatttaaaaaatttcatcctgaatttgatgaggatgtttttgttgatcttaaacctcttaatgtcgttaaatcaagaaatagcgagggtggcacaggttttgtgcaagtagcagaagaggtaaataattggcaaaaaaaattgttactttga

SEQ ID NO: 287836 - DNA, 841 bp, Unknown
  Bacterial polypeptide expressing nucleotide sequence isolated from the Sargasso Sea
tttgcacattatttattagcatattttgaaatgtttaaaagagataaagttagatttgctaataatttgaaaagcctaaatgaaaatcctttgggtgctgcagcttttgctggtacaaattttaatatcgatagattttttacaactaaaaaattgaaattcaagtatccaacaaataattcaatagatacggtttctgatagagatttcgttttagattttttatacaccgtttcaacatgttcggttcatatttcaagaattgctgaagaatttataatctggaattcagatgcatttaaattaattaaattaaatgacaagattgtaactggttcttctataatgcctcaaaaaaaaaatcctgatcctttggaatttttgagaggtaatagtgggtcaagttttgggaacttattttctatgcttacaattttaaaaggtttgccactgtcatatttcaaagatatgcaagatgataaaaaactagtgtttaattcttatgatttattaaaaaattcaattcaagttcttattgatattctaaataatttttctccaaataaaaaaagaatgttagaactagctaatgaaggatttatattgtctacagatttagcggactaccttgttcaaaaacataatttgccatttagaaaagcatatatggttactgcaaaaattgttaatttggcagaaactaaaaacttaaaactatacgaacttccaatgaaagaattaaaaaaaattgaaccaaatctagatgataacgtttttaaagttcttaatttaagaaactcaataaaatcgaaaaaatcatatggaggtacttcttttgaaa

SEQ ID NO: 287837 - DNA, 490 bp, Unknown
  Bacterial polypeptide expressing nucleotide sequence isolated from the Sargasso Sea
gaggaaggcgggtcggttactgggaaacctcactgggttcctggcgacccaaaaaggtcttcctctgacctacaacaaagacctacaagaggacaaagagccactgtttgatagttgcgacaccatccgactcaccacgatcgcgttgacgggcatgatcgaatctctgaagttcaacgggcactcaatgtccgctagcgccgattctcaagaaatcgccgcaactgacctagccgactttcttgtccagagaggcctcccgttcagagaagcacattcagtcatcgctggactcgtccgagaatctttagacagcgacgcggagttaactgatctagtgaacaaccacccagacctagggcccgaagcagcacagctgctgcaaccaggcgttggctgggcccgacgcaacagccatgggggaggtggaccggaagcggtcaccgaacagttagcagcgctgaaagctcacgtggaatctatttcgtga

SEQ ID NO: 287838 - DNA, 382 bp, Unknown
  Bacterial polypeptide expressing nucleotide sequence isolated from the Sargasso Sea
tatgaaaaataaaaataaagcagtttggggttcaagatttaataatcctacatcaaaaatttttgaaaagattggggcatcaatagatgtagataaaagactatttgaagaagatatttttgcctccattgttcatgcacaaatgctaattaaacaaaaaataatagataaaaaaaaaggcagaaaaataattaaaggattaaaaaaaataagaaatgaaatattaaaaaataaatttcaatttaataagaagtatgaggacatacatcttaatattgaaaaaagactttttgaaattattggagaagaagcaggatatttacatatagcaagatctagaaatgatcaagttataactgattttaaaatttggataaaaaaa

SEQ ID NO: 287839 - DNA, 724 bp, Unknown
  Bacterial polypeptide expressing nucleotide sequence isolated from the Sargasso Sea
aaaaaaccaactaataactcgatcgactcagtatcggatagagattttgctattgacttcttgtccgcagcagcaacttgtgcaatgcatctgtcaagattagcagaagactttattatttttaattctgaagcttttggatttttggaatttacagacaaagtcttaacgggctcttcaattatgccacaaaaaaaaaatccagatcctgctgaactgataaggggtagaacggccattaattatggaaacttaaattcgatgctgacaattatgaaaggtctgccaatatcttattataaagacttgcaggatgataaagaattggtttttgatagttacgacaccttaagagacagtttgtctatgtctattgagttaatggagaatttaattacaaaaaaaaataatatgaaagatatggctcagaaaggatatacaactgctactgattttgcagatttccttacaaagaaaaaaaatatgccctttagaaaaagttacacaatttcatcaaaattagttaattatgctgagagaaaaagaataagactagatcagctctctaaaaatgaaataaataagtttgttaaaaaaattgaaataaatatacctaagatttttgatgttgtaaattctatgaattcaaaaacctcatttggtggcacatcggcaaaaaatgttaaaaaaatgataaaaaaatataaaagtgaattaaaatgaa

SEQ ID NO: 287840 - DNA, 874 bp, Unknown
  Bacterial polypeptide expressing nucleotide sequence isolated from the Sargasso Sea
gatatttggaaaaaaaattcacactgcaaggtcaaggaatgatcaagtccttgtctcaattcagttatacctaatagatgaattaaattttataaaaacagaagtaaaatctttatttgatctattaattaatcttgccaagaaaaataaaaatattattatgcctggatatactcacatgagagctgcaatgccttcctcctttgggttgtggttttcagcttatgctgaaatattaattgatgatgttattagccttaatagttcaattgaaataattaatcagaatacattagggagtgctgctgggtatggaacatcttttaatattgacagagattttacaacaaatgatttaaattttaaaacattgaaatataattcactcgcatgtcagattagtagaaataaaattgaaaaaaatacattcgatactttgggaaatattgcctttactttatcaaaaatttctatggatatatgcttatattctggagatgagtttcattttatttcatttcctgaaaatattacaacagggtctagtataatgccacataaaaagaatcctgatgtttttgagattataagaggaaaatgtaatagtattcaaaatctatcaaattctgcatctttgtcatcaactaacctaccaagtggatatcatagggattttcagctaaataaaggtaaaattattaatgcagttaatgacataaaagaatgtatccaaattttatcttactgcttatctaaagttagtgtaaataaaaaaatactggaaaagtcaaattatgaaaatattttcagtgtagagttaataaacgagatggttttaaaggtataccttttagagatgcatatcttgaattaa

SEQ ID NO: 287841 - DNA, 453 bp, Unknown
  Bacterial polypeptide expressing nucleotide sequence isolated from the Sargasso Sea
catgtggggcggccgctacgccgccggaccggcagaaaccatggaacgtatcaatgcctccatcgatttcgatcgtcgtttctacgcgcaggacatcgccggctccaaggcgcattgccgaatgttgatagactgcgaaatcatctccgccgccgacggcgacgccatccttaccggattggactccgtccttaaagacatcgagacgggcaactttgaattcaagacctcactcgaggatatccacatgaacgtggaagcggcactggcggagaagatcggcgagccggcgggccgcctgcatacgggacgcagccggaacgatcaggtcgcgaccgatttccgactgtgggtgcgcgatgccatcgacgcgtttgaccgtcaattgcaggatctgcaacgggcgcttatcgagaaagcggaagaaaatgtggataccgttttgccggggta

SEQ ID NO: 287842 - DNA, 640 bp, Unknown
  Bacterial polypeptide expressing nucleotide sequence isolated from the Sargasso Sea
tatgcacctgtcaagattagctgaagattttattatttttaattctgaagcttttagttttgtagagtttagagataaagttttgacaggctcttctatcatgcctcaaaaaaaaaatcctgacccagctgaattgataagaggaagaacggctattaattatggtaatttaaattctatgttaacaatcatgaaagggctgccgatatcttattacaaagatttacaggatgataaagaattggttttcgacagctatgatacacttaaagacagcttaatgatggctgttgagcttatacaaaatttaaatacaaaaaaaaataatatgaaaaatatggcgcaaaaagggtatacaacagcaactgatttttctgattttctttcaatgaaaaaaaagctaccttttagaaaaggttataatatttcatcaaaattagttaattatgccgagaagaagaaaattagattggatcaactttctaaaagtgaaataaataagtttgttaaagatgttgatataaatatacccaaaatgtttgatgttgtgaactctatgaattcaaaaaaatcttttggtggaacatccgcaaaaaatgttaaaagaatgattgtaaaacatagaaaagacctaaaatga

SEQ ID NO: 287843 - DNA, 709 bp, Unknown
  Bacterial polypeptide expressing nucleotide sequence isolated from the Sargasso Sea
tttaaataatattgagttaattaatgaatgtcctttaggatctgcagcattagctggaacatcttacaagatagatagacaatttactgcgaggaaacttggttttaaaaaacctactggcaattctattgatgcggtttgtgatagagattttgtaatagattttttatcagcagcagctacatgtgcaatgcatatgtcaagattagctgaagactttattatatttaattctgaagcttttaattttttaaaattcagcgataatgtactaactggttcatcaataatgcctcaaaagaagaaccctgatcctgcagaattaattagaggtaaaactgctattaattatggaaaattaaactcgatgcttacaattatgaaagggttgccaatttcttattataaagatttacaagacgataaatctcttgtgtttgacagttacgacactttaaaagatacgttgcttatggcaaacgaacttattttgaaccttaatgcaaataaaataaatatgaaacaaatggctcaaaaaggttatacaacagcaactgattttgctgattacttagtaaagaaaaaaaactttgcatttagagaagcatatgtaacttcatctaaacttgtgaattatgccgagaaaaaaaaagtaagattagacgaactttctcttgaagaaataaataaatttttgaaaagagttaaa

SEQ ID NO: 287844 - DNA, 505 bp, Unknown
  Bacterial polypeptide expressing nucleotide sequence isolated from the Sargasso Sea
catgggcaaaaataaaaacaataaaccaatttggaacactagaattaaaaatgagtcaaaaaacctttttaaaaaggttggtggatcaatagaaattgataaaagattattcagagaagatattgaagcttcaattgtacatgttgagatgctgtttagacaaaaaattataaattttaaaattaagaataaaatagtatggggtttgaatagaataaagaacgaaattataaaaaaaaaatttatttttgatgacaaacttgaggatattcatatgaatatagaacacagactctttgaactaattggagaagacgcagggtatattcacactgcaagatcaagaaatgatcaggttgtcacagattttaaaatttggttaagaaatgctaataaagaaattgttaaaaacattgatattacaattaacaatattttaaaaaaagcggaaaaaaatattgaaacaattatgccaggtttcacacacctgaaaaatgcacaacca

SEQ ID NO: 287845 - DNA, 595 bp, Unknown
  Bacterial polypeptide expressing nucleotide sequence isolated from the Sargasso Sea
atgactaagttgtgggaaaaaggagttgggttcgataaaaagattgaaagttttactgtaggcaatgataatgatttagatcagattttacttccttacgattgtgaagcttcaattgcacatgtaaagatgttaaataaaatgaaatatttaaatgataatgaatcagataaattaattaaagaactaaattttattttggaagaaagtaaaagcggtaattttaaaataaaaaaatctcatgaagattgtcatactgcaattgaagatcacctagtaaatacatgtggtgattccggtaagaaaattcatactgcacgatccagaaatgatcaagttctaactgctcttcgtttatattatagagaatcaatagatgatgtgaaaaaactattaattgatttaattaaatcattagagttgttttcagataaaaatggtaaaatacaattcccaggatatactcatatgcaaaaagcaatgccatcatcagtgcagctttggtctaatgcatatattgaatcaatgaatgatgatttaaaattattacaaactgcttatgcattaattaatcaatctccactaggttcgggag

SEQ ID NO: 287846 - DNA, 439 bp, Unknown
  Bacterial polypeptide expressing nucleotide sequence isolated from the Sargasso Sea
atgagtaaaaataaaaacaatcaaccaatttggggcacaagagtaaaaaaaagctctactaatttattcaaaaaaattggcggctcattatcaattgataaaagattatttaatgaagatattgaggtatctattattcatgttgaaatgttatttaagcaaaaaattatcaattttaaaataaaaaataaaattatatggggtttgaaaagaattaaaaatgaaataataaaaaaaaaatttcctttcgatgaaaagctagaagatatacatatgaatatagaaaatagactttttgatcttattggagaagatgcaggattcgttcacacagctagatctagaaatgatcaagtagttactgatttcaaaatttggttaagaaaagctaacaatgaaattactaaaaatattgatgtaataataaaaaatatttaaa

SEQ ID NO: 287847 - DNA, 691 bp, Unknown
  Bacterial polypeptide expressing nucleotide sequence isolated from the Sargasso Sea
gaaattagatgaaattcagtcaataaacttaaaggttgccttagcttttcttgaaaagtccgaaaaacactctagcaatccgatgcctggttacactcatcttcagcgagccatgccatcttcatggggtctatggtttggtgcatttgctgaatcatttttagataacgcagaattgctatcaaatactaagacatggataaatgttaatcctctaggcacagctgctgggtatggagtcaatcttcctatcaagcgggatatatctacaaaagagttaaattttaaaagaaaacaattaaatagtctttatgtccaaaatagcagagggaagttcgaattggagttaattggtgtattaaaacagccgatgcttgatatccgtaagttttcatgggatatgagtctctttttatctcaagagtttaacttactaagtctaccacctatttattcaacgggctcatctataatgcctaacaaatctaatccggatgtaattgagataatgagggctaacttttctatcttatcaggccattattctgaattagaaaatttaatctctttacctagtggatatcatcgagatctacaactcacaaaaagatctcttattcattctattcattgtgtactcaaaacaatgaatctattgcctaagttagtaaggtcaataatgataaatact

SEQ ID NO: 287848 - DNA, 803 bp, Unknown
  Bacterial polypeptide expressing nucleotide sequence isolated from the Sargasso Sea
gattgacttgaacaccctagactgtattgtttcgcgttgggaaaatgaagcccaacttgcccattcaataactttgttgatgaatcaccttagcacaattgcacaggatcttatttttttgagtcatccatatgttggagctataaagattgacgacaagtatgtgaccggttcatcaattatgcctcaaaagaaaaatcctgattttgcagaaattattaagtcaaagacatctatggctcaaggaatgttatcaggtttaattggtatacaaaaaggtgcaatgagcggctacaatcgtgacactcaaacaagcaaatatctgatcatggatctagttcgagaatgtgaaaaagcgccctcaatattgcaaggagtatttgaaagtttgatagttaataataaaaaaatgaaagaattatctgaaaaagattttttgaatgcaacggacattgccgattatctgtctcgaaagcttaatatgccctttagagagagctatcaaattttagctaaaagtgtaaaactttctgcacccgaactaaaaataactaaggatgcactcaataaatcattggaagaatttggaaaatcaaacgaaattgcaaatgatttggaagatctacaggatactcaaaaacttttacgacatagaaatcaccgtggaagcccttcaccggaagaaacaaggctacaagtaaaagtattcaccaaacaattaaattctctttcgagtcctcttttaattctggagaaaaaaattggtgttgcccaaaacaattgtagaaattatgaagtctgac

SEQ ID NO: 287849 - DNA, 402 bp, Unknown
  Bacterial polypeptide expressing nucleotide sequence isolated from the Sargasso Sea
aatgaaaaaaaatagtataaataagcaaaaaaaaaataaaatgtggggtggaagattttcttcatctactagtgaattaatggaggaatttaactcatcaattcaatttgatcaaattctatatgtagaagatattgagggatcaatagcacactcagaaatgctttctaaacaaaacattatttctaataaagagtttttatctattaaatctggtttagaacaaataaaaagagaaatttctaataatgagtttaatttttcaactaaactagaagatatacatatgaatgttgaaaatagattagtagaaataattggagatgatggcaaaaaactacacactgccagatcaagaaatgatcaagttgcaactgacattaaattatggcttagaaaaaa

SEQ ID NO: 287850 - DNA, 769 bp, Unknown
  Bacterial polypeptide expressing nucleotide sequence isolated from the Sargasso Sea
ttcgtataatatagataggaattttacttctaaaaaattaggtttcaaaagaccaactaataattcaattgattcagtatctgatagagattttgttctggattttttatcttcagcttcaatatgtgctatgcatatatctagatttgcagaagaattaattatttggaattcagatatttttaaacttattaaaatagacgataaaatgttaactggttcatcaatcatgcctcaaaaaaaaaatcctgacccagcagaattaatcaggggacgggctggaaaaaattttggatttctgcaagcaatgttaacaacaatgaaagggttgcctctatcatattataaagatatgcaagaagataaagggttagtatttgatagttatgatattattttagaatcaattattataagcaatgagctaattaaaaatataaaaccaaataaagaaaggatgttatctttgtctaatgagggatataccactgccacagattttgcagattatcttgtacgaaataaaaatttatcatttaggcaggcatataaaatatcagctcaattggttaattatgctgagaataaaagaaaaaaattaaatcaactaagttttgatgagataaaaaaagtaaaaaatgacttggataaaaacgtaatgaaaatatttaatgtaaaaaattcaataaatatgaaaatttcttatggaggaacttctaccaaaaatattaaaaaaatgatatctaaattaaaaaaggaatttaaataa

SEQ ID NO: 287851 - DNA, 551 bp, Unknown
  Bacterial polypeptide expressing nucleotide sequence isolated from the Sargasso Sea
catgggtaaaaataaaaacaatcaaccaatttggaacactagaattaagaaggagtctaaaaaccattttaaaaaggttggtggatcaattacaattgataaaagattatttaaggaagatattgaagcttcaatcgtgcatgtcgagatgctatttagacaaaaaataataaattttaaaattaaaaataagatagtatggggtttaaatagaattaagaatgagattataaaaaaaaaatttatttttgatcataaacttgaggatattcatatgaatgtagaacacagactctttgaactaattggagaagatgctggttatattcacaccgcaagatcaagaaatgatcaagtagttacagattttaaaatttggttaagaaaggctaataaagaaattgttaaaaatattgatgtaacaattaaaaatattttaaaaaaagcagaaaaaaatgttgaaacaattatgcctggtttcacacaccttaaaaatgcacaaccagtttcttttgctcattacctaatgtcgtacttagaaatgtttaata

SEQ ID NO: 287852 - DNA, 748 bp, Unknown
  Bacterial polypeptide expressing nucleotide sequence isolated from the Sargasso Sea
cttgcccattcaataagtttgttgatgaatcaccttagtatagttgcacaagatcttatttttttgagccatccttatgtaggagtgatccagattgatgataactatgtgacaggttcttcaattatgcctcaaaagaaaaatccggattttgcagaagtaatcaaatcaaaagcatctctagctcatggaatgttatcaggtttgcttagtatccaaaaaggtgcaatgagcggttataatcgtgatacccaaacaagcaaatatctgatcatggacctgatacgcgaatgtgaatccgcacccttaatattgcagggagtattggaaagtttgacggttaatcataaaaaaatgaaagaattatctgaaacagattttatgaatgcgacagacattgcggatcatttggcacgtaagcttgatctgccttttagagaatgctatcacctcactgctaaaagtgtaaaactttctgcaccagaattgaaaataactaatcaagcacttagaaaaacattggaagagattggtcaacctgcagaaattgcagatgatatggataatttgcaagaaccactgaagctaatagaacaaagacttcatcatggaagcccttcaccagaacaaactaggcttcaagttaaagaatttactaatcaactagattcgctttcggctcctctcgtaaatatggtaaataagataaacgatgcgcaggagaattgtagaaattatgaagtatgac

SEQ ID NO: 287853 - DNA, 386 bp, Unknown
  Bacterial polypeptide expressing nucleotide sequence isolated from the Sargasso Sea
catggcaaaaaataaaaacaaccaggcaatatggggtactagaattaaagataatacatctaatctttttcagaaacttgggagctctataaacattgataaaagactttataaggaagatatagctgtatctattgctcatgtagagatgttatttaaacaaaaaataataacttttaaaattaaaaataaaattatttatggacttaataaaatagaaaaagaaatatcaaaaaataaattagaatttagtaaaaaatatgaagatattcatatgaatattgaaaaaagactttttcaaatcattggagatgaagcgggatatatgcacacggcccgttcgagaaatgatcaagttctagctgactttaaaatatggattaaat

SEQ ID NO: 287854 - DNA, 775 bp, Unknown
  Bacterial polypeptide expressing nucleotide sequence isolated from the Sargasso Sea
taaaaaatcatcaaaagaaactatagctaacattaactctttaatgaaaatgttaatcaaaaaagcagagaaaaatgttgatactgttatgcctggcttaacacatcttaagaatgcacaacctatttcgtttgcacattatcttctgtcttactttgaaatgtttaaaagagataaaaaaagattcgaaaataatataaaacttttagatgagtgcccattaggttcagccgcactagcgggaacttcttataaaatagatagaaattatacttcaagacaacttggttttaagaaaccaactgataattcaatagactctgttgcagacagagactttgcagtagattttttatatgcctctgctttatgtgcaatgcatttatctagattagctgaagattttataatttttaattcgaatgcatttaatttaatttcatttgatgacagtatgttgactggatcatcgataatgccacaaaagaaaaatcctgaccctgctgaattaatcagaggtagagttggtttgaactatggaaatttaaattcgatgcttactataatgaagggacttccaatgtcttatttcaaagatcttcaggatgataaaaaacttgtctttgatggatttgatactttaaatgactcattggttttaagtcttgaattagttaattcaataaaaccgaatgaaaaaaatatgctaaaaatggctagtgaaggttttaccacggctactgattttgctgattatttggtaaaggaaaagaaa

SEQ ID NO: 287855 - DNA, 436 bp, Unknown
  Bacterial polypeptide expressing nucleotide sequence isolated from the Sargasso Sea
ttcatacaataaagattttcaagaggataaagagccaatatttgatactgcagaaacaatatcttcttgcatgaaagcaatgactattttaattaatgagggcattgaatttaatattaaaaatttatctgactctgtagaaaatgatttttctaatgctactgatttagcagattacttagttggtaaaaatgttccttttaggactgcctatcaagttgttggtgaaattgttaaatattgcctagagaaaaaaatattatttaaaactcttaaaattgatgaatttaaaaaatttcatcctaaatttgatgaggatgtttttttggatctcaaaccttttaatgttgttaaatcaagaaatagtgagggtggaacaggttttgttcaggtagaaaaagaggtaaatagttggcaaaataaattgttactttga

SEQ ID NO: 287856 - DNA, 578 bp, Unknown
  Bacterial polypeptide expressing nucleotide sequence isolated from the Sargasso Sea
catggtaaaaaataaaaacaaccagacaatatggaatacaagaattaaaaataattcttctaatctatcacaaaaaataggtagctctattgatgtagataaaagactgtataaagaggatataaatggttctattgctcacgtagagatgttatttaaacaaaaaataatttcttttagaacaaaaaataaaattatttatggactaaataaaattgaaaaagaaatatctaataaaaaatttgaatttaataagaaatacgaggacattcatatcaatatcgaaaaacgactgtttcaaataattggtgaagaagcgggatatgttcacacagcaagatctagaaacgaccaggtaattaccgattttaagatctggattaaatctgcaaatcaaaaaattagtgtaatgttaaataacgtaattaaaaattcaattaatttagcagaaaaaaatatagacactattatgccaggttttactcatttgaaaaatgcacaagcagtttcatttgcacactatctaatggcatacgtagagatgtttaaaagagacaaagacagatttaagaataatt

SEQ ID NO: 287857 - DNA, 697 bp, Unknown
  Bacterial polypeptide expressing nucleotide sequence isolated from the Sargasso Sea
aatgaaactttggcaaaaaaatacaccggctaacgataaaattatcgattttactgtgggtaaagaccgagattttgatctgtatctcgcagcctatgattgccaggcctctatcgcacatactcaaatgttggataaaataggagtattgacagaacaggagtcccaagcaatagtggaagtcttagaggaacttaaatctaaagcagaaaacagcaagtttgtgattgaggattcctttgaagacatgcattcaaaaatagaattcacattaactgaaaaattgggtgatttaggtaaaaaaattcacacagcaagatctagaaacgatcaagttttagtggcaatgcacctatatttaaaggaggagatagcagcaattaaaaaactgacctacgacttatttaagcttttaataaaactttctaaacaacacaaagataaattattacctggatacactcacttccaagtggctatgccttcttcttttggactgtggttttctgcttatgctgaaagtttaattgatgatgtaacccttttgaatgctgcaagaaaaatagttgatcaaaatccattgggtagtgctgcaggctttggtagttcattccctattgacagaaaagcaactacagaaagtctgaattttatggatctgaaatacaacgtaattgctgctcaaatgagtagaggt

SEQ ID NO: 287858 - DNA, 132 bp, Unknown
  Bacterial polypeptide expressing nucleotide sequence isolated from the Sargasso Sea
aacttaaggataaagttgttactggatcttcaataatgccacaaaagaaaaatccagatactctagagtattttaagaggcaaaacaggaaatatctacggaaatttattttctatgctcacaattcttaaa

SEQ ID NO: 287859 - DNA, 454 bp, Unknown
  Bacterial polypeptide expressing nucleotide sequence isolated from the Sargasso Sea
atggaaaaaaagactaaagatatagatagaaaaaataaagaaaaaggtaagtctcaggtaagttctgtgtggggaggtcgatttactggtgtcccctctgacattatggaaaaaataaacccttcaatagactttgataaacgttttttcgttcaagatatagagggctcgagagttcatgcagagatgcttggaaagcaaggaattatttcagcaaaagagagcgaagaaataattgaaggtcttaaccagattgaaaaagaaatacacgaagacaacttccagtttaggagagacttagaagatatacacatgaatgtcgaggcgcgattaactactttaataggggaaactgggggtagattacacacggcgcgctctaggaatgatcaggttgcaaccgactttaaaatgtgggtcagggacaagatagatgatttgatcgaagcactga

SEQ ID NO: 287860 - DNA, 459 bp, Unknown
  Bacterial polypeptide expressing nucleotide sequence isolated from the Sargasso Sea
catggtaaaaaataaaaacaaccagacaatatggaatacaagaattaaaaatagttcttctaatctctcacaaaaaataggtagctctattgatatagataaaagactgtataaggaggatataaatggttctattgctcacgtagaaatgttatttaaacaaaaaataatttcttttagaacaaaaaataaaattatttatggactaaataaaattgaaaaagaaatatctaataaaaaatttcaatttaataaaaaatatgaggacattcatatcaatattgaaaatcgactgtttcaaataattggtgaagaagcgggatatgttcacacagcaagatctagaaacgatcaggtaataacagactttaagatctggattaaatctgcaaatcaaaaaattagtgtgatgttaaataacgtaattaaaaattcaattaatttagctgaaaaaaatgt

SEQ ID NO: 287861 - DNA, 496 bp, Unknown
  Bacterial polypeptide expressing nucleotide sequence isolated from the Sargasso Sea
atgacaaataaaaataagacagtttggtcaagcagatttaaaagctcaacttctaaatcttttcaaagaattggggcttcaataaatgtagataaaagactttacgaacaagatatctttgcctcaaaaattcatacgcaaatgttaattaagaaaaaaattatacctgctaaagaaggtaaaaaaatactaaaaggattggaaaaaattagaggacagattaaaaaaggtaagtttattttcaaggaaaaatttgaggatatccatctaaatattgaaaaaaaattatacgaaataattggtgattcggcaggatacatgcacactgctagatcgagaaatgatcaggtagttaccgattttaagctttgggtgaaagattcatcagtaattttaattaaagaattaaactctttaatgaaaaatattgtaagcaaaaaaaacaaaaacgtaaatactgtaatgcccaggttttacccatctcaaaaatgctcaa

SEQ ID NO: 287862 - DNA, 628 bp, Unknown
  Bacterial polypeptide expressing nucleotide sequence isolated from the Sargasso Sea
atgtatcgttcccgattaggaaaagatcttgatgatatcacgttaagctatgtttcatccataaaagatgattctgacattgcattttatgatatcataggaagtgaagcacatgtaatcatgttatatgaaaataaactcttgtcaaaaattgaaacaaaaaagatcttgaccgcgttagaagaattaaagggaggaaacatctctcagcctgattttgaacctgaagatatacatgaattaatagaatctctagtaatcaaaaaaactggaatcgaaaatggcggaaaaatgcatactgctcgttcacgaaatgatcaagtagcacttgatattagactaaaaattcgcgatgacattaacatacttttacaatgtctaatcgaaacaatttctactcttctgaaaactgcacaagaaaatacaaaaacaataatgccactttacactcatcttcaacaagctcaagttggagtattttcacactatttactttcatatgcagattcgttgttacgtgatctagatagattcatgtcattgtatggacgagtaaatcaaagtccattaggagcaggtcctgtaggtggtacaagtcttcctattgatagagaccagtactgcaaaa

SEQ ID NO: 287863 - DNA, 373 bp, Unknown
  Bacterial polypeptide expressing nucleotide sequence isolated from the Sargasso Sea
atgagtaaaaataaaaacaataaaccagtttggggcacaagaataaaccaaaaaactacatcttcctttcaaaaaattggttcatcgttaaaaatagataagagacttttcaaggaagatataagtgcttctatagttcatgtggaaatgttggcgaaacaaaaaataattaacatatccataaaaaataaaattatatgggggctaaataaaattttaaatgaaatacttaaaaaaaaatttttttttaatgataaaaatgaagatatacacatgagcatagaacaaagactttttgaattaataggtgaggatgccggttttattcatactgctaggtctagaaatgatcaggtacttacagatcttaaat

SEQ ID NO: 287864 - DNA, 550 bp, Unknown
  Bacterial polypeptide expressing nucleotide sequence isolated from the Sargasso Sea
atggtaaaaaataaaaacaacaaagcaatttggaccacacgaataaaagggaaatcctcatccctttttcaaagagttgggagttcaataaatatagataaacgactttataaagaagatattatggtgtctatcatccatgttgaaatgctttttaagcaaaaaataatttcatttaaagtaaaaaataaaatcatttatggactagataaaattaaaaaagaaatttcaaaaaagaaatttgtgtttaatgagaaatatgaggatatacatatgaatatagagaaaagactgtttgatataataggagacgaagcaggctatatacatacagctagatcaagaaatgaccaagttctaactgatttaaaaatttggatacgatcagcatcaaaagaaattaattataacttagataaattaataaaaacaattttaaaaatagctgaaaaaaatattaaaactataatgccaggttttacacatttaaaaaatgcccaaccagtatctttcagtcactatctaatggcttatgttgaaattttataga

SEQ ID NO: 287865 - DNA, 373 bp, Unknown
  Bacterial polypeptide expressing nucleotide sequence isolated from the Sargasso Sea
atgagtaaaaataaaaacaatcagccaatttggaacacgagaattaaaaaaagtactaaaagtttgtttaataaagtcggtgggtctttgtctgttgataaaagattatttaaagaagatattgaagcatctatggttcatgtagaaatgctttttaaacaaaaaattgttaattttaagatcaagaataaaatcatatgggggcttaaaagaataaaaaatgaaatcataaaaaaaaaattcttttttgataggaatcttgaggatattcatatgaatattgaggcaagattattcgaattaattggtgaagaagctggatatattcataccgcaagatcaagaaatgatcaggttgttacagatttcaaat

SEQ ID NO: 287866 - DNA, 793 bp, Unknown
  Bacterial polypeptide expressing nucleotide sequence isolated from the Sargasso Sea
atggtaaaaaataaaaacaaccagacaatatggaatacaagaattagaaataattcctccaatttattacaaaaaataggaagctctattgatgtagataaaagactttataaagaagatataaatggttctattgctcatgtggaaatgttgttcaaacaaaaaattatttcttttaaaattaaaaataaaattatttatggattgaaaaagattgagaaagaaatatctaataaaaagtttgaatttaataaaaaatatgaagacattcatataaatattgagaaacgactatttaaaataattggtgaagaagctggatatattcatactgctagatctagaaacgaccaagtaatcactgactttaaaatctggattagatctgcaaactataaaattagtatgatgttaaataatgtaattaatagttcagttaatttagctgaaaaaaatgtagatactattatgccaggttttactcatttgaaaaatgcacaagcagtttcgttcgcacactatctaatggcgtatgttgaaatgtttaaaagagacaaagacaggtttagaagtaatctattcagtttaaatgaaaacccgctaggtgttgctgcattgactggaacttcgtttaatattgataggaattttacgacaaaaaaacttggttttgaaagacccacaaataattcaattgatactgtagcagatagagattttgttttagattttctttacagtgtttctgtttgttcattacatttatcaagaattgctgaggaattaatcatct

SEQ ID NO: 287867 - DNA, 744 bp, Unknown
  Bacterial polypeptide expressing nucleotide sequence isolated from the Sargasso Sea
acatcaaaatacctggttttaagaaaccaactgataattcaatagactcggtagctgacagagattttgcagtagattttttatatgcttctgctttatgtgctatgcacttatctagattagctgaagattttataatttggaattcgaatgcatttaatttaatctcatttgatgacagcatgttaactggttcatcgattatgccacaaaagaaaaatcctgatcctgctgaattaattagaggcagagttggtttgaactatggtaatttaaattcgatgctaacaataatgaaaggacttccgatgtcttattttaaagatcttcaagacgataaaaagcttgtcttcgatggtttcgatactttaaatgattcattagttttaggtcttgagttagtaaattcaacaaaaccgaataaaaagaatatgcttaaaatggctaatgaaggttatacaacggctaccgattttgctgattatctagtaaagcaaaaaaaactcactttcagagacgcttatgctattgcagcaaaattagtaaattacgctgaaaataaaaataaattattgtttgagttatctttgcaagaaataatgaaaatttacaaaaatttagataaaaaagtattgaaaatatttgatgtaaataattcaatgaactcgaaaagatctcacggaggaacttctattgcaaatattaaatcaatgattaaaaaatataaaaaggaattaaaatgag

SEQ ID NO: 287868 - DNA, 538 bp, Unknown
  Bacterial polypeptide expressing nucleotide sequence isolated from the Sargasso Sea
atgggtaaaaataaaaacaatcaaccaatttggaatactagaattaaaaaaaaaacaaaaaacctttttaaaaaggttggtggatcaatagaaatcgataaaagattattcagagaagatattgaagcctcaattgtacatgttgagatgctgtttagacaaaaaatcataaactttaaaattaaaaataaaatagtatggggtttgaatagaattaagaacgaaattataaaaaaaaaattaatttttgatgataggcttgaggatattcatatgaatatagaacacagactctttgagttaattggagaagatgctggatatattcacactgcaagatcaagaaatgaccaagtagttacagattttaaaatttggttgagaaaagccaataaagaaattgttaaaaatattgatgtaacaattaaaaatattttaaaaaaggcagaaaaaaatgttgaaacaattatgcctggtttcacacacctaaaaaatgcacaaccagtttcttttgctcattacttaatggcatacttag

SEQ ID NO: 287869 - DNA, 620 bp, Unknown
  Bacterial polypeptide expressing nucleotide sequence isolated from the Sargasso Sea
tatgagcaataagaagacaacagttgggtcggtaagtaagcaggtattagaatatactgcaggtcgtgatattgaattagatcgattactggtagatgtcgactgtattgcaaccgctgcgcatgtcaaaatgttagaacaagttccttgtgatatgccaatattaagcaaaatggaatgtgataaaattattaatagtttaaatgaaataagagttcagaaagataaaggaaagtttaagattagattaagtgatcaggatgttcatctagcaattgaaagagttttaacattagaattaggtgatacaggaaaaaagatacatactggaagaagtcgcaatgatcaagtagctgtagatttgcggctgtatggaaaagaacaacttttgttaattctatctgaacttactgatctaataaaagttctaataaaatttgggaaaagataccaattagttcctatggtcggtcgaacgcatatgcagccaggcatgccatctagtgtcggtttatgggcttctgctcacgcagaaagtttattagatgatactaaattaattttccatattctagaagttaatgatcaatgtccacttggttctgctgcaagctatggtg

SEQ ID NO: 287870 - DNA, 760 bp, Unknown
  Bacterial polypeptide expressing nucleotide sequence isolated from the Sargasso Sea
atagatagaaattatacttcaagacaacttggttttaagaaaccaactgataattcaatagactctgttgcagacagagactttgcagtagattttttatatgcctctgctttatgtgcaatgcatttatctagattagctgaagattttataatttttaattcaaacgcatttagtttgatttcatttgatgacagcatgttaactggttcgtcgattatgccacaaaagaaaaatcctgacccagctgaattaatcagaggtagagttggtttgaactatggcaatttgaattcgatgcttactatattgaaaggacttccaatgtcgtattttaaagatcttcaagatgataaaagacttgtctttgatggatttgatgctttaaataattcattggttttaagtatagagttggtgaattcagtaaaaccaaataaaaaaaatatgcttaaaatggctaatgaaggttttacaacggccactgattttgctgattacttagtaaaggaaaaaaagctcacttttagagagtcatattcaatagcaacaaaattagtaaattacgctgaaaagaataacaaattgttatttgagttatctttacaagaaataatgaaaatttataaaaatttagataaaaaagtattaaaaatatttgatgtaaataattcaatgaactcgaaaagatcacatggcgggactgctattgcaaatgtaaaagcaatgattaagaaatataaaaaggaactaaaatgaa

SEQ ID NO: 287871 - DNA, 604 bp, Unknown
  Bacterial polypeptide expressing nucleotide sequence isolated from the Sargasso Sea
catggacaaaaataaaaacaataaggcaatatggaattctagaattaagaaaaaatcgtctgctttattccaaaaaattggtagttcaattaatattgataaaagattgtataaagaagatattctaggatcaatagcgcatgtagaaatgctttttagacaaaaaatcattacatttaaaatcaaaaataagatcatctacggattacaaaaaattgagaaagatattttgaaaaataaatttgatttcaatgaaaaatatgaagacattcatataaatatcgaaaaaaaactttttgaaatcattggggaggaagctggatacatccatactgctagatcaagaaatgatcaagtattagtagattttaagatttggattaagaatgcaaatagagaaataaattcaaacttagataaaataattaactccattctaaaattagctgaagcaaatataatgactatcatgccaggtttcactcatatgaaaaatgcacaacctacctcttttgcacattatcttatggcttatgtagaaatgttttctagagataaaaaaagacttgaattcaatttagaaaatctaaatgaaaatccatta

SEQ ID NO: 287872 - DNA, 727 bp, Unknown
  Bacterial polypeptide expressing nucleotide sequence isolated from the Sargasso Sea
atgagtaaaaataaaaacaatctgccaatttggaatactaggataaaaaaaaattcgaataatctttttaaaaaagtaggtggatcactatcaatagataaaagattatttaaagaagatattgaggcatcaattgtgcatgttgatatgttgtttagacaaaagattataaattttaaagttaaaaataaaattgtatggggtttaaatagaattaaaaatgaaattattaaaaaaaaatttatctttaatgacaaactcgaagatattcatatgaatatagagcatagactttttgaattgattggagatgatgcgggatatatacacaccgcaagatcaagaaatgatcaagtagtcacagattttaaaatttggctgaaaaaagcaaacagtgaaatattaaaaaatattgatgtaactattaaaaatattttaaaaaaagctgaagctaatattgaaacaattatgcctggctttacacatttaaaaaatgcccaaccagtttcttttgctcattatttaatggcatacttagaaatgtttaatagagataaaaaaagatttataaataatttagatagtcttaatgaaaatccactaggtgtcgcagccttaactggtacatcatttaaaattgatagattttatacttcaaaaaaattaggtttccaaaaaccaactaaaaattcaattgacactgtttcagaccagagattttgttatt

SEQ ID NO: 287873 - DNA, 523 bp, Unknown
  Bacterial polypeptide expressing nucleotide sequence isolated from the Sargasso Sea
atgtcaaaaaataaaaacaacgagacaatatgggggtcaagaataaaaaaaaatacttccaccctttttagaaaagtaggaaattctattgatatagataaaagactttataaggaggatattgcaggatcaatagcgcacgtagaaatgttgtttaaacagaaaataatttctttcaaaattaaaaataagatcatttatggcctcaataaaatagaaaaagaaatcaagagcaaaaaatttgagtttcataaaaaatatgaggatattcatataaatattgaaaaaagactttttcaaattatcggagaagaggcaggttatattcacactgctagatcaagaaatgatcaagtgataactgattttaagatatggattagatcagcaactaaagaaataaatattaatttagataagttgataaaaagtataattaaactagctgaaagaaatatttatactattatgcccggctttactcatctcaaaaatgctcaagctatttcatttgcacattatt

SEQ ID NO: 287874 - DNA, 433 bp, Unknown
  Bacterial polypeptide expressing nucleotide sequence isolated from the Sargasso Sea
catggctaaaaataaaaacaatcaagcaatttggagcactagaatttcaaaaaaaacttctcaaatttttaaaaaatcgggaagctcattaaatattgataaaagattatataaagaagatatcgaagcatcaacagcacatattgaaatgctatttaagcaaaaaattatttcatttaaaattaaggctaaaataatttggggattaaataaaattaaaaatgaaataattaaaaaaaaatttaattttaacaatgaaaatgaagatatacatatgtctattgaaaatagattatttcaaataataggagatgatgcgggatttgtacatactgctagatctagaaatgatcaagtaattaccgactttaaattatggttaagaaaagcaacagatgatctaatagcaaatttaaataatacaattaaaatt

SEQ ID NO: 287875 - DNA, 442 bp, Unknown
  Bacterial polypeptide expressing nucleotide sequence isolated from the Sargasso Sea
catgactaaaaataaaaacaatcagccaatttggagttctagaataaaaataaactctaaaaacctattcagaaaagttggtggatcactagatatagataaaagattatttaacgaagacatatctgcatcaattgttcatacagaaatgctatttaagcaaaaaataataaactttaaaattaaaaataagattgtgtggggtttgaatagaataaaaaatgaaattataaaaaaaaaatttccctttgataaaaatcttgaagatattcatatgaatattgaaaaaagattgtttgatttgattggtgaggatgctggatttatacataccgcaagatctagaaatgatcaggtaatcactgattttaaaatatggttaaaaaaatctacttatgaaataactaaaacacttgatggccttataagtacaattctgaaa

SEQ ID NO: 287876 - DNA, 542 bp, Unknown
  Bacterial polypeptide expressing nucleotide sequence isolated from the Sargasso Sea
tatgtatcgttcaagattaggaaaaaatcttgatgaaattacattaaactatgtctcatcaatatctgacgattctgatatcgcattttatgatatcataggcagtcaagctcatacaatcatgttgtatgaaaagaaactcctgacaaagacagaattaaaaaaaattctttcagcattagaagatctgaaaaatggaaaaatctcacaaccagattttgagcctgaagacattcatgaattaattgaatcattagttatcaaaaaaaccggaattgatagcggtggaaaaatgcatactgcaagatcaagaaatgatcaagtcgcactagacattagaatgaagattcgtgatgacattaacattctaactcagtgtttaattgaaacaattagtgagttactgtatttagcaaaacaacatcacaaaactgttgttccactctatacacatctacaacaagctcaggttggtgtattttcacattatcttttatcatatgcagattcgttattcagagatcttgatagatttatttcac

SEQ ID NO: 287877 - DNA, 400 bp, Unknown
  Bacterial polypeptide expressing nucleotide sequence isolated from the Sargasso Sea
tttttgattttaccagaacatttttgtactggtagttctatcatgccacaaaaaaagaatcctgatgtacttgaaattttgagaggcaagtatcatacagtcaaggcttgtgagactgaaattgccggattgataagtggtttaggtactggtttccacagggattttcagctcacaaaagagcccgcaatgaaaggaataaaaactacgctagatagcctagaaattgcatcgttagtgattaagaatatcactgtaaatacagaccgatgtaaagaagctatgacagatgaaatatatgcaactgaacgagcctacgcattggttaagaaaggtatcccttttcgggaagcatatagacaaattgggatagagctttctgaggcgaagaaaaattgaa

SEQ ID NO: 287878 - DNA, 592 bp, Unknown
  Bacterial polypeptide expressing nucleotide sequence isolated from the Sargasso Sea
acaatttaattttatcaatttaccagatgatctttcaactggtagttcaattatgcctcagaaaaaaaatccagatggtgcagagcttgttagaggaaaaacaagtattatcattagtaatttaagttcaatgcttaatattattaaagggttaccactttcttatagtaaagacttacaagacgataaacaaataacatttaattcatacgacaatgtttctttgtgtataaaagttatgaatgaaattttatcaaaatctacattcaacaaaactagaatgaaagagttgattgataattcaaatgcaaccgctaccgatttggctaattggttggttcaaaatcttagatattcatttagagatgcttatgttgttacaggaaagattgtttcttattgttcaaaacaaaatagaaacatagattcattatctcttggagaattaaaaaaatttgacaaaaatataacagctgacgcaaaaaaagtgctatcagctgctaatagtgttaaatcaaaatcaagttttgggggtacagctcctgaaattactaaaaaaataataaaacttgttataaaaaaatacttataa

SEQ ID NO: 287879 - DNA, 639 bp, Unknown
  Bacterial polypeptide expressing nucleotide sequence isolated from the Sargasso Sea
catgggtaaaaataaaaacaatcaaccaatttggagcactagaattaagaaggagtcaaaaaacctttttaaaaaggttggtggatcaatagcaattgataaaagattatttaaagaagatattgaagcttcaatcgtacatgtcgagatgctgtttagacaaaaaattataaattttaaaattaaaaataagatagtatggggtttgaatagaattaagaatgaaattataaaaaagaaatttatttttgatgataaacttgaagatattcatatgaatatagaacacagactctttgaactaattggagaagatgctggatatattcacacggcaagatcaagaaacgatcaagtagttacagattttaaaatgtggttaagaaaagctaataaagagatcgttaaaaatattgatgtaacaattaaaaatattttaaaaaaagcagaaaaaaatgttgaaacaataatgcctggtttcacacaccttaaaaatgcgcaaccagtttcttttgctcattacttaatggcgtacttagaaatgtttaacagagataaaaatagatttaaaaataatttagagagtcttaatgaaaatccacttggcgtggctgctttaacaggtacttcttttaaatc

SEQ ID NO: 287880 - DNA, 820 bp, Unknown
  Bacterial polypeptide expressing nucleotide sequence isolated from the Sargasso Sea
aaataatataaaacttttagatgagtgcccattaggttcagctgcactagctggaacttcctataaaattgatagaaattatacttcaagacaacttggttttaagagaccaactgataattcgatagactctgttgcagacagagactttgcagtagattttttatatacctctgctttatgtgcaatgcatttatctagattagctgaagattttataatttttaattcaaatgcatttaatttaatttcatttgatgacagtatgttgactggttcatcgataatgccgcaaaagaaaaatcctgaccctgctgaattaatcagaggtagagttggtttgaactatggcaatttaaattcgatgtttactataatgaagggacttccaatgtcttattttaaagatcttcagaatgataaaaaacttgtcttcgatggatttgatactttaaatgactcattggttttaagtcttgagttagtgaattcaataaagccgaataaaaaaaatatgcttaaaatggctaatgaaggttataccacggctactgattttgctgattatttggtaaaggaaaagaaactcacttttagagagtcttatacggttgcagcaaaattagtgaattacgccgaaaggaaaaataaattattatctgagatatctttacgagaaataatgaaaatttacaaaaatttagataaaaatgtactaaaaatatttgatgtaaataattctatgaactcaaaaaaatcttatggaggaacttcttctgctaatgttaaagcaatgattaaaaaatataaaaaggaggta

SEQ ID NO: 287881 - DNA, 387 bp, Unknown
  Bacterial polypeptide expressing nucleotide sequence isolated from the Sargasso Sea
catgggtaaaaataaaaacaatcagccaatttggaatactaggattaaaaagggggaaacaaatctttttaaaaaggttggtggatcaataggaatcgataaaagattattcagagaagatattgaagcttcaattgtacatgttgagatgctgtttaaacaaaaaattataaattttaaaattaaaaataaaatagtatggggtttgaataggattaagaacgaaatcataaaaaaaaaatttatttttgataataagcttgaagatattcatatgaatatagaaaatagactttttgagctaattggagaagacgcagggtatattcacaccgctagatcaagaaatgatcaagttgtcacagattttaaaatttggttaagaaa

SEQ ID NO: 287882 - DNA, 652 bp, Unknown
  Bacterial polypeptide expressing nucleotide sequence isolated from the Sargasso Sea
gatgtatcgttcccgattaggaaaagatcttgatgatatcacgttaagctatgtttcatccataaaagatgattctgacattgcattttatgatatcataggaagtgaagcacacgtaatcatgttatatgaaaataaactcttgtcaaaaattgaaacgaaaaagatcttgaccgcgttagaagaattaaagggaggaaacatctctcagcctgattttgaacctgaagatatacacgaattgatagaatctcttgtaatcaaaaaaaccggaattgaaaatggcggaaaaatgcatactgctcgttcacgaaatgatcaagtggcacttgatattagactaaaaattcgtgatgacattaacatactcttacagtgtttaattgaaacaatttccactcttctgaaaactgcacaagaaaacactaaaacaataatgccactttacactcatcttcaacaagctcaagttggagtattttcacactatttactttcatatgcagattcgttgttacgtgatctagatagattcatgtcattgtatggacgagtaaatcaaagtccattaggagctggtcctgtaggtggtacaagtcttcctattgatagagacagtactgcaaaattacttggattctcattctcttgt

SEQ ID NO: 287883 - DNA, 475 bp, Unknown
  Bacterial polypeptide expressing nucleotide sequence isolated from the Sargasso Sea
catgagtaaaaataaaaacaaacaaacaatatggaatacaagaattaaagggaattcatcttcgttgtttaaaagagtgggaagttccatagatatagataaaaagctccataaagaagatatagcgtgttcgattgctcatgtagaaatgttatttaggcaaaaaataatttcattccaaataaaaaataaaattatttatgggctaaataaaattgaaaaagaaattgcaaaaaataaatttgaatataaaaaaaaatatgaggatattcatatgaatattgaaaaaagattgtttgaattaattggcgatgatgcaggctatgtacacaccgccagatccagaaatgatcaagtaataacagattttaaaatgtggttaataaaatcaacaaatgaaattaataaaaatttaaataacattattaagacaatcttaaaaattgctgaaaaaaatatagaaacaattatgcca

SEQ ID NO: 287884 - DNA, 481 bp, Unknown
  Bacterial polypeptide expressing nucleotide sequence isolated from the Sargasso Sea
tatgaaaatttggaattctaagaatcaaaaaataaatcagaaagtagataccttcttaagtggtgaagacatacatcttgataatgagatatttacatttgatgtagatgcatccattgcgcatactgaggaattgcttgcaataaaactacttacaggaaatgaagcttctatgttaaaaagagagcttaagaagattaaaaaagattttttatctggcaagcttactcttaataaaaaatttgaagactgccattcggccattgaatatctgttaatcaaagaacttggagatgttggcaagaagatacacaccggaagaagtagaaatgatcaggtactggttgcccttagactttatcaacaacactatttaaaaattattagggatttagtgctaaagctagctaaagaacttttaagtaagtcaaagcaaaatgaatatttaccaatgcctggttatacccatctgcaaagagca

SEQ ID NO: 287885 - DNA, 457 bp, Unknown
  Bacterial polypeptide expressing nucleotide sequence isolated from the Sargasso Sea
atgaaaaataaaaataaaactgtttggtcacacagagtaggtaaggcaaattctataaattttcaaagaattggctcatctattaacgttgataaaagactttataatgaagatatatttgcatcaatcgttcatgcacaaatgctaattaaacaaaaaattattccaaaaaaggatggaataaaaataatcaatggattaaaaaagataaaaaaagaaattgaaaaaaataaatttaaatttaaagaaaaatttgaagatatacaccaaaatattgaaaaaagattgttcgagataattggtcaatccgctggttatttacatacagcaagatcaagaaatgaccaagttgtaactgattttaaaatctgggttaaaaatgcttccttagatattaataaaattttaaatttattaataaaatccattttaaaaaaagctgaaaaaaatattagta

SEQ ID NO: 287886 - DNA, 697 bp, Unknown
  Bacterial polypeptide expressing nucleotide sequence isolated from the Sargasso Sea
atgggtaaaaataaaaacaatcagccaatttggaatactagaattaaaaaggaaaaaacaaacctttttaaaaaggttggtggatcaatagaaatcgataaaagattattcagagaagatattgaagcttcaattgtacatgttgagatgctgtttagacaaaaaattataaattttaaaattaaaaataaaatagtatggggtttgaatagaattaaaaatgaaattataaaaaaaaaatttatttttgatgataaacttgaggatattcatatgaatatagaaaacagactctttgaacttatcggagaagatgctggatatattcatactgcaagatcaagaaatgaccaagtagtcacagattttaaaatttggttaagaaaagctaacaaagaaattttaaaaaatattgatgtaacaattaaaaatattttaaaaaaagcagaaaaaaatgttgagacaattatgcctggtttcactcacctaaaaaatgctcaaccagtttcttttgctcattacttaatggcctacttagaaatgtttaacagagataaaaacagatttaaaaataatttagaaggtcttgatgaaaatccacttggtgtagctgctttaacaggtacttcttttaaaattgatagattttatacttcaaaaaaattaggtttcgacagaccaactaaaaactcaatta

SEQ ID NO: 287887 - DNA, 502 bp, Unknown
  Bacterial polypeptide expressing nucleotide sequence isolated from the Sargasso Sea
tataagatcaaaaacagggagagtttttagttcactcgcaaattcacttattattcaaaaaggtataccaagtggatatagtaaagatttgcaggaagataaagaaccaaccttcgatgcatattattcaattgaaataattttaaatgttgcgaatgaaatggtaaaatctataaaaattaataaagaaaggatgtatcaggaatcaaacaaaggttttacaaccgcaacagatttagcggattggatggtgagaaaaattagcctaacttttagagatgcccatcataaaactggaaaaattgttttattagctgagaaagaaaaaaaaatgttatgtcaattaactttagatagtcttaaaaaaattgaacctaaaattaacaaagatgtttatgatattttattaccagaaaaatcaatatctcataagaaatcatatgggggaacttctttagaaaaggttgttgaggcaataaaaagagccaaaaaaagaatatag

SEQ ID NO: 287888 - DNA, 598 bp, Unknown
  Bacterial polypeptide expressing nucleotide sequence isolated from the Sargasso Sea
ttctgatatatttaaatttattaaaattaacgacaaaatgctaactggatcgtcaataatgccccaaaagaaaaatcctgatccagccgaattaattagaggaagagcagggaaaaactttggtgcacttcaagccttattaacaaccatgaaaggtttgccattatcttattacaaagatatgcaagaagataaatctttggtgtttaatagttatgatactattttagaatcaattattatttcaaatgaattaattaaaaatttaaaacctaacaaagatagaatgctagcccaatcaaatgagggatatactaccgcaactgattttgctgattatttagtgcaaaaaaataaattgtcatttagagaggcatacaaaatttctgcaaaattagtgaattatagtgaaaaaagaaaaaaaaaattaaatcagcttagttttgctgaattaaaaaaaatggttaagaatttggataaaaatgcaatgagagtatttgatgtaaaaaattcagtaaatctcaaaacatcttatggaggaacttctacaaaaaacataaaaaaggtgatatttaaactaaaaaaggaatttaaataa

SEQ ID NO: 287889 - DNA, 646 bp, Unknown
  Bacterial polypeptide expressing nucleotide sequence isolated from the Sargasso Sea
catgacaaaaaataaaaacaaccaggcaatatggggcgatagaataaagtcaaatacctcttcaatttttcaaaaagctggtagttccataaatatagataaaagactttacagagaggatatagctgcatctatagtacacgtggaaatgttatttaggcaaaagataatttcttttaaaattaagaataaaattatttatggccttcataagattgaaaaggaaattgccaaaaaaaaatttcaatttaacgaaagatacgaagatattcatttaaatattgaaaaaagactttttcaaattattggggatgatgcaggttatctacatatagcaagatcaagaaatgatcaggtaattacagattttaaaatttggatcagatctgcctcaaaaaaaattatgaccaaattagatggcataattaaaagttcattaaaattagctgaaaaaaatatagataccatcatgcctggtttcacgcatctcaaaaatgctcaggcaatttcatttgcacattacataatggcttatattgaaatgtttgagagagataaaaaaagattttctaataatttagaaagtttgaatgaaaatccattaggtgttgctgcgcttacaggaacatcttttaacattgataga

SEQ ID NO: 287890 - DNA, 610 bp, Unknown
  Bacterial polypeptide expressing nucleotide sequence isolated from the Sargasso Sea
tattgtggtcaaccagcaatataattttattgatcttcctgacgatcttgcaactggtagttcaattatgcctcagaaaaaaaatcctgatggagctgaattaattagaagtcaatcagcaacaagtataagtaatctaaataatctattaattatattaaaaggccttccccttggttatagcaaagacttacaagaagataaaaaattaatttttaattcttatgatacggtgaacttgtcattaaaagtgatgatagaacttattaaaaaaataaaatttaataaaaaaaatatgcaaaatgcttgcgatcagtcttactctacttctacagatttagctaattatttagtaaagcagctcaattacacttttcgaaatgcttatatattgacaggcaaaatagtggaatattcgattaaaaaaaataaaaaattagaagaattatctattactgagttaaaaaaatttgataaaaaaatttctatttcaatatataaaatactatcaagtgcaaatagcatgaaaaataaaactagttttgggggtgcttcaccagaaagtgtaaacaaatctattcaatatgctataaataagtatttaaaatga

SEQ ID NO: 287891 - DNA, 552 bp, Unknown
  Bacterial polypeptide expressing nucleotide sequence isolated from the Sargasso Sea
caggctcatctataatgccacaaaaaaaaaatccagatcttttggaatatttaagaggtaagtctggcctagcttttggaagtttgttttcaatgctaacaatattgaaaggattgccactttcttattttaaagatatgcaagatgataaagaaataatttttaaatcatacgacactctcattaattgtctaaaaatatttgatgaaatattgaaaaacgtttctcctaataaaaaaaagatgttagagctagctgagaccggttatactactgctactgatttggcagattatttggttcaaaatcattccatgtcatttagaaaagcatatctaaaaactgctgaaatagtaaatttggctgaaaagaaaaaaagaaaacttaaagatcttaaaattgaagaacttaagaaaattgaaccaaagctaacaaatgaagttttaaaagtttttgatttaaaaaattcaataaattcaaaaaaatcctacggaggaacatcttttgaaaacatcaaaagaatgataatgaaatataaaaaagataaatgat

SEQ ID NO: 287892 - DNA, 742 bp, Unknown
  Bacterial polypeptide expressing nucleotide sequence isolated from the Sargasso Sea
atgagtcaaaataaaaacaataatacagtttggaacacaagaattaaaaaaaaaatttcaaacattttaaaaaaagttggatcctctattgaagtagataaaaggctgtataaagaagatatattagcatctgtctcacacgcagaaatgttatacaagcaaaagattataactattaagattaaggataaaattttatgggggttgaaaagaattcaaaatgaaattgagaaaaaaaactttaagtttgatgaaaatttagaagacattcatatgaatatagagaatagactttttgaactaattggtaatgatgctggttatttacattcagcaaggtctagaaatgaccaagtagttacagatttaaaactatggttaaaaaaatccacaatagaaattgatagtttattattaaagctaataaaatctttgatcaaaatttcagagaaaaatatattttctatcatgccaggttttactcatcttaaaaatgctcaaccgatttccttagcacattattttttatcaaatgttgaaatgttcaaaagagatagacttagattttcttctaatatgaaaagtttgaaccaaaatcctttgggagctggtgctttttctggaacatcttttaatattgatagatggtataccactaaaaaactaaaatttgaggaaccaacaaataactctttagatacagtatctgacagagattttgttttagattttttgtacagtt

SEQ ID NO: 287893 - DNA, 793 bp, Unknown
  Bacterial polypeptide expressing nucleotide sequence isolated from the Sargasso Sea
cttgttcctgctctagcaggaacaagttttaatattgatagaaactatacatcaaaaaaattaaaatttaaaaacccaacaaataattcaattgatacagtttcagatagagattttgtattggattttttatattctgtatcagtttgttctgtacatatttcaagattagctgaagaatttattatttggaattcagatgctttcagattgataaaacttagtgataaaatagtcactggatcctctataatgccacaaaaaaaaaatcctgatacgttagaatatttaagaggaaaaacaggaagtagttttggtaatttgtttgcaatgcttactattttaaaaggattaccactttcatattttaaagatttgcaagatgacaaagaactagtttttaactctttcgatcaaataaaaaattcaattttaatagttatagaaatattaaaaaattttgccccaaataaaaaaagaatgtatgaattggcgaatattggttttacgacgtccacggacttagcagattatattgttaaatcttatggaatcccatttagaaaatcatatcaaataacttctaaaattgtaaattatactgaatctaaaaaaattaaattaaatgaattaactttacaagacttaaagaaaattgaacctatgctccaagaggatgttttaaaaatttttgatttaaaaaattcaataaaatcaaaaaaatcatatggtggtacatcttttgaaaatattaagaaaatgataaaaaagtataaaaaagaatcaaaatgat

SEQ ID NO: 287894 - DNA, 826 bp, Unknown
  Bacterial polypeptide expressing nucleotide sequence isolated from the Sargasso Sea
ggtgacctggggaggcgtctccatactggtcggtcgagaaatgaacaggtgtcacttgacctcagactctacctccgtcgccaaatcggtcatctccaagttgaacttgaaggcttgatttcggcgttatgtggatgttcgtcatcggcaggcgacacgcttgtgcctgcgtatactcaccttcgtcgtgcgcaacctgtacttgtggcgcatgtcttgctggctcatgccacagccttccagcgtgattggatacgttttgactcggcgagagacgaagcggatgctatgccactgggttcaggtgcggtggcaggaacgagttacgaaatcgatacgcaaacactcgctcaaactcttgggtttactcgcgtggtcaaaaacagtattgatgcggcgtctgatcgtgattttgtatcgtctatgttgcatgcgtgtgcgttgacaatggtacatatcagtcgtttggcagaagaccttattatctttacgagtgaagagtttggttattttgaactttctgattctgttgcgacaggaagtagtctgatgccacaaaagaaaaatcctgatccacttgaattggtacgtggaaagagtggtcgtgtcattggtcacttaaccgggtggttgacgaccatgaaagggttaccaagcggttataacaaggacctccaagaggacaaagagattgtgtttgatacggagaagaatgttttaggttcgattcgtgctactacttcagtcgtcaacaacttgacagtgtgcccgggtcgaacagaatttgcctcaacgggcatgttgcttgcgaccagatgtagctgat

SEQ ID NO: 287895 - DNA, 442 bp, Unknown
  Bacterial polypeptide expressing nucleotide sequence isolated from the Sargasso Sea
catggcaaaaaataaaaacaaccaagcaatatggcattcaagaattaaaaaaaagagctcaactttatttcagaaagtaggtagctctataagtatagataaaagactttatgaagaggatattaaaggctctattgcacacgtagaaatgttgttcaaacaaaaaattatctcttttaaaattaaaaataagattatttatggacttggaaaaattgaaaaagaaatcaataaaaataaatttgaatttaatgaaaaatatgaagatattcatatgaatatagaaaagagattatttcaaattattggtgaagaggcaggatatattcacattgcaagatcaagaaatgatcaagttataactgatttcaaattatggataaaatctgcaactaaagaaatcaacctaaatttaaataaaataattagatcaactattaaa

SEQ ID NO: 287896 - DNA, 661 bp, Unknown
  Bacterial polypeptide expressing nucleotide sequence isolated from the Sargasso Sea
cttgaaaatttggatgaaatcatcaaccaaagaaattaatgttctattagatactattattaaaagtgtaataaaagcagcagaaaaaaatatatatactcttatgcctggatttactcatttaaaaaatgctcagccagtttcatttggccactatttgatggcttatgttgaaatgtttaaaagagataaaaagagattcataaataatctagatagtttaaatgaaaatcctttaggtgtcgctgctttaactggaacctcttttaatattgatagaaattacactacaaaaaaacttggatttacaaaaccaactaataactcaatagatacaatttctgacagggattttgtgctagattttctttactctatctcagtctgtgccatgcatatttctagaatagctgaggaacttatcatatggaactctgatgctttcaagttaataaatttatcagataaagttgtaactggttcttcgataatgccacaaaaaaaaaatccagatttactggaatttttacgaggaaagtctggaattatttatggtaatttgttttctatgcttacagttttaaaaagtttacctttatcttactacaaagatcttcaagacgataaggaaattgtttttaaatctaatgatacactacaa

SEQ ID NO: 287897 - DNA, 499 bp, Unknown
  Bacterial polypeptide expressing nucleotide sequence isolated from the Sargasso Sea
aatgaataataatgataagactaatccgttgtggggtgggagatttaaaagtgaagcagatgaaactgctttgaagttctctgcttcggtagatttagataaaagactctataaagaagatatagaaggctctattgtctatgccatggcactcaaagaagcaaaagtaataacccaaaaagactattctcagatcaaaaaaggtctactggccatatcaaagtctataaaagatggaaaattccattgggacatgaatcttgaagatgtccacatgaatatagagtctgctttatacagaaagataggcaaggcagcaaagaaactgcacacgggcagatcaagaaatgatcaagttgcaacagaccttagattattccttatgagaaaaatagatctgattcttcatgaaataagctcaactcaaaaaaaggtaactaaattagccaaaaaatatcataaaaactttaatggcctgggcttacacatactcaaatag

SEQ ID NO: 287898 - DNA, 715 bp, Unknown
  Bacterial polypeptide expressing nucleotide sequence isolated from the Sargasso Sea
aacaaataactctttagatacagtttctgacagagattttgttttagattttttgtacagttcatctatatgctcgatgcatatatcaagaattgcagaagagttaataatttggaattcagaccaatttaaattcattagcttaaaagataatattgtaacaggctcatcgataatgcctcaaaaaaagaatcctgatactttggagtttttaagaggaaaaactggatcaatttttggaaatcttttttcaatgttaacaattgttaaaggtttaccaatatcttattttaaagacttacaagatgataaagatctggttttcagatcttttgataatttgaaaaattgtttaataatttttgatgaagtaataaatggagtaattgttaacaagaaagtgatgttagatgctgctaaaataggatttacaacagcaaccgattttgctgatgcattggttaaaaacatgaatttttcttttagggaagcttatttgttaacggcaaaagttgtgaattttgctgaaaagaaaaatttagctttaaatgaaattggacatgaagatttaaagaggattgttccaaaaataagtcccgatgtgatgaaaaatctggatttaagaaactctgtaaattcaaaaaaatcatatggtggaacttcttttgaaaacataaagaaaatgataagaaaacataaaaaagaaataaaatga

SEQ ID NO: 287899 - DNA, 661 bp, Unknown
  Bacterial polypeptide expressing nucleotide sequence isolated from the Sargasso Sea
tttgtataattgttcggtttgttctatgcacatttcaagaatagcagaagacttgatcatttggaactcagatgcatttaatttaattacactttcagacaaaattgttacaggttcttcaataatgcctcaaaaaaaaaatccagatcttctagaatttttaagaggtaaaactggaacaatatatggaaattttttttcaatgcttacaatcttaaaaggattacctttatcctattttaaagatttacaagatgacaaagaaattatttttaagtctactgaaactcttaataattgcttgaagatattaattgaaatcttaaataatataaatccaaataaaaaaagaatgttagaacttgctaaatcaggatatataactgcaaccgatttagctgagcatttagtcaaaaattattctatgccatttagacaggcttatcaaaaaacagcagcaatagttaatctggcagaaaaaaagaaaaagagactaaatgaattgaccattgaagaattaaaaaaaattgagccaaaattgaaaaatgatgtagttaaaatatttgatttaaaaaattccataaattcaaaaaaatcttatggaggaactgcttttgataatattaaaaaaatgatagtaaaatacaaaaaaaatttatga

SEQ ID NO: 287900 - DNA, 394 bp, Unknown
  Bacterial polypeptide expressing nucleotide sequence isolated from the Sargasso Sea
catggtaaaaaataaaaacaaccagacaatatggaatacaagaattaaaaataattcttctaatctctcacataaaataggtagctctattgatgtagataaaagactgtataaagaagatataaatggttctattgctcatgtagagatgttatttaaacaaaaaataatttcttttagaacaaaaaataaaattatttatggactaaataaaattgaaaaagaaatatccagtaaaaaatttgaatttaataaaaaatacgaggacattcatattaatattgaaaaacgactgtttcaaataattggtgaagaagcgggttatgttcacacagcaagatctagaaacgaccaagtaataaccgactttaagatctggattaaatctgcaaat

SEQ ID NO: 287901 - DNA, 433 bp, Unknown
  Bacterial polypeptide expressing nucleotide sequence isolated from the Sargasso Sea
atgagtcagaataaaaacaacaatacagtttggaatactagaattaaaagaaagacttccagcatttttaaaagagttggttcttctattgatgtagataaaagattatacaaagaggatatattagcgtctgtctcacatgccgaaatgttatacaagcaaaagattataactattaagattaaggacaaaattttatggggattgaaaaaaattcgaaatgaaatcgagagaaaaaactttaaatttgatgaaaatttagaagatatacatatgaacatagagaatagactttatgaacttattggtaatgatgctggttatttacattcagcaaggtctagaaatgatcaagtggttacagatttaaaattatggttaaaaaaatccacattagaaattgataatttattattaaagttaataaaatatt

SEQ ID NO: 287902 - DNA, 571 bp, Unknown
  Bacterial polypeptide expressing nucleotide sequence isolated from the Sargasso Sea
atggcaaaagtttggagtaaaaggtttgataatgcacttaacccttttattgaaaagtttaatgcctcaattggttttgatagaaagcttattttagaagatttagattgctcaattgctcatgcgaaaatgcttggcaaaacaaaagttttatcctcttctgaagctttgcaaattattaatggtttagagttaataaaagttgagtatttggagggtaaattttctcctggtccaccttctgaagatattcactattgcatagaagaaaagctaattagtttaattggtgaaactggaaaaaaattacatacaggtagaagtagaaatgatcaagttggtacggatataagattgtggcttagaaaagagattgacaatattgaaattttaataaccgatttgcaaaaatccttcttaaatcttgccaaatctaatatttataccttaattcctggatatacccacatgcaaagagctcaaccattatctttggctcatcatttattggcttacattgaaatgctacaacgagatcgtgaaaggtataaagaagtacgctcaagagtta

SEQ ID NO: 287903 - DNA, 846 bp, Unknown
  Bacterial polypeptide expressing nucleotide sequence isolated from the Sargasso Sea
gagataaaaaaagatttcttaataatatagaaaatttaaatgaaaatcctttgggagtagctgccttaagtggaacctcgtttaatatagatagattttttacttcaaaaaaaatgaaatttaaaaaaccaacaaataactctattgatactgtagcagatagagattttgtattggactttttatatgcagtttctgtatgttctctccacatttcaagaatagccgaagaactaattatttggaattcagatggttttaatttgatttatttatcagacaaagttgttactggttcatcaattatgcctcaaaaaaaaaatccagacccactagaatacttaaggggaaaagctggaggaacattcggtaatctattttcaatgttaacaattctaaaaggtttaccattatcatattttaaggatttacaagatgataaagaaatagtttttagatcatttgatattttagataattgcctttccatactaaacgaaatattaaataattttaaaccaaataaagatagaatgttagaattggccaataaaggttttataacttcaactgatttagcagattatctagtaaagtatcatgataaatctttcagaaaagcatacgaaatttcagctaagatagttaattatgctgaaaaaaaaaatataaaactgaatgaacttaatttaaaagatctacaaaaaatagagcctgaattaacaaaaaatgttttaaaaattttcaatttaaaaaattctgttaattcaaaaaaatcatttggaggaacatcctttaaaaatataagaaaaatgattgtaaaatataaaaaaatttataaataat

SEQ ID NO: 287904 - DNA, 358 bp, Unknown
  Bacterial polypeptide expressing nucleotide sequence isolated from the Sargasso Sea
atgaaaaataaaaataaaactgtatggtctaaaagatttaaggaagatacatctaaatcttttcaaagaataggttcgtctataaatgttgataaaagactttataaacaggatattcttgcatcaatagtacactcccaaatgctggtaaagcaaaaaattatttcgccaaaagttggtaataaaattattaatggattaaaaaaaattaaaaaacaaatggataaaggtagctttaagtataaagaaaaatatgaggacattcatttaaatattgaaaaaaaattgtttgagatttctggtcaagcagcaggttacttacatactgctagatctagaaatgatcaagttgttactg

SEQ ID NO: 287905 - DNA, 719 bp, Unknown
  Bacterial polypeptide expressing nucleotide sequence isolated from the Sargasso Sea
gccaactaataattccatagatactgtagcggatagagattttgtaattgattttttatatgctgtttcagtttgttctcttcatatatcaagaattgctgaagaattaattatttggaattcagatggttttaatttgattacattatcagacaaagtagttacaggttcatcaattatgccccaaaaaaaaaatccagatccattggagtatttaagaggcaaagctggaggaacttttggaaatttattttctatgctaacaatcttaaaaggacttccactatcatactttaaagatcttcaagatgataaagaaatagtttttagatcatttgatactttaattaattgtatatcaatacttgatgaagttttaggtaattttaaaccaaataaaaataaaatgttaatattggcaaataaagggtttgccactgcaacagatcttgcagaatatttggtaaaatatcatgaaaaaacatttagaaaagcatatcaaattacagctaacgtggttaactatgcagaaaaaaatagaaaaaaattaaacgaattaacaataaaagatctgcaaaaatttgaacctaacttaaaaaacaatgttttaaatatttttgacttaaaaaactcaattaattcaaaaaaatcatttggcggaacatcatttaataatgtaaaaaaaatgatagtaaaatataaaaaaatttataaatgat

SEQ ID NO: 287906 - DNA, 406 bp, Unknown
  Bacterial polypeptide expressing nucleotide sequence isolated from the Sargasso Sea
gatgaaaaagaatagaacagtttggtcaaatagaatcacaaaaggaaattcaaaaaatttccaaaggataggttcgtctataaatattgataaaagactctataaagaagatatttttgcatcaataatacatacaaaaatgcttattaaacaaaaaataatatcaaaaaaagatggttttaaaataataaaaggtcttaaaaaaatagaaaaagaaataagcaaaaaaaaattcaaatttaaagaacagtttgaggacattcatcaaaatatcgagaaaagattatttcaagttattggtgagtctgctggctatttacatactgcgagatcaaggaatgatcaagttgtgaccgactttaaaatttgggtaaaagactcatctgaagatactattgatacaata

SEQ ID NO: 287907 - DNA, 301 bp, Unknown
  Bacterial polypeptide expressing nucleotide sequence isolated from the Sargasso Sea
cttcataaatattgataaaagactttataatgaggatattcaggcatcgattgttcatgtgcaaatgctaacaaagaaaaaaataattccaagaaacgctggaattaaaataatcaaagggttaaaaaaaattaaaactgaaatcgataaaaataaatttaaatttaaggaaaagtttgaagatattcatcaaaatattgaaaagagactttttcaaattattggtgactctgcaggctatttgcacacagcgagatctagaaatgatcaagttgtaacagattttaaaatgtcgggttaa

SEQ ID NO: 287908 - DNA, 805 bp, Unknown
  Bacterial polypeptide expressing nucleotide sequence isolated from the Sargasso Sea
tggaagcaactcgctagactgcatcgtttcccgttgggaaaacgaagcccagctggcccatgtcttcagcatgttgatgaaccgcctcagcgtcatctcccaggacctgatcattctcagtctgccctacctgaagatggtccgcatcgatgacggatttgtcactgggtcctcgatcatgccgcagaaaaagaatccggattttgcagaagtgatccgttccaaggcggcttttgtccagggacaactgcagagcctgctgggaatccagaaaggcgccctgagcggctataaccgggatacccaatggaccaaatacttgatcatggacgtggtacgggaatgtgaagatgctcccggaatcctccgtgaagtttaccggaccctggaaatcgacattgatgcaatgcggcggcattgtcaaagcggattcatgaatgccgtggacctggcagacctgctctgtcgggaaaacggtctcgccttccgcgaagcccacaacatcattgcccgagccgtcaagttgagttcagaatccggctccatttccgcggattccctaaaaaatgcttttcaggaatcaggacgagatccgcaagaacttcctgaaaacatcgaagcttaccaaaatccctcgactctaatcgaagccaggaaacaaacgggatcaccctcgccggaacaggtttggagtcagattggagcattacggaaagaacttgaatccatctcaaaaccgatgattgagatcagcagcagggcagaaaacgcctggcagcgatgccggaatgtaaactccggttga

SEQ ID NO: 287909 - DNA, 729 bp, Unknown
  Bacterial polypeptide expressing nucleotide sequence isolated from the Sargasso Sea
tatactcatcttcaaaaagggcagccagttttactttctcattacttgatggcatatttttcaattttatcaagagacctagacagacttgaatcttgttatgaaagcatgaatgttatgccattgggttcaggtgcattcgcaggagtcactattcctattgatagaaaatttttagctaatgaattaggattcaaaaatatttctgataattcaattgattctgtttcatcgagagatcatatcttggatcttctttattcattgagctcaataatgatcaatacttcaagaatatgtgaagaatttataatctggtctacagatgaattcggttttattaatttgccagaaaattttactactggatcaagcataatgcctcaaaaaagaaacccagattatttagagctagttcgtggtaaaacaggaaactctattggtaatcttatttcattgatgactactttaaaaggtcttccatttacatataatcgagaccttcaagaagatagagaaggagctatgaattcattagaatcagtgactaaaactgtagtagtgcttaagagtatgtttttaggtataacttttaataaagaaaagatgttgagttcttcaattgaatcaaatattctatcgacagatttagctgattatttagcttttaaaaaaattccatttagagaagcttatgaagtaataaaaaaagtttctaaaaaattatcc

SEQ ID NO: 287910 - DNA, 82 bp, Unknown
  Bacterial polypeptide expressing nucleotide sequence isolated from the Sargasso Sea
attgacctcccccgatagcttttgtactggttcttcaatcatgcctcaaaagaaaaatcctgatgtgccgaactcatcgagg

SEQ ID NO: 287911 - DNA, 607 bp, Unknown
  Bacterial polypeptide expressing nucleotide sequence isolated from the Sargasso Sea
aatttggaattcagatatatttaaacttattaatctagatgacaaaatgttaaccggttcatctattatgccacaaaagaaaaacccagatcctgcagaattgattagaggtagaactggaataaattttggatctttacaggcaatgttaacaaccatgaaaggtcttcctttgtcttattataaagatatgcaagaagataaggcgctagtattccaaagctacgatacgttattggaatcaattactataagtgatcaattaattaaaagtttaaagcctaataaagaaagaatgctttctttagcaaatgaaggctatactactgctacagattttgcagattatattgtaaaaaataataatttatcttttagagaagcatacaaaatttcagcaaaactagtaaattatgctgaaaagaaaagaaaaaagttaaacgaactaactttgaaagaagttcaaaatatcaaaaaagatttaaatggaaacgttttaaaagtatttgacgttaaaaattcagtaaactcaaagtcttcttatggtggaacttctacaaaaaatataaaaaaaatgatatctaagttaaaaagggaatttaaatga

SEQ ID NO: 287912 - DNA, 635 bp, Unknown
  Bacterial polypeptide expressing nucleotide sequence isolated from the Sargasso Sea
catggcaaaaaataaaaacaaccaggcaatatggaacacacgtataaaaaaagatacgtcaagtttgtttcaaaaagttggtaattctttagatgttgataaaagactctacaaagaagatattaaaggatccatcgcccatgttgagatgctttttaaacaaaaaataatatcatttaaaattaaaaataaaattatttatggtctaaacaaaatagaaagagagatttccaataaaaaatttgagttcaataaaaaatatgaagacatccatatgaatattgaaaaaagactttttcaaattattggtgaagaggctgggtatgtccatacagctagatcaagaaatgatcaggtaatcactgattttaaattgtggataaaatctgcaaccaaagaaataaataacaatcttgataaagtgattaagtcctctgtaaaattagctgaaaaaaatattcagactattatgcctggttttactcatttaaaaaacgctcaggcaatttcatttgcacattatctaatgtcttatgttgaagtttttaatagagataaaaaaagattttctaataatatagaaagtttagatgaaaatcctcttggtgttgctgctttatctggaacatcattta

SEQ ID NO: 287913 - DNA, 808 bp, Unknown
  Bacterial polypeptide expressing nucleotide sequence isolated from the Sargasso Sea
aaccaaaatcctttgggagctggtgctttttctggaacatcttttaatattgatagatggtataccactaaaaaactaaaatttgaggaaccaacaaataactctttagatacagtttctgacagagatttcgttttagattttttgtacagttcatctatatgctcaatgcatatatcaagaattgcagaagagttaataatttggaattcagaccaatttaaattcattagcttaaaagataatattgtaacaggctcatcgataatgcctcaaaagaagaatcctgatactttggagtttttaagaggaaaaaccggatcaatttttggaaatcttttttcaatgttaacaattgttaaaggtttaccaatatcttattttaaagacttacaagatgataaagatctggttttcagatcttttgataatttgaaaaattgtttaataatttttgatgaagtaataaatggagtaattgttaacaagaaagtgatgttagattctgctaaaataggatttacaactgcaaccgattttgctgatgcattggttaaaaacatgaatttttcttttagggaagcttatttgttaacggcaaaagttgtaaattttgctgaaaagaaaaatttagctttaaatgaaattggacatgaagatttaaaaaggattgttccaaaaataagtcccgaagtgatgaaaaatctagatttaagaaactctgtaaattcaaaaaaatcatatggtggaacttcttttgaaaacataaagaaaatgataagaaaacataaaaaggagataaaatgaa

SEQ ID NO: 287914 - DNA, 502 bp, Unknown
  Bacterial polypeptide expressing nucleotide sequence isolated from the Sargasso Sea
atggcaaaaaaagaaaaagaaataaatcctctatggggaggtagatttgaatctgggactgatgatatcgctcaatcattttctgcatctatcgatatagataaaagactctttgaagtcgatatccaaggttcaattgcatatgccgagatactaaaagtggcgaatttaataaattcctctgaacttaaaagaataaaaaaaggtctcaataagattttagatgagataaggcatgataaatttaattgggatccaggcttagaggatgttcatatgaatattgaggcaaggcttgtaaaaattgctggcacagcagcaaaaaaaattcataccggcagatctagaaatgatcaagtagccacagatttaaggctatttctaaagaaccaaatagacgagattctagacttaactatcttgcttcaaaaatctttattaaaaaaagctgacgaaaataccgatactttgatgccccggtctaactcatcttcagattgca

SEQ ID NO: 287915 - DNA, 508 bp, Unknown
  Bacterial polypeptide expressing nucleotide sequence isolated from the Sargasso Sea
atgtatcgttcccgattaggaaaagatcttgatgatatcacgttaagctatgtttcatccataaaagatgattctgacattgcattttatgatatcataggaagtgaagcacatgtaatcatgttatatgaaaataaactcttgtcaaaaattgaaacaaaaaagatcttgaccgcgttagaagaattaaagggaggaaacatctctcagcctgattttgaacctgaagatatacatgaattaatagaatctctagtaatcaaaaaaactggaatcgaaaatggcggaaaaatgcatactgctcgttcacgaaatgatcaagtagcacttgatattagactaaaaattcgcgatgacattaacatacttttacaatgtctaatcgaaacaatttctactcttctcaagactgcacaagaaaatacaaaaacaataatgccactttacactcatcttcaacaagctcaagttggagtattttcaccactatttactttcatacgcagat

SEQ ID NO: 287916 - DNA, 438 bp, Unknown
  Bacterial polypeptide expressing nucleotide sequence isolated from the Sargasso Sea
aatgaaaaataaaactgtttgggcaaatagacttaaagaaaagacatcagcctcttttcaaaaaataggctcatctattggtgtagataaaagactatatgagcaagacataactgcgtctattattcataccaaaatgttagttaaacaaaaaataatagctagtaacgaaggagctaaaatcatcaatgggcttaagaaaataaaatcgcagattgagataggaaagtttaaatttcaagataaatttgaggatattcatttaaatatagaaaaaaaattatacgaattaattggtcccacagcaggctttttacacacagcaagatcaagaaatgatcaagttgttacagatttcaaactatggataaaaaaatcatcgagagaaactattagtaacattaattctttaatgaaaattttgttaaaaaaagcgga

SEQ ID NO: 287917 - DNA, 778 bp, Unknown
  Bacterial polypeptide expressing nucleotide sequence isolated from the Sargasso Sea
agctggcacatcatttaatatagatagaaattttacaacaaaaaaattaaaatttagtacacctacaaaaaattctattgatacagtttctgatagagattttgttattgactttctatatgctgtatctgtttgctctttgcacatatcacgttttgctgaagaatttattatatggaattctgatgctttcaaactaatacagcttaatgataagatcgtaaccggatcatctataatgccacaaaaaagaaatccagatcccttagaatttctaagaggaaaaacaggaaatgcttttggtaatttattttccatgctaactattttaaaaggactgccattatcttattttaaagatatgcaggatgataaagagttagtttttaaatcttttgatcaattaaaaaattcattattaatttttaatgacattttaaaaaactttagtgcaaataagaaaaggatgtttgaattagcaaagtcaggtcatactactgcaactgatttagcagattatatggttgaagagcttcattttccatttagaaaatcttacgaaatcacttctaaaattgtaaattatgctgaatcaaaaagaaaaaatcttgatgaattggatgtaaatgagttaaaaaaaattgaaccaaaattaaatgaagaagcattaaagatgtttgatctaagaaactcaataaaatcaaaaaaatcttatggtggtacttcttttgaaaacattaagaaaatgataaacaaatataaaaaggaaataaaataa

SEQ ID NO: 287918 - DNA, 433 bp, Unknown
  Bacterial polypeptide expressing nucleotide sequence isolated from the Sargasso Sea
catgtcaaaaaataaaaacaaccaagcaatatggggtgcgcggattaaaaaagctacatcagcaacatttcaaaaaattggaagttcaatagaaatagataaaagactttataaagaagatataaaggtctcgaaagtacatgtagaaatgctttttaagcaaaaaatagtttcttttaaaataaaaaataaaataatttatgggttagagaaaattgaaagagagataaaaaataataaaatccatttaagtaaaagttacgaagacattcatatgaatattgaaaaaagactttttcaaataatcggagatgaagcaggatatatacacacagcaagatcaagaaacgaccaagttataacagattttaaaatttggattaaatcctctacaaaagaaataagtcttaaaatagataaggttataacaagt

SEQ ID NO: 287919 - DNA, 643 bp, Unknown
  Bacterial polypeptide expressing nucleotide sequence isolated from the Sargasso Sea
caccgggtcctcgatcatgccgcagaaaaagaatcccgattttgcagaagtgatcttttccaaggcggcttttgtccagggacagttgcagagcctgctgggaatccagaaaggcgccctgagcggctataaccgggatacccaatggaccaaatacttgatcatggacgtggtacgggaatgtgaagatgcacccggaatcctccgtgaagtataccggaccctggaagtcgacatggatgcaatgcggcggcattgtcaaagcggattcatgaatgccgttgacctggcagatttgctctgtcgtgaaaatggtcttgccttccgcgaagcccacaacatcattgcccgagccgtcaagttgagttcagaatccggctccatttccgcggattccctgaaaaaggcttttcaggaatcgggacgagatccgcaagaacttcctgaaaaaatcgaagcctaccaaaatcccacgactttgatcgaagccaggaaacacactgggtcaccctcgccggaacaggttcaaaatcagattggagcattacggaaagaattcgaatcaatctccaatccgatgattgagatcagcagcagggcagaaaacgcctggcaaagatgccggaatgtaaatcccggttga

SEQ ID NO: 287920 - DNA, 352 bp, Unknown
  Bacterial polypeptide expressing nucleotide sequence isolated from the Sargasso Sea
atgaaaaataaaactgtttgggcgaatagactaaaggggaagacatcactttcttttcaaaaaataggctcatctattagtatagataaaagactatatgagcaagatatagctgcgtctattgttcatgcaagaatgctcgtaaaacaaaagattattggtagcaaagaggggtctaaaataatcaatggacttaaaaaaattaagtcacaaattgataaaggaaagtttaaatttcaagaaaaatttgaagatattcatctgaatatagaaaaaaatttatttgagttaataggtccttcagcaggttttttgcacacagctagatcaagaaatgaccaagtcgttacag

SEQ ID NO: 287921 - DNA, 823 bp, Unknown
  Bacterial polypeptide expressing nucleotide sequence isolated from the Sargasso Sea
atgaaaaactccacttggtcgggaagatttaaaaaagggttagacgaagaagtgctcgagttctctgaaagcattagctttgatcatcttctttttgattcagacatcagggtgtgtattgcgcatgcggagatgttgtcagagtgtaaaattatttcaaagaaggaatcaaatatgttgattaaaggtttaaatgcagttcaaaagaaatatgatgctggcaagctgaggctgtcaatcaaatttgaagacgtacacatgaacatagaacaagctcttactaaagagattggagaacttggtaaaaaaattcatatgggaagatctaggaatgatttagttgcaacagacttcaggttgtacttgagggactgctcagacttaattctggaaaaattaagagacatcagatatgcacttgccttatctgcacacgataattctagcgtaatttttccaggttacacacatttacaactagctcagccagttacattcggacatcatctgcttgcttggcatgaaatgttagcaagagatgaacagagaatggctcaaactaaagataggcttaatgttcttcctttaggaagcgctgctctgtctgggacaccatataaaattgatcgcaagtttgttgctaaaaaactcggatttaaaactgtgtcatctaattctatggatgcagtaagcgatagagatttcgtttgtgattttgcatatacatgttcaatgacgatgatgcatctttcaaggatatcagaggaactagttttctggatgaacagtcatatcaagcttgtcgatatagatgaagcatttg

SEQ ID NO: 287922 - DNA, 466 bp, Unknown
  Bacterial polypeptide expressing nucleotide sequence isolated from the Sargasso Sea
atggcaaaaaaagaaaaagaaataaatcctttatggggaggtagatttgaatctgggattgacgatctcgctcagtcattttctgcatctattgatatagacaaaagactctttgaagtcgatatccaaggttcaattgcatatgccgagatactaaatgtggcgaatttaataaattcctctgaacttaaaaaaataaaaaaaggtctcaataagatcttagatgagataaagcatgataaatttgattgggattcaagcctagaagatgtacatatgaatattgaggcaaggcttgtaaaaattgctggttcagccgcaaaaaaaattcatactggcagatctagaaatgatcaagtagcaacagacttaaggctatttctaaagaaccaaatagacgagatcctctatttaactatcttacttcaaaaatctttattaaaaaaagctgacgttaatacctgat

SEQ ID NO: 287923 - DNA, 751 bp, Unknown
  Bacterial polypeptide expressing nucleotide sequence isolated from the Sargasso Sea
tggtataccactaagaaactgaaatttgaggaaccaacaaataattctttggatacagtttctgacagagatttcgttttagattttttgtacagttcgtctatatgctcaatgcatatatcaagaatcgcagaagagttaataatttggaattcagaccaatttaaattcattagcttgaaagacaatattgtaacaggctcatctataatgcctcaaaaaaagaatcctgatactttagaatttttaagaggaaaaactggatcaatatttggaaatcttttttcgatgttaacaattgtaaaaggtttacccatttcttattttaaagatttacaagatgacaaagatcttgttttcagatcttatgataatttgaaaaattgtttgataatctttgatgaagtaataaatggaataattgttaacaagaaagtcatgttggatgctgctaaaataggatttacaacagcaaccgattttgctgatgctttagttaaaaatatgaatttttcttttagagaagcatatttattaacggcaaaagttgtaaatttagctgaaaagaaaaatttggctttaaatgaacttaatcatgaagatttaaagaaaattgtcccaaaaataagtcttgatgtaatgaaaaatctagatttaaaaaactctgtaaattccaaaaaatcgtatggtggaacttcttttgaaaacattaagaaaatgataagaaaacataaaaaagaaataaaatgaa

SEQ ID NO: 287924 - DNA, 445 bp, Unknown
  Bacterial polypeptide expressing nucleotide sequence isolated from the Sargasso Sea
ttgccattatcatatagcaaagacttgcaagaagataaagaaggtttatttgatagctttgatagtttgtacattgtatttaaagcatgcataggcatgatttctgatgtaactatcaacaaagaaaaaatgctagaagcatcaaaacaaggtcatactacagccacagatttagcagattggattgttaaagaattaaaaattccttttagaaaatcacatgaaatttcaggaagaattgttaaacttgcagaaaaaaataattgcctcttacatgagcttccactcgatagttttaaaagcattgagagaaaaataaataaaaatgtttttaaagtattgagtgtagaaaattctgtgaaatcaaaaatatcatatggcggcacttcaccaaaggaagtcttaaagcaaattaaaaatgcgaaaagaaggtttttaaaataaa

SEQ ID NO: 287925 - DNA, 910 bp, Unknown
  Bacterial polypeptide expressing nucleotide sequence isolated from the Sargasso Sea
tctgaaaaatgctcaacctatttctttttcacattattatttagcttatattgaaatgtttaatcgtgacaaaaaaagatttaataataatttagacagtcttaacgaaaacccgttgggcgttggagctttaagtggaacttcttttaaaatagatagactctatacgacaaaaaaattaaatttcttaaaaccttctagaaattccattgatacagttgcagatagagattttgttttggattttttgtacgcggcctcaacatgttcaatgcatatttctagattagccgaagaactaataatttggaattcagatgcttttgatcttatttcattgaatgacagagtcgttactggttcatctataatgcctcaaaaaaaaaatcctgacccattagagtttttaagaggaaaaacaggaacaatatacggaaatcttttttcaatgttgacaattttaaaaggtttaccattatcatattataaagatcttcaagatgataagaaaattatctttgatgcttttgataacttgtcaaactccatattattaatgaatgaagtgcttaaaaattttactgctaataaaacacaaatgtatgagctagctaataagggattcattacagctactgatcttgcagattattttgttaaagaattaaactatccatttagaaaagcttataatattacagctaaaattgtaaattattgtgaaaaaaaaaataaaacttttacaaaacttacaattgctgaacttagaaaaattgaaccaaaattaagtaaggatgtaacaaaaatatttgatttaaaaaattcaataaattcaaaaaaatcgtttggcggaacatcttttgataatataaagaagatgataaaatattataaaaaagaattaaaatga

SEQ ID NO: 287926 - DNA, 842 bp, Unknown
  Bacterial polypeptide expressing nucleotide sequence isolated from the Sargasso Sea
caaatcaagatttttcaataatttagaattaattgatgactcacctttaggtgtggcagctttatctggaacctcatataaaattgataggcattttacatcaaaaaaacttggattcaaaaagccgactaacaactcgatcgacaccgtttcagatagagattttgccattgattttttgtatgcttgtgccgtctgcgccatgcacctatctagacttgcagaagattttataattttaaattctgatgcttacaaattaattagttttaatgataagatgcttacaggatcatcaatcatgcctcaaaaaaaaaatccagatccagctgaacttatcagggggagaacaggaattaattatggtaaattaaattcaattttaacaataatgaaaggtcttccaatttcttattttaaggacttacaagacgataagtcgctcgtgtttgatggatttgatactcttaaagatacacttataatgagtaatgaattgattaaaaatgtttatccaaataaaacaagaatgttgaatatggctaatactggttatacaactgcaactgattttgcagattatttagttaaagaaaaaaatttatcctttagggcggcttacaaaatatcttcaaaaatagtcaattatgctgaaaaaaataaaaaaaatttagatgaattgaatttaaatgagataaaaaaattttataaagatttagatttaaaagttttaaaaatttttaacgtaaaaaattcaatgaattctaaaaattcttttggaggcacttcagaaaaaaacgtaaaaagtatgattaaaagatataaaaaggaactcagatgag

SEQ ID NO: 287927 - DNA, 631 bp, Unknown
  Bacterial polypeptide expressing nucleotide sequence isolated from the Sargasso Sea
ctatctagattggccgaagactttattatttataattccgatgcttccaatttaatttcattcaaagacagcatgcttacaggctcttctattatgccacaaaaaaagaatcctgatcctgcggaactaataagaggaaaagttggaatgaattatggaaagttaaatgcaatgctgacaataatgaaaggtcttcccatgtcatattttaaagacatgcaggatgacaaagagttagtttttagtggctatgatactttgaaagatactctaattatgagcgccgaattaataaattctgtaaatgctaataaagcaaatatgctttttatggctaatcaaggatatacaacatcaactgattttgcagactatcttgttaaaaataaaaatttatcatttagagagtcttacgctatttcagcaaaagttgtgaattatgcagaaaaaaataaaaagatattatctgaattaaatttggatgaaatcaaaaaattttataaagatttagataaaagtgttttaaaagtatttgatgtaaaaaattctatgaatgcaaaaaaatctcatggaggaacatctataattaatgttaaatcaatgataaaaaaatataaaagagaaatttaat

SEQ ID NO: 287928 - DNA, 514 bp, Unknown
  Bacterial polypeptide expressing nucleotide sequence isolated from the Sargasso Sea
atggcaaaagtttggagtaaaagatttgataatacacttgaccctttcattgaaaagtttaatgcttctattggttttgatagaaagcttattttagaagatttagattgctcgattgcccatgcaaaaatgcttggtaaaacaaaagttttatccccttctgaaactgtggagattattaatggtttagagaaaataaaagttgaatatttggaaggtaaattttctcctagtcccccttctgaagatattcactattgtattgaagaaaaattaattagtttaattggtgatactggaaaaaaattacatacaggaagaagtagaaatgatcaagttggtacagatataagattgtggcttagaaaagagattgataatcttgaaattttaataattgatttgcaaaaatccttcttaaaacttgcgaaatctaatatttatacactaattcctggatatactcacatgcaaagagcacaaccattatctttagctcatcatttattggctt

SEQ ID NO: 287929 - DNA, 835 bp, Unknown
  Bacterial polypeptide expressing nucleotide sequence isolated from the Sargasso Sea
tatgataagaaaaaataaagctgtttggggagctagatttaataatcaaacttctaaaatttttgaaaaaattggagcttcgattgatattgataaaagattatttgaagaagatatcttcggatctattgtgcatgctaatatgttagttaaacaaaaaattgttagcaaaaaaataggtaaaaaaatcattaatggacttaaaaaaattagaggtgaaattagagaaaataagtttaaatttaataaaaaatacgaagacatccatttaaatgttgaaaaaagactttttgaaatcataggagaaaatgctggttatttacatatagctagatcaagaaatgaccaagtgattacagattttaagttatgggtaaaaaaatcctctaaaaaaattattaaaaatttagataccttaaataaaagttttttgcataaggctgaacaaaatattcaaacaattatgcctggatttacccatttaaaaaatgctcaacctatttcttttgctcattatctattagcgtacattgaaatgtttaaaagagataaaaataggtttgttagtaatattaattatattgatgaatgtcctcttggagtgggtgcgctggctggaacttcatatagaatagacagaaattttacatctaaaaaattaggatttaaaaaacctacaaataattcgatagattctgtttctgatagagattttgctctagattttttatcatcggcttcgatttgtgctatgcatatttctagatttgcagaagagttaattatttggaattcagatatatttaaactagttagtctcgatgataaaatgctt

SEQ ID NO: 287930 - DNA, 598 bp, Unknown
  Bacterial polypeptide expressing nucleotide sequence isolated from the Sargasso Sea
taatcaacaatttaattttatcaacttgccagatgaattagcaactggtagttccatcatgcctcagaaaaaaaatcctgatggggctgaattagtgcgaggaaaagcaagtggtattattagtaatttaaatgggttgctagttatactaaaaggcctcccattagcttacagtaaagatcttcaggatgacaaaaaaatagttttttcagcatttgatgatgcttgcctcacgttagaggtaatgacagaaatatggtctaaggttagttttaataaaggcattatgaatgatgcagttaataattctaatgctacagcaacagattttgcgaattggttagttcaacatatagaattatcttttagagaagcttatcaattaactggtagaattgttgcgcatgctaataaaaataataaaaaactagatcaacttagtttagaagaacttcaaaaatttaataacaaaattactaaagatgctcaaaaaactctttctagtaatgaaagcataaaaaataaaaacagttttggtggaacatcaccacaaagggttaaacaatcaattaaatatgctataaaaaaatatctttaa

SEQ ID NO: 287931 - DNA, 757 bp, Unknown
  Bacterial polypeptide expressing nucleotide sequence isolated from the Sargasso Sea
atgactcaaaataaaaacaataatacagtttggaatacaagaattaaaaaaaaaacttcaaacatttttaaaaaagttggatcctctattgatatagataaaaggttgtataaagaagatatattagcatctgtttcacatgcagaaatgttatacaaacaaaagattataactattaagattaaggataaaattttatggggtttgaaaagaattcaaaatgaaattgagaaaaaaaactttaaatttgatgaaaatttagaagacattcacatgaatatagagaatagactttttgaacttattggtaatgatgcaggttatttacattcagcaagatctagaaacgaccaagtggttacagatttaaaactatggttaaaaaagtctacaggagagatcgatagtttattattaaaagtaataaaatctttgataaaaatttcggaaaaaaatatttttactattatgccaggttttactcatcttaaaaatgctcaaccaatttctttagcacattattttttatcaaatattgaaatgtttaaaagagatagatttagattttcctccaatatgaaaagtttgaaccaaaatcctttgggagctggtgctttttctggaacatcttttaatattgatagatggtataccactaaaaaactaaaatttgaggaaccaacaaataactctttagatacagtttctgatagagattttgttttagattttttgtacagttcatctatatgctcaa

SEQ ID NO: 287932 - DNA, 785 bp, Unknown
  Bacterial polypeptide expressing nucleotide sequence isolated from the Sargasso Sea
gggcttatggtttgcatcattcgctgaatctttcattgataatattgatttaataattaaaacaattgattggattgattcaaatccgcttggtactgcagctggatatggtgtcgccttgccacttgatagaaaaaagaccactaaagatttaggtttcaatcgaatacaaataaatagtctctatgctcaaaatagtagaggtaaatatgaaatgcaaataataaatactcttaaacaacctatgcttgatttgagaaaatttgcatgggatatgagtttgtttttgtctcaagagtttaatttattatcaattgataataaatattcaactggatcatcaataatgccaaataaaagtaaccctgatgtcatagagataattagagctaactattcaattcttgcaggtttatcctctgaattagaaaacttattatcattaccaagtggttatcacagagatcttcaactcaccaaaagaagtttagtttcttcttttattatttgttttcaaacattatctataattccagatattcttaaatcaattaaagtaaataaaacaaattcaagcagctacatcaatgaggatatgatgatgactgataaagtatacgaatatgttgctgccggtatgtcttttagagacgcatatgatcttgtaaaaaataatccagttgacaaaaaaattaatacagttaaatctaaaaattattcactaggttctccaaaaaatcttgaattaaacattctcaaaaaacgactgacaaagataagatagc

SEQ ID NO: 287933 - DNA, 984 bp, Unknown
  Bacterial polypeptide expressing nucleotide sequence isolated from the Sargasso Sea
tacaaaaagcatttcctgagatgggtaatcgagaacatgatctcatcatacccgcgtacacacactttcgacgcgcccagcctgttcttgcagcacatcaactattagtgtggtgtgaaaaatttgatcgcgatcgacaacgacttgctgattgtcgacagcggacaaacattatgccgttaggttcagcggcactcgccggtacaagtttgccaattgatcggtcaaagacacagacagcacttgggttcgatgcaatcgctccaaatagtcttgatgcggccagcgaccgagactttgtctgtgagcttgcgtttgttctctcactgaccgcagtgcatctctcccaatgggctgaagagtggattatctacagtactgatgagtttggctttctcaaactcccggaagcattctgtacgggcagttccatcatgcctcaaaagattaatccggatgtactcgaattggtgcgtggaaagtctgcacgagtgattagtaacgttcaacaaattcttgtattactcaaaggacttccaactgcttacaaccgagacctgcaggaggataaggaggctgtcttcgattcaattgatacgctcgaaacgatgcttggtgtcgctgcaccgcttgtagctggtacacattttgatcgagaacggatcggggaatctattgaaaaaggacatcttgatgcaacgaccctcatggaggcactcatcgttgaaggtgtaccacagcggaccgcacacgaaaccgttggcaaacttgtacgacttgccctgacaaaagggtgcagtctggctgaacttactgatgatgcctgtcgggcagaatatgacggctggaaggcctctctacggcaggctttggggtcctcacgggcagttgaacggatggtgagttttggctcgaccgctccggcttgtgttgccgaacaacttgctgcgtggcggcagaaactggagactgccgcgaagtaag

SEQ ID NO: 287934 - DNA, 541 bp, Unknown
  Bacterial polypeptide expressing nucleotide sequence isolated from the Sargasso Sea
catgaataagaaaagtaaaatactatcaaccacaattaataaaagcacttccagtttaatggatgattttaatagctcaattgatattgataaaagattaattgaagaggatattgctgttacaagtgcacatgtaaaagctttagtaaaactaaaagttatttcaaaaaaagaagctcttactattcaaaaaggattaaattcaatattgaatgataataaaaaaggtagactaaaattttcaaaaaaaaatgaggatattcacatgaatgtagagtctttcctgaataaaaaaataggtaatgtagctaataagatacatacaggaaggtctcgtaatgatcaggtagcaactgatactagattatggacaattaaagcctccaaaaatttacaagaagaaatcaagaatttaatgaagtctattttaaatcaagctcgtggaaatgaaaaaactattattcctggatttactcatttgcaagtggcacaacctgtatctttggctcatcacttaattgcatatttagagatgttttaa

SEQ ID NO: 287935 - DNA, 1282 bp, Unknown
  Bacterial polypeptide expressing nucleotide sequence isolated from the Sargasso Sea
atgaaactatgggataaaaataactcaggtaatgaaaaaataattgaatttacaattggtcatgataggttaaatgatatgcatttaattaaatatgatttaaaagcttctatttcacatgcaaaaatgttgtacaaatccaatcttttatcagaaattgaatgtgatagaataataaacattcttaatgagatgctaattgaggccgaatctggagaattaaaaattgagaaggaatttgaagatatgcactcaaaaattgaatatacacttataagtagactaggtgatattggaaaaaaaattcacactgcaagatcaagaaatgatcaagtacttgtctcaatccagctctaccttattgatgagttaaataatataaaaacagaagtaaaatctttatttgacttattgattaaacttgccaataaaaataaggatattattatgcctggatatactcatatgaaagccgcaatgccttcctcttttggattatggttttcagcatatgctgaaacattaattgacgatattattagccttaatagctcaattgaaatagtaaatcaaaacacattaggtagtgctgctggttatggaacatcatttaatattgatagagattttacaacaaaagatttaaattttaaaacattaaagtataactccctcgcatgtcaaattagtagaaataaaattgaaaaaaacaccttcgatgctatagggaatattgcctttacattatcaaaaatttcaatggatatatgtttatattctggagatgagtttcaatttatttcatttcctgaaaatattacaacaggatctagcataatgccacataaaaagaatcctgatgtttttgagataataagaggaaaatgtaatagtattcaaaatctatcaaactctgtaaatttatcatcaactaacctcccaagtggatatcatagggattttcaactaaataagggaaaaattattaatgctgttaatgatataaaagaatgtattcaaattctatcatattgtttatctatgataagtgtcaataaaaaaatacttcaaaaatcaaattatgaaaatatttttagtgtagagttaatcaatgagatggttttaaaagggatgccttttagagatgcttatcttgaattaaaaagtaaattaaaatcaggtgaaataaagtttccaaagacagttaaccattctcacattggaagtattggaaatttagctctagataaaatagttctcaagatgaaggattactattaga

SEQ ID NO: 287936 - DNA, 355 bp, Unknown
  Bacterial polypeptide expressing nucleotide sequence isolated from the Sargasso Sea
catgagtcaaaataaaaacaataatacagtttggaacactagaataaaaaaaaagacttcaaatacttttaaaaaagttggatcctctattgaggtagacaaaaggttgtacaaagaagatatattagcatcagtttcacatgctgaaatgttatacaagcaaaagattataactattaagattaaggataaaattttgtggggattaaaaagaatccaaaacgaaattgagaaaaaaaacttcaaatttgacgaaaatttagaagacattcatatgaatatagagaatagactttttgaacttattggtaatgatgctggttatttacatacagcaagatctagaaacgaccaa

SEQ ID NO: 287937 - DNA, 1510 bp, Unknown
  Bacterial polypeptide expressing nucleotide sequence isolated from the Sargasso Sea
atgagtaaaaaacaaccacaaatttggggtaagcacctcagcaatccgcctgatgaacaaaacattcttttttgtgcaggacgtgatgttcaggaaattccaatggccgatcaaattttactgccttttgatatttggacaaaccgtgcacattgcatcatgcttcacaagcaggcaattatctcgggaagctgtctgagaaaaattcttaccggtctcggtaaactggaaaatctcattgaagagggtaacttcgaacttgatcctaaaaaggaagatgtacacataaacgtagagggttttgtcactgaagatcaaggtgtagatgcaggaggtagaatgcatataggcaggagcagaaatgatcaaactgcttgtgatatgagactatacctaagaagctcatgcttgaatcttttttttgctgttaaaaattttgcttctgctttactgcttaaggcagaagaaaatgcagaaagcgttatgcctggattcactcactaccagcctgcaatggtaacatcctggggacactggctctgctcatacatacagggactttgcagagacctcgagcggcttgaatttgctctttcccttgtcaatcgaaatccgctaggagctgctgctgcttttgggacatcatggcctattgaccgcgccctaactaccaagctactagcttttgaaaaaattgactttaacacgctggactgcattgtttcgcgatgggaaaatgaagctcaacttgcccattcaataagtttgttgatgaatcaccttagtatagttgcacaagatcttatttttttgagccatccttatgtaggagtgatccagattgatgataactatgtgaccggttcttcaattatgcctcaaaagaaaaatccggattttgcagaagtcatcaaatcaaaagcatctctagctcatggaatgttatcaggtttgcttagtatccaaaaaggtgcaatgagcggttacaatcgcgacacccaaacaagcaaatatctgatcatggacctgatacgcgaatgcgaatctgtacccttaatattgcagggagtattggaaagtttgacggttaatcataaaaaaatgaaagaattatctgaaacagattttttgaatgcgacagacattgcggatcatttggcacgtaagcttaatctgccgtttagagaatgctatcacctcactgctaaaagtgtaaaactttctgcaccagaattgaaaataactaatgaagcacttagaaaaacattggaagaaattggacaacctgcagaaattgcagatgacatgaataatatgcaagaaccactgaagctaatagaacaaagacttcaccacggaagcccgtcaccagaacaaactaggcttcaagttaaagaatttactaatcaattaaattcgctttcggctcctctcgtaaatatgggaaataagataaatgatgcgcaggagaattgtagaaattatgaagtaagacaagtaaaaagatgaa

SEQ ID NO: 287938 - DNA, 728 bp, Unknown
  Bacterial polypeptide expressing nucleotide sequence isolated from the Sargasso Sea
gatggataataatacagataaagtattctcaaaaggccttttttcgaatttctcgtcatcagtttcattcgataaaagaatctataaacaagacatagaattatctattgcttacagcaaggcattaaataaaatagatataatttcatctgaagagcaaaagaaaattgaagatgctttaattttaataaacaaagaaatagaatccggcaagtttgattggagggatgatttagaagatattcatatgaatattgagagcagattatatgacctaataggccctattgctggaaaaatacatactggcaaatcaagaaatgatcaagttgccacttcattaagaatgtatttaaaatcaagagtagatcatattaaagggttaattagaaacttagaaatagagattgttaggaaagctgatcttaattttggtgtcattatgccttcctatactcatttgcaaagagctcagccagtacttctttctcattatttaatggcttattttgagatgctagagagagatatatcgagattttcagaatgcaaaactagaatggacgaacttatactaggaagtggagccgtagctggttcattttacaatatagatagaaattttttagctaaagaattgtgtttttctaggataaataaaaatagtatagatggggttagtgatagagattttattattgatttagctaattgtattgccacatcta

SEQ ID NO: 287939 - DNA, 529 bp, Unknown
  Bacterial polypeptide expressing nucleotide sequence isolated from the Sargasso Sea
aaatccggactcattggaattaataagagccaaaacaaattcaattagaattaaatctttagagttttctaatattatatcaaatcttccattaacttattttaaagattttcaagaggataaaagaatcatatttgtttgttatgatgaattgctaagctgtctcaaagttatgcaagatgttatcaagaaatctaagtttgaacaatcagttggaagagacattaataataattattatgctactgccaccgatctagcagattaccttgtaatagaaaaaaaaataccatttagagactcttataaaataatcgccaatatagtaaactatgctcagcaaaataataaaaacctttcagagataaaaattgacgaatatcaaaaatttcaaaaagtaattgataaaaatatttataaatacgtcgatgtagataagagtctttcaagaaaaaaaacatccatgagcactaatccaaaagaagtgtctagaatgattaaaaaatatttaaaatttctaaaagtataa

SEQ ID NO: 287940 - DNA, 417 bp, Unknown
  Bacterial polypeptide expressing nucleotide sequence isolated from the Sargasso Sea
gatgtatcgttcccgattaggaaaagatcttgatgatattaccttaagctatgtttcatcaataaaagatgattctgatattgcattttatgatattattggaagtgaagcacacgttatcatgttatatgaaaataaactcttgtcaaaaactgaaacaaaaaaaatcttgactgcattagaggaattaaagggaggaaacatatctcaacctgattttgaaccagaagacattcatgaattaatagaatcactagtaatcaaaaaaactggaattgaaaatggaggtaaaatgcatactgctcgttcacgaaatgatcaagtagcacttgacattcgattaaaaattcgtgatgacattaacatactcttgcagtgtttagttgaaacgatatcaactcttctcaaaactgcaca

SEQ ID NO: 287941 - DNA, 1291 bp, Unknown
  Bacterial polypeptide expressing nucleotide sequence isolated from the Sargasso Sea
atgaaactttggaatcaaaactcaaaagataaaaactctgcaattgatcatttcttatcaagcgaggatataactttagatcaagaattatttttatatgatattgaagcatcgatcgcccacgtgcatgaattagaaaaaatcaatattttcactaaaactgaggcaaggaaagtaatttcttccttaaaaaagcttggaaaattatttcaaactaataaatttaaattgactgctaaatatgaagactgtcattctgcaatagaggatttcctgacaaaagaattaggctcaattggtaagaaaattcatactggaagaagcagaaacgatcaaatcatggtagctatgcgtctttatgcaagagagaaattagatgaaattcagtcaataaacttaaaggttgctaaagcttttcttgaaaagtccgaaaagcactctagcaatccgatgcctggttatactcatcttcagcgagctatgccatcttcatggggtctatggtttggtgcatttactgaatcatttttagataacgcagaattgctatcaaatactaagtcatggataaatgttaatcctctaggcacagctgctggctatggagttaatcttcctatcgagcgggatatatctaccaaagagttaaattttaaaagaaaacaattaaatagtctttatgtccaaaatagtagagggaagttcgaattagagttaattggtgtattaaaacagccgatgctcgatatccgaaagttttcatgggatatgagtctctttttatctcaagagtttaatttactaagtctaccgcctatttattcaacgggctcatctataatgcctaacaaatctaatccggatgtaattgaaataatgagggctaacttttctatcttatcaggtcattattccgaattagaaaatttaatctctttgcctagtggatatcatcgagatctacaactcacaaaaagatctcttattcattctattcattgtgtactcaaaacaatgaatctattgcctaagttagtaaggtcaataaagataaatactcatcgatcaaatgagcttattgatcaagacatgttgatgacagatcaggcttatgaaatggttcaatctggtataccttttcgagatgcttattcaaaagttaaatctaatcgagacaaaaatgtaccattaaaaaatatttccagacaaaaatcttcctctggatctgcatataatctaaatttgcaggtgctaaagtccagatttattaagctatctaaaaatcaataac

SEQ ID NO: 287942 - DNA, 1104 bp, Unknown
  Bacterial polypeptide expressing nucleotide sequence isolated from the Sargasso Sea
aaattattaaatgcttaaaagaccttaataaaaaatttatttctaataaatttaaattaacgaataaatatgaagactgtcattcagctattgaattctatctcactaaagagcttggagagactggtaaaaaaattcatacaggtagaagcagaaacgatcaaattcaagtggcattaagattgtatgcaaaagacaatttaaaaaatattaataaaattaacaaaagaattgctaaaacttttctacaatatgcaaaaaaataccatgatctcccaatgcctggatacactcatcttcaaagagcaatgccttcaacatggggactttggttctcctctttcgcagaggcttttattgataattatgatttaaatagttcaacaattgattggattgacagtaatccattaggaactgctgcaggatatggtgttgatattcctcttaatagaaaaatggtaacaaaggaattaggatttaagagaattcagctgaactctctttatgtccaaaacagtagaggcaaatatgaaatgcaaataattaactcactaaaacagtcaatgttggacataagaaagtttgcatgggatatgagcttattcttatctcaagagtttaatttattgactataggtgatatttacttaactggttcctcaattatgccaaacaaaaaaaatccagatgtaattgaaattatgagaggaaattattcaataattgcaggaaattactcagaacttgaaaacttgttatcactaccaaccggttatcatagagatttacaaattacaaagaaaagcttaatttcaagttttaaaattactgaaaaaactcttgaattgataccagacttagttagatcaattaagataaataaaaaaagatctttagaatttattgatgatgaaatgatgatgacgtcgcaagtttatgagttagtttcaaaaggtatgccttttagagatgcctatcaagctgttaaagatagcaaaggcaaattacaaatatcaaaaaagaatataactaattcttcaagcggatctcctaaaaatctcaatctagaaattcttgaaaagagactaaatgggaaatagg

SEQ ID NO: 287943 - DNA, 367 bp, Unknown
  Bacterial polypeptide expressing nucleotide sequence isolated from the Sargasso Sea
catgggtaaaaataaaaacaatcagccaatttggaatactagaattaaaaaggaaaaaacaaacctttttaaaaaggttggtggatcaatagaaatcgataaaagattattcagagaagatattgaagcttcaattgtacatgttgagatgctgtttagacaaaaaattataaattttaaaattaaaaataaaatagtatggggtttgaatagaattaaaaatgaaattataaaaaaaaaatttatttttgatgataaacttgaggatattcatatgaatatagaaaacagactctttgaacttatcggagaagatgctggatatattcatactgcaagatcaagaaatgaccaagtagtcacagat

SEQ ID NO: 287944 - DNA, 445 bp, Unknown
  Bacterial polypeptide expressing nucleotide sequence isolated from the Sargasso Sea
catggcaaaaaataaaaacaatcagtcagtttggtcgtctagaattaaaaaaaagaaaaactcattttttgataaaattggatcctctataaatgtggataaaagattatacaaagaggatataaattgttcgttagttcatgtagatatgcttttcaaacaaaaaataatatcatttaaagttaaaaacaaaattttctttggtttgaacaaaattaaaaatgaaataataaaaaaaaaatacatattcaaagctgaagatgaagatatacacatgagtattgagagaaggctacacgaaataattggagatgatgcgggttatattcatactggcagatctagaaatgaccaggtagttactgatttaaaagtttggatgaaaaaaagtacaaatgagataattgatagtcttaaatctttacaaaaaacatttttaaaatta

SEQ ID NO: 287945 - DNA, 574 bp, Unknown
  Bacterial polypeptide expressing nucleotide sequence isolated from the Sargasso Sea
atgtcagatcaaatagtaactggatcttcgataatgcctcaaaagaaaaatccagatccattagaatttttaagaggtaaaacaggcaacgcatatggaaaccttttctcaatgttaactattcttaaaggacttcctctctcatattttaaagatttacaagatgataaagaaatagtctttagatcttatgatagcttgggtacttgcattttactccttgatgaagtgctaaaaaatataaaacctaaaaaagataaaatgatttctctagcaaaaaaaggttttattacatctactgatcttgctgattatctagtcaaaaattataaaataaattttagacttgcttataaaataactgcaagaatagtcaattatgctgaaaaaaataataaaaagttagatgaattaaatttagatgaattaaaaaaattttactcaaaaatagataataaaatttttaaaattttatcacttgaaaattctattaattcaaagaaatcttttggaggaacgtcgtttaataatataaaaaaaatgataaaaaaatattatagggcttatatatgat

SEQ ID NO: 287946 - DNA, 421 bp, Unknown
  Bacterial polypeptide expressing nucleotide sequence isolated from the Sargasso Sea
gacttacaggaagataaggagccaatctttgactcatctaagacaatcaagcaatgcttaattaatttagctggaatgttagaaacttcaaaaataaataaaatagagatgtttaaagcacttaataaaggatatccaactgctactgatcttgctgattatttagtaactaatcttaattttacttttagagatgctcatgaaataactggtaaaattgtgttattagctgaaaaaaaagagtgttctcttgaagaattaacaattgatgaattaaagaaaattgataataaaattgactctaaagcgttaaatgtattaagcataaattcttcaatatcgaaaaaaaattcctttggtggaacgtcacctagattagttaaaaaagcgataagtgatgcaaaaaaaagatacttataga

SEQ ID NO: 287947 - DNA, 685 bp, Unknown
  Bacterial polypeptide expressing nucleotide sequence isolated from the Sargasso Sea
cagagattttgctatcgactttttatatgcgtctgcagtttgtgccatgcatctatcaagattagcagaagattttataatttataattcagatgcttttaatttaatttcattcaatgacagcatgcttactggttcgtctattatgcctcaaaaaaagaatccggatcctgcagaattgataagaggaaaagttggaataaattacggtaaattaaacgcgatgctaacaattatgaaaggtcttccaatgtcttattttaaagacatgcaggatgataaagaattagtatttgatgggcatgatactttaaaaaataccttaactttaagtgctgagttaattaattctgttaaacctaataaaggaattatgcttttaatggctaacaagggctatactactgcaactgattttgccgattatcttgttaaagttaaaaagttatcttttagagagtcgtatactatctcatctaaattagttaattttgcggaaaaaaataaaaaaatgctatcagatttaactttagaggaaataaaaaaaatctacaaagatttagataaaagtgttttaaaagtgtttgatgttaaaaattcaatgaatttaaaaaaatcattcggaggaacttctgaaagtaatgttaaatcaatgattaaaaaatataaaaaggaagctaaatga

SEQ ID NO: 287948 - DNA, 495 bp, Unknown
  Bacterial polypeptide expressing nucleotide sequence isolated from the Sargasso Sea
aatgaaaaataaaactatttgggcgaatagactaaagggaaagacgtcactttcttttcaaaaaataggctcatcaataggtgtagataaaagactttatgagcaagatatagctgcgtctattattcataccaaaatgctagttaaacaaaagattattggtaacaaagaaggttctaaaattattaatggtcttaaaaagattaagtcacagattgataaaggaaagtttaaatttcaagaaaaatttgaagatattcatttaaatatagaaaaaaaattatttgaattaattggcccttcggcaggctttttgcatacagcgagatcaagaaatgatcaagttgttacagatttcaaattatggattaaaaaatcatcaaaagaaactatagctaacattaaatctttaatgaaaattttaatcaaaaaagcagagaaaaatgttgatactgttatgcctggcttaacacatcttaagaatgctcaacctat

SEQ ID NO: 287949 - DNA, 388 bp, Unknown
  Bacterial polypeptide expressing nucleotide sequence isolated from the Sargasso Sea
ctgccaatttggaatactagaattaaaaaggaaaaaacaaacctttttaaaaaagttggtggatcaatttcaatcgataaaagattatttagagaagatattgaagcttcaattgtacatgttgagatgctgtttagacaaaaaattataaattttaaaattaaaaataaaatagtatggggtttgaatagaattaagaacgaaatcataaaaaaaaaatttatttttgatgacaagcttgaggatattcatatgaatatagagcacagactctttgaactgattggagaagacgcaggatatattcacactgcaagatcaagaaatgatcaggttgtcacagattttaaaatttggttaagaaatgctaataaagaaattgttaaaa

SEQ ID NO: 287950 - DNA, 790 bp, Unknown
  Bacterial polypeptide expressing nucleotide sequence isolated from the Sargasso Sea
aatgaaaaatgtaacttggtctagtaggtttactaaacaaattgattcggaagttttagattttagccaaagtctaaatattgatatagttctatacaatgcagatattaaggtcactacagctcatgttgaaatgttgtctaattgcgggcacatcactattaccgagaaaaagaaaatcattaatgggctcaaaaaagtcaacagactagctgatactggcaaactaaattggtctgtagaatatgaagacgtacatatgaatattgagaatgctttggtatctttgataggtgacgttggtaaaaaaatccatcttggaagatcaagaaatgatcttgtcacaacagatttaagattatacttaagagattttattgatatttatcttgataaaattagagagatccaacatgttatagcaaagtctgccattcaacattctgacttgatgtttcctggtttcacccatatgcagatagctcagccggtaacatttggacatcacttattagcatggtgtgaaatgctatatagagatgaagtaagactaacaaataccagagagctgctaaatactatgcctttaggctccgctgccctttcaggcacatcattaaaaattaacaggaatatgattgccaagaaattaggctttaaaactgttaccaaaaattcaatggatgcggttagtgatagggattatgtctgtgattttgcatatgttaactctatgataatgatgcatctttcaagagtttgtgaagaacttgtgttgtggtccaacccc

SEQ ID NO: 287951 - DNA, 385 bp, Unknown
  Bacterial polypeptide expressing nucleotide sequence isolated from the Sargasso Sea
atgacaaaaaataaaaacaactcatcagtttggaacacgagaataaaaaaatcatcctcactgtttcaaaaagtagggagttcaataagctttgataaacgactttttaaagaggatatacaagcctcaattgctcacgtggaaatgctttttaaaaaaaagataattactttcaaagtaaaaaataagattatttttggacttaatagaattagaaatgaaattgttaaaaaaaaacataaatttgataataaacatgaagacattcatatgagtattgagaaaaggttgtttgaaattatcggagaagatgctggctatgttcatacggcaagatctagaaatgaccaagtcattacggatttaaagttatggatgataaaaa

SEQ ID NO: 287952 - DNA, 460 bp, Unknown
  Bacterial polypeptide expressing nucleotide sequence isolated from the Sargasso Sea
atgaaaaataaaacaatttggtctaatagatttaaaaacaaaacgtctcaatcttttcaaaagattgggtcatcaattcatattgataaaagactttatgagcaagatattgcttcatctgttgtacacacgcaaatgctagtgaaacaaaagattataaaaagtgaagacggtaacaaaattatcaatggacttaaaaaaattaaagttcagatagataagggaaattttgagtttaaagaaaagttcgaggatattcacttaaatatagaaaaagcattatttgagatcattggtccatcagctgggtttctgcatactgctagatctagaaatgatcaggtcgtgactgattttaaattgtggattaaaaaagcatcaaacgaaattataaaagatatttcggttgtcatgagaaatcttaaaaaaaaagctgaaaaaaatacagatacggttatgc

SEQ ID NO: 287953 - DNA, 432 bp, Unknown
  Bacterial polypeptide expressing nucleotide sequence isolated from the Sargasso Sea
catggcacaaaataaaaacaataaggctatttggaatacaagaataaagaaagatacatcatcaattttcaaaaaattcggtagttctattgatgttgataaaagactatttaaagaagatattcaaggatctattgttcacgttgatatgctatttaagcaaaaaattatatcatttaaaattaagaataaaataatttggggattaaatagaataaaaaatgaaattactaaaaagaaatttaactttaattctaatcttgaagatatccatatgaatattgaaaatagattatttgaaattattggagatgatgcaggatatattcatacagcaagatcaagaaacgatcaggtaattactgattttaaactctggttaagaaattcaacctttgaaataattaatcaattaaacgatttaataaatat

SEQ ID NO: 287954 - DNA, 706 bp, Unknown
  Bacterial polypeptide expressing nucleotide sequence isolated from the Sargasso Sea
aattctatagatacggtttcagatagagactttgtaattgactttctttatagcgtatcagtgtgctctatgcatatttcaagaatagcagaagagttgattatatggaattcagatggatttaatttaattaacttgtctgataaagttgtaactggatcttcgataatgcctcaaaaaaaaaatcctgatcttctagaatatttaagaggtaaatctggaattgcatatggaaatctattttctatgctgactattttaaaaggtttaccattatcctattttaaagatttacaagatgataaagagattgtgtttaattcaaatgatacacttataaattgtctaaaaatttttgatgaggtattaaaaaattgtagtcctaataaaaaaaaaatgcttaatcttgcaaataaagggtacatgactgcaacagacttagctgactatcttgtgaaaaatcattcaatgtcatttagaaacgcttatcaaaaaacctccgctatagttaatttggcagaaaaaacaaaaaaaagcttaaatgaactatctttagatcaacttaaaaaaattgaacctaaacttactgaagacgttttgaaagtgtttgatttaaacaattctgtgaattcaaaaagatcttttggaggaacatcttttgataatattaaaaagatgatagtgaaatacaaaaaagaaatatgat

SEQ ID NO: 287955 - DNA, 909 bp, Unknown
  Bacterial polypeptide expressing nucleotide sequence isolated from the Sargasso Sea
ggatcaggcggatcggcaccagtccacgatgattcctggttacacccatctccagcgtgctcagccgctgtgtctggcgcatcatctgctcgcttacatcgagatgctgcaacgggatcgtcagcgtcttggcgacgcccgtgggcgcgtcaatatttgtccgctcggggctgcagctctggcgggtacaccggtaccgattgatcgccgccggacggctgaggatcttggcttcacagcgatttacgccaacagcctcgatgccgtcagtgaccgtgatttttgtgttgaattttcagcggctgcatccctggtgatggctcatctgagccgtctggcagaggaggtgatcgcttgggcgtcggaggaatttggttttgtgcggctgagcgatcgctgtgccacgggcagcagcttgatgccgcagaagaagaaccccgatgtgccggagttggtcaggggtaaatgcggccgtgtctttggccatctgcagggactgctgacgatgatcaaaggccttcctttggcttacaacaaggatttccaggaagacaaggaagcgctgtttgatgcctatcggaccacacgtgactgtgtggaagcgatggcgatcttgtttgaggaggggttggagttccgcatcgaccgtctcaatcaggcggtggaaagcgatttttccaatgccactgatgttgccgattatctcgtggctcgtggtgttccctttcgcgaggcatatcaattggtcggggctgttgttcgccgttgccttgagcagggttgtctactgcgggaactcagcctcgagcaatggaaggagctccaccctgcctttgaggccgatctgcacgaggcactcgctccacgggcggtggtgtcggcccgtcgcagtgaaggaggaacgggatt

SEQ ID NO: 287956 - DNA, 1006 bp, Unknown
  Bacterial polypeptide expressing nucleotide sequence isolated from the Sargasso Sea
tatggcaaaagtttggagtaaaagatttaataattcacttaatcctttcattgaagagtttaatgcttcaattggttttgatcgaaaacttattttagaagatttagagtgctccatggctcatgcaaaaatgcttggcaaaactaaagttttaacatcttctgaaactttgcagattattaatgggctagagaaaataaaagttgattttatggaaggtaaattttctcctggtccaccttctgaagatattcactattgtattgaagaaaagctaattagtttaattggtgaaactggaaaaaaattacatacgggtagaagtagaaatgatcaagtggggacagatataagattgtggctaagaaaagagattgataatcttgatattttaataactgatttgcaaaagtccttctttaagcttgcaaaaacaaatatttataccttaattcctggatatactcatatgcaaagagcacagccattatctttagcgcaccatttattggcttatttagaaatgtttcaaagagaccgggaaaggtttcaagaagtcagatcaagagtcaatacctccccattaggggctgcagccctagcaggcacaaaaataaaaatagatagagaatttacagctgcagaattgggttttgaaaagatttataagaatagtattgatgcagttagtgatcgagatttttgtatagagtttgcttctgcatctgctttagcgatgtcccatttgagtaaaatttcagaagaaataattttatgggtaactgatgaattttcttttgctaaattaacagacaattgttcaacgggtagtagtttaatgcctcagaaaaaaaatcctgatgttccagaattgataagaggtaaaacgggaagagtatatggacatcttcaagcattattaacaatggtcaaaggtgtacctcttgcatataataaagattttcaagaagataaagagccaatatttgatactgcagaaactata

SEQ ID NO: 287957 - DNA, 781 bp, Unknown
  Bacterial polypeptide expressing nucleotide sequence isolated from the Sargasso Sea
aatgaccgagaaggacacatcgcccccgcaggagcgccagaagtctagcatctggggcggccgcttctcaagcggcccgtcgcagctgatgcaggacatcaacgcctcgatcgactatgaccgccggcttttccggcaggacatagccggctcgaaggcgcatgccagcatgctggcgcactgtggcatcatctcgtcggaagaccgcgatgcgatccatgccggacttgagacaatcctcggtgagatcaccggtggcggtttcgtcttttcggccgagcttgaagacatccacatgaacatcgagtcacggcttgccgaactgattggcgagccggcgcgccgcctccacacagcccggtcgcgcaacgatcaggtggcaacggatttccggctgtgggtgcgcgagctgattgattcggtcgacgccgcgctggccgaaatgcaggccgtgctgcttcgccgcgccgacgagcatgccgaaacactgatgccggggttcacccatctgcagacggcgcagccggtgaccttcggctttcatctcatggcctatgtcgagatgttcgggcgtgaccgtggccgctttgccgatgcgcggcggcggctgaatgagtcaccgcttggcgctgccgcgctggccggcacctcatttccgaccgaccgccacatgacagccgaacttcttgggttcgaccgccccgccgcgaatgccatggacgccgtgtcggaccgtgatttcgcggtcgaatttctggccgctgccgcgctttgtgccgtt

SEQ ID NO: 287958 - DNA, 624 bp, Unknown
  Bacterial polypeptide expressing nucleotide sequence isolated from the Sargasso Sea
catgagtaaaaataaaaacaataaaccaatttggggtacaagaattaagaaaaatgcctcaactttatttaaaaaagttggtggttcattaccagtagataaaagactatttaaagaagatatcgaaggatcgattgctcatgtcgaaatgcttcacaaacagaaaattataaattttagaataaagaataaaataatttggggattaaaaagaattaaaaatgaaattgtaaaaaaaaaattcaattttgattatgatttagaggatattcacatgaatatagaaaatagattatttgaacttattggtgatgatgctggatatattcatacggctagatctagaaatgatcaggtaataactgaccttaaattatggttaaaagatgcaacaaaaaaaataataattttattagataatacaaattcaaatattttaaatcttgcaaaaaaaaatatcagaacaattataccaggatttacacatttaaaaaatgcacaaccgttatctttggcacattatctactagcatatgttgaaatgtttaagagagataagaaaaaatttaagaataatttagagtttttagatgaaaatcctttaggtgtaggggctttatctgg

SEQ ID NO: 287959 - DNA, 860 bp, Unknown
  Bacterial polypeptide expressing nucleotide sequence isolated from the Sargasso Sea
gaatttaataaattcctctgaacttaaaaaaataaaaaaaggtctcaataagattttagatgagataaagcgcgataaatttgattgggattcaagcctagaagatgttcatatgaatattgaggcaaagcttgtaaaaattgctggtacagccgcaaaaaaaattcatactggcagatctagaaatgatcaagtagcaacagacttaaggctatttctaaagaaccaaatagacgagatcctaaatttaactatcttacttcaaaaatctttattaaaaaaagctgacgaaaataccgatactttgatgcctggtctaactcatcttcaaattgcacagccggtgacttttgggcatcacctaatggcctggttcgaaatgctgtctagagattattcgaggttagaagatgcaaaaaaaagaatggatgtcatgccattaggttcagctgcgttatctggaacaagattcaatatagatagaaagtttcttgctaagaagctgggctttggagagataagtagaaattcaatggatgcagtgagtgacagagattttgttctggagttagcttcttctttatcaatagtaggaattcatctttcaagaatttgtgaggagataatactctggtcttcaagccaatatagttatatctgtttatctgacgaagtgtgtacaggctcttcgataatgcctcaaaaaaagaatcctgatatggccgaactgattagaggaggtgcctccaaaactattgctaatcttatggggcttctgtcattgatgaaaaatcttccattaacttataacagagacttacaagatgataaggaatacattttcaatagtattgatttca

SEQ ID NO: 287960 - DNA, 868 bp, Unknown
  Bacterial polypeptide expressing nucleotide sequence isolated from the Sargasso Sea
gctgcacgggatcgtcagcgtcttggcgatgttcgtgggcgcgtcaacatttgtccgctcggggctgcagctctggcaggtacacccgtaccgatcgatcgccgccggacggctgaggatcttggttttgcagcgatctacgccaacagcctcgatgccgtcagcgaccgtgatttctgcgtcgaattttcagcggctgcatccctggtgatggctcatctgagccgtctggcagaggaggtgatcgcctgggcgtcggaggaatttggttttgtgcggctgagcgatcgctgtgccacgggcagcagcttgatgccgcagaagaagaaccccgatgtgccggagttggtcaggggtaagtgcggtcgtgtttttggccatctgcagggactgctgacgatgatcaaaggccttcctttggcttacaacaaggatttccaggaagacaaggaagcgctgtttgatgcctatcggaccacacgtgactgtgtggaggcgatggccatcttgtttgaggagggtttggagttccgcatcgaccgtctcaatcaggcggtggaaagggatttttccaatgccactgatgttgctgattatctggtggctcgtggtgttccctttcgcgaggcgtatcaattggtcggggctgttgttcgccgttgccttgagcagggttgtctactgcgggaactcagcctcgagcaatggaaggagctccaccctgcctttgaggccgatctgcacgaggcactcgctccacgggcggtggtgtcggctcgtcgcagtgaaggaggaacaggatttgatcgggttcatgagcaggtcatgctttggcaggaacgcctcaaagaatctgcaattggttgat

SEQ ID NO: 287961 - DNA, 940 bp, Unknown
  Bacterial polypeptide expressing nucleotide sequence isolated from the Sargasso Sea
tacataccccagatgcttattaagcaaaaaattattccatcaaaggacggaaaaaaaattattagaggtctcaacaaaattaagtcgcaaattgataaaggtaaatttatttttagagaaaaatttgaagatatacatctaaatatagaaaaaaaactatttgatattataggtccttctgccggatatatgcacactgctagatctagaaatgaccaagtagttactgattttaagttatgggttaaagaatcgacacaagatgttttaaaaaatattagtgatgttatgaaagctcttttaagaaaagcagaaaaaaatgttgaaacagtaatgcctggttttacccatttaaaaaatgctcaaccagtatcatttgctcattatcttttagcctattatgaaatgttaaatagagacaaaaagagatttaaaaataatttaactcttttagatgagtgccctttaggttctgcagctttaacaggaacttcatacaaaatagacagaaactttactgcaagaaagcttggctttaaaaaaccaacaaataattctattgattctgtctcggatagagattttgctatagactttttatatgcagctgctgtttgtgcaatgcatctatcgagacttgctgaagattttataattttaaactcagatgcttataaattaataagttttcaggacaatatgttaacaggttcatcaatcatgccacaaaaaaagaatcctgatccggctgaattaattagaggtagaactggaataaattatggtaagttaaattctattcttacaataatgaaaggtttgccaatttcatattttaaagatttgcaagatgacaagtctttagtttttgatggatatgatacgttaaaagatacattaattatgggacatgaattgattaatagcctcaaacctcaaa

SEQ ID NO: 287962 - DNA, 955 bp, Unknown
  Bacterial polypeptide expressing nucleotide sequence isolated from the Sargasso Sea
ttggagattctgcaaaaaaattacacacccggcagatcaagaaatgatcaggtagttacagatcttaagctttttctcaaagatgaaaccaaagctattaagaaaaaaattaaagacctacaaaaaagtattctaaataaagctcaaaaacattatgcagatctcatgccaggctttactcatctgcaaatagctcagccggtaaccttaggccatcatttgcttgcttactttgagatgctacaaagagactctattagatttgaaagcaatgaaaaaaccctgaatcaaatgcctttaggagttggtgcactagcaggcaacagatttggcattgatagaataaagcttgcaaagaaacttggtttcaccgagattacaaagaattcaatagatacagtaagcgatagagattttgttaccgacgtttcctacagttgttcaatgcttgctgttcatttgtcgagaatgtcagaagaaataattttatggtcatcctcgcaatttgattatgttcagctacctgaagagttatgcaccggctcatcaatcatgcctcaaaagaaaaatccagacatggcagagcttattcgaggaggcagttcacaaactttaggcaaccttgttacaactttatctttaatgaaaaaccaaagcctttcatacaatagagataatcaggaggacaaagaacctctttttaaatcaattaatttcatcaaggatgccttagagattatgtccgaaatgatcaaaggtatgagttttaacattaaaaaaatgctaaaggacctagatctatctgaggttggagcaacagattttgcagagtatttggttttaaagggcgtccccttcagagaagctcataaaataactggcaaaatagtaaaagaagctgaaagaaaaaatttatttatcagagaatttaatttgagtgaattaaaaaaaatac

SEQ ID NO: 287963 - DNA, 925 bp, Unknown
  Bacterial polypeptide expressing nucleotide sequence isolated from the Sargasso Sea
ccgggatttactcatttgcaaacagctcaaccaattacttggggtcatcatatgatggcatatgttgagatgttcgcaagagatcgctctaggtttaaggatgcaagaaatagaatgaatgagtgcccattaggttccgcggcattagcaggtacttcttttccaattgaccgagaccacactgctagagctcttaaatttgaaagaccgacagcaaactctctggacgcggtaagtgatagagacttcgctttggagtttttaacttcttcttctatatgcgccatgcatttaagcagattggcagaagaacttgttatttggtcttcagcacaatttaagtttattgatctatcagatcgattttcaacgggatcttctattatgccccagaaaaaaaaccccgatgctgctgaattggtgcgtgcaaaaatagggcgaatattaggagctaatataggcttaatgacagttatgaagggcctccctctggcttattctaaagatatgcaggaggacaaggagaaggtttttgatgcagcagatagtttaagtttagctttatgtgcaatggaaggcatgatccaagatttgaccgccaataaagaaaatttggagttagcagcaaaatctggcttttctacggccactgatttagcagattggctagttagagttttaaacttaccctttcgagaagcacatcacgtgacaggtgaaatagtaagccttgctgaacgagcaaaatgcgatttatctgagctagaacttaaagacatgcaaagtatcaattccgatattaatgaagatgtgtttaaggttttgtctgttgaaaattctgttaagtcgcgatcttcatacggaggaacatcacctaaagaggtgcaatttcaaatagatagatggaaaaaggtattaagatgaa

SEQ ID NO: 287964 - DNA, 886 bp, Unknown
  Bacterial polypeptide expressing nucleotide sequence isolated from the Sargasso Sea
gggctcatcatggttttagcttacgttgaaatgattggtagagacagaacaagacttgaagattgtttatatcgtcttaatgaaaacccattaggtgcagctgcacttgcagggacttcttttcctattgatagaaaatatacaactaaagagttgggatttagagagccaacaaaaaatgctatggacactgtctcagatagagactttgtaatagaatttttatttgttctatcactaattgctgttcatttatcaaaaatagcagaggaaacagtactgtggtcaaatcaacaatttaattttatcaatttaccagatgatctttcaactggtagttcaattatgcctcagaaaaaaaatccagatggtgcagagcttgttagaggaaaaacaagtattatcattagtaatttaagttcaatgcttaatattattaaagggttaccactttcttatagtaaagatttacaagacgataaacaaataacatttaattcatacgacaatgtttctttgtgcataaaagttatgaatgaaattttatcaaaatctacattcaacaaaactagaatgaaagagttgattgataattcaaatgcaaccgctaccgatttggccaattggttggttcaaaatcttagatattcatttagagatgcttatattattacaggaaagattgtttcttattgtttaaaacaagatagaaacatagattcattatctcttggagaattaaaaaaatttgacaaaaatataacagctgacgcaaaaaaagtgctatcaactactaacagtgttaaatcaaaatcaagttttgggggtacggctcctgaaattactaaaaaaatgataaaacttgttataaaaaaatacttataat

SEQ ID NO: 287965 - DNA, 805 bp, Unknown
  Bacterial polypeptide expressing nucleotide sequence isolated from the Sargasso Sea
tgaatctccccttggttctggagctattgctggaacatcatttgatattgatagaaactatacatctgaaaaattaaattttgatagacccatgatgaattctattgatgcagtttcaagcagagattttgcagcagaatttatttcgtgctgttcaataaattcattgcacttatcaaggctatcagaagagataattatatggatgagcgagccatttaaattcattaaactttcagacagcttctcgactggctcttcaatgttaccacaaaaacgaaaccctgatgccgcagaactagttcgggctaaatcaggaagaattattggagatttaaatgcactgttaatcatgcttaaaggcttacctctagcatactcaaaagacctacaagaagacaaagaagcagtttttgactgttatgactcactttgcgtttgcctaatggcaatgaaagggatgattgaaaatatttccccaaacaaagaaagaatgtatcactatgcaaaagaaggcttttcaactgcaactgatttagctgattggctggtaataaatcttaacttaccttttcgaaaagcacatgaaataacaggtgaaattgtaaaattagcagaaaaatctaatcgaattcttgaagaaattactctcgaagaaatgttagaaattaaccccaatattaataaagaaattaaaaatattttgagtgtaaaaaactccgttttttctaaaaaaagttttggtggaacttctccagatagaattaaagaagccatcagtttggctaaggaaagaattaaatga

SEQ ID NO: 287966 - DNA, 739 bp, Unknown
  Bacterial polypeptide expressing nucleotide sequence isolated from the Sargasso Sea
tatgacaaataaaaataagacagtttggtcaaatagatttaaaaaatcaacttctcaatctttccagagaattggggcatctattaatgtagacaaaagactctacgaacaagatatttttgcctcgaaaattcatactcaaatgcttgttaaaagaaaaattataccagcaaaagaaggtaaaaaaattattaaaggattagataagattaaaggacaaattaaaaagggtaaatttgtattcaaagaaaaatttgaggacattcatttaaatattgaaaagaaactattcgaaataatcggtgactccgcaggttacatgcatactgctagatcgagaaacgatcaagtggttacagactttaaactttgggtaaaagattcttctttaattttaataaaagaattaaactctttgatgaaaaatataattggtaaagcggataaaaatgtaagtactgttatgccaggattcacacatcttaagaatgcacaaccagtgtcatttgctcattatctcctagcttattatgaaatgctaaagagagataaacaaagatttcaaaacaatttgaaattaatagatgagtctccacttggagcagcggccttatcaggaacttcttataatattgatagaaattttacatcccaaaagctgggttttaaaaaacccacaaataactccattgatacagtttctgatagagattttgctatagattttctttatgcatgc

SEQ ID NO: 287967 - DNA, 673 bp, Unknown
  Bacterial polypeptide expressing nucleotide sequence isolated from the Sargasso Sea
tatggcaaataaaaataagactgtttggtcaaatagatttaaaggctctacttctaaatcctttcaaaggataggagcgtctataaatgtagataaaagactctatagccaagacatttttgcttcaaaaatacatacgcagatgcttattaaaaacaaaattattcctgctaaagagggaaaaagaataattaaaggtttagagaaaataaaaaaattaattgataatggaaaatttatttttaaagaaaaatttgaagatattcatttgaatatagaaaaaaaactatttgaaattataggaaattcagctggatatatgcacacggctagatcaagaaatgatcaagtagttacagatcttaaactttggataaaagactcaactatttcaattattaaagaattagattctttaatgaaaaatattgtcagtaaatctgaaaaaaatatctctactgttatgccaggttttactcatttaaaaaatgctcaaccgatttcttttgcacattatcttttggcatattatgaaatgttaaaaagggacaagaaaagatttcataacaatttagaattgataaacgaatctcctcttggtgctgccgctctgtcaggaacttcatataaaataaatagaaactatacatctaaaaaattaggttttaaaaaa

SEQ ID NO: 287968 - DNA, 656 bp, Unknown
  Bacterial polypeptide expressing nucleotide sequence isolated from the Sargasso Sea
agactatttaaacaagatataatggggtctattgctcacgtagaaatgctttttaaacaaaaaatcatttcttttaaaataaaaaataaaattatttatggacttggtaaaattgaaaaagaaatatctaaaaacaaatttgagtataatttaaaatacgaagatattcacatgaatattgaaaagagactatttgaaataattggtgaggaagctggttatattcatactgctagatctagaaatgatcaagttattacagatttaaaaatttggatgagatcatcgaataaagaaattttaaatcatcttaataaaataattaaaactactttaaggattgccgagaaaaatatcaaaactataatgccaggatttacacatctaaaaaatgcacagcctatatcttttgcacattatcttatggcttatgtcgaaatgtttactagagataaaaaaagatttaatgataacattgaaagtttaaatgaaagtcctctcggtgtacttgctttggcaggaacatcctttaatatagacagagaatatacagctaaaaaattaggttttaaaaaacctactaataattcaatagacactgtttcagatagagattttgttttagactatctttatagttgctcagtttgctcaat

SEQ ID NO: 287969 - DNA, 916 bp, Unknown
  Bacterial polypeptide expressing nucleotide sequence isolated from the Sargasso Sea
ttggtcaggcagattaataaacaaatggatacagaggttcttgagtttagccaaagcctcagtgtggacattgttttatatgagactgatattgctgttacgattgcccatattgaaatgttgtttaaatgtggacatattaagaaaaatgaatgcgtaaaaataatttcaggattaaagaaagttttaaagcaggctgagacaggcaggctcaagtggaatatagcttttgaagatgttcatatgaatatcgaaaacgccctcgttaagataataggtgatttaggtaagaaaatacatctcggtagatcgagaaatgatcttgttgcaactgatttaagaatatatttaagagagtttgttgatatttacctgttgaagctaagggagattcaggtggtcttagcacatatgtctaaagaacactcaaagtcactatttcctggatatacacaccttcaggtagcacaaccagtaacctttggtcatcatctactagcgtggtgtgaaatgctttatagggatgagcttagattgttaagttttaggaagttgcttaatatcatgccgctgggctcggcagcattatctggcacttctttaaagattgatagagaatttgttgcaaaaaaacttgggtttgacagtgtcacaaataattccatggatgcagttagcgatagggactttgtttgtgactttgcgtatgcaaattctatgataatgatgcacctatcaagaattagcgaggagctagtattatggatgagtcctcagataaacctagtttcattagatgaaagtttttgtactgggtcatccataatgccacaaaagaaaaaccctgatgtgcctgaattgattcgtgggaaaactggctcagtctatggagcattgattggtatgctcacactca

SEQ ID NO: 287970 - DNA, 699 bp, Unknown
  Bacterial polypeptide expressing nucleotide sequence isolated from the Sargasso Sea
atagagattttgtattagaatcattatctattgcaactttaatcatggttcatatttcaaggttatcagaagaaataataatatgggcttccccaggatttaattttgtaaaattacctgaagatttttcgacgggttcatctattatgccacaaaaaagaaacccagattctgctgaattaataagaggaaaaacaggaagaatagctagtgcttatctaaatattgtaactatgttaaaaggattacccctttcatattcaaaagatatgcaggaagataaagaagcggtatttgattcttttgataatttaaaaatttgtttggatgttgctattggtctaattaaagaaattaactttaatactaaaaatatgtatgaaatggcaaaattgggatatctaacagctacggatttagctgattggcttgtaaaggaagttggagttccatttagagatgcccacgctattacaggaaaagtagttaagttagctgaaagcaaaaacttagggttaaatgagctagaattaaatgatttaagaagtataaataaaaatatatctgaagaagctctaaaagttttatcattagaatattctttaaaaagtagagatagttttggtggtacggcacctaaaatggtaaaaaaagctataaaaaaagcaaaaatacaatggttaaaaaatattgtataaa

SEQ ID NO: 287971 - DNA, 634 bp, Unknown
  Bacterial polypeptide expressing nucleotide sequence isolated from the Sargasso Sea
atgagtaaaaataaaaacaatcagccaatttggaacactagaatatcaaaaagaaagaagacactatttggtaaagttggagggtctttatcaatagataaaagattatttaacgaagatattgaagcatcgattgctcacgtagaaatgctttttaaacaaaaaattattaattttaaaattaaaaataaaattatatggggtcttaaaagaattaaaaatgagataattaagaaaaaatttttgtttgaccaaaatcttgaagatattcatatgaatatagaaaaaagattatttgaattaataggtgatgaagctggatatattcacacagctaggtcaaggaatgatcaggttataacagacttaaagttatggttaaaaaaagcaaatcaagaaataattaaaaatttaaatattacaattaataatttaattaaaaaagctaatagcaatgtaaaaacaattatgcctggtttcacacatttaaaaaatgcacaagctgtctcatttgctcattatttaatggcatatgttgaaatgtttgaaagagacataaagagatttaataataattttgaaagtataaatgaaaatccacttggagcagcagcactaacaggaacttctttta

SEQ ID NO: 287972 - DNA, 634 bp, Unknown
  Bacterial polypeptide expressing nucleotide sequence isolated from the Sargasso Sea
tgcagctttaagtggaacctcatttaatattgataggttttttacaacaaaaaaactaggatttaaaaaaccaactaataactctattgatactgtagctgatagagattttgttttagatttcttatactcaatttctgtttgttcgttacacatatcaagaattgctgaagaactaataatttggaattccgatggctttaacttaattaaattatcggacaaagttgtaacaggatcatcaattatgcctcaaaagaaaaatcctgatcccttagaatatctaagaggtaaagcaggtggaacttttggaaatttattttcaatgctgacaattttaaaaggtttaccattatcttattttaaagatctacaagatgataaagaaatagtttttagatcatttgatactttaaacaattctatctctatacttaatgaagttttaaacaattttaaaccaaacaaattaaaaatgataaaattggcaaataaaggatttgttacagccacagatttggcagattatttggtaaaatatcatggaaaaacatttagagatgcttatcaaaaaacagcgatgatagttaattatgctgaaaaaaataatattaaactaaatgaattagcttaa

SEQ ID NO: 287973 - DNA, 851 bp, Unknown
  Bacterial polypeptide expressing nucleotide sequence isolated from the Sargasso Sea
gatcaggtaataactgattttaaattgtggttaaaatctgcaactaaagaaataaataacaatcttgataaagtcattaagacttcaataaaattagctgaaaaaaatattcatactattatgcctggatttactcatttaaaaaatgctcaggcaatttcattcgcacattatttattatcttatgttgaaattttcaatcgagataaaaaaagattttcaaataatctagaaagtttagatgaaaatcctcttggtgttgctgctttatctggtacatcatttaatatcgatagattttatacaaccaaaaaacttggttttaaaaaacctacgaacaattctattgataccgtttcagatagagactttgtgattgattttctttacagcatatcggtatgctctatgcatatttcaagaattgcagaagaattaattttatggaattcagatggatttaatttaattaatttgtctgataaagttgtaactggatcttcaataatgcctcaaaaaaaaaatcctgatcttctagaatatttaagaggtaaatctggtagtgcctatggaaatttattttctatgctgactattttaaaagggttaccactatcttattttaaagatcttcaagatgataaagagattgcgtttaattcaaatgatacgctcataaattgtctaaaaatttttgatgaggtattaaaaaattgtagtcctaataaaaaaaaaatgcttaaacttgcaaatagtggatacattacagcaacagacttagctgactatcttgttaaaaatcattcaatgtcatttagaaaagcttatcaaaaaacctcagccatagtgaa

SEQ ID NO: 287974 - DNA, 847 bp, Unknown
  Bacterial polypeptide expressing nucleotide sequence isolated from the Sargasso Sea
actgcacaacctataagcttgggtttccatcttgctgcatatattgaaatggttggacgagataggaatagattgcaagattgtagaaagcgtgtaaatgaatcccctcttggcgctgcagcgctcgcaggaacttcctttccgattgaccgtcatcttactgccaagctccttgattttgacaggcctatgccaaatgcacttgatgccgtttcggctcgtgatttcgccttggaatttactagtgctgccacaatttgtgctatccacttgtcaagactggccgaagaaattgtgatctggtctacagatagatttaattttattcgtctatcagatgaatttaccaccggctcgtcaataatgccgcaaaagagaaacccagacgcagctgaactgataagggcaaaaccgggtagaataatgggtcactttatctcattagcaactatactaaaagggctgcctcttgcttactgtaaggatatgcaggaagataaagaacccttatttgacacaactaaaactctttcaataagtattgcagcaatgtccggtatgattgacgatatgagttttaataaagctgcaatgcgcgatgctcttcaaaaagggcatccaacggccacagaccttgcagattttcttgtgcgtagtttgggcaagccatttcgtgatgcacaccatgtaagtggcactctggtcgctttagctgatgagcgcggatgcgcattagagaatttaagccttgatgaaatgcgaaacgtagagccgcttttaaatgaagatgtatatactgtgttaagaatagatgatgcatttaatgcgcgctccagcttggcggaac

SEQ ID NO: 287975 - DNA, 808 bp, Unknown
  Bacterial polypeptide expressing nucleotide sequence isolated from the Sargasso Sea
aaaaaatagctcaagcctatttgcaaaagttggtagctcaatagatgtagataaaagactttataagcaagatattcaagcttctacgattcatgtagagatgttgcttaaaaaaaaaattatttctttacaagttaaaaataaaattgtgtgggggcttaaaaaaatattaaatgaaataataaaaaaaaaatttaattttgataaacaaagtgaagatattcatatgagtattgaaaaacgactatttgaaataattggtgaagatgctggatttattcatactgcaagatctagaaacgatcaagtccttgtggattttaaactttggatgattgaagcaacaaacgatattattaaagaaattaattccaatattagctcaatattgaaaattgcggaaaaaaacatttttacagtaatgcctagctttactcatttaaaaaatgctcaaccaatttcttttgcacattatattttagcttatgttgaaatgttccaaagagacaaaaaaagatttttaaataatagagaagcacttatggaaaatccattaggtgtagctgctattgcgggaactagctttgatatagacagagaatatacaacgaaaaaattaaaatttaaaaaacctacaggtaattcaatcgatactgtttcggatagagactttgttttggatttcctttattcaatttctgtttgttcaaatcatatatctagatttgctgaagaatttattttatggaattcagatgcttttgatttaataaaacttaaagataaagttgttaccggatcatcaata

SEQ ID NO: 287976 - DNA, 784 bp, Unknown
  Bacterial polypeptide expressing nucleotide sequence isolated from the Sargasso Sea
agattatttagagaagatatttttgcctctactattcatgttaagatgcttgttaagcaaaaaatcataaaaaaagcaattggtgaaaaaattatatttggcctaaataaaattttaaaagaaataaataacaaaaaatttaaattttccaaaaaaaatgaggatatacatttaaatatcgaaaaaagactttttaaattaataggttcttccgcgggatacatgcatatagctagatcaagaaatgatcaagtggtgacagattttaagctttgggttaaaaaatcttctacaactttagttaatgttttggataaaatttgcaaaagttttgtagaaaaagctgaaaaaaatatatcaacagctatgcctggctttacacatcttaaaaatgcacaaccaatagtattcgcccactatctcttggcttatgttgaaatgtttcaaagagataaaaaaagatttttaagtaacattaattacttaaatgagtgccctttaggcgcagctgctttagctggaacctcttacaaaattgacagaaaattcactgctaaaaaattaaattttttaaaaccaacaaataactcaattgatactgtggcagatagggattttgcgttagattttttatcagctgcatcaatttgtgctgttcatatttcaagatttgcagaagaattagtaatttggaactctgatgcttttaaactaattagtttcagtgataatcttttaacaggatcatctattatgcctcaaaaaaaaaatcctgacccagcag

SEQ ID NO: 287977 - DNA, 576 bp, Unknown
  Bacterial polypeptide expressing nucleotide sequence isolated from the Sargasso Sea
gatgaaaaaaaatccgtcaagaaatacgcattttaagaaaagtccctcgaagttattagaatctattaataactcgatagatattgataagagaatgtacaaagaagacattgaaggctcaattgcacatgccacaatgctcggaaaacaaaaaattatatcaaaaaaagatcaaacaaaaattgttaatggcctgaaaatcattttacaaaatattaattctggtaaaattcttttcaaaagcaaacttgaagatattcatatgaatattgaatcattgctcttcaaacaaattggggaagctgctggaaaattgcatactgcacgatcacgtaatgatcaggtggttactgactttaaactttggataagaaataatagtataaatcttaataagcatgttcaaaacttacaaaaaagtcttattaatgttgctaaaaaaaatactgctactgtaatgcctggctatacacatcttcaggtggcacaaccaatatctttagcacatcactgtcttgcatatgttgaaatgatgggtcgagacagatcaagattaaaagattgcatagaaaggtt

SEQ ID NO: 287978 - DNA, 869 bp, Unknown
  Bacterial polypeptide expressing nucleotide sequence isolated from the Sargasso Sea
aaagtggggtaattcaatagatattgataaaagactctataaagaagatatcaagggatcaattgctcatgttgaaatgctttttaaacaaaaaataatttcatttaaaataaaaaataaaattatttatggactagcaaaaattgacaaggaaatcacaaaaaataaatttgagtttaataaaaaatatgaagatattcatatgaatatcgaaaagagactttttcaaattattggtgaagaagctggttatgttcacactgcaagatcaagaaatgatcaagtaattactgattttaaaatttggatgaaaaattcaactatcgaaataaatagtaatattaataaagttattaagagtacaattaagttagccgaaaaaaatattgagactattatgcctggatttacacatcttaaaaatgctcaagctatttcttttgcgcattatttaatgtcttatgtggaaatgtttaacagagataaaaagagattttcaaacaatttagatagtttaaatgaaaatccgttaggcgtcgcagctttagcaggaacatcatttaatatagatagaaattatacaacaaaaaaacttggttttaaaacacctacaaataattctattgatacagtttcagatagagattttgtattagattttttatatgcttcatctgtatgtgctatgcatatttctagaatcgctgaagaactaattatttggaattctgatggttttaacttaattaatttatctgataaagttgttactggatcatcgataatgccacaaaagaaaaatcctgatcttctagaatacttgcgtggaaaatcaggaagtgcttatgggaatttattttcaatgctta

SEQ ID NO: 287979 - DNA, 886 bp, Unknown
  Bacterial polypeptide expressing nucleotide sequence isolated from the Sargasso Sea
aaagagattgaaacaaataaattcaaatttaaaatggaattagaagacatccacatgaatattgaaagtagattaattgaattaattggtgattctggaaaaaaattacatactgcacgctcaagaaatgatcaagtcgttacagactttaagatgtggataaaaagtgatttggattcgatactagaccttttaaagcaacttcaagaaaatttaattattcaagctgaagataattatgagaccttaatgccaggttatactcatttgcaagttgctcaacctgtcacttttggccatcatcttttggcctatgttgaaatgtttggaagagacagagcaagaattaaagattgtgtaagtagaatgaatgaatgccctcttggctcagctgcactcgctggaacaagttaccctatcgatagaaactttgtagcaaaaaaattaaacttttcttcacctacaagaaactctatagatgctgtttcaagtcgtgattttgctattgaatatttatctgtacttagcttaattggcattaatttatctagaattgctgaagagcttattctatggtcatcaaatggttttaatttcatagtgattaatgaagaatatactactggatcgagtatcatgcctcaaaaaagaaatcctgatgcagctgaacttattagaggaaaatctaacagacttgtagggaatttagttaatttaacaactttattaaagggcttacctcttgcgtacagtaaagacttacaagaagataaagagccagtatttgattcatctgagaatataaaaaattgtctattaaatatgattggtataattaagtctctaaaaattaataaaaataaaatgcttaaggccctacagaaag

SEQ ID NO: 287980 - DNA, 970 bp, Unknown
  Bacterial polypeptide expressing nucleotide sequence isolated from the Sargasso Sea
tatgaagatattcatatgaatattgaaaaaagactttttcaaataattggagaggaggcaggttatatccacatagcaagatcaagaaatgatcaagtaattacagattttaaaatttggattaaatccgcaattaaagaaattaatattgaattagataaaataattaaaagtacattaaaattagctgaaaaaaatatagatactattatgcctggttttactcatctcaaaaatgcacaagctatttcttttgctcattatttaatggcctatgttgaaatgtttaatagagataaaaaaagatttaaaaataatttaaataatttagatgaaaatcctttgggtgttgctgctttaagtggaacttcttttaatatcgatagaaattatacaactaaaaaacttggctttaaaaaacccactaataattcaattgatactgtttctgatagagattttgttttagattttttatatagtatttcagtatgctctatgcatatttctagaattgctgaagaacttattatttggaattcagatggttttaacttaattaatttatctgacaaagtagtaacaggatcatcaataatgcctcaaaaaaaaaacccagatctattagaatatttacgaggaaaatccggtagcacttatggaaatttattttctatgcttacaattttaaaaggtttaccattatcatattttaaagatcttcaggatgataaagaaattatatttaaatcaaatgacacactattagattgtctaaaaatatttgatgaaattcttaaaaactttacccctaataaaaaacaaatgcttaaacttgcaaattctggatatataacagcaacagacttagctgattatctagtaaaaaatcactcaatatcatttagaagagcttatcaaaaaacagcttctgtagttaatttggcagaaaagaaaataaaatcttgat

SEQ ID NO: 287981 - DNA, 724 bp, Unknown
  Bacterial polypeptide expressing nucleotide sequence isolated from the Sargasso Sea
aagcagtatttttgctcattatctattagcttatgtagaaatgttaaaaagggataaacaaagatttattaataatttaaaaagtttatctgaaaacccacttggtgtagcagctttaactggaacttcatttaatatagatagaaactttacaacaaaaaaattaggttttaaaaaaccaacaaataattcgattgatactgttgctgatagagattttgttttagactttttatacagtgtttcagtatgttctttacatatttcaagaatagcagaagaattcataatatggaattcagatgcatttagccttatcaatctttctgactctgtagttacgggctcatcaattatgccacaaaagaaaaatcctgatctattagaatatttaagaggtaaatcaggtactagttttggaaatttattttcaatgctaacaatattaaaaggcttaccattatcttattttaaagatcttcaggatgataaagaaatagtttttaaatcaaatgaaacattaatcaattgcattcaaatacttaatgaaattttaaaaaattttagccctaataaaaaaaaaatgttagaacttgcaaatattggatatatcacggcaactgatttagcagattatctcgtaaaaaatcataccatgtcttttagaaaagcatatcaagttactgcttcagttgttaattacgctgaaaaaaataaaaaaaaa

SEQ ID NO: 287982 - DNA, 618 bp, Unknown
  Bacterial polypeptide expressing nucleotide sequence isolated from the Sargasso Sea
aatgaaaaaaagtagtttgaataaacaaaaaaataataaaatatggggtggaagattttcttcatctccaagtgaattaatggatgagcttaattcatcaattcaatttgatcagattctctatgtcgaagatattgatggatcaatagcacattcagaaatgctatctaaacaaaatattatttctaaaaaagagtttttatctattaagtatggtttagaacaaattaaaaaagaaatatctaataatgagtttaatttctcaactaaactagaagatatacacatgaatattgaaaatagattagtggaaataataggagataatggtaaaaaattacatactggtagatcaagaaatgatcaagttgctactgatatcaaattatggataagaaataaaattgataaaatagaattaagtctgaaagatttgcaacgaacacttattaaaaaatcagaaatctattatgatctcttaatgcctggctatacgcatcttcaagttggtcaaccagtaacatttggacatcatttgttagcttacgtagaaatgtttggtagagataggggtagattaattgactgtcgaaaaagaatgaatgagttgcccttggg

SEQ ID NO: 287983 - DNA, 901 bp, Unknown
  Bacterial polypeptide expressing nucleotide sequence isolated from the Sargasso Sea
attgggtcttcaataaatattgataaaagactttataaagaggacatatttgcatcaattattcacgctcaaatgcttgttaagcaaaaaattattccaagaaaagatggagccaaaataataaaaggtcttaaaaaaatagaaaaagaaattgaaaaaaatagatttaaatttagagaaaaatttgaagatattcatcttaacattgaaaaaagactgtttgaatttatcggtaaatctgcaggatatctccatactgcaagatcaagaaacgaccaagttgtaacagattttaaaatttgggtaaaaaaagcatcgctagatattaatgatactttaaatttattaattaaatctattttgaaaaaagcagaaaaaaatatcgatactgttatgcctggttttacccatttaaaaaatgcacaacctatttcttttgcacattacttgttagcctatgtagagatgcttaatagagataaaaaaagatttttaaataatattgagttaattaatgaatgtcctttaggatctgcagcattagctggaacatcttacaagatagatagacaatttactgcgaagaaacttggttttaaaaaacctactggtaattctattgatgcagtttgtgatagagattttgcaatagattttttatcagcagcagctacatgtgcaatgcatatgtcaagattagctgaagactttattatatttaattctgaagcttttaattttttaaaattcagcgataatgtactaactggttcatcaataatgcctcaaaagaagaatcctgatcctgcagaattaattagaggtaaaactgctattaattatggaaaattaaactcgatgcttacaattatgaaagggttgccaatttcttattataaag

SEQ ID NO: 287984 - DNA, 802 bp, Unknown
  Bacterial polypeptide expressing nucleotide sequence isolated from the Sargasso Sea
tgaatctcctcttggttctggagctttagcaggaacacccttcaatattgatagagattttactgcaaaaaaactagacttcaataaacctatgatgaattcaattgatgcagtttcaagcagagattttgtaatagaatttatctcttgttgttcaatttcttcaattcacttatcaagactctctgaggaagttattatatggatgagcgatccattccaatttatcaaactttctgatagtttttctacaggttcatcaatgttacctcaaaaacgtaaccctgacgccgcagaactagttagagctaaatcgggaagaattataggagatctaaatacattattagttgttttaaaaggtttacctttggcatactcaaaagatttgcaagaggataaagaagcaatttttgactcttatgatactttaaaattatgtttattagcaatcaaaggaatgatagaaaatttaacacccaataaagaaagaatgctatattttgcagaaaaaggattttctacagccacagatttagctgattggctcgtaattaatctaaatttgccttttagagaagctcatgaaataacaggaaaaattgtaaaactagctgaacaagctaactgcaccttagaagaagtaaaacttgaagatatgaaagatattcataaaggaataaatcgagaaattaaaaaagtcctaaatgtaagagattccgtattgtccaaaaaaagtttcggcggtacttctccagaaagaatcaagcatgccgtaaaaaaagcaaaagagagaatataa

SEQ ID NO: 287985 - DNA, 669 bp, Unknown
  Bacterial polypeptide expressing nucleotide sequence isolated from the Sargasso Sea
catgaaaaataaaaataaagctgtttggggtactagatttaataatcccacttctagaatttttgagaaaattggtgcatcaatcgatattgataaaagattattcgaagaggatattttagcatctactatacatgtgcaaatgttaattagacaaaaaataattaataaaaaaagaggcaataagataattaacggattaaaaaaaattaaaaaagaaataaaaaataataagtttaattttaataaaaaatatgaagatattcatttgaatatagaaaaaagactttttgatataatagggcaagatgctggttacctacatatagcaagatcaagaaatgaccaagtaattacagattttaaattatgggtaaaaaaagcttcttatacaataattgaaaacttaaatgttttaattaaaagttttttaaaaaaatctgaaaataatattcaaactatcatgccaggctttacgcatttgaaaaatgctcaaccaatttcttttgctcattatctattagcctatgttgaaatgttcaaaagagataaaaaaagatttttaagtaacattgattacatagatgagtgtccgctcggcgtgggagctctggctggaacttcctataagattgatagaaattatacatctaaaaaattggggcttta

SEQ ID NO: 287986 - DNA, 793 bp, Unknown
  Bacterial polypeptide expressing nucleotide sequence isolated from the Sargasso Sea
atgacaaaaaataaaaacaaccaggcaatatggagtactagaattaagggcactagttctatgctttttcaaaaagttggtaattcaattgatgttgataaaagactttataaagaagatattgctggatctatagctcatgtagaaatgttgtttaaacaaaaaattatttcttttaaaatcaaaaataaaataatttatggtcttaataaaattcagaaagaaatatcaaagaaaaaatttgaatttaatgaaaagtatgaggatatccatataaatatcgaaaaaagactcttccaaataattggtgaagaagcaggctatattcatactgctagatcaagaaatgatcaggtaattacagattttaaaatttggatcaaatctgcaacattagatattatcagtatgatagataagattataataagttcagtaaggttagctgaaaaaaatatatatactatcatgcctggtttcacacatctcaaaaatgcgcaggctatttccttaggtcattacttaatggcttatgtagaaatgtttgaaagagataaaaaaagatttaaagataatttagataatttagaggaaaatccattaggtgttgcagcattgtctggaacatcttttaacattgatagaaattatacttcaaaaaaattaggttttaaaaaaccaacaaataattccatagatacagtttctgatagggattttgttttagacttcttattcagtgtttcagtatgttctatgcatatttctagaattgcagaagaacttataattg

SEQ ID NO: 287987 - DNA, 556 bp, Unknown
  Bacterial polypeptide expressing nucleotide sequence isolated from the Sargasso Sea
aaataaacctatctggggaaataaaatcaaaagtaagacagcttctgcttttcaaaaagtttctagttcaattgaatttgacaaaagactatttagagaggatatactcgcatcaattgctcatgtagaaatgttaaatagacagaaaataattagttttaaaattaaaaataaaattatctggggattaaaaaaaattcaaaatcaaattattaaaaagacatatgtatttaactatcaagacgaaaatatacatatgagcattgaaaaaaaactttttgaacttattggggacgatgcaggatttatccatacagcaagatcaagaaatgatcaagttttagttgatttcaaaatttggatgacaaattcaaatgaaaaattaattaaaatgttagatcaaactataaaaaatattttgaaaatagctgaaaaaaatatttatacaatcatgcctggttttacacatttaaaaaatgcacagcctatctcatttgcccattatattttagcctatgtagaaatgtttaatagagataaaaacagattaaaaaat

SEQ ID NO: 287988 - DNA, 865 bp, Unknown
  Bacterial polypeptide expressing nucleotide sequence isolated from the Sargasso Sea
gatgaaaaaaaatccgtcaagaaatacgcatttaaaaaaaggtccatcgaagctattggaatctattaataactcaattgatgttgataaaagaatgtacagagaagacattcaaggctcaattgcacatgccacaatgcttggtaaacaaaaaattatatcaaaaaaagatcagacaaaaattgtcaatagtctcaaagtaattttaaacaaaattaattctggaaaaattcatttcaaaagtgaatttgaagatattcatatgaatattgaagcattactcttcaagcaaatcggtaaaactgctggaaaattgcatacagcgcgatcacgaaatgatcaggttgtaacagattttaaactttggataagaaataatagtgttaatcttaataaacacattcaaaatttacagaagagtcttataaatgttgctaaaaaaaatactaatactgtgatgcccggctatacacaccttcaggtagcacaaccaatatctttagctcatcactgtcttgcttatgttgaaatgatgggcagagatagatcaagattaaaagattgtatagagagattaaatgaaagtcctcttggcgcaggagctttagcaggaacatcatttcctatcgacagaaatctaacagcaaaattattaaaattttctaaaccaacagttaatgcacttgatagtgtatcggatagagatttcgcagtagagtttttgtttgtaatatcactactaagtacacatttatcaagaatggctgatgaaattattctttggtctaatcaacaatttaattttatcaacttaccagatgaactagtaactggtagttccattatgcctcagaaaaaaaatcct

SEQ ID NO: 287989 - DNA, 548 bp, Unknown
  Bacterial polypeptide expressing nucleotide sequence isolated from the Sargasso Sea
tatggcactttggggtggacgcttccgtcagggagccgatagccggttcaagcagttcaacgattcgctgcggttcgattaccggctggcagagcaggatattcagggctccatggcctgggccaaagcgctggtcaaggtgggcgtgttgaccgagggtgaacaggccaagttacagcaggcgatggaagtgctgctcgcctcggtgcagcaggatccccagcagatcctcagctcggacgccgaagatatccactcctgggtcgagagccagctcatcgccgccgtcggcgaccttggcaaaaagctgcacaccggccgctcgcgcaacgatcaggtcgccaccgacctgaaactctggtgcaaggcccagggcgagctgctgcttggctccatcaccgccctgcaacaagggctggtcgcctccgctcgcgccaatcaggccgctgtgctgccgggttacacccacctgcagcgggcccaaccggtcacctacgcccactgggcgctggcctatgtggagatgctggagcgggactactcccgcc

SEQ ID NO: 287990 - DNA, 766 bp, Unknown
  Bacterial polypeptide expressing nucleotide sequence isolated from the Sargasso Sea
cgcgactacgaacgcctggtcgattgccgcaagcgcgccaaccgcatgccgctgggcagcgctgcactggccggcaccacctacccgatcgaccgtgagtacaccgcacaactgctgggctttgacgccgtgggcggcaattctttggacggcgtgtcggaccgtgacttcgccattgaattctgcgccgcagccagcatcgcgatgatgcacctgtcgcgcttctccgaagagctggtgctatggaccagcgcgcaattccagttcatcgacctgccagaccgcttctgcaccggcagctcgatcatgccgcaaaagaaaaaccccgacgtgccagagctggtgcgtggcaagagcggccgtgtgtttggcgcgctgatgggcctgctgaccctgatgaaaggccaaccactggcctacaacaaggacaaccaggaagacaaggaaccgctcttcgacgccgccgacaccctgcgcgactcgctgcgcgcctttgccgacatgatcccggcgatcaagcccaagcacgcgatcatgcgtgaagcggcactgcgcgggttctccaccgcgaccgacctggcggattacctggtgcgccgtggcctgccgttccgtgactgccacgaaatcgttggccacgccgtgaagtacggtgtggacaccggcaaggaccttgcggaaatgagcctggaagaactgcgccagttcagcgaccagatcgagcaggatgtgtttgccgtgctgaccctggaaggctcggtgaatg

SEQ ID NO: 287991 - DNA, 961 bp, Unknown
  Bacterial polypeptide expressing nucleotide sequence isolated from the Sargasso Sea
acatttgaaaaaggcacctgatcaagtaatgcaagatattaatgcttctataggctttgataaaaagctttataagcaggatatagcaggatctttagcgcatgttgctatgcttgctgcttgtaaaatcgttaccaagaaagaggcagatcttattactaaaggtctaaagcaaattgagcaggaaatagaggctggaaaatttaaatttaaagctgagttagaagatattcatatgaatatagaggctcgccttaaagctattattggtgatgtggctggtaaattacatactgcacgctcacgtaatgaccaggttgctacagattttaaattatttgtagtcgaggctaatgagcaagtgataacattgcttaaaggcttgattaacaatttattaaaaaaagccgaaaagaatttagatacaattttacctggatatacccatttacaggcggctcagccagttacttttgcgcatcatttacatgcttatgtagaaatgttaggtcgagatatttcgcgttttagtgatgcaaaagagcgtgcgaatcaatgccccttgggtagtgctgctcttgcaggaacttcttttccaattgatcgtaagagggtggctaagtcattaggctttaaagagcctacagctaattctttagacagtgtttcggatcgcgattttgctttagattttttagctaatacaagtatctgtatgggccatttaagccgttttgctgaagagattgtagtatggatgagccaaggttttgcttttgtaaaattatcagatagctacacaactggtagttctatcatgccgcaaaagcgtaacccagatgctgcagagttagtgcgcggtaagacagggcgtgcttacggtaatctaattacccttttaactactatgaaagctttacctttagcctatagtaaggatatgcaagaagataaagagccg

SEQ ID NO: 287992 - DNA, 966 bp, Unknown
  Bacterial polypeptide expressing nucleotide sequence isolated from the Sargasso Sea
aataaatgcatcaatagatgtagatcagcgtttatttaaagaagatataaaaggatcaatagctcatgcgaagatgcttggtaaacaaaaaattatctcgaaaagagattcaaataaacttgttactgggctaaaatctattcaaactgatattgaaaaaaaaagagtaaagttttcaagaaaacttgaagatatacacatgaatatagagagtttgctcttaaaaaaaattggtaaggttgcagaaaaactacatacagcaagatcaagaaatgatcaagttgttacagatttaaaattatggattaaaaataattcttcgcaacttgataaagagttaaagatttttcaaaaaacacttataaatatttcaaaaaaaaatattgatacaattatgcctgggtacacacatttacaggttgcacaaccaattaccttcgcacatcatcttttagcttatgttgaaatgataggtagggatagatcaagaattaaagattgcttatatcgacttgatgaaaaccctttaggttcagctgcacttgcaggtacatcatacccaattgacagatcctatacgactaaacaacttggctttagagagccgactaaaaatgctatggatagcgtttcagatagagattttgtaattgaatatattttttgtctttcattaataggtttacatttatcacgacttgctgaggaaataattttatggtctaatcaacaatttaaatttatatttttgccagatgagctttcaactggaagttctataatgccacaaaaaaagaatcctgatggtgctgaacttgttagagcaaaatccagcttaataattagtaatttaggatctatattaaatattttaaaaggactccctctatcatacagtaaagatctgcaggatgataaaagtcttattttttactcatatgataatttaatactttgtttaaaagt

SEQ ID NO: 287993 - DNA, 787 bp, Unknown
  Bacterial polypeptide expressing nucleotide sequence isolated from the Sargasso Sea
atggcaaaaaataaaaacaaccagacaatatggggcactagaattaaaaatagtacttctactctttttcaaaaagttggaagttcaattgatattgataaaaggctgtataaagaagatattgctagttcgatcgcccatgtagaaatgttattaaaacaaaaaatcatttcatttaaaattaaaaataagatcgtttatggacttaataaaattgaaaaagaaatatcaaataaaaaatttgaatttaaaaaaaaatatgaggatattcatattaatatcgaaaaaagacttttcgaaataattggtgaagaagccggttatattcatactgcaagatcaagaaatgatcaggtaattaccgatttaaaaatttggatcaaatctgcaaataataaaattaatattggaatagataaaataattaaaagctcattaaaattagcagaaaaaaatatatatactattatgccaggttttactcatcttcaaaatgcacaagctatttcttttgcacattacttaatggcatatgttgaaatatttaatagagataaaaaaagatttattaataatctagataatttagatgaaaatcctttaggtgtcgctgctctaactggaacttcatttaatattgatagaaattttacaactaaaaaactgggttttaaaagacctactagtaattcaattgatacagtttctgatagagattttgttttagattttttatacagcgtttctatatgctctatgcatatttctagaattgctgaagaactaa

SEQ ID NO: 287994 - DNA, 654 bp, Unknown
  Bacterial polypeptide expressing nucleotide sequence isolated from the Sargasso Sea
aatggaaaagaagactaaagagatagataagaaaaataaagcgaaagataagtctcaagtaagctccgtctggggtggccggtttactgatggcccctctgatattatggacaaaataaatccttcaattgattttgatcagcgttttttttcacaagacgtacaaggctcaagggttcatgcggagatgctggcgaaacaaggaattatttcgaaaagagagagcagggatataatcgaaggcctaaataaggtcgagaaagaaatacgtgatggggaatttcgattccgaagagagctggaagatattcatatgaatgttgaggcccggttaaccgaattaataggagaatctggtggccgactgcataccgcacgctcaagaaacgaccaggttgcaacggactttaagatgtgggtaagagaaaaaatagacgatttggttcaagctgtagtgctgcttcagaaagctctgatagacaaagctgaggagaatacagccgttgtgatgccagggtttacgcatctccaagtagcccaacctgtaacttttggacatcaccttctcgcctatgttgagatgttcgggagggataagggccgacttgaagactgcaggagtaggctaaacgaatgtcctcttgggtccgctgc

SEQ ID NO: 287995 - DNA, 946 bp, Unknown
  Bacterial polypeptide expressing nucleotide sequence isolated from the Sargasso Sea
attaattaaatctattttaaaaaaagcagaaaaaaatattgatactgttatgcctggttttactcatctaaaaaatgcacaacctatttcttttgcacactatttattagcctatgtagaaatgcttaacagagataaaaaaagatttttaaataatattgaattaattgatgagtcccctttagggtctgcagcattagcgggaacatcttacaaaatagacagacaatttaccgcaaagaaacttggttttaaaaaacctactggtaactctattgatgctgtttgtgatagagattttgcaatagattttttatcagcggcagctacatgtgcaatgcatatgtcaagattagctgaggattttattatatttaattctgaagcttttaattttttaaaatttagcgatagagtgcttactggctcgtccataatgcctcaaaagaaaaatcctgatccagctgaattaataagaggtaaaacagctattaattacggaaaattaaattcgatgctaacgattatgaaagggttaccaatttcttattataaagatttacaagatgataaagctcttgtgtttgatagttatgatactttgaaagatacgttgcttatggcgaatgaacttattttaaatcttaatgcaaataaaataaatatgaagcaaatggcccaaaaaggttacactacagcgactgattttgcagattatttggtaaagaaaaataattttccttttagagaagcatatgtagcttcatcaaaacttgtgaattatgcagagaaaagaaaagtaaggttagatgaactttctttaaaggaaataaataaatttttaaaaggagttaaagttgataatatcaaaatatttgatgtattaagttcaatgaactccaaaacatcttatgggggaacagcaaccaaaatattaaaaatatga

SEQ ID NO: 287996 - DNA, 396 bp, Unknown
  Bacterial polypeptide expressing nucleotide sequence isolated from the Sargasso Sea
tatgacggatcagaagaaatctgaccaggccacatcctccgaaaaaccctggggtggccgtttcagcgagcctaccgatgcctttgtcgagcgctttaccgcgtcagtcggttttgatcagcgcctgtaccaccatgatattaccggctctatcgcccatgccaccatgctggccaaggtgggtgtgctcaccgacgccgagcgggaccagatcatcgaaggcctgaaaggcgttaaggaagacatcgaagccggtcgcttcgagtggtccgtcagcctggaagacgtgcacatgaacatcgaagcccggctgaccgaccgcatcggcatcaccggcaagaagctgcacaccggccgtagccgtaacgaccaggtcgctaccgacatttcgctgta

SEQ ID NO: 287997 - DNA, 906 bp, Unknown
  Bacterial polypeptide expressing nucleotide sequence isolated from the Sargasso Sea
attttaaaataaaaaataaaattgtttggggattaaatagaataaaaaatgaaattataaaaaaaaaatttatctatgatgaaaatcttgaagatatacatatgaatatagaaaatagactttttcaattaattggtgaagatgctggatttatccatactgcaagatctagaaatgaccaagttattactgatttaaaaatttggttaaaaaaagcaactaaagaaataaatagcaatttaaaccttacaattaaaaatattttaaaaaacgctgacaaaaatgttgaaacaattatgcctggctttacacatttaaaaaatgcacaacctgtttcatttgctcattatttattagcttatgtagaaatgtttactagagacaaaaaaagatttaacaataatcttgataatttaaatgaaaatccacttggtgtagccgctttaaccggtacttcttttagtattgatagattttacactactaaaaagcttaagtttaacaaaccaacaaaaaattctatagatacagtttcagatagggattttgttattgattttttatattgttgttcaacatgctcaattcatatatcaagaattgcagaagagtttataatttggaattcagatgcatttaatttgatttctttaaatgataaaattgttacaggttcatccataatgcctcaaaaaaagaatcctgatccgttagaatttttacgaggcaaaacaggaggatcaattggtaatctattttcaatgttaactatattaaaaggtcttcctttatcctatttcaaagatctgcaagacgataaagaattagtatttaaatcttttgatcaattaaagaactctttaattatattaaacgaatgttttaaaaaatttttcagtaaataaa

SEQ ID NO: 287998 - DNA, 736 bp, Unknown
  Bacterial polypeptide expressing nucleotide sequence isolated from the Sargasso Sea
atgagtaaaaataaaaacaatcaaccaatttggggaaatagaataaataaaagttcaaaaaatttatttgaaaaagttggtagttctttaaaaattgataaaaggctttaccatgaagatattttagcttcttcagttcatgttgaaatgctttttagacagaaaatcattgattttaaaataaaaaataaaattatatggggccttaaaagaataaaaaacgaaattataaaaaaaaaattttcgtttgatgaaaaacttgaagatattcacatgaatattgaaaaaagattatttgatttaattggagacgatgctggttatattcatacagcaagatctagaaatgatcaggtaataactgactttaaaatatggataaagaaagcaacaaatcagattgtcaaaaatttagattcaacaataaacttgactttaaaaaatgcgaataaaaatgttgagacaattatgcctggtttcacacatcttaaaaatgcccaaccagtttcatttgcacattatttaatggcttatgtagaaatgttttctagagataaaaaaagatttcttaataatattgataatttaaatgaaaatccacttggtgtcgctgctctgactggaacttcctttaatattgatagattttatacttcgaaaaaattaaaatttaaaaagccaactaaaaactctattgatacagtgtctgatagagatttcgttttagattttttgt

SEQ ID NO: 287999 - DNA, 884 bp, Unknown
  Bacterial polypeptide expressing nucleotide sequence isolated from the Sargasso Sea
tactgatattaagttatggctaagaaaaaaaatagaccaaattgaactaagtcttaaaagctttcaacaaatactcattgaaaaatcagaaacttattatgatctcttgatgcctggatatactcatttacaagttggacaacctgtcacatttggacatcatttgttagcctacgtagaaatgcttggaagagataggggtagattaactgactgtcgaaataggttaaatgaattaccgctaggttccgcagctttagcaggaactagttatccgattgatagacattatgttgcacaaaaacttaatttcagcaaacctactgaaaactccatggatgctgtctcagatagagattttgctattgaatttatgtctgcttcatctttaatagctattcacttatctagactagcagaagaattaattatttggtcttcagatagctttaattttgttaaattacctgagagttacactactggatcaagtattatgcctcaaaaaagaaatcctgatgccgcagaattaataagagctaaacctggtagaatatttggaaatttatttagcctaatgacagtgctaaaaggtcttcctatgacatatggaaaagatatgcaagaagataaagaacctttatttgatactgctaaaactattgaagcgtgcattatcaatatggaaggcatgattaaaagccttgaacctattcctgataaaatgatggaggcccttcagaaaggctatcctacagcaactgatttagctgattatttagtaactgaattaaagataccttttagggatgcacatcattttactggtcagattgttttattagctgagaaaaaaaaatctaccttagagaaattaaccatgg

SEQ ID NO: 288000 - DNA, 904 bp, Unknown
  Bacterial polypeptide expressing nucleotide sequence isolated from the Sargasso Sea
aataaaataatttggggtttaaataagataaaaaatgagattataaagaaaaaatttaattttaattctaatcttgaggatattcacataaatatagaaaatagattatttgaaattattggagaggatgcggggtatattcacacaggaagatcaagaaatgatcaggtgattactgatcttaagctatggttaagaagttcaactgttaaaattcttaatcagctgaataatctaataaaaattattataaaagatgctgaaaaaaatgttcaaactataatgccaggttttacgcatttaagaaatgctcaacctatttcatttgctcattatttattagcttatgtcgaaatgtttaatagagataagaaaagatttcaaaataatttagaaaatttatcagaaaatcctctgggagttgctgcgcttgcgggaacaagttttaatatcgatagaaactatacttcaaaaaagctaaaatttaaaaatccaacaaataattcaattgatactgtctcggatagagattttgtactagattttttatattctgtatcagtttgttctatacacatatctagaatggcagaagaattcattatatggaattctgatgcttttggattaattaagctacatgataaggttgtgacgggatcatctataatgcctcaaaaaaaaaatcctgatccattagaatatctaagaggaaaaacaggaagtagttttggtaatttattttctatgcttactattttaaaaggattgccactttcttatttcaaagatttacaagatgataaagaattagtttttaattcttatgatcaaataaaaaattcaattttaatcctttcagaaatattaaaaaattttactccaaacaaaaaaagaatgtaga

SEQ ID NO: 288001 - DNA, 861 bp, Unknown
  Bacterial polypeptide expressing nucleotide sequence isolated from the Sargasso Sea
tatatgcacactgcaagatcaagaaatgatcaagtagtaactgattttaaactttgggtaaaagactcatctatcattttgataaaagaattaaactctttaatgaaaaatattgtaagtaaagcagacaagaatgtaagtacagttatgccaggttttactcatcttaaaaatgcacaaccagtttcttttgctcattacctcttagcttattatgaaatgttaaaaagagacaaaaaaagatttcaaaataatttagaattaataaatgaatcacctcttggagctgcagctctatcaggaacttcttataatattgatagaaatttcacatctaaaaaattaggttttaaaaaaccaacgaataactcaatcgatacagtttctgatagagattttgcaatagattttctgtacgcttgcgctgtatgcgcaatgcatttatcaagattggctgaagacttcataatactaaattcagatgcatatcaactaataagctttaatgataaaatgcttaccggttcttcaattatgccgcaaaaaaagaatcctgatcctgcagaacttatcagaggaagaactggaatcaattatggaaaattaaattctatgttaacaattatgaaaggacttccaatttcatatttcaaagacctgcaagatgacaagtctttagtatttgatggatttgatactttaaaagatactttagttatgagcagcgaattaattaaaaatatttatccgaacaaaactagaatgtctaatatggcaaaaactggatatacaacagcaacggatttcgcagactatttggtaaaagataaaaagctatcttttagagaagcttataaaata

SEQ ID NO: 288002 - DNA, 610 bp, Unknown
  Bacterial polypeptide expressing nucleotide sequence isolated from the Sargasso Sea
ttaattatttggaattctgatggtttcaacttaatttatctttctgataaaattgtaactggttcctctataatgccacaaaaaaaaaatcctgaccttttagaatatttaagaggtaagtctggtttgacatttggaaatttattttcaatgttaacgattcttaaaggattgccgctttcttactttaaagatatgcaagatgataaagaaatagtttttaaatcatatgatactttaatgaactgtctgaaaatatttgatgaaatattgaaaaatatttcccctaataaaaaaagaatgtacgagctagctgactcagggtttcttacagcaactgatctcgcagattatttggtaaaaaatcattcaatgtcatttagaaaagcatatcaaaagactgctgaaatagtaaattttgcagaaaagaaaaaaaagagattgaaagatcttaagctagaagaattgaaaaaaattgaaccaaaactaactaatgaagttttgaaagtttttgatttaaaaaattcaataaattcaaaaaaatcttacggaggaacatcttttgaaaacataaaaagaatgataatgaaatatagaaaagacaaatgat

SEQ ID NO: 288003 - DNA, 620 bp, Unknown
  Bacterial polypeptide expressing nucleotide sequence isolated from the Sargasso Sea
catgagtaaaaataaaaacaacaaagcaatatggaatgcaagaattaaagctaatacttctgcattatttgaaaaagttggaacttctatagacgtagataaaaagctttttaaagaagatattgcttcttcaatcgtgcacgtggaaatgctgtttagacaaaaaataatatcattcaaaataaaaaacaaaataatatatggtttaaataaaatagaaaaagagatagttaaaaaaaaatttgaatataaaaaaaaatatgaagatatacatatgaatatagaaaaaagattgtttgaattaattggtgatgatgctggttatattcatacagcaaggtctagaaatgatcaagttataacagattttaaaatttggttaacaaaatcaacaaaggaaataacaaaaaatatagatattattatcaaaacaattttaaaagttgctgaaaaaaatattcatacaataatgccaggatttacacatttaaaaaatgctcaacctgtttcatttgctcattacttaatggcttatgtggaaatgtttaaaagagataaaaaaagatttttagataatttagaaaatttatcagaaaatccacttgggtgtgcagctttaa

SEQ ID NO: 288004 - DNA, 823 bp, Unknown
  Bacterial polypeptide expressing nucleotide sequence isolated from the Sargasso Sea
ttttcaaataatttaaatagtttaaatgaaaatcccttaggtgttgcagctttagcaggtacatcatttaatatagacagaaattatacaactaaaaaacttggttttaaaatacctacaaataattctattgatacagtttcagatagagattttgtagtagattttttatatgcttcatctgtgtgtgcaatgcatatatctagaattgcagaagacctaattatttggaattctgacggatttaacttgatcaacttatctgataaagtcgttactggatcatctataatgcctcaaaaaaaaaatcctgatattctagaatacctacggggaaaatcaggagatgcttatggaaatttgttttcaatgctcacgattttaaaaggcttaccattgtcttattttaaagatttgcaagacgataaagagattgtctttaaatctttcgacaatctaaataattgtttaaaaatttttgatgaaatactaaaaaattgtaatccaaataagaataaaatgttagaacttgctaattctggatacacaacagcaactgatttagctgattatcttgtaaaaaatcattccatgtcatttagaaaagcatatcaaaaaactgcagaagtagttaattttgtagaaaaaagaaaaaagaaattaaatcaattaactttggaagagttaaaaaagattgaacctaaacttaatgaagatgtattaaaagtatttaatttaaaaaattcaattaattcgaaaaaatcttatggtggaacttcttttgataatattaaaaaaatgatattgaaatataaaaaagaaa

SEQ ID NO: 288005 - DNA, 823 bp, Unknown
  Bacterial polypeptide expressing nucleotide sequence isolated from the Sargasso Sea
tatggactacagaaaatagaaaaagaaatatctaaaaacaactttgattttaataaaaaatatgaggatattcatatgaatattgaaaaaaaacttttcgatattattggtgaggaggctggatatattcatactgctagatcaagaaatgaccagataataactgattttaagatttggattaaaaaagcaactcaagaaattaccataaatttagacaaagttataaaatcctctcttaagattgctgagaaaaatattgaaacagttatgcctggctttacccatttaaagaatgctcaaccaacatcattcgctcattatttgatggcatacgttgaaatgttttcaagagataaaagaagatttattaataatttagaaaatctaaatgagagcccacttggtgtagctgcactcacaggcacatcatttaatattgatagaaattatacagcaaaaaaacttggattcagtcatccaactaataattcaatagacactgtttcagatagagattttgtattagattttctttttagtatttcagtctgttcaatccatatttcaagaattgcagaagaactaataatttggaattcagatggatttaatctaattcatctttcagataaagttgttactggatcatctataatgcctcaaaaaaagaatcccgatttgttagaatatttaaggggcaaaactggatcaatgtttggtaatttattttctatgctaacaatactaaaaggactgccattatcttatttcaaagatatgcaagatgataaagagatagtctttaaatctaatgatacat

SEQ ID NO: 288006 - DNA, 808 bp, Unknown
  Bacterial polypeptide expressing nucleotide sequence isolated from the Sargasso Sea
ctgcgtggcgagatcgaccgcatcggcgggctgctgacggaactgcgcacggccctgctcgacatggcggagaagaacgcctcgaccatcatgccgggcttcacgcacttgcaggtggcgcagccggtcaccttcggccatcacctgctggcctacgtcgaaatgttttcgcgcgacgccgaacgcatgatcgattgccgcaagcgtgtgaatcgcctgccgttgggtgcggcggcgctcgccggcaccagctatccgatcgaccgtcatgcggtggcgaagaccttgggcttcgacggcatctgcgcaaactcgctggatgcggtgtccgatcgtgacttcgcgatcgaattcacggcagcgtcggcgctggtgatgacgcacgtgtcgcgcttctcggaagaactggttttgtggatgagtccgcgcgtcggcttcatcgatctggccgaccgtttctgcaccggctcgtcgatcatgccgcagaagaagaacccggacgtgcccgaactcgcgcgtggcaagacgggccgcgtgaacggtcatctgatcgcgctgctcacgttgatgaaaggccagccgctcgcctacaacaaggacaaccaggaagataaggaaccgctgttcgacaccgtcgatacggttgcggacacgctgcgcatcttcgctgaaatggtcgcgggcatctcggtgaagccgcaagccatgcgcgacgccgcgttgcaaggcttctccacggccaccgatctcgccgattacctggtcaagcgcggcctgccgtttcgcgacgcgcacgaagccgtggcgc

SEQ ID NO: 288007 - DNA, 945 bp, Unknown
  Bacterial polypeptide expressing nucleotide sequence isolated from the Sargasso Sea
aatcttaagctgccgctgcagacgcaggaagaagatattcacagctgggtggaagctcagtggcagcaaaaaattggtgctgtggcgaaaaagctgcacacgggccgcagccgtaacgacttagtggcaaccgacttacgcttgtggaccaaactgaatgccagccaggttcgcagcactttaatcaccgctattggtgcattgattacttttgctgatgcgcattttggtgctgtgatgccgggctttactcacctgcaacgggctcagcctgtgctggtcagtcactgggctttagcttacatcgaaatgtttaaacgggatttaagccgtattgacgatgcgttagagcggatggatgtctgtcctttaggttgtggtgctttagcgggtactggtattcaaatcgatcgcacagctttagcccagcgtttaggctttaaatcagctgcgcttaatagcttagatgcggtgtcggatcgggattatgtggtggagttatcagccacagcctctttgtgtatgacacatttatcgcgtttatctgaagatgtgattttcttttgctcaggcgaagcggctttctttaagctgggtgacgctatcagcagtggctcgtcgttaatgccacaaaagaaaaaccctgatgtgtttgagttattacgtggcaaaaccggccgggtgctgggtcatttagtggctattttgcatgtactcaaaggtttgcctctggcgtacaacaaagatatgcaggaagacaaacaaggctttttcgatttgatggcaagctggcaacaatgcttgctggtgctggcgaccgtactgccgcatttatcggttaatgtagagcgttgccatttagctgcagagctgggctacagcaatgccactgatttaacggattatctggtagggaaaggcatcgccttccgcgacgctcatgaa

SEQ ID NO: 288008 - DNA, 789 bp, Unknown
  Bacterial polypeptide expressing nucleotide sequence isolated from the Sargasso Sea
tcttaaaagaaaagttggtgatattgctggtaaggtgcacacaggtaaatctagaaatgatcaagtagcaactgatttgaaaatgtggattaaagaaaaattggatgaaattattaaaagaattatgcacattcaaaaaacgataataaaaaaatctgaagaaaatattaatataataatgcctggctttactcatttacaaaacgcacagccaattttattttcacattatttactatctttttttgagatgattaacagagataaaaaaagagccgcccaacttataaaaaatttgaatgaatgtccacttggttcaggagcacttgcaggaacaaatttttttgaaattgatagattttttatagccaaacaactgggttttgaaaaaccgactgaaaattcaattgatagtgtttcgaatagagactacgtagttgaatttttaacaattctttccatgataagtatgcatttttcaaaaatgtctgaggactttatcatctgggcaagtggagcattcgaatttatcaagtttcctgattcgctatgtacaggctcttcaataatgcctcaaaagaaaaatccagatgctgctgaacttattagatcaaaaacaggtagagtttttagttcactatccaatttgctcattattcaaaaaggaataccaagtggctacagtaaagatttacaagaagataaagaacctacatttgatgcatattattcaattgaaatcattttaaatgttgcagatgaaatgattaaatctatcaaaattaataa

SEQ ID NO: 288009 - DNA, 929 bp, Unknown
  Bacterial polypeptide expressing nucleotide sequence isolated from the Sargasso Sea
cagatctaggaatgatcaagtaataactgactttaaattgtggctcagaaactcaacacatgaaattgtcaaactattaaactcttctataaaaataatattaatttgcgctgataaaaatatcaaaacaattatgcctggatttacacatttaaaaaatgctcaaccaatttcttttgctcactatttactagcttatgttgaaatgtttcaaagagataaaaaaagatttaataataatttagataaccttatggaaaatccattaggtgttgcggctatagctggaacatcatttaatatagatagaaattttacaacaaaaaaattaaaatttagcatacctacaaaaaattctattgatacagtttctgatagagattttgttattgattttttatacgctgtatctgtttgttctttgcacatatcgcgttttgctgaagaatttattatatggaactctgatgctttcaaactaatacagcttaatgataagattgtaaccggatcatccataatgccacaaaaaagaaatcctgatcccttagaatttctaagaggaaaaacaggaaatgcttttggtaatttattttccatgcttactattttaaagggattaccattatcttattttaaagatatgcaggatgataaagagttagtttttaagtcttttgatcaattgaaaaattcgttattaatttttaatgacattttaaaaaactttagtgcaaataaaaaaagaatgtttgaactagcaaaatcaggtcatactactgcaactgacttagcagattatatggttaaagagtttcagtttccttttagaaaatcttacgaaatcacttctaaaattgtaaaatatgctgaatcaaaaagaaaaaatcttgatgaattagatataaatgagttaaaaaaaattgaat

SEQ ID NO: 288010 - DNA, 840 bp, Unknown
  Bacterial polypeptide expressing nucleotide sequence isolated from the Sargasso Sea
atttaaatttaaagaaaaatttgaagacattcatcaaaatatcgaaaaaagattgtttcagatcattggtgaatctgcgggatatttacataccgcaagatcaagaaatgaccaagttgtaactgattttaaaatatgggttaaaaatgcttcgctagatattaataaaacattaaaccatttaatgagatctatcttaaaaaaggcatcaaaaaatatcgacacagtgatgcctggctttactcatttgaaaaatgcacaacccatttcttttgcacattatctgctcgcatatgttgagatgctaaacagagataaaaaaagatttgtaaataacattgaattgatcgacgaatgtcctttggggtctgctgctcttgctggcacgtcatttaatatagacagaaaatttacagcaaaaaaacttggtttcaaaaaaccaactaataattctatcgactctgtatcagatagagacttcgctattgattttttatctgctgccgcaacctgtgctatgcatttgtcaagattggctgaagattttataatttttaattctgaagcttttggttttgtagaatttacagataaagttctgactggctcttcaataatgccacagaaaaaaaatccagatcctgcagaattaataagaggtagaacagcaatcaactatggaaatctaaattcaatgttaacaattatgaaaggacttccaatttcttattacaaagatttacaagatgataaagcattagtttttgatagctatgatacattgaaggatagcttatcaatgtccatcgagttgatagaaaatttaaatacaaaaaaaaa

SEQ ID NO: 288011 - DNA, 887 bp, Unknown
  Bacterial polypeptide expressing nucleotide sequence isolated from the Sargasso Sea
gttgagacaattatgcctggatttacacatcttaaaaatgcccaagctatctcttttgcacattatttaatgtcttatgtagaaatgtttaatagagataaaaaaagattttcaaataatttaaacagtttaaatgaaaatccgttgggtgttgcggcattagctggaacatcatttaatatagatagaaattatacaactagaaaacttggttttaaaataccaacaaataattctattgatacagtttcagatagagattttgttttagattttttatacgcttcatcagtatgtgctatgcatatttctagaattgctgaagagttaattatttggaattctgatggttttaacttgattaatttatctgataaagttgttactggatcatcgataatgccacaaaagaagaatcctgatcttttagaatatttgcgtggaaaatcaggaagcgcttatggaaatttattttcaatgcttacaatcttaaaaggtttaccattgtcttattttaaagatctacaagatgataaagagatagttttcaaatctaacgacaatctaaataattgtttaaaaatttttgatgaaatactaaaaaattgtaatccaaataagagtaaaatgttagaacttgctaattctggatacactacagcaactgatttagctgactatcttgtaaaaaatcactcaatgtcttttagaaaagcatatcaaaaaactgctgcagtagttaattttgctgaaaaaagaaaaaaaaaattaaatgagttgactttagaagaattaagaaaaattgaacctaaacttaaagatgacgtgttgaaagtatttaatttaaaaaattcaattaattcgaaaaaatcttatggtggaacttc

SEQ ID NO: 288012 - DNA, 653 bp, Unknown
  Bacterial polypeptide expressing nucleotide sequence isolated from the Sargasso Sea
catgagtcaaaataaaaacaataaagcagtttggagttcaagaataacaaaaaaaacatcttcaatttttcaaaaagtaggtagttctataagtattgataaaagacttttcaaagaagatataactggaagtatagctcatgtagaaatgttatttaaacaaaaaattatttcatttaaaacaaaaaataaaatcgtttggggactaaacaaaattagaaatgaaataattaaaaaaaaatttaattataaatctgaatacgaagatattcacatgaatatagaaaaaagattgtttgaaattattggagatgatgcggggtttgtacatactgcaaggtctagaaatgatcaggtaattacagattttaaactttggctaagaagttcaacaaacgatataataaaacttctcaactcatccataaaaataattttaattattgcagaaaaaaatattcagacaattatgcctggatttactcacctaaaaaatgcacaaccaatatcttttgctcattacttgttagcatatgttgaaatgttcaaaagagacaaaaaacgatttaaaaataatattgatagtttattagaaaatcctttaggagcatcggcgatagccggaacttcattcaatatagacagaaatttta

SEQ ID NO: 288013 - DNA, 841 bp, Unknown
  Bacterial polypeptide expressing nucleotide sequence isolated from the Sargasso Sea
atgagaaaatcaactaatgaaataattaagcttttaaattcaacaaataaattaataattaaaaaatctgaaataaataaagaaacaataatgccaggttttactcatttaaaaaatgctcagcctgtgtcatttggacattatcttttagcatatgttgaaatgtttaacagagacaataatagatttaaaaataatttaaataatttattagaaaatccattaggatcagctgcattagttggtacaagttttaatatagatagaaattttacttcaaaaaaacttggctttaaatatccaacaagtaattctattgatactgtatcagatagagattttgtggttgattttttgtatgctgtatctctttgtagtttacatatatcaagatttgcagaagagtttattatttggaactccgatggttttaaattaatcacattaaatgataaaattgttaccgggtcttcaataatgcctcaaaaaaaaaatcctgatccattagagtttttaagaggtaaaactggtattgcatatggaaacttgttatctatgttaactattctaaaaggtttaccactttcatattttaaagatcttcaagacgataaagaattagtatttaaatcttttgatcaattaaaatcttctttaatgattctaaatgatgtgcttaataattttagtccaaataaaaaaagaatgcttgagctagcaaatgaaggtttcataactgctactgatttagcagaatacctcgtaaaaaaaatgaattttccatttagaaaagcatacatattaacatcaaaaatagtaaattatgctgagaaaaataata

SEQ ID NO: 288014 - DNA, 690 bp, Unknown
  Bacterial polypeptide expressing nucleotide sequence isolated from the Sargasso Sea
catgagcgatcgaaagacagaaaacagtcaggagttatggggcgggcgtttcagcgaacccacggacgcctttgtccagcggtttacggcatcggaggcctttgaccgtcaactcgctgtctacgacatcgcaggctccagcgcccatgccgagatgctgatgtcgacgggcgtcctcactgcagacgaaaatgccgcgattcagcagggcctcaccgatatcctggccgagatagaacaaggcgcctttgagtggtccgttgcacgcgaagatgtgcacatgaacatcgaagcgcggctcaccgaactgattggcgatgtcggcaaaaagctgcacactggccgatcgcgcaacgatcaggtcgccaccgacctgcgtctatacctccgcgccgcactcgacgccatcagcgccgagctgactcgcctgcaaaccggcatcgtgacgctggcagctcagcacgcgagtaccgtcatgcccgggttcacccatctgcaggtagcccagccggtgacgtttggccaccaccttttggcctggaacgaaatgctggagcgagactatggtcgtctggcggactgccgaaagcgattgaatgtctcgcccctgggcgccgctgcactggcagggactaccttcccgatcgatcgtgacgccaccgccgagatgctcggctttgatgcgcccac

SEQ ID NO: 288015 - DNA, 704 bp, Unknown
  Bacterial polypeptide expressing nucleotide sequence isolated from the Sargasso Sea
ttcaatagatacagtttcggatagagactttgtgctagattttctttatgctgtttcagtatgttcaatgcatatttctagaattgcagaggaattaattatatggaattcagatggatttaacttgatcaacttgtcagataaagttgttacaggctcttcgattatgcctcaaaaaaagaaccctgatcttctagaatatctaagaggaaaaactggaacttcttatggaaattttttttctatgttaacaatactaaagggcttgccactatcttactttaaagatttacaggatgataaggaattagtttttaactctaatgatactctcataaactgcctaaaaatatttgatgaagttttaaaaaattgcagtgcaaataaaaagaaaatgctagaacttgcaaatacaggtcatattacggcaacagatttagcggattatttagttagaaatcactccatgtcttttagaaaggcatatcaaaaaacagctgctattgtgaacatggcagaaaaaagaaagaaaaatttaagcgagttaactttacatgaactaaaaaaaattgaaccaaaactcacagaagaagttttaaatatttttaaattaaaaaattctattaattcaaaaaaatcttttggaggaacatcttttgataatgtaagaaaaatgataataaaatataagaaaataaaatgat

SEQ ID NO: 288016 - DNA, 850 bp, Unknown
  Bacterial polypeptide expressing nucleotide sequence isolated from the Sargasso Sea
cgatcaagtgattacggatgcacgcctttttgcaaaagatgctcttcagcgtttaactcaagagacacaacggttagtaacggccttagttacgcttgcagaaacacaccctaggaccttatttcccgggtttacccattttcaaccagcgcaaccggttcttttttcgcattacatattggcttatgcccaaaaatttatgcgagatatacagcgttttgaacaggcatttgatacaagcgatgtctgtacactgggctctggagctttggcaggcaataactatgctttagatcggcaattcatggcggatttattgggattttctcgcatttcatttaatagcatggacgcagtgagtgatcgtgatttcatgtgtgaaacattggcagcaacgagtttatgcatgacccatttaagtcgtttttgtgaagatattattgtatattgctcaccagcaatgggattccttcaattgggagacagtgtgacaacaggatcgtcgctaatgccacagaaaaaaaacccagacattgcggaacttattcgaggtaaaacaggtcgtgtgcatgcccattggcatgccttgcaaacaacgcttaaggggcttccattaacgtataaccgtgatttacaagaagataagccacttttatatgatagcgtcgatacaactgaagcttgtttacgctgtttttgcaatatgattgagaccataaagcttgatgaagaggccattcaaactggacttgaaaagggatatggcgtagctaccgacttggcagattacttggttgcaaaaggcgttccatttcgagatgcccatgaaattacgggacaaatggtatta

SEQ ID NO: 288017 - DNA, 961 bp, Unknown
  Bacterial polypeptide expressing nucleotide sequence isolated from the Sargasso Sea
ttttaaaattattggtgaagaggcagggtatgttcatacagctagatcaagaaatgaccaggtgataactgattttaagttgtggttaaaatctgcaaccaaagaaattaattacaatctcgataaagtcattaagagttccataaaattagctgaaaaaaatattcagactattatgcctggttttacacatttaaaaaacgctcagccaatttcattcgcgcattatctgatgtcttatgttgaaaattttaatagagataaaaaaagatttattaataatttagaaagtttaaatgaaaatcctcttggtgttgctgctatatctggcacatcatttaatatagatagaaattatacaacccaaaaacttggttttaaaaaacctacaaataattctattgatacagtttcagacagagattttgtgcttgattttctttatagcatttcagtatgctctatgcatatttcaagaattgcagaagagttaattttatggaattcagatggattcaatttaattaatttgtctgataaagttgtaactggatcttcaataatgcctcaaaaaaaaaatcctgatcttttagaatatttaagaggtaaatctggaactacctatggaaatttattttctatgctaactattttaaaggggttgccgctatcttattttaaagatcttcaagatgataaagaaattgtgtttaattcaaatgatacacttattaattgtctaaaaatttttgatgaagtattaaaaaattgtagtccaaataaaaaacaaatgcttaaacttgctaataatggatacactactgcgactgacttagctgattatcttgtaaataataattcaatgtcttttagagaggcctatcaaaaaactgcggcaatcgttaatttagctgaaaaaaagaaaaaaaaattagatgagttaactttgatcaataaaaaa

SEQ ID NO: 288018 - DNA, 976 bp, Unknown
  Bacterial polypeptide expressing nucleotide sequence isolated from the Sargasso Sea
tgatgcgggattcttacatatagctaggtcaagaaatgatcaagttattactgattttaaattatggattaaaaaatcatcaaaagaagtagttaatagcttaaatgttttaattaaaaactttttacaacaatctgaaaaaaatattaaaactataatgcctggatttacacatcttaaaaatgcacaaccaatttcttttgctcactatttattagcttatgtagaaatgttcaaaagagataagaaaagatttagtagtaatattaattatattgatgaatgtccacttggagtaggagcattagctggaacttcatataaaattgacagaaatttcacatcaaaaaaactaggctttaaaaaacctacaaacaattctatagactctgtatctgatagagattttgctttagattttttatctgccgcatctatctgcgcaatgcatatttctagatttgctgaagagttaataatttggaattctgatatattcaaacttattgagcttgatgacaaaatgcttaccggatcctcaattatgcctcaaaaaaaaaatcctgatcctgctgaattaatcagagggagggctggtaaaaattttggagcattacaagcaatgttaaccactatgaaaggtttacctttatcctattataaagatatgcaagaagacaaagcattagtttttaatagttatgatacacttttagagtcgattattataactaatgaacttgttaaaaatttaaaacctaataaagaaagaatgttttccttatctaacgaaggttacactactgctactgattttgctgattatcttgtacaaaacaataatttatcttttagagatgcatacaaaatttctgctaaattagtaaactatgcagaaaagaaaaataaaaagctaaatcaactcagttttaatgaggttaagctaatgaataatgatttaaataaaaatgtatga

SEQ ID NO: 288019 - DNA, 885 bp, Unknown
  Bacterial polypeptide expressing nucleotide sequence isolated from the Sargasso Sea
catgggtaaaaataaaaacaataaaccaatttggaatactagaattaaaaaggaaaaaataaacctttttaaaaaggttggtggatcaatttcaatcgataaaagattatttagagaggatattgaagcttcaattgtacatgttgagatgttgtttagacaaaaaattataaattttaaaattaaaaataagatagtatggggtttgaatagaattaagaatgaaattataaaaaaaaaatttatttttgacgacaagcttgaggatattcatatgaatatagaacacagactctttgaactaattggagaagacgcggggtacattcacactgcaagatcaagaaatgatcaggttgtcacagattttaaaatttggttaagaaatgctaataaagaaattgttagaaacattgatgcaacaattaaaaatattttaaaaaaagcagaaaaaaatgttgaaacagttatgcctggttttacgcaccttaaaaatgcacaaccagtttcttttgctcattatttaatggcgtacttagagatgtttaatagagataaaataagatttaaaaacaatttagagagccttaatgaaaatccacttggtgtggctgctttaacaggtacttcttttaaaattgatagattttatacttcaaaaaaattaggttttgatagaccaactaaaaactcaatagatactgttgctgatagagattttgtaattgattttctatattcttgttccgcctgtgccattcatatctctaggattgcagaggagtttatcatctggaattcagatgcttttagacttattaatttgaatgataaaattgtaactggatcatcgattatgcctcaaaaaaaaatcctgatccacta

SEQ ID NO: 288020 - DNA, 706 bp, Unknown
  Bacterial polypeptide expressing nucleotide sequence isolated from the Sargasso Sea
aatgaaaaaaaatccttcaagaaatgtccatttttcaaaaggacctagtgagattttagatgcaattaattcgtctatagatattgatcaacgtctatataaagaagatataactgggtcaatagcgcatgctaaaatgctcggtaaacaaaaaataataagtaaaaaagaacagaatgcaatagtctctggacttaaagcaattgaaagagatattgaaaaaaacaaggtagtattttcaaaaaaacttgaagacattcatatgaacattgaaagtttattatttaagaaaattggaaaaattgcaggaaagcttcataccgctagatctagaaatgatcaggtagtaactgatttaaaattatggattaaaaaagaatctaaaattttagatagtgaactaaaaaaatttcagaaaactttgattaatattgcaaaaaaaaatactgaaacaattatgccaggttacactcatttacaaattgctcaaccaataacattggctcatcatgttttagcttatgttgaaatgattggtagagatagaacaagacttgaagattgtttatatcgtcttaatgaaaatccattaggtgcagctgcacttgcaggcacttcttttcccattgatagaaagtatacatccaaagagttaggatttagagaaccaacaaaaaatgctatggatactgtctcagatagagat

SEQ ID NO: 288021 - DNA, 813 bp, Unknown
  Bacterial polypeptide expressing nucleotide sequence isolated from the Sargasso Sea
gctgcttgattgttcaaaaaggttaaatattaaccctcttgggtctgctgcattagcgggaacagctttcccaattgacagacaatctacaacaaaagagctaaattttacatctcccacaactaactcaattgatgctgtttcagacagagactttgtaatggaatttctatctatttctgcaataacttctatacatattagcagactttctgaagaaattgttatttggtgttctgatcaatttaattttattaagctctctgataaattttcaactggatcatctattatgcctcaaaaaagaaatccagatgcagctgagctagccagagggaagtctggaagaataataggctctcttatgtctattttagtagttttaaaaggattgccattatcatatagcaaagacttacaagaagataaggaaggtttatttgatagctttgatagtttgtacatttgtattaaagcatgcataggcatgatttctgatgtaaccatcaacaaagaaaaaatgctagaagcatcaaaatatgggtatactactgctacagatttggcagattggcttgtaaaagaattgaaaattccttttagaaagtcacatgaaatttcaggaagacttgttaaacttgcagaaaaaaataattgcctcttacatgagcttccactcgatagttttaaaagcattgagaaaaaaataaataataatgtttttaaagtattgagtgtagagaattctgtgaaatcaaaaatatcatatggcggcacttcaccaaaagaagtcttgaagcaaattaaaaatgc

SEQ ID NO: 288022 - DNA, 757 bp, Unknown
  Bacterial polypeptide expressing nucleotide sequence isolated from the Sargasso Sea
cattatattttagcatatgtagaaatgtttgaaagagacaagcgaagacttaaaaataattttaaaagtcttgaagaaaaccctttgggatctggagcattatcaggtacatcatttaatattgatagaaattttacaactaaaaaattaggttttaaagttccaacaaataactccattgatacagtatcagacagagactttgttttagattttctttatgcttcatcaacatgtgcaatgcatatatcaagactcgctgaagaatttataatttggaattctgatgcttttagaatgatttctttaaacgatagtatggttactggatcttcaattatgcctcaaaaaaaaaatcctgatcctctagaatatctaagaggaaaagtaagtaactcttatggaaatttattttcaatgatgacaatactcaaaggtttaccattatcttattttaaagatcttcaagatgataaaaaaattgttttcgatacatttgataacttgatagactcaattaaagtattaaatgaagtgttaaaaaatttttcaattaacaaaagtgaaatgttaaatcttgcaaaaaaaggacatataacagcaacagatctagctgattacttagttaaaaatctgaattatcctttcagaaaatcgtatcaaattactgcgaagatagttaattactgcgagaaaaataaaaaaaatctttcagatttgtcttttaaagaactaaaaagaattgaaactaatataa

SEQ ID NO: 288023 - DNA, 583 bp, Unknown
  Bacterial polypeptide expressing nucleotide sequence isolated from the Sargasso Sea
atgaaaaataaaacaatttggtctaatagatttaaatacaaaacgtctcaatcttttcaaaagattgggtcttcaattcatattgataaaagactttatgaacaagatatagctgcatctgtagtgcatacgcaaatgctcatgaaacaaaaaataattaaaagtcaagacggtaaaaaaattatcaacgggcttaaaaaaattaaagctcagatagataagggaaattttgagtttaaagagaaatatgaagatatccatttaaatattgaaaaagcattattcgacattattggtccttcagctggatttctacatactgcaagatcaagaaacgatcaggtggtaaccgattttaaattatggattaaaaaagcatcaaacgaaattataaaagacatttcagttgtcatgaaaaatctgattaaaaaagctgaaaaaaatacagatacggtgatgcctggattgacgcatttaaaaaatgcgcaacctatttcattcgctcattatttgttgtcatactatgagatgttaaaaagagataaaaaaagatttgaaaataatcttgaacttttagacgagt

SEQ ID NO: 288024 - DNA, 590 bp, Unknown
  Bacterial polypeptide expressing nucleotide sequence isolated from the Sargasso Sea
catgaaaaaaaaaaataaagctgtttggggtactagattcagtaatgctccttcaaaaatttttgaagaaattggtgcatcgattgatgttgataaaagattatttgcggaagatgttttgggttctgttgtgcatacccaaatgttagttaaacaaaaaataattgacagaaaaaaaggcaataaaataatcagtggattaaaaaaaataagaaacgaaattgaaaaaaataaattcaaatttaataaaaaatatgaagatattcatctaaatattgaaaaaagactttttgcaattatagggaacgatgcaggctatttacacatagcaagatctagaaatgatcaagtaattactgattttaaattatggataaagaaagcatctaaagaaacagtgaaaaggttaaatgatttaattaaaagttttataaaaaaatcagagaataatattcaaacaattatgcctggtttcactcatttaaaaaacgctcaaccaatctcatttgctcactatttattagcttatgttgaaatgtttaaaagagacaaaaaaagattcatcagtaatattgattatattaatgaat

SEQ ID NO: 288025 - DNA, 865 bp, Unknown
  Bacterial polypeptide expressing nucleotide sequence isolated from the Sargasso Sea
cgggcgcagccggtgctggtcgcgcactgggcattagcttacgtcgaaatgtttaagcgcgatgtgagtcggctggacgatgcgctagcacgtatggatgtttgtccattaggatgtggtgccttggccggcacaggtgtcgcggttgatcgggtcgcactagcacagagtttggggtttgccagcgcggcgttaaacagcctggatgcggtgtctgaccgtgactacgtagtagagttgtcggctgcggccagtctctgtatgacacatttatcacgcttatcagaagatgtgatttttttctgctcaggcgaggcaggctttttcaaactgggtgatgcaataagctctggctcgtcgctgatgccgcagaagaagaacccggatgtgtttgagctgctgcgaggcaaaaccggccgtgtgctgggccatctggtagcgattttgcacgtattgaaaggcttacccttagcctacaacaaagacatgcaggaagataaacagggctttttcgatctgatgcagacctggcaacaatcgttgctggtgttggcaactgtactaccgcatttaagcgttaacgtgcagcagtgtcgtcaggctgctgaactcggttatagcaacgcaacagatttggctgactatctggtgagcaagggcatgccatttcgtgatgcgcatgaagtggttggcgagctggtagtgcatgcggcgaaacagcagcaggcgctggaggctttaacactggatgagtttaaacagtttagctcgctgattagcgaagatgtttacccggcgttacaacttgaagcgggtttgcaaaaacgcgctgcgcttgggggtactgcacctcagcaggtgctgg

SEQ ID NO: 288026 - DNA, 810 bp, Unknown
  Bacterial polypeptide expressing nucleotide sequence isolated from the Sargasso Sea
gggttccttagttcatacccaaatgttaattaaacaaaaaataatcagtagaatcaaaggtaaaaaaataatctatggactaaaaaaaattagaaatgaaataaaaaaaaataaatttaaatttaataaaaaatatgaagatattcatttaaatattgaaaaaagactttttacaattattggaaatgatgcaggatatttacatatagcaagatctagaaatgaccaagtaattactgattttaaaatatggattaaaaaagcatcaaaagaaattataaaaaatttaaattttttgactaaaagttttttaaataaatcaaaaaataatattgaaacaattatgcctggttttactcatttaaaaaacgctcagcctatatcttttgcacattatttattagcttatgttgaaatgttcaaaagagataaaaaaagatttattaataatatcgagtatattgatgagtgtccattaggtgttggagccttagcaggcacttcatataaaattgatagaaattttacatctaaaaaattaggttttaaaaaaccaactaataattctatagactcagtatcagatagagattttactttagattttttgtctgcagcttcaatctgtgctgtgcatatttcaagatttgcagaagaattaattatttggaattctgatatatttaaacttatacagcttaacgataaaatgttaaccggctcatccattatgccacaaaaaaaaaacccggatccagctgaacttattagaggtagagctgggaaaaattttggatcactttcagcaat

SEQ ID NO: 288027 - DNA, 898 bp, Unknown
  Bacterial polypeptide expressing nucleotide sequence isolated from the Sargasso Sea
catgcaaagagctcaaccattatctttggcacatcatttattggcttatttagaaatgctccaaagagatcgtgaaaggttaaaagaagtacgggcaagagttaatatttctcctttaggagctgcagcattagctggaacaaaaataaaaattgataggcattttacagctgcagaattgggttttgaaaagatttataaaaacagtattgatgcagtaagtgatagagatttttgtatagagtttgtttctgcatctgctttgttaatgtctcacttaagtaaaatttcagaggaaataattttatgggtaactgatgaattttcttttgcaaaattaacagataaatgtgccacaggaagtagcttaatgccccagaaaaaaaatcctgatgtaccagaattgataagaggtaagacaggaagagtatatggacaccttcaggcattgttaactatggtcaaaggggtaccactttcatacaataaggattttcaagaggataaagagccaatatttgatactgcagaaacaatatcttcttgtactaaggcgatgactattttgataaatgagggcattgaatttaatattaaaaatttatctgattctgtagaaaatgatttttctaatgctactgatttggcagattatttagttgctaaagatgttccttttaggaccgcctatcaagttgttggtgaaatagttaaatattgcttggagagaaaaatgttatttaaaaatctcaaaattgatgaatttaaaaaatttcatcccgaatttgatgaggatgtttttgtagatcttaaacctcttaatgtcgttaaatcaagaaatagcgaaggtggtacaggttttgttcaagtagaaaaagaggtaaatagtggaaaaaaa

SEQ ID NO: 288028 - DNA, 844 bp, Unknown
  Bacterial polypeptide expressing nucleotide sequence isolated from the Sargasso Sea
aaaattattcatggtctaaaaaaaataaaaaaaaatattagttctaataaaattaaattagatccaaggcatgaagatatacatatgaatattgagtctatacttaacaaaaatattggaagtatagctggaatgctgcatactggccgctcacgtaatgatcaagtagttactgattttaaattgtggattaaaaatcacgcaaaaattatagataaagagataaaattattacaaaaagttttaattaaaatttcaaaaaaaaatttatttacagttatgccaggttatacacatttgcaaattgcgcagcctgtctcactggctcatcattttctagcatatgtagagatgtttggccgtgaccaaaaaagaattcataattgtattacattgctagatgaaaatcctctaggatcaggagctatagctggaacacagtttccaattgatagaaaatttactacaaaattattagggtttaaaagtcctacaactaattctattgacagtgtatctgatagagattttgccatagagtttatttttacactaactatgttaggaacacatttgtcacgtcttgcagaagaaattatattatggtcgagtcaacattttaattttatcaatttaccagatcatttatcaaatagtagttcaataatgcctcaaaagaaaaaccctgatggtgcagaaatagtgagatctaatgtttctagtcttataggaaatttaaatagtatacttattattttaaaaggcttgcctttagcttatagtaaagaccttcaagatgataaaaaattaacatttcagtcttacgataatgttttattgagca

SEQ ID NO: 288029 - DNA, 787 bp, Unknown
  Bacterial polypeptide expressing nucleotide sequence isolated from the Sargasso Sea
gctgcatttacatttcaaaaagtaggctcatctttaaatgtagataaaagactttttagagaggatataaccgcatctatcgctcatgttgaaatgttggaaaaacaaaaaattattacagtagctgtaaaaaataaaattatttggggtttaaagaaaattttgaatgaaataataaaaaaaaaattttcttttgatgaaagaaatgaagatattcatatgagcatagaaaaaaggcttttcgagattttaggtgaggatgcaggtttcatacataccgctagatctagaaacgaccaagttcttactgatttaaaaatatggttgagaaaatctacttatgaaattatcgacgacctaaacaaaacaatgaaaatttttttaaaatgtgcagaaaaaaatattcatacaattatgcctggattaactcatttaaaaaatgctcaaccaatatcttttggacattatctagtcgcgtatatagaaatgtttttaagagataaaaaaagatttaagaataatctagaaaatctatatgaaaatcctttaggtgttgctgcattctcaggtacatcatttaatatagatagattttatacaacaaaaaaactcaaatttaataaacctacaggaaactcaattgatacagtatctgatagagattttgtttgtgactttctttattcagtttcattatgctctattcacatatcaagattttcagaagaatttatcatttggaactctgatgcttttaatatgatcagtttaaatgataaaatagtta

SEQ ID NO: 288030 - DNA, 649 bp, Unknown
  Bacterial polypeptide expressing nucleotide sequence isolated from the Sargasso Sea
atgagtaaagtaaaaaaaaataaatctgtttggagttccagaatccttaatgaaaattcaaataactttaagaaatttggaagttctatatatatagacaaaagactattcaaagaagatatttctgcatcaatggtacatattgaaatgttatgtaaacaaaaaataatttcgctaaaagtaaaaaataaaattatttggggccttaagaaaattttaaatgaaatagtcaaaaagaaatttaattttgatattaaacacgaagatattcatatgaatatagaaaatagattgtttgaaattattggtgaggatgcgggatatttacatactgctagatcaagaaatgatcaggttattacagattttaaattatggataagaaaagcaaataaagaaattattaaaaatttagatacaacaataaagattattttaagtagttcagaaaagcatatatatacaattatgccaggttttactcatttaaaaaatgctcaaccgatttccttagcgcattaccttcttgcttatgttgaaatgtttagtagagataaaaaaagatttttaagaaatttatcgagtttgctggagaatcctttaggtgttggtgcattatctggaacctcttataatatagatagaaatt

SEQ ID NO: 288031 - DNA, 832 bp, Unknown
  Bacterial polypeptide expressing nucleotide sequence isolated from the Sargasso Sea
tatggcaaaagtttggagtaaaaggtttgataatgcacttgacccttttattgaaaagtttaatgcctcagttggttttgataaaaagcttattttagaagatttagagtgctcgattgcccacgcgaaaatgcttggcaaaacaaaagttttgtctccttctgaagttttgcaaattattaatggcttaaagttaataaaagttgagtatttggagggtaaattttctcccggcccaccttctgaagatattcactattgcatagaagaaaagctaataagtttaattggtgaaactggaaaaaaattacacacaggtagaagcagaaatgatcaagttggtacagatataagattgtggctaagaaaagagattgacaatattgaaattttattaatcgatttacaaaaatctttcttaaatcttgcgaaatctaatatctataccttgattcctgggtatacccatatgcaaagagctcaaccattatctttggctcatcatttattggcttacatagaaatgctccaaagagatcgtgaaaggtataaagaagtacgctcaagagtgaatatttctccgttaggagctgcagcattagctggaacaaaaataaaaatagataggcactttacagcaactgaattgggttttaaaaagatttataaaaacagcattgatgcagtaagtgatagagatttttgtattgagtttgtctctgcatctgctttgttgatgtcacatttaagtaaaatttcagaggaaataattttatgggtaacagatgaattttcttttgcaaaattaacagataaatgtgccacaggaagt

SEQ ID NO: 288032 - DNA, 721 bp, Unknown
  Bacterial polypeptide expressing nucleotide sequence isolated from the Sargasso Sea
attctcttttaaaattaaaaataaaattatctggggtcttaatagaattcataacgaaataataaaaaaaaaatttaattttgatatttcccatgaggatattcatatgagtatagaaaaaagattatttgatttaattggagacgatgcgggatatattcatacagctagatctagaaatgatcaagtagtaacagattttaaactatggttaataaagtctacaaaagaaataataaaaattttagaaaaattaaataaagttataattcttaatgctgaaaaaaacatagatacaattatgccaggttttactcatttaaaaaatgctcaaccaatctcactagcacattatctaatgtcacatattgaaatgtttaatagagacaaagaaagatttaacaataattttcaaagcttattagaaaaccctttgggtgtagctgctatatctggaacttcatttaacattgacagaaattatacaactaaaaaactaaaatttagtaaaccaactagaaattcagttgacactgtatccgatagagattttgtattagattttttatatgctacctcagtatgttcaatgcatatttctagaatttctgaggaattaattatatggaattctgatgcatttaattttatttctttaaatgacaaaatggtaacaggatcatctatcatgcctcaaaaaagaaatcctgatccgctttga

SEQ ID NO: 288033 - DNA, 685 bp, Unknown
  Bacterial polypeptide expressing nucleotide sequence isolated from the Sargasso Sea
atgagtaaaaataaaaacaataaaccagtttggagctctagaataagtaaagatacctcttatatctttcaaaaagtgggtagttcattaagaatagatagaagactttttaaagaagatttaaggggttcaattgctcatgttgaaatgctttataaacaaaaaattatatcattatctataaaaaataaaattgtttggggactcaatagaatatttaatgaaattaataaaaaaaaattttttttcaatgaaaaaaatgaagacattcatatgagtatagaaaacagattatttgaacttattggtgaagatgcaggatatatacatacggcaagatctagaaatgaccaggtgttaactgactttaaattatggttaagagactcaactaaagaaattataaaagagctaaacttaacaatgcaaattataataaaaaatgcagaaaaaaatattaatactataatgccaggatttacgcatttaaaaaatgctcaacctatttcatttgctcattatattttagcttatatggaaatgtttgaaagggataagaaaagatttcaaaataatttggaaaatttaatggaaaatcctttaggtgttgctgctttatctggaacatcttttaatattgatagaaattacactacaaaaaaattgaaattcaataaacctacaa

SEQ ID NO: 288034 - DNA, 830 bp, Unknown
  Bacterial polypeptide expressing nucleotide sequence isolated from the Sargasso Sea
atttgatagttctcttaacccttttattgaaaagtttaatgcttcaattgattttgataggaaacttgttttagaagatttagattgttcgattgcccacgcaaaaatgcttggcaaaacgaaagttttaactgcgaatgaagctctgcaaattgttaagggtttagagaaaataaaagttgagtatttggagggtgaatttttccccagtcccccttctgaggatattcactattgtatagaagaaaaacttattcgcttaatcggtgaaactggaaaaaaattgcatacaggtagaagtagaaatgatcaagttggaacagacatacgattatggttaagaaaagagattgataatcttgaaattttaataactaatttgcaaaaatcctttttaaatattgcaaaatcgcacatttatactttaattcctggatatactcatatgcaaagagctcaaccattatctttagctcatcatttattggcttatttagaaatgcttcaacgagatcgtgaaaggtttaaagaagtaagagcaagagtaaatatttccccattaggagctgcagctttagcgggtacaaaaataaaaatagataggaattttacagcagcagaattgggatttgaaaagatttataaaaatagtattgatgcagtcagtgatagagatttttgtatagagtttgtttccgcatctgctttgttgatgtctcatctgagtaaaatttctgaggaaataattttatgggtaactgatgaattttcttttgcaaaattaacagataaatgtgcaacaggaagtagcttaatgccacagaaaaaaa

SEQ ID NO: 288035 - DNA, 901 bp, Unknown
  Bacterial polypeptide expressing nucleotide sequence isolated from the Sargasso Sea
agatactattattggcctggcttcactcatctcaaaaatgctcaggcaatttcattcgcacattatttgatggcttatgttgaaatgtttgagagagataaaaaaagatttaataacaatttggatagtttaaatgaaaatcctttaggtgctgctgcacttacaggaacatcttttaatattgatagaaattatacctcaaaaaaattaggctttaaaaaaccaacaaacaactctattgatacagtttctgatagagattttgttttggattttttgtttgctgtttctatctgttctatgcatatttctagaattgcggaagagctcattatatggaattctgatggatttaatttaataaatttgtctgataaggtagttacaggctcatcaataatgcctcaaaaaaaaaatcctgatcttttagaatttataagaggaaaatcaggtatttcctacggaaatctatttgcaatgcttacaattttaaaaggtttgccattgtcgtattttaaagatcttcaagatgataaagaaataatctttaaatcttttgacactttatcagattgtttaaaaatatttgatgaaattcttaaaaacatcagtcctaataaaaagaaaatgctggaacttgcaaactctggttatattactgctacggacttggccgattatcttgttattaattgctcaaccccttttagaaaagcttatcagaaaactgctaaaatagtaaatcttgcagagaaaaaaaagaaaaggcttaatgaattaaccctagaagatctaaaattgattgagccaaaattaacagaagatgtgctaaaagtatttgatttaaaaaattcgataaaatcaaaaacatcatatggcggaacatcttttgtaatataaa

SEQ ID NO: 288036 - DNA, 862 bp, Unknown
  Bacterial polypeptide expressing nucleotide sequence isolated from the Sargasso Sea
aacatagatacagttatgccaggttttacccatttaaaaaatgcacagccaatttcatttgcacattacttgttggcgtatgtagaaatgcttaatagagataaaaaaagattttcaaataatattgaattaattgacgaatgccctttaggatctgctgcattagctggcacttcttataaaatagatagacaatttaccgcaaaaaaacttggtttcaaaaaacccactggaaattctattgatgcagtttgtgacagagattttgcgatagactttttatcagctgcagctacatgtgcaatgcatatgtcgagattagcggaggattttattatatttaattcagaagctttcaattttttaaagttcagtgataaagtgcttacaggttcatcaataatgcctcaaaagaaaaatcctgatccagctgaactaattaggggcaaaactgcgattaattacggaaaattaaattcgatgcttacaataatgaaaggtttaccaatttcttattataaagacttacaagatgataaagctcttgtatttgatagttatgatactttaaaagatacgttacttatggcgaacgagcttattttaaatcttaatacaaataaaataaatatgaaagaaatggctcagaagggatatacaacagcaacagattttgctgattatttggtaaagaaaaaaaattttccttttagagaagcctacgcaaccacatctaaacttgtgaattatgctgagaaaaagaaattaagattagatgagctttcgctgaaagaaattaataaatttttaaaaaaggttaaaattgataatgtcaaaatatttaatgtttttagttcgatga

SEQ ID NO: 288037 - DNA, 847 bp, Unknown
  Bacterial polypeptide expressing nucleotide sequence isolated from the Sargasso Sea
attctcggttccttaattcatgtggaaatgttagcaaaacaaaaaattattacaaaaaagataaaaaataaaattataaatggactaaaaaaaattgaaaaagaaatattaagaaaaaaatttatatttaataaaaaacatgaagatattcacatgaatattgaaaaaagactttttgaattaataggtaatgatgctggatttattcatacggcaagatcaagaaatgaccaagtaattaccgattttaaactctggaccaaatctgcaaataatcaattacaaaaaaatttaagtagattaattaaaacaattttaaaaattgctaataaaaatattgaaaccataatgccaggttttacacacttaaaaaatgcccaacctgtttcacttgcacattatttgcttgcatatgtggaaatgtttgaaagggacaaaaaaagactacttaacaatttagataatttaaacgaaaaccctcttggagttgctgctataagtggaacatcatttaatatagacagattatacacaacaaaaaaacttggttttaaaaaacctacaaataattctatcgatacagttgctgatagagattttgtattagattttttatatactatttctgtatgttcattgcatatttctagaattgctgaagaattaataatttggaactcagatggttttaatttaattacactaaatgataaagttgtaacaggatcttcaataatgcctcaaaaaaaaaatcctgacccattagaatatttaaggggtaaagttggaggaacttttggtaatttattttcaatgcttactattttaaaaggtttacctttgtctt

SEQ ID NO: 288038 - DNA, 829 bp, Unknown
  Bacterial polypeptide expressing nucleotide sequence isolated from the Sargasso Sea
cagcagtgacaccgtcaaaccatggggcggtcgattcactgggccgacggatgcattcgttgaggcttttaccgcatcggtcgagttcgaccagcgcctggcgctgtgtgatattgaaggatcgatggcgcacgttcagatgctcggggaagtgggggtgctggaagccgcggaatgcgcagccatccgcaacgggctcgcggccgtcaaagggcgcatagaaagcggcgaatttgcatggtcaatcgcgctcgaagacgtacatatgaatgtcgaacaggcgctggtggaagaagtgggcgatgtcggcaagaaactgcacaccgcgcgctcgcgcaacgaccaggttgcaaccgacataaggctctacctgcgcacccagatcgatgcgatcagagtcgtcttgtcacgactgatgatggccttggttgacctcgccgaacgcgaagccgacagcctgatgcccggcttcactcacttgcaggcggcgcagccgatcagctttggccatcacatgatggcgtggttcgaaatgctgtggcgcgaccacgagcgccttgccgactgccgcaaacggactaacgtattgccactgggtgccggtgcactggccggcacgacgtttcccatcgatcgcgaacgggtcgcggcactgcttggctttgacggcgtcgccgaaaattcactggatgccgtcagcgatcgcgacttcgccatcgagttctgtgccgccgcagcgatgctgatgatgcatctctcacgcatggccgaagagctcatcctgtggaactcgcaggccttcggtttcgtaacgatggatgacgcgttc

SEQ ID NO: 288039 - DNA, 775 bp, Unknown
  Bacterial polypeptide expressing nucleotide sequence isolated from the Sargasso Sea
aacaaaaataaaaatagataggcactttacagctgaagaattgggttttgaaaagatttataaaaacagtgttgatgcagtaagtgatagagatttttgtatagagtttgtttcttcctctgctttattgatgtctcatttaagtaaaatttcagaagaaataattttatgggtaactgatgaattttcttttgcaaaattaactgataaatgtgccacaggaagtagtttaatgccgcagaaaaaaaatcctgacgttccggaattgataagaggtaagaccggaagagtatatggacatctccaggcattattaacgatggtcaaaggagtaccactttcctacaataaggattttcaagaggataaagagccaatatttgatactgcagaaacaatatcttcttgtattaaagcgatgagtattctaataaatgagggtattgaatttaatattcaaaatctatctgattctgtagaaaatgatttttctaatgctactgatttggcagattacttagttaataaagatgttccttttaggaccgcttatcaagttgttggtgaaatagttaaatattgtctggagagaaaaatgttatttaaaaacctcaaaattgatgaatttaaaaaatttcatcctgaatttgatgaggatgtttttgtggatctgaaaccttttaatgtcgttaagtcaagaaatagtgaaggtggtacgggttttgttcatgtagaaaaagaggtaaataattggcaaaaaaaattgttactttga

SEQ ID NO: 288040 - DNA, 796 bp, Unknown
  Bacterial polypeptide expressing nucleotide sequence isolated from the Sargasso Sea
ttcaatcgctcatgcaaaaatgcttggtaaaactctagttttatcctcttctgaaactttaaagattattaatggtctgcaaaaaataaaagttgagtatttggagggcaatttttctcctggtctcccctctgaagatattcactattgcattgaggaaaaactaataagtttaattggtgaaacaggaaaaaaattacatactggtagaagtagaaatgatcaagtcggtactgacataagattgtggttaagaaaagagattgacaatcttgaaatcttaataaatgatctgcaaaaatctttattgcatcttgcgaaaactaatatttacaccttgattcctggatatacacatttgcaaagagcacaacccttatcattagcgcatcatttattagcttatttggaaatgtttcaaagagaccgcgacaggtttaaagaagtaagatcaagagtcaatatttgtccattaggtgctgcagctttagctggcacaaaaataaagatagacaggaactttacagcttcagaattaggttttgataaaatatataaaaatagtattgatgcagtaagtgatagagatttttgtatagagtttatttctgcatctgctctgctaatgtctcatttaagtaaaatttcagaggaaataatcttatgggtaactgatgaattttcttttgcaaaattaactgataaatgtgcaacgggtagtagcttaatgccgcagaaaaaaaacccagatgttccagaattgataagaggtaaaacaggaagagtttatggacat

SEQ ID NO: 288041 - DNA, 820 bp, Unknown
  Bacterial polypeptide expressing nucleotide sequence isolated from the Sargasso Sea
aagacataattattcgccattaggtagcgccgccttggcaggaactacatttaatataaatagagatgagacatcaaataacttagatttcaaagcaccaatgagtaattcaatagatgctgtatcagatagagattttattttagatgcattaaatttatgttgttctatatcaatacacttatctaggctatcagaagaaataatattatggagctctcctggttttaattttattaatttaccagataccttttcaactggttcttcaataatgcctcaaaagaagaatcccgatgcagcggagctaataagaggtaaaagtggtagagttattggaaattacgtaaacttatttaatgtaatgaaagctttaccattggcatattctaaagatatgcaagaggataaagaacctttattcgatagcataaaaacaacaaaagatactattaatgtaatgtctgaaatgataaaagaaattacatttaatccagataagatgttagagatgtgtaataagggacacattaatgctactgacgtagcagatgccttagtagctgatttgggagtcccttttagagatgctcataggataacaggaaagttggttgctatagcagatagaaaaaaaatacaaatacatgaattaaatattagagactttaaaaaagttgataagagaataaataaaaatattgtaaataaaattactttagaggcatcagtaaaaaatagagatagctatggaggtaccagtccagaaaatattaaaaaagaaataatattttctaaagaaaagtggtgtaatgattag

SEQ ID NO: 288042 - DNA, 700 bp, Unknown
  Bacterial polypeptide expressing nucleotide sequence isolated from the Sargasso Sea
atcgacaccgtagcggatagagatttcgttttatattttctttacagtgtttctgtttgttcactgcatttatcaagaatttctgaggaattaattatctggaattctgatggttttaatctgattaacctctcagataaaatagtaactggttcatcaataatgccacaaaaaaaaaatcctgatcttttagagtacttaagaggtaaatctggaattacttttggtaatttattttcaatgtttactatattaaaaggattacctctttcatacttcaaagatcttcaagatgataaagaaattatttttaaatcatatgatgttctttttcaaagtttaaaaatatttagtgaaattcttaagaatgtaagtcctaataaaaaaagaatgcttgaattagcatactcaggttacattactgcaacagatttagcagattatctagttaaaaataattcaatgtcttttagaaaagcttaccaaaaaacagcttcactagtgaatttagctgaaaagaaaaagaaaaaactaaatgaattatccttggaagacttaaaaaaggttgaaccaacattaacaaaagatgtgctaaaagtgtttgatttaaagaattctgtcaattccaaaaaatcttatggtggaacatcttttgataatatcaaaaagatgataaggaaatatagaaaattaagatgat

SEQ ID NO: 288043 - DNA, 586 bp, Unknown
  Bacterial polypeptide expressing nucleotide sequence isolated from the Sargasso Sea
ggggaatcagtttattgatttggatgatgcatggtgcaccggttcatcgattatgccgcaaaagaaaaatcctgatattcctgaacttatcagaggaaaaacgggacgtgtctatggagatttgatagcactgttaacgctaatgaaagcgcagccacttgcctataatcgggataatcaggaggacaaggaaagtttatttgatgccgtggatactttaaagatgtgtctgactgcttttgctggtttaatccctagtattaccgtgaacaataaatctatgttagatgctgctgaacgggggtatacaacagcaaccgaccttgctgattatttagtacttcaaggcgtgccttttcgagatgcacatgcggttgttggcaaggctgtacaatatgctagtaaaaaaagtaagaccctatcagcactgtcactatctgaacttcagcaattttctgaattaattaaggatgatgtgtttgcagttctaaagcttgaaggttctgtattagcaagaaatcatgttggagggacatcgccaacacaggttaaaacacaaatagcacgcgtaaagaaaaaaatctaa

SEQ ID NO: 288044 - DNA, 559 bp, Unknown
  Bacterial polypeptide expressing nucleotide sequence isolated from the Sargasso Sea
caccggatccagcatcatgccgcagaagaaaaaccctgatgtagcagaactggtgcgcggcaggagcggccgggccgtggggaacctgaccgcactgctggtgctgatgaaggggcagccgctcgcttacaatcgtgacaatcaggaagacaagcagccgctttttgacagtttcgacaatgcccatgcctgtttgggggtgctggctgccatggtgccgaatatgacctttgaccgagaacggatgcgaaatgccgcgagccgcgggcatgcgacagcaacagatcttgcggactatctggtgcgtgagggaatggcttttcgtgatgcgcacgaagtcgtgggaagggcggtacagctcgccgagtcatcaggacgggaactcgatgccttgtcgcttgaagaattgcggggcgtgagtgaccgaatcaacaaagacgtgtttgagatcctgacgctggaagggtcgctgcactcacggaatcacatcggcggaacggctcccggccaggtgcgtctggctgccgagcaggccagacaggttttggcggaacggtga

SEQ ID NO: 288045 - DNA, 934 bp, Unknown
  Bacterial polypeptide expressing nucleotide sequence isolated from the Sargasso Sea
ccaatagataaaagactatttaaagaagatatcgaaggatcaattgcccatgtcgaaatgcttcacaaacagaaaattataaatttcagaataaagaataaaataatctggggattaaaaagaattaaaaatgaaattgtaaaaaaaaagttcaattttaattatgatttagaggatattcatatgaatatagaaaacagattatttgaacttattggtgatgatgctggatatgttcatacagctagatctagaaatgatcaggtaattactgaccttaaattatggttaaaagaggcaacaaaaaaaataataattttattagataatacaaattcaaatattcttaatcttgcacaaaaaaatatcagaacaattatgccaggatttacacatttaaaaaatgcacaaccactatctttggcacattatctactagcatatgttgaaatgtttaagagagataagaaaaaatttaagaataatttagaatttttagatgaaaatcctttaggtgtaggggctttatctggcacctcttttaaaattgacagagattacaccacaaaaaaacttaaatttaaaaaaccaacaaacaattctgtagatactgtatctgatagagattttgttttagactttttgtattcttctctggcttgctctttacacatttctagaattgctgaagaactaataatttggaattctgatgcatttaacatgataactttaaatgataaattagtaaccggttcgtctataatgccacaaaaaaaaaatcctgacccattagaatatttgagaggtaaaactggaatatttataggaaatatcaattctatgatttcaatattaaaaggtttacctttatcatattttaaagatttacaggatgacaaagaaattgtttttaaacaaatgatcaattaaa

SEQ ID NO: 288046 - DNA, 827 bp, Unknown
  Bacterial polypeptide expressing nucleotide sequence isolated from the Sargasso Sea
aatgaaaaaaaatccatcaagaaatgtccacttttctaaagggccaagcgagctattggacaaaataaactcttcaattgatgtagatcaacgtttatttagggaagatattgccggctcaattgctcatgcaaaaatgcttggtatacaaaacattatttctaaaaaagactcaggaaaaatagtttcgggtttgaaatctattgaaaaagatattgaaaataacaaagtgaagttttctaggaaacttgaagatattcatatgaacatagaaagtttattgttaaaaaaaattggtaaggttgcagaaaaattgcatacaggaagatctagaaatgatcaggttgttacagatcttaaactatggattaaaaaaaattcaaatgatttagataatgaattaaaaacttttcaaaaaacaatcataagagtttcaaaaaaaaatattaatactgttatgccaggatacacccatttacaaattgcacaaccaattaccctggcacaccatctattggcttattttgaaatgattggaagagatagattacgactaaaagattgtctatatcgtctaaatgaaaatcctttaggatcagctgcccttgcaggaacttcatttccaataaatagaaaatacactacaaaggagttaggttttagagagcctacaagaaatgcaatggatagtgtgtccgatagagattttgttattgagtttatgtttcttctatcattaactggagttcacttatctcgtctagctgaagaaataattctttggtctaatcaacagtttgattttatattttttactgatgatcttt

SEQ ID NO: 288047 - DNA, 859 bp, Unknown
  Bacterial polypeptide expressing nucleotide sequence isolated from the Sargasso Sea
tgtttctctcgcacatcattgtatggcttatgtagaaatgattggtagagatagagaaaggatttttgattgtataaaaagaatgaatcaaaatcctcttggttctggtgctttagctggaacatcattttctatcgatagaaattttactactaaaaatttaggtttcgataaacctacaaataactctatagatagtgtttcagatagagattttgtaatagaatttattttttcattgtctctattaggtattcatttgtcaagacttgctgaagaaatagtaatgtggtcaaatcaaaattttaattttattaaactacctgatgaactttcaacaggaagttccattatgccacaaaagaaaaatcctgacggagctgaattagtaagatcaaatgttgctacttcaattggaaatttaaatagtattttaattataatgaaaagtcttcctctggcgtatagcaaagatttgcaggacgataaaaaattaactttctctacatttgatataaccttattaagtattaaggtgattaatgaaattatgaaaaaagttaaatttaataaacaaaatatgcaaaatgctattgaaaattctttttctacagccacagatttagcagattggttagtaaaaaacttaaattataattttagaaaagcttacaaaataactggtaatatagtaaattatgcgtataaaaaagataagctactattccaattatcactaaaagaaatgcaaaaatttgaaaaaaaaatcaacaaagatatttttagtgtattgtcagttgagaaaagtatgaaaagtaaaactagctttggtggtacagctccaaatagagttaaaaat

SEQ ID NO: 288048 - DNA, 646 bp, Unknown
  Bacterial polypeptide expressing nucleotide sequence isolated from the Sargasso Sea
atgaaaaaaaacccggcaagaaatgtccacttaaaaaaaggaccgagtaatttacttgaggaaattaattcctcaatagaaacagactacagattatatcgtgaagatattgaaggttctattgctcacgctaaaatgctagctaataaaaaaataatttcaaaaaatgaaggcatttcaatcataaaaggacttaataaaattttaaaaaaaattgaagtaggtaaggtttcttttagaaaagaattagaagatattcatatgaatattgaatcattgttgtttaaagaaataggtaaaactgcaggtaaacttcatactgccagatcaagaaatgatcaagttgttactgattttaaattatggataaaaaacaatagtaaaagtttaaataaaaatatccaacaattacaaaaaagtttaataaacatatctaagaaaaatttaaatacagttctaccaggatatactcatttacaaattgctcaaccaatttcattggctcatcattgccttgcgtatgttgaaatgctcggcagggatagatcgagattaaatgattgtttaaatagattaaatgaaaaccctttaggttccgctgcattagctggcacatcatttccaattgatagaaatttaacatcaa

SEQ ID NO: 288049 - DNA, 879 bp, Unknown
  Bacterial polypeptide expressing nucleotide sequence isolated from the Sargasso Sea
tgattttaaattttggatgaaaaattcgaccaacgaaataaatagcaatattaataaattttttaagaacacaatcaagttagctgaaaaaaatgttgagactataatgcctggttttacacatcttaaaaatgcccaagctatctcttttgcacattatttaatgtcttatgtagaaatgtttaatagagacaaaaagagattttctaataatttaaacagtttaaatgaaaatcctctaggtgttgcagctttatcaggaacatcatttaatatagatagaaattatacaaccaaaaaacttggttttaaaatacctacaaataattctattgatacagtttcggacagagattttgttttagattttttgtatgcttcatctgtgtgcgctatgcatatttctagaattgctgaagagttaattatttggaattctgatggttttaacttgataaatttatctgataaagttgttactggatcatcaataatgccacaaaagaagaatcctgatcttttagagtacttgcgtggtaaatcaggaaacgcttatggaaatttattttcgatgcttacaattttaaaaggtttaccattgtcttattttaaagatttacaagacgacaaggaaattgtttttaaatcgaacgataatctaaataattgtttaaaaatttttgatgaagtactaaaaaattgcaatccaaataagagcagaatgttagaacttgctaattctggatacattacagcaactgatttggctgactatcttgtaaaaaatcactcaatgtcttttagaaaagcatatcaaaaaactgctgcagtagttaattttgcagaaaaaagaaaaaagaagttaaatgaattaacttt

SEQ ID NO: 288050 - DNA, 755 bp, Unknown
  Bacterial polypeptide expressing nucleotide sequence isolated from the Sargasso Sea
aaaaaaagctaataaagaaattgttaagaatatagatgtaacaatcaaaaatattttaaaaaaagcagaaaaaaatgttgaaacaatcatgcctggtttcacacatcttaaaaatgcacaaccagtttcatttgctcattacctaatggcgtacttagaaatgtttaatagagataaaaatagatttaaaaataatttagagagtcttaatgaaaatccacttggtgtagctgcattaacaggtacttcttttaaaattgatagattttacacttcaaaaaaactagggttcaatagaccaacgaaaaactcaattgatacggtttctgatagagattttgtaattgattttctttattcttgttccgcttgtgctgttcatatctctagaattgctgaggaatttataatctggaattcagatgcttttaaacttataaatttaaatgataagattgtgactggatcatcgattatgcctcagaaaaaaaatccagatccattagaatacttaagaggcaaaacaggtttaatgtttgggaatcttttttctatgcttacaacattaaagggtttgccattatcatactttaaggatttacaagatgataaagaaattgtttttaaatcatttgatcaattaaaaaattccttaataatattaaatgatgttcttaaaaatttttcaccagataaaaaaagaatgattgaacttgctgaaaatggctttattacagcaaccgatttggcagatt

SEQ ID NO: 288051 - DNA, 721 bp, Unknown
  Bacterial polypeptide expressing nucleotide sequence isolated from the Sargasso Sea
aatcctacagtaaattcaattgacagtgtatcagatagagattttgccgtagaatttatttttgtattatcaatgatagcaattcacttatcacgtcttgctgaagaaattatattatggtcaagtcagcattttaattttgtaaaattaccggatcaattatctactggaagctctataatgcctcaaaagaaaaatcctgatggagctgaaatagtgagatctaatgtttcaagtataataggtaacttaagtagtattatgataattttaaaaggattaccactagcttatagcaaagatcttcaagatgataaaaaaataacatttaaatcatttgatgatgttttattaagcactaaagttatgactgaaattttaaataatgtacaatttaacaaaaaagtaatgcataattctatatacaattcatattctactgcaacagatcttgctgattggttagtaaaaaatttagattttactttcagagatgcatataatttaactggcaaaatagttaattatgcttcaaaaagagataaattattggataaaatttctttaaaagagtttcaaaaatttgaaaaaaatatcacaaaacaggtttttaaagttttatcaccgttaaacagcatgaaaagtaaatcaagttttggaggtacttctccagaaactgtgaaaaaatccatacaatatgctataaaaaaatatttatgaa

SEQ ID NO: 288052 - DNA, 793 bp, Unknown
  Bacterial polypeptide expressing nucleotide sequence isolated from the Sargasso Sea
tttgaaaaatgcccaacccatttcttttgcgcactatgtgttagcttatgtggaaatgtttggcagagataaacggagattaaaaaacaattttactaacctaagacaaaatcctttgggatcaggcgcattatctggaacatcatttaatatagatagaaattttacaactaaaaaacttggttttaaagttccaacaagtaattcaatcgatactgtgtctgatagagactttgttttagactttctttttgcttcatcggtatgtgcaatgcatatatctagacttgctgaagaatttataatttggaattcggatgcttttaggctcattactttaaaagacaatattgttactggatcttcaattatgcctcaaaaaaagaatccagatcctcttgaatatttaaggggaaaagttagtaatgcttatggtaatttgttttcaatgatgacaatactcaagggattacctctatcttatttcaaggatctacaagatgataaaaaaattgtttttgatgcctttgataatttaactaactcaataaaagtattaaatgaagtattaattaatttttcagtaaataaaaatgaaatgttaaatcttgcaaaaataggatatataacagcaacagatctagctgattactttgtaaaaaatctaaattatccttttagaaaagcatatcaaatcacagcaaaaatagttaattactgtgaaaaaaataaaaaaaatctttcagatttatcttataaagaactaaaaagaatcgaacctggtataaaagag

SEQ ID NO: 288053 - DNA, 904 bp, Unknown
  Bacterial polypeptide expressing nucleotide sequence isolated from the Sargasso Sea
aacaactcaaaaattttagatgatgcagtaaagtcattacagaaaaaattaattattatagcaaaaaaacatactctaactataatgcctggttatacacatttacaaatagctcaaccagtatctctatctcttcatttgatggcctatgttgaaatgttcaatagagatagaagtcgtttgaaggattgtttatatcgcttaaatgagaatcctttaggagcagcggctttatctggcacatccttcccaatagatagagattttacatcaaaattacttaacttcagaaatccaacacgtaatgcgatggacagtgtttctgatagagattttgcaattgaatttatttttgttttatctttaatagctgtacacctatcaagaatttcagaggaaataattttgtggtcaaatcagcaatttaattttatttctcttccagacgaattggctactggaagttcaattatgcctcagaaaagaaatccagacgcagcagaaattgttaggggtcaaactagcttaattattagtaatttaaatgcattgttgacaattttaaaaggattaccattaacttacagtaaagaccttcaagatgataaaaaattagtatttaattcttttgattctgtattgatggctattaatattattactgaaatactatcaaaaacaaaatttaatataataaatatgaaaaaggcagtcgataattcacaatctactgcgacagattttgctaattggttagtgcaagaacttaattatacatttagggatgcttataatttaaccggaaaaatagtattatatgcatcaaaaaaaaatattaatctagaatctttatctcttaatgatctaaaaaaattgacaaaaacatatcaaaatcagcaacaaa

SEQ ID NO: 288054 - DNA, 877 bp, Unknown
  Bacterial polypeptide expressing nucleotide sequence isolated from the Sargasso Sea
atagctcatgtggaaatgttatctaagcaaaaaattattccatttaaagttaaaaataaaattgtttggggtttaaataaaataagaaatgaaataataaaaaaaaaatttatttttaaactagaatatgaagatattcatatgaatattgaaaaaagattaattgaaataataggagatgatgctggatttgttcatactgcaagatcaagaaatgaccaggttctaactgattttaaaatgtggttaaaaacttcaacaaatgaaataattaatcttttaaattcatctataaaaatattaataacaaacgcagaaaaaaatgttgaaacaataatgccaggttttacacacctaaaaaatgcccaagcaatctcatttgcacattatttacttgcttatgttgaaatgtttaaaagagataaaaatagatttaataacaatttggatagtttgttagaaaaccctttaggagtaggtgcaatagctggtacttcatttaatatagatagaaactatacttcgaaaaaattaaaatttagtaacccaacaaataattctattgatactgtttcagacagagattttgtaattgattttttatatgcagtatctgtttgctcagttcatatatcaagactagcagaagaatttattatatggaattcagatgcttttagaataattaaacttaatgataaaatggtaactggttcttcgatgatgcctcaaaaaaaaaatcctgatcctctagaatatcttagaggaaaaactggcaacgcatttggcaacctattttcaatgttaacaattttaaaaggacttccattatcttattttaaagatatgcaagatgataaagagttagtctttaaat

SEQ ID NO: 288055 - DNA, 811 bp, Unknown
  Bacterial polypeptide expressing nucleotide sequence isolated from the Sargasso Sea
catgaccaaaaataaaaacaatgaagcaatttggagtaatagaattaaaaaaaaaccttctaagctttttcaagaaattggaggttctatagatgtagataaaagactattcaaagaagacattcttgcttcttctgtacatgtggaaatgttagcaaaacaaaaaatcatttcatcaaaaattaaaaaaaaaattctaaatggtcttaaaaaaattaataaagaaatacagaataaaaaatttatttttagtaaaaaacatgaagatattcatatgaatattgaaaagagactttttcaattaataggggatgatgcgggatttatacatactgccagatcaagaaacgatcaagttatcactgatttcaaactttggattaaaaaagcaaataaaaatctagatcaaaatttaaatgaattaattaaaacaattttaaaaatagctaacaaaaatataaaaacagttatgcctggctttacacatttaaaaaatgcacaaccggtttcacttgcccactatttactagcctacgtcgaaatgttcaaaagagataaagaaagacttttttataatttagataacttaaacgaaaatccacttggggttgctgcgctcagcggaacatcatttaatatagatagattttatactacaaaaaaacttggttttaaaaaacctaccaataattctatagatactgtggcagatagagattttgttttagactttttatatactatttccgtttgctcattacacatttcaagagtagcagaagagttaataattggaactcagatggtttta

SEQ ID NO: 288056 - DNA, 811 bp, Unknown
  Bacterial polypeptide expressing nucleotide sequence isolated from the Sargasso Sea
atggcaaaagtttggagtaaaaggtttgataatgcacttgacccttttattgaaaagtttaatgcctcaattggttttgatagaaaacttattttagaagatttagattgctcgattgcccatgcgaaaatgcttggcaaaactaaagttttatcctcttctgaagctttgcaaataattaatggcctagaatcaataagagttgagtacttagaaggtaaattttctcctagtccaccctctgaagatattcactattgtatagaagaaaaactgataagtttaattggtgaaactggaaaaaaattacatacaggtagaagcagaaatgatcaagttggtacagatataagattgtggttacgaaaagagattgacaatattgaagttttaataaccgatttgcaaaaatctttcctaagccttgcgaaatcaaatatttataccttaattcctggatatactcatatgcaaagagctcaaccattatctttggctcatcatttattggcttacatagaaatgctccaaagagaccgtgaaaggttaaaagaagtacgaacaagagttaatatttctcctttaggagctgcagcattagctggaacaaaaataaaaatagataggtactttacagcttcagagttgggttttgaagagatttataaaaacagtattgatgctgttagtgatagagatttttgtatagaatttgtttctgcatctgctttgttaatgtcgcatttaagtaaaatttcagaggaaataattttatgggtaactgatgaattttctttgcaaaataacagat

SEQ ID NO: 288057 - DNA, 842 bp, Unknown
  Bacterial polypeptide expressing nucleotide sequence isolated from the Sargasso Sea
aatgtttaaaagagataaacaaagatttaaaaataatttagaaaatctaaatgaaaacccacttggtgtagcagctttatcaggaacttcatttaatatagacagattttttacatcaaaaaaattaggcttcaaaaaacctaccaataattcaattgataccgttgcagatagagattttgttttagattttttatatactgtatcggtatgttcactgcatatttctcgtttagctgaagaatttataatatggaactcagatggatttggactaataaatttaaacgataaaataataactggctcttctattatgcctcaaaaaaaaaaccctgatcctttagaatatttaagaggtaaaacaggttttacatttggaaatttattttctatgttaacaatattaaaaggattgcctttatcatattttaaagatctacaagatgataaggaaatagtttttaaatctaatgagataataattaattgtattaatatacttaatgaaattctaaaaaattttagtccaaacaaacaaaaaatgttagagcttgctagcataggatatatcactgcaacagatttggcagattatttagtgcagaataacaatataccttttagaaaagcatacaaaataactgcatcgattgtaaattatgccgaaaaaaataaaaaaaaattaagtgatttaaatataaatgaattaaagaaaatagaacctaaactttcaaaggatgttttaaagattttcaacctaaaatattcaattaattcaaaaaaatcttatgctggaaccgcttttgataatattaaaaagatgataactaaacataaaa

SEQ ID NO: 288058 - DNA, 451 bp, Unknown
  Bacterial polypeptide expressing nucleotide sequence isolated from the Sargasso Sea
aatgaaaaaaaatccgtctcgcaatgtccattttacaaaagggtcaagtaatcttttagatacaataaatgcatctattgatgtagatcagcgtctctacaaagaagatatcttaggctctattgcgcatgcaaaaatgctaggaaaacaaaaaataatatcaaaaaaagatgaaacaaatttaatctctggcctaaaatctgttcaaaaagatattgaaaaaaataaagtatttttttcaaaaaaacttgaagatattcatatgaatatagaaaatttattattaaaaaaaattggtaaagttgctggtaaattacataccgctagatcaagaaatgatcaagttgttacagatttgaagttatggattaaaagtaattcattattacttgattatgaattaaaaaattttcaaaaaacattaattaatgttgcaaaaaaaaatactgca

SEQ ID NO: 288059 - DNA, 808 bp, Unknown
  Bacterial polypeptide expressing nucleotide sequence isolated from the Sargasso Sea
taaggaagatatagccgtgtctatcgctcatactgaattgctttttaaacaaaaaatcatttcttttaaaatcaagaataaaattatttatggcctcaataaaatagaaaaagagatattaaataaaaaatttgaatttaataaaaaatatgaagatattcatatgaatattgagaaaaggttatttcaaataattggtgaagaggcaggatatgttcatacagcgagatcaagaaatgaccaagtaattacagaccttaaaatttggattaaatctgcaactaatgaaatcgatattacattaaataaaattattaaaagcacattaaaattagctgaaaaaaatgtagaaaccataatgccaggatttacacatttaaaaaatgcccagccaatttctttttctcattatttacttgcttacgttgaaatatttaatagagataaaaaaagattcaaaaataatttagacgatttaaatgaaaacccattaggtgtagcagcgttaagtggaactacattcaatattgatagagactatacaacaaaaaaacttggttttaaaagacctacaaataactctatagatacagtttcagatagagattttgtattagattttttatacaccgttgctgtttgttccatgcatatttctagaattgcagaggagctaattatttggaattcagatggttatggcatgataaatttatctgataaagtggtaactggttcctcaataatgcctcagaaaaaaaatccagatgtgttagaatatttaagaggaaaatctggaactgtatac

SEQ ID NO: 288060 - DNA, 865 bp, Unknown
  Bacterial polypeptide expressing nucleotide sequence isolated from the Sargasso Sea
catgagatggttggaaagagactactcaagattggttgacgcaaaaaatagaatgagcgtaatgcctttgggttctgccgccttggctggatcaaggtataaaattaatagaagctttttagcgaaaaaacttggctttcaaagtttatctagaaactctattgacgccgtaagtgatagagactttgtaatagaaacagcctccacactttctatacttggtgttcacttatcaagaatttgcgaagaaattgttttatggtcttcttcgcaatttgaatatgtttacttatctgatgaggtttgtactgggtcttcaattatgcctcaaaaaaagaatcctgatgttgcagaactaataagaggtggctcttcaaagactatagccaatctaatgggcttattgtctttaatgaagaatctacctctctcttacaacagagacttacaagaagacaaagactttatttttagaagtatagattattctaatgatagcctagttttacttggccttttgattaaaggcatgaaagcaaatacaaaaaaaatggaagccgattgtaagcttggacaaattactgctacagatttagcggactaccttgtggacaagtctatgcctttcagaaaagctcatgaaactgtagggaagatagtggcacacgctgaatctaagggagtgcaaatatttgaattagaaatttcagaattaaggaagttttctaaattaatctccgaagatgtaaattcttatttagatcccgtgaaatcaattaattctagaaaacttgttggaggaacggccccctctcaggtaagaaaagaaatcaattatgcaaaaaaagttttagcgaaaaggtag

SEQ ID NO: 288061 - DNA, 542 bp, Unknown
  Bacterial polypeptide expressing nucleotide sequence isolated from the Sargasso Sea
catgccccagaagcgcacccccgacgcggccgagctggtccggggcaagtcgggacgggtggtgggcgacctgaacgcgctgctcacgatggtgaagggcctgccgctggcctacaaccgcgacctgcaggaagaccgcgaggccctgttcgacgcactcgagaccacgaccgcctgtgcgcggatcacggcggggatgtggcggacgctcgaggtgaagcgggagcgctacgaagccgcgctgaccggggatttcctgctggcgaccgagctcgcggactatcttgcgacgaagggcgtaccgtttcgggatgcgcaccacgtgtcgggtcggctggtggcctggtgcgaggacaacgacacggacttctcgtcgctcactctcgaggtgctccagcagcaccatgccgcgttcgatgcggatgcgctgggctggttggagccgagggccgcggcagagcgtcgggacagcctcggcgggacggcatcgagcgagatcgcccgtcagatcgatgcgttgcgcgtgtggctcgcggagtagc

SEQ ID NO: 288062 - DNA, 917 bp, Unknown
  Bacterial polypeptide expressing nucleotide sequence isolated from the Sargasso Sea
actggtcgataagagactttatagggaggatatttttgcatctgttattcacactaaaatgttgattaaacaaaaaattattcccaaaaaggatgggataagaatagtaaatggacttaaaaaaattaaaaaagaaatagataaaaataaatttaaatttagagaacagtatgaagatattcaccaaaatatcgaaaaaagattatttgaaataattggaaaacctgctggatacttacatactgcaagatcaagaaatgaccaggtagtaactgattttaaaatgtgggtaaaaagtgcatctttaaatataaatttaattttaaattcattaattaaatctattttaataaaagctgaaaaaaatatagataccgtaatgccaggattgacacatttaaaaaatgctcaacctatttcttttgctcattatctgcttgcatatgtagaaatgcttaccagagataaaagaaggtttttaaataacattgaattgatagatgagtgccccttgggctcagctgctatggcaggaacttcatataatattgatagaaattttacagcaaaaaaactaggttttaaaaagccaacaagaaactcaattgactctgtatgtgatagagattttgcaatagattttttatattcagcagctacttgtgctatgcatatgtcaagattagctgaagactttataatctttaattcagaagcttttaattttttaaaatttagcgataaagttttaacaggctcatcaataatgcctcaaaaaaaaaatcctgatccagctgaattaataagaggtaaaacagcaattaattatggaactttaaattctatgttaacgattatgaagggtttacaaatttcatattacaaagatcttcaagatgataaggctcttgtttttg

SEQ ID NO: 288063 - DNA, 583 bp, Unknown
  Bacterial polypeptide expressing nucleotide sequence isolated from the Sargasso Sea
aataagcaaagatacttcttatatctttcaaaaagtgggaagttcattaagaatagatagaagactttttaaagaagatttaagaggttcaattactcatgttgaaatgctttataaacaaaaaattatatcattatctataaaaaataaaattgtttgggggctaaataaaatatttaacgaaattagtagaaaaaaatttttttttaatgaaaaaaatgaagacattcatatgagcatagaaaacagattatttgaaataattggcgaagatgcaggatatatacatactgcaagatctagaaatgatcaggtgttaactgattttaaattatggcttagagactcaaccaaagaaattataaaagagctaaatttaacaatgcaaattatagttaaaaacgcagaaaaaaatattaatactataatgcctggatttactcatttaaaaaatgcgcaacctatttcatttgctcattatattttagcctacatggaaatgtttggaagagataaaaaaagatttaaaaataatttagaaaatctaatggaaaatcctttaggtgttgctgctttatctgga

SEQ ID NO: 288064 - DNA, 898 bp, Unknown
  Bacterial polypeptide expressing nucleotide sequence isolated from the Sargasso Sea
aatgaaaaagaagttaaaaaataaaaatttgtggggtggaaggtttttagaaaacccttctaaagagatgactagaattaatgcatctattaattttgataaaaagctttacagacaagatattttagcctcaaaagcacatgctgaaatgttatgtaatcaaaaaattattaatgaagatgaaaaaaataaattattaaaaggattagataaaatagggaaagaaatatcaaaatctaagataaagtttgaagaagaattagaagatattcatactcacatagaacatagattaataaaattattaggtgatttaggaaaaaaactgcacactgcaaggtctagaaatgaccaggtagcaaccgacttaaaaatttggataagagaagaacattacctaattgatgctttgttaaaaaacttacagtcttcattactagaaaaggctgaaaaacatatttttgatattatgccaggctttacacacctgcaagctgcacaaccaataacattagcacatcatatgcttgcttatgtaaatatgtttgggcgtgacagagaaaacctaattagcttaatagaaagacataattattcaccattaggaagtgccgcattggcaggcactacttttaatataaatagagatgaaactgcaagtaaattaggttttaatagtccaatgtcaaactctttagacgcagtttcagatagagactttgttttggatgcattaaacttatgttgttctatttttatacatttatctagattagcagaggaaataattttatggagttcgcctggttatgggtttgtagagcttcctgatacattctcaacaggatcatcaataatgccacagaaaaaaaacccagatgcagccgagttgattaga

SEQ ID NO: 288065 - DNA, 667 bp, Unknown
  Bacterial polypeptide expressing nucleotide sequence isolated from the Sargasso Sea
agattttttatataattgttcagtctgctcaatgcatatatctagaattgcagaagaattaataatttggaattcggatggttttaatcttataagattatctgataaagtcgttacaggctcgtctataatgccacaaaaaaaaaatccagacttactagaatacttaagaggaaaaacaggcttagtatatggtaatttattttcaatgctaacaattttaaaaggattaccattgtcatatttcaaagatttacaagatgataaagaaattgtttttaaggcaaatgatacacttataaattgtttaaaaattttgaacgaaactttgataaatataattccaaataaaaaaaatatgctagaacttgcaaatttagggtatttgacagctactgacttggcagactatttagttaaaaatcattctaaatcctttagagaagcttatcaaataacagctaagttggttaattttgcagaaaaaaataaaaaaaaacttgaagatttatcaattcaagatttaaaaacaatcgaaccaaaattaacaaatgatgtattaaaagtttttgaccttaaaaattctataaattcaaaaaaatcttatggaggaacagctttttataatatcaaaaaaatgatattgaaatacaaaaaaacattatga

SEQ ID NO: 288066 - DNA, 888 bp, Unknown
  Bacterial polypeptide expressing nucleotide sequence isolated from the Sargasso Sea
agattgacaatattgaaattttaataactgaattgcaaaaatctttcttgaatcttgcaaaatctaatatttataccttaattcctggatatacccacatgcaaagagcgcaaccattatctttggctcatcatttattggcttacatagaaatgctccaaagagaccgtgaaaggtataaagaagtacgctcaagagttaatatttctcctttgggagctgcagcattagctggaacaaaaataaaaatagatagacattttacagctgcagaattgggttttaaaaagatatataaaaacagtattgatgcagtgagtgatagagatttttgtatagagtttgtttctgcatctgctatattgatgtctcatttaagtaaaatttcagaggaaataattttatgggtaactgatgaattttcttttgcaaaattaacagataaatgtgccacaggaagtagcttaatgccgcagaaaaaaaatcctgacgttccagaattgataagaggcaagacaggaagagtgtatggtcatcttcaggcattgttaacgatggttaaaggggtaccgctttcatataataaagattttcaagaggacaaagagccaatatttgatactgcagaaacaatatcttcttgtattaaagcaatgactattttaattaatgagggcattgaatttgatattgaaaatctatctgattctgtagaaaacgacttttctaatgctactgatttggcagattacttagttgataaagacgtccctttcaggaccgcttatcaagttgttggtcaaatggttaaatattgcttggagagaaaaatgttatttaaaaatcttaaaattgaagaatttaaaaaatttcatcccgaaatttgat

SEQ ID NO: 288067 - DNA, 767 bp, Unknown
  Bacterial polypeptide expressing nucleotide sequence isolated from the Sargasso Sea
aacatcttttaatatagatcgtaacttcacaacaaaaaagttaggttttaaaaaaccaactgataattcgatagatactgtttcggatagagattttgtattagattttctttatgcatcatctgtatgtgcaatgcatatatctagatttgctgaggaatttataatatggaactctgatgcttttaaacttattactttaaatgacagtatagttactggttcatctataatgccacaaaaaaaaaatccagatactcttgaacacttaagggggaaagtgggcaactcttatggaaatttattctcaatgttgactattttgaaaggactacctctttcatattttaaagatttacaagaagataaaaaaattgtttttgaaacttttgataatttatcaaactcaataaaaatatttaatgatgttttaaaaaattttaccgtaaataaaaaggaaatgttagaacttgcggacaaagggtatataacagctactgatttagctgattattttgttagagaattaaattactcttttcgaaaatcatatcaattgactgcaaaaattgtaaattactgcgaaaaaaataaaaaatttttttctgatttatcaattcaggaactaaaaaaaatagaaccaaacataaaagataatgtaattaaggtttttgatataagaaattcagtaaattcaaaaaaatcttatggtggaacatcttttgaaaacataaagaaaatgataagaaaatataaaaatgcttaaa

SEQ ID NO: 288068 - DNA, 916 bp, Unknown
  Bacterial polypeptide expressing nucleotide sequence isolated from the Sargasso Sea
agccgaccttcttacgaaaataaactcttcaatagatatcgataaaagattagcttttgaagatattttaggttcaaaagctcatgttgagatgttagctaaagtgcagattataaataaaaagacaaaaacaaagatattaaatgggttaaaaaaaatagagaaagagttaaatgatggtgatttcagttttgataacttgttagaggatattcatatgaatatagaatctaggttaggagaaattattggcgccgatgcaggccgcatacacacggcaaggtctagaaatgatcaagtcgtgactgaccttagactgtggattagaaaagccattgaagacatagagcttgaactatctaaacttcagagcgttcttctaaaaaaggcggagaaaaacatggaaataatttttcctggatacactcatctacaagttgcccaacctgtaagatttagccatcacttgcttgcctatttagagatgtttggaagggatttagaaagatttaagcaaactaaagaaagattgaatgaatgtcctttgggagctgccgctttggctggaacttcttttccaattgataggttttacacagcaaaagcccttgggtttaaagctccaatgagaaatagcatggatgcagtttccgatagggacttcgttctagagtttatatctgactcttctattgcaatggtgcactttagtagattagcagaagagtttatattatgggggtctacagagtttgactttatatcgctacctgactcgttggtcactggttcttcgataatgccacaaaagaaaaatcctgatgctgcagagcttattagagctaaaacaggtagagttaacggagcgctgctatccctcctaacggtaatgaagggcttacctttggcctatgct

SEQ ID NO: 288069 - DNA, 364 bp, Unknown
  Bacterial polypeptide expressing nucleotide sequence isolated from the Sargasso Sea
aatgtctagaaaaaaaacaaataaaattagaaaaagattttcaaagtcctctagtttaaatttccagaaaattaattcatcaattgaatttgataaatttttatatcaagaagatattgaaggatctatagctcatgcatcaatgcttgcatctcaaaagatcataacgatgcaagaaggtaaaaaaattacaaatggactgaaaaaaatattaaaagaaataaaaacaaataagttaaaatttgatgcaaacttagaagatattcatatgaatattgaaagtaggcttgaagaacttataggtgatactgctggaaaattacacactgccagatctcgaaatgatcaagtggtaacagaccta

SEQ ID NO: 288070 - DNA, 674 bp, Unknown
  Bacterial polypeptide expressing nucleotide sequence isolated from the Sargasso Sea
tgtactagattttctttatgctatttcagtatgttcaatgcatatttctagaattgcagaggaattaattatatggaattcagatggatttaacttaatcaacttgtcagataaagttgttacaggctcttcgattatgcctcaaaaaaagaatcctgatctcctagaatatctaagaggaaaaactggtgcatcttatggaaattttttttctatgctaactatactaaaaggtttgccactatcctactttaaagatttgcaagacgataaggaattagtttttaactctaatgatactctaataaattgcttaaaaatatttaatgaagttttaaaaaattgcagtgcgaataaaaaaaaaatgcttgaacttgcaaatacaggtcatattacggcaacagatttagctgattatttagttagaaaacacaccatgtcatttagaaaggcatatcaaaaaacagctgctattgtaaacatggctgaaaaaagaaagaaaaatttaaacgaattaactttaaatgaacttaaaaaaattgaaccaaaattgacagaagaggttttagaaattttcaatttaaaaaactctgtaaattcaaaaaaatcatttgggggaacttcttttgaaaatattaaaaaaatgataactaaatataagaaactaaaatgat

SEQ ID NO: 288071 - DNA, 532 bp, Unknown
  Bacterial polypeptide expressing nucleotide sequence isolated from the Sargasso Sea
ttgctggaaaaaataaattcctcaattgaaattgactcacgtctttataaagaagatattgaaggctctgtagctcatgctaaaatgcttataaaaacgaaaattattaaatcaaaggaaggtaaacaaattatttctgcattatttagtattttaaaagatattgaaaaaaataaagttaaatttagttccagttatgaagatattcacatgaatatagaatttttattacaaaaaaaaattggttcattagcgggtaaattacatacagctagatcacgaaatgatcaagttgttacagatttaaaactttggataaaaaaacatattcatacaattgataatgagtgtaaaaaatttcaaaaaattctgataaatgttgctaaaaaaaatataaacactgttatgcccggttatacacatttgcaaatcgcacaacctgtatctcttgcgcatcattgtcttgcatatgtagagatgataggtagggatcgaagcagactaaatgattgcaaacatcgattaaatgaaa

SEQ ID NO: 288072 - DNA, 739 bp, Unknown
  Bacterial polypeptide expressing nucleotide sequence isolated from the Sargasso Sea
atgaataataaaaataaagctgtttggggtactagatttaataaagccacatcaaaaatttttgaaaagataggggcttcaattgatattgataaaagattatttgaagaagatattttagcctctaccgtgcatgcacaaatgttaattaagcaaaaaataattgataaaaaaaaaggtaaaaaaataatcaatggtttaaaaaaaattagagaagaaattagaaaaaatagatttaaatttgacaaaaaatatgaagatattcatttaaatattgaaaaaagacttttttcaattataggaaacgatgcaggttacttgcacatagcaagatctagaaatgatcaagtaattacagattttaaattatggattaaaaaatcttctaaagaaattataaaaaatttagataatttgattagaagttttttacaaaaatccgagagaaatatccaaacaataatgcctggatttacacatttaaaaaacgcacaaccaatttcatttgctcactatttattagcgtatgttgagatgtttaaaagggatagaaaaagatttataaataatattgattacatcgatgaatgccctctaggcgtaggcgcgctagctggaacttcttataaaatagatagaaattttacatctagaaaattagggtttaaaaaaccaacaaataattcaattgattccgtatctgatagagattttgctttagattttttatcttcggctt

SEQ ID NO: 288073 - DNA, 592 bp, Unknown
  Bacterial polypeptide expressing nucleotide sequence isolated from the Sargasso Sea
atgaaaaaactttggggtggtagatttaaacaatcgactgattcactgatggaaaccttttcggcttctatttcttttgataagcgtttatatgactgtgatattgaaggtagtatcgcacattgcaaaatgctggctcgttgtaaaatcataaccacagcggaatcaaataaaataatcaagggtcttaaacgaattttacgcgaatgcgatgaaggtcgtttcaagtttagcgatagtctggaagatatccatatgaatattgaaaaccgccttcgagaaatcataggtcctgttgccggcaaattgcacacggcaagaagtcgaaacgatcagatttgtctcgatatacgactttatctccggaaagaaatcgatgatattgtcggtgcaatcaaccgccttaccaagactttgatcacgattgcaaaaaaaaatatcaatcatctcatccctggttacacccatttgcaacgagcgcagccggttttactgtcacaccatttacttgcttatgtagagatgatgcttcgcgataaagaacgttttctcgatgcctataaacgaatcaatgtaatgccgttgggttcgg

SEQ ID NO: 288074 - DNA, 854 bp, Unknown
  Bacterial polypeptide expressing nucleotide sequence isolated from the Sargasso Sea
aagagattttgagagaattatagaaacccgttcgagaacagacgtatctcctttaggagctggagcattagctggttcctctttgcctatagatccattaatgacttcagaatcacttggtttctcggaaactttcaaaaactcacttgatgctgtttctgacagagattttgtggctgaagcaatttttgttaatgcattattaggtgttcatctttcaagaatcggagaggaacttgtactttggtccagcgaagagtttggattcgtagacatagatgacgaatacactacgggatcttccatgcttccccagaaaaagaacccagatgttgcagagctagcaagagctaaaaccggcagaatcattggcaatttagcaggatttttgacagtgttgaaagggctccctttgacatacaacaaagacctgcaagaagataaagaacctttatttgattcttttgacactaacagtttggttctaacagcattaacgggaatgttgaactctattactttcaacgaagaaaaaatgtctgcagcagctgacaagcctttctcgatggcaatagatcttgctgaatacttagttcataaaggaatgcccttcagagaggcacacgcactgattggtggactggttaaaacctcgatagatgataaaaaagatttcgaaaaactcgtattagaaaatgataatttcggacccgagatagaagatttttttaaaccagagatggccattaggagacgcattacgccgggaagtacaggtttggaagctgtagaggttcaaaaagagctaatagaaaaacgtttagaaactcaaacttctatgatctcaagatgac

SEQ ID NO: 288075 - DNA, 634 bp, Unknown
  Bacterial polypeptide expressing nucleotide sequence isolated from the Sargasso Sea
catggtaagaaataaaaacaaccaaacaatatggaatacgagaataaaaaaaaaaatttctacgtattttaaaaaagttggtagttcaataaatattgataaaagattatacaaagaggatatcagaggttctgtcgctcatacagaaatgctttttaggcaaaaaattatatccttcaaaatcaaaaataaaattctttatggtctgcaaaaaatagaaaaagaaattctaaataataaatttgatttcaaaaaggagtttgaggatattcatatgaatattgaaaaaagactttttcaaattattggtgaagaagctgggtatattcatactgcgagatcaagaaatgaccaagttataactgatttaaaaatttggataaaatcatcaaataaagagctgaatattaatttagataaaattataaaatctactatcaaaatcgcagaaaaaaatattgaaacagttatgcctggctttactcatttaaaaaacgctcaacctatttctttagctcattatctaatggcatacgttgaaatgtttgttagagataaaaatagatttactaataacttaaaaaacttaaatgaaagccctcttggtgttgcagctttgacaggtacttcattt

SEQ ID NO: 288076 - DNA, 913 bp, Unknown
  Bacterial polypeptide expressing nucleotide sequence isolated from the Sargasso Sea
taataaaaaaaaaggtaacaaaatagtttctggtttgaaaaaaattaaaagtgaaattaataaaaataaatttatttttaaaaaaaaatatgaagatattcatctgaatatagaaaagagactttttgaaataattggccctgacgcaggctacctacatattgccagatcaagaaatgaccaggtaataactgattttaaaatgtgggttaaaaaagcatcttatgaaattgaaaaaaatttaaataatttaattaaaagttttttaaagaagtcggaacaaaatattcaaactataatgcctggctttacacatttaaaaaatgctcaaccaatttcttttgctcactatttgttggcatacgtagaaatgtttaaaagagacaagcaaagatttataaataacattgattatatcaatgaatgtcctcttggtgttggagctctttcaggaacttcatataatatagatagattttttacctctaaaaaattaggttttaaaaaacccactaataattcaattgatactgtggccgatagagattttgcattagattttttatctgcagcatcaatctgtgctgtccacatatcaagacttgctgaagaattaattatctggaattctgatatatttaaaattattaactttgatgacagaatgttaactggatcctcaattatgcctcaaaaaaaaaatccagatccggcagaattaattagaggaagagctgggaaaaattttggctctttacaagcgatgcttactacaatgaagggtctgcctttatcatattataaagatatgcaggaagataaagctatagtgtttaatagttatgatactcttttgggttcaattattataaacaacgaactcgttaaagctttaaaacctaacaaaaaaaga

SEQ ID NO: 288077 - DNA, 700 bp, Unknown
  Bacterial polypeptide expressing nucleotide sequence isolated from the Sargasso Sea
atgtccaaagcccaagccaccagcgccgactctgcgccgtcccacaaccagctcgacaccaaggcccaggcctggtcggcgctgttttccgagcccatgagcgatctggtcaagcgctacacctccagcgtgtttttcgacaagcgcctgtggcaggccgacattgcaggcagcctggcgcacgccgaaatgctggccgcgcaaggcatcatcagcgccgaagacaacgcctccatccagcgcggcatggcgcagatcaaagaggagatcgagtccggcgccttcgagtggaagctggacctggaagacgtgcacctcaacatcgaagcccgcctgacccagctggtgggcgacgcgggcaagcgcctgcacaccggccgtagccgcaacgaccaggtggccaccgacgtgcgcctgtggctgcgcggcgagatcgacctgatcggcgacctgctgaaagagctgcaggtgtcgctggtggatgtggccgagcagaacgtcgaggtgatcctgcccggcttcacccacctgcaggtggcccagcccgtgagctttggccaccacatgctcgcctatgtggaaatgttcaagcgcgatgccgagcgcatggccgacgtgcgccgccgcaccaacgtgctgcccttgggcagcgcagcattggctggcaccacttacccgctggaccgcgaacgcgtcgcca

SEQ ID NO: 288078 - DNA, 816 bp, Unknown
  Bacterial polypeptide expressing nucleotide sequence isolated from the Sargasso Sea
gatggcggatgagatccttctgcctttcgacatttggaccaaccgcgcccattgcatcatgctggaacaatgcgggctgatccaaagcacacatctgacgagcatcctgaacggtttgcgggaactcgaagattcgatcgagaaaggaaccttcaggctgaaaccggagttggaagacgttcataccaacattgaggtatttgtcagcgaagcccagggagcagacgcaggagggcggatgcacatcggcagaagccgtaacgaccagtcagcctgcgatatgcggctttatcttcgcaaccgggctaccggactgttcggggatgttaaaagttttgccaaaaccctgctcgatctcgctgaagaacataccgggacggtgatgccggggtttacccattaccagcctgccatgatcaccagttgggggcactggctctgtgcttatgttcaggggctttgcagggatctggaacgggtcggttttacgctcaggctggtcaatcgaaacccgttgggagccgctgccggattcggaagttcctggcccctaaaccgtgaattgaccaccgaattattggggtttgatcgtgtggaaagcaactcgctggactgcatcgtttcccgttgggaaaatgaagcccagctggcccatgccttcagcatgttgatgaaccgcctcagcgtcatctcccaggacctgatcattctcagtctgccctacctgaagatggtccgcattgatgacgggttcgtcaccgggtcctcgatcatgccgcagaaaaagaatccggattttgcagaagtgatccgttc

SEQ ID NO: 288079 - DNA, 922 bp, Unknown
  Bacterial polypeptide expressing nucleotide sequence isolated from the Sargasso Sea
caaccaagcaatctggcaaacacgtataaaaaaaaatgcgtcaagtttgtttcaaaaagtaggtaattcaatagatattgataaaagactttataaagaagatattctaggatcaattgctcatgttgaaatgctttttaaacaaaaaataatttcattcaaaataaaaaacaaaattgtttatggactagcaaaaattgataaagaaatcacaaacaataaatttgagtttaataaaaagtatgaagatattcacatgaatatcgaaaagagactttttcaaattataggtgaagaagccggctatgttcacactgcaagatcaagaaatgatcaagtaattactgatttcaaaatttggatgaaaaattcaaccaacgaaataaataacaacattaataaagttattaagagtacaattaagttagctgaaaaaaatgttgagactattatgcctggatttacacatcttaaaaatgctcaagctatctcttttgcgcattatttaatgtcttatgtagaaatgtttagtagagacaaaaagagatttttaaataatttagagagtttaaatgaaaatcccttaggtgttgcggctttggcaggaacatcatttaatatagatagaaattatacaaccaaaaaacttggttttaaaatacctacaaataattctattgatacagtttcagatagagattttgttttagattttttatacgctacatcagtgtgtgctatgcatatttctagaattgctgaagagttaattatttggaattcggatgcttttaacttgatcaatttatctgatagagttgttactggatcttctataatgccacaaaaaaagaatcctgatcttttagagtacatgcgtggcaaatctggaagcgcttatggaaatttgttttcgatgctt

SEQ ID NO: 288080 - DNA, 871 bp, Unknown
  Bacterial polypeptide expressing nucleotide sequence isolated from the Sargasso Sea
tttaaaaaagttggatcttctattgaggtagataaaaggttgtacaaagaagatatattagcatccgtttcacatgctgaaatgttatacaagcaaaagattataactatcaagattaaggataaaattttatggggattgaaaaaaatccaaaatgaaattgagagaaaaaacttcaaatttgacgaaaatttagaagacattcatatgaatatagagaatagactttttgaacttattggtaatgatgctggttatttacattcagcacgatctagaaacgatcaagtagttacagatttaaaactatggttaaaaaaatcaacagtagaaattgatggtttattattaaagctaataaaatctttgatcaaaatttcagagaaaaatatattttctataatgccaggttttactcatcttaaaaatgctcaaccaatttctttagcacattattttttatcaaacgttgaaatgttcaaaagagatagatttagattttcttctaatatgaaaagtttgaaccaaaatcctttgggagctagtgctttttctggaacatcttttaatattgatagatggtataccactaaaaaactaaaatttgaggaaccaacaaataactctttagatacagtttctgacagagatttcgttttagattttttgtacagttcatctatatgctcaatgcatatatcaagaattgcagaagagttaataatttggaattcagaccaatttaaattcattagcttaaaagataatattgtaacaggctcatcgataatgccacaaaaaaagaatcctgatactttggagtttttaagaggaaaaactggatcaatttttggaaatcttttttcaatgt

SEQ ID NO: 288081 - DNA, 786 bp, Unknown
  Bacterial polypeptide expressing nucleotide sequence isolated from the Sargasso Sea
gttgtttaaacaaaaaattatttcttttaaaatcaaaaataaaattatttatggtttaaataagattgagaaagaaatattaaataaaaaatttgagtttaatgaaaaatatgaagatatacatatgaacatcgaaaaaagactttttcaaattattggggaagatgctggatatattcataccgctagatctagaaatgatcaagtaattacagattttaaaatttgggttagagatgcaacttataaaattaatacttcattagataaagttattcgtagtactttaaatttagcagaaaaaaatatttatactataatgcctggtttcacccatctaaaaaatgctcaggcaatttcttttgcccattatttaatggcctatatagagatgtttaaaagagataaaaaaagatttataaataattttgatactttagatgaaaacccattaggtgttgctgctttgagtggaactcctttcaatattgatagaaattacactacaaaaaaacttggctttaaaagaccaacaaacaattcaattgatactgtttctgatagagattttgtgttagattttttgtacagcatttcattatgttcaatgcatatttcaagaattgctgaagaactcattatttggaattcagatggtttcaatttaattaatttatcagataaagttgttactggatcatcaataatgcctcaaaaaaaaaatccagatttactagaatatttacgagggaaatctggtagtgcatatggaaatttattttctat

SEQ ID NO: 288082 - DNA, 784 bp, Unknown
  Bacterial polypeptide expressing nucleotide sequence isolated from the Sargasso Sea
attggaagacattcatatgaacgttgaaagtcggttaaaagaaattattggagatacagcaggtaaattgcataccgcaaggtcaagaaatgatcaggtttcaaccgatttgagattatgggttcgtaatgcaatttcaatcttagataaagaattaaaagaattacaaaagagacttattgttcttgctgaaagtaatacttcaacaattatgcccggttttacacatctacaaaatgctcagccaattacattcggacaccatttattagcttatgttgaaatgtttggcagagatagatcaaggctgcttgattgttcaaaaaggttaaatattaaccctcttgggtcagctgcattagcgggaacagctttcccaattgacagacaatctacaacaaaagagctaaattttacatctcccacaactaactcaattgatgctgtttcagacagagactttgtaatggaatttctatctatttctgcaataacttctatacatattagcagactttctgaagaaattgtcatttggtgttctgatcaatttaattttattaagctatcagataaattttcaactggatcatctattatgccacaaaaaagaaatccagatgcagctgagctggccagaggcaagtctggaagaattataggttctcttatgtctattttattagttttaaaaggattgccgttgtcatatagcaaagacttacaagaagataaagaaggtttatttgacagctttgacagtttgtacattgtattaaagcat

SEQ ID NO: 288083 - DNA, 475 bp, Unknown
  Bacterial polypeptide expressing nucleotide sequence isolated from the Sargasso Sea
atgtatcacaccaatataaataattctgataatgaaatttttcaaaaatttactgaatctgttagttatgacagaaacctttttaagcaagatataaaaggttctattgctcacgcaaaaatgctagccaaacaaaatattatttctactgatgatgctgataaaatttgctctggactttatcaaatcgaaaaagaaattattaataataaatttatatggaaatatgaattagaagatattcatatgaatatagaatcaagacttcaagaattgattggagatatcgctggtaagcttcatactgctagatctcgcaatgatcagattgctttagatatgcgcttgtttttaaaagagactatagttgatacaattaaattattattagaattacaatctacaattatagctcgtgcggaagaaaatcttgatgtaattatacctggatatacacacatgcaaagagctcagc

SEQ ID NO: 288084 - DNA, 850 bp, Unknown
  Bacterial polypeptide expressing nucleotide sequence isolated from the Sargasso Sea
tatgacaaactttgaagatattcatatgaatatagagcatagactttttgaattgattggggatgacgcgggatttatacacaccgcaagatcaagaaatgatcaagtagttacagattttaaaatttggctgaaaaaagcaaacagtgaaatactaaaaaatattgatgtaactattaaaaatattttaaaaaaagctgaagataatattgaaacaattatgcctggcttcacacatttaaaaaatgctcaaccagtttcttttgctcattacttaatggcatacttagaaatgtttaatagagataaaaaaagatttgtaaataatttagatagtcttaatgaaaacccactaggtgtcgcagctttaactggcacatcatttaaaattgatagattttatacttcaaaaaaattaggtttccaaaagccaactaaaaattcaattgacactgtttctgacagagattttgttattgattttctctactcttgttctgcatgcgcagtacatatttctagaattgcagaggaatttataatttggaattcagatgcatttaaacttataaatttaaatgataagattgttactggatcatctataatgcctcaaaagaaaaatcctgatcctttagagtatttaagaggtaaaacaggcttcatgtttggaaatcttttttcaatgttaacaactctaaaaggattacctttatcttattttaaggatttgcaagatgataaagaaattgtctttaaatcatttgatcaattaaagaattcattaattatattaaatgatgttcttaaaaacttttcaccagataaaaaaaaaatgcttgaactagca

SEQ ID NO: 288085 - DNA, 829 bp, Unknown
  Bacterial polypeptide expressing nucleotide sequence isolated from the Sargasso Sea
atgttttctagagacaaaaaaaaatttaaaaataatcttgataatctaaatgaaaatcctcttggtgtagctgcattaacaggtacttcttttaatattgatagattttatacaactaaaaaacttaaatttaataaaccaacaaaaaattcaattgatactgtttcagatagagattttgttatagattttttatactcatgttcggcatgttcaatacacatttcaagaattgctgaagagtttataatatggaattcagatgcatttaacttaataactttaaatgataaaatagttactggatcgtctataatgcctcaaaaaaaaaatccagatccattagaatttttaagaggtaaatctggaggatcaataggtaatttattttcaatgttgacaatattaaaggggcttcctttatcttacttcaaagatcttcaggatgataaggaattagtatttaagtctttcgatcaacttaaaaactctttagttatcttgaacgatattttaaaaaatttttctgtaaataagaaaagaatgcttgaacttgcaaacacaggatatactactgcgacggatcttgctgattacatggttaaggagctaaattatccatttagaaaagcatatttgcaaactgctaaaataattaattactctgaaaaaaataaaaaaaaacttagtgaacttaaaatagaagaaataaaaaaaatcgagccaaaattaaataatgatgtttttaaggtttttgacctaaaatattcaataaattcaaaaacttcatttggaggaacttcttttgcgaatataaagaaaatgataa

SEQ ID NO: 288086 - DNA, 711 bp, Unknown
  Bacterial polypeptide expressing nucleotide sequence isolated from the Sargasso Sea
aatgagaaataaaaataagacggtttggtctaatagatttagtaaaggaaattctagaaattttcaaaggattggatcatcaattaatattgataaaagactttatgaagaagatatttttgcatcaataattcatgctcaaatgcttattaaacagagaattatcccaaaaaaagatggtgctaaaataattaaaggacttaaaaaaatagagaaagagattgagaaaaataaatttaaatttaaagaaaaatttgaagatattcatctcaatatcgaaaaaaggctgtttgaaattatcggtcaatctgcaggatatcttcatactgcaagatcaagaaatgaccaagtagtaacagattttaaaatgtgggttaaaaaagcatcactagatataaatgagactttgaatttattaattaaatctattttgaaaaaagccgagaaaaatatagatacagttatgcctggttttactcatttaaaaaatgcacaacctatttcttttgcgcattacttattagcctacgttgaaatgcttaatagagataaaaaaagatttttgaataatatagaattaatagacgagtgtccgctaggatctgctgcattagctggtacatcttacaaaatagataggcaatttacagcaaaaaaacttggtttcaaaaaacctactggtaattcaattgatgctgtttgtgataggga

SEQ ID NO: 288087 - DNA, 729 bp, Unknown
  Bacterial polypeptide expressing nucleotide sequence isolated from the Sargasso Sea
attcggtgaagatgcaggttatattcacacagcaagatcaagaaatgaccaagtaattactgattttaaaatttggataaaaaattcaacctatgtcattaatgataatattaataaaattattagaagcacaattaaattagctgaaaaaaatatcgaaactattatgccgggttttacacatcttaaaaatgcgcaagttatatcttttgcacattacttaatgtcttatgtggaaatgtttaatagggataaaaaaagatttcataataatctagatagtttaaacgagaatcctttaggtgctgctgccttagctggtacatcatttaatatagatagaaatttcacatcaaaaaaacttggttttcaaaaacctactaataattctatcgacacagtttcagatagagattttgttttagactttttatttgctgcttccttatgtgcgatgcatatttctagaatagctgaagaacttattatttggaattctgatggttttaatttaataaaactgtcagacaaaattgtgactggatcatctataatgcctcaaaaaaaaaatcctgaccttttagaatatcttcgaggaaaatcaggtaccatttatggaaatctattttctatgcttacaatattaaaaggtttaccattatcttatttcaaagatttgcaggatgataaagaaattcttttcaaatcttacgatgatttaaataattg

SEQ ID NO: 288088 - DNA, 474 bp, Unknown
  Bacterial polypeptide expressing nucleotide sequence isolated from the Sargasso Sea
tatgaacatcgagtctttgctgtttaaacaaattggtaaaacagcaggtaaattacatactgcacgatcaagaaatgatcaagttgttacagatttcaaactttggataatagacaatagtgtaagcttaaataatcttcttcaaaaatttcaaaaaagtcttatcaaagttgctaaaaaaaatatttctacagtaatgcctggttttacacatctccaagtagctcaacctatttctttagcacatcactgtcttgcctatgttgaaatgataggaagagacagatcaagattaaatgattgtataagaagattaaatgagaatcctcttggctcttgcgcattagcgggaacatcttttccaattgatagaaattttactacaagattattaaaattttcaagaccaactgtaaatgctcttgatagtgtttctgatacagattttgctgttgagtttttatttgttcttac

SEQ ID NO: 288089 - DNA, 712 bp, Unknown
  Bacterial polypeptide expressing nucleotide sequence isolated from the Sargasso Sea
agcaaactccctagatgcagtctcagatagagactttgcaatggaattcctatctgcggcttcgatttgcgcagttcatttgtctcgttttgccgaagaaattattaactggaacagtattcaatttggcttcgtcagtttgtcggacgcctttacaactggcagttctataatgccgcaaaagcgtaatcccgatgcagcagaactagtacggggtaaaacgggcagggttttaggctcactaaactcgttgctaattatgatgaagggacttccgcttgcctttttcaaggatatgcaggaagacaaagaaccactcttcgatgcatcagatacattagaagtctgtatatatgcatgcattggaatggttgatgatatgaagccaaacgcagaaaaaatgcgcgctgcttctgatcaaggtttttctacggctacagaccttgcggactggttggttcgtgaattagatcttccattccgtagagctcatcatgtaactggtgaaatcgtaaagcttgccgagcaaaaaagttgtaggttggtagatttaaagatagaagagctgaaaagtattgagacgtccataaatgaaaagatttttgacgttttggatcccgtgaaatcagtctttagtcgagtgagttttggaggtactgcaccaggaaatgttaagaaagcagctgtggaagcaaggaaacggtttctttag

SEQ ID NO: 288090 - DNA, 697 bp, Unknown
  Bacterial polypeptide expressing nucleotide sequence isolated from the Sargasso Sea
aaaaaatatcaaagtcataataccattctatacgcatttacaaaaagcacagccaatccttgcatcacattttattaattcgtatattgaaatgtttcttagggatatggcaagattaaaacatgcctatgatatttcagatgtaagcccattgggatcttgcgctggtgcaggaacgtcttttaatattgaccgaaaattgactgcaaagttgcttggatttaaagaaatatccagaaatagcttagattctgttagtgacagagattttgttgcagattctatttactcatgctccatgttgatgatgcatttttcaagattttgtgaagatttaattatatggaatagttctgaatttggatttataaaaatcggtgattcttttactactgggtcaagtataatgccacaaaagaaaaatcctgatattttagaacttataagaggtaaatgtggtagtgtctatggcaacttaaacaacatactcgtaaatttaaaaggattaccttcaagctataatagggatttacaagaggataaagagcctttattttcttcttttaagactgcgatggaatgtacgggtatttttactgatatgattaagtcggttgtatttaattcggaaaagatcaaatcaagtattaattctggatttatgacagcaaccgacattgcagattatttagtaaaa

SEQ ID NO: 288091 - DNA, 727 bp, Unknown
  Bacterial polypeptide expressing nucleotide sequence isolated from the Sargasso Sea
gatgctgtttagacaaaaaattataaattttaaaattaaaaataaaatagtatggggtttgagtagaattaagaacgaaattataaaaaaaaaatttatttttgatgataaacttgaagatattcatatgaatatagaaaacagactctttgagctcatcggagaagatgctggatatattcatactgcaagatcgagaaatgaccaagtaatcacagattttaaaatttggttaagaaaagctaacaaagaaattgtaaaaaatattgatgtaacaattaaaaatattttaaaaaaagcagaaaaaaatgttgagacaattatgcctggcttcacccacctaaaaaatgcacaaccagtttcttttgctcattacttaatggcctatttagaaatgtttaacagagataaaaatagatttcaaaataatttagaaagtcttaacgaaaatccactaggtgtagctgctttaacaggtacttcttttaaaattgatagattttatacttcaaaaaaattaggttttcagagaccaactaaaaactcaattgacacagtctctgatagagatttcgtaattgattttctttattcttgttccgcgtgtgctgttcatatttctagaattgcagaagaatttataatctggaattcagatgcttttaaacttattaatttaaatgataagattgtaacaggatcatctatcatgccacagaaaaaaaat

SEQ ID NO: 288092 - DNA, 904 bp, Unknown
  Bacterial polypeptide expressing nucleotide sequence isolated from the Sargasso Sea
tccttctgaagatattcactactgtattgaagaaaaactaattagtttaattggcgaaaccggaaaaaaattgcataccggcagaagtagaaatgatcaggttggtacagatataagattgtggctaagaaaagagattgacaatcttgaaattttattaattgatctgcaaaaatcttttttaaatcttgctgaatctaatatttatactttaattcctggatatacacatatgcaaagagcacaaccattatctttagcacatcattttttggcgtacttagaaatgttccaaagagatcgcgaaagatttaaagaagtaagatcaagagttaatatttctccattaggggctgcagcattagctgggacaaaaataaaaatagataggaattttacggcagcagaattaggttttgaaaagatttataaaaatagtattgatgcggtaagtgatagggatttttgtattgagtttgtttctgcctctgctcttgtaatgtctcacttaagtaaaatttcagaggaaataattttgtgggtaactgatgaattttccttcgctaaattaacagacaaatgtgctactggtagtagtttaatgccgcaaaaaaaaaatccagatgttccagaattgattagaggcaaaacgggaagagtttatggccatcttcaagcattgttaactatggtaaaaggtcttccactcgcatacaataaggatcttcaagaagacaaagagccaatatttgatactgcagaaactatttcttcatgcataaaagcgatgactattttagttaatgaagggattgaatttaatattaaaaacttaacagactctgtagaaaatgatttttctaatgcaactgatttggcagattatttggtgggtaaagaagtt

SEQ ID NO: 288093 - DNA, 789 bp, Unknown
  Bacterial polypeptide expressing nucleotide sequence isolated from the Sargasso Sea
ctgccctggctggaacgtcatttccaataaatcgagaaaaaacatcgtcggccctacattttaaagctccttcagcaaattctttagatgcagtaagtgacagagattttgcactagaatttttgtcagtttcatcgatttgtggcatgcatttaagtcgattggctgaggaattggtaatttggtcttcggcacaatttaaattaatttcactttccgatcgtttttcaactgggtcatcaataatgcctcaaaagaaaaatcctgatgctgcagaattgataagagccaaaataggtagaatttttggtgccaatgtagctcttatgattgtaatgaaaggacttcctttggcttactcaaaagacatgcaagaggataaggagcaggtatttgatgccgccgataatttgatggttgctctagcagccatgagtgggatgattaaagatctcaaagcaaataaggaaaatatggaggcagctgcacattttggattttctactgcaacagatttggcagactggctagttcaaaaattgaatttgccgtttagagaagcacatcatatcactggccaaatagtgcaaagagcagaagtaaaaaaatgtgatctatgtgatctggatttagctgtaatacgagaggtagatgatagaattactgaagatatctactctgttctttcagtacaaaactcggttgcctcaagggcctcatatggagggacggccccgtctcaagtaagaagtcagattgcccgttggagaaagaccttggagttatgaa

SEQ ID NO: 288094 - DNA, 700 bp, Unknown
  Bacterial polypeptide expressing nucleotide sequence isolated from the Sargasso Sea
atgtcaaaaaataaaaacaataaagctatttggagcaccagaataaaaaaaaacacaacttctacatttaaaaaagttggtagctcaatcagtatagataaaagattatttaaagaagatatacagggctcaatagtacatgttgaaatgctctttaaacaaaaaattatatcttttaaaatcaaaaataaaataatttggggccttaacaaaatacaaaatgaaattcttaaaggaaaatttgattttaaagtggaattagaagacatacatatgaatatagagaatagactacatgaaataattggagaggatgctggcttcgttcatacaggaagatcaagaaatgatcaggtagtcactgatcttaaaatatggatgaaaacatcaactctagatctaataaaacttttagaaagtctaaataaaatttttttaaaggttgctgaaaaaaatattgaaactgtaatgcctggttttacacatctaaagaatgctcagccgatatcttttgcacattatttattagcatattttgaaatgtttaaaagagataaagttagatttgctaataatttgaaaagtctaaatgaaaatcctttgggtgctgcggcttttgctggtacaaattttaatatcgatagattttttacaactaaaaaattaaaattcaactatccaacaaataattcgatagata

SEQ ID NO: 288095 - DNA, 784 bp, Unknown
  Bacterial polypeptide expressing nucleotide sequence isolated from the Sargasso Sea
ggactaaataagattgaaaaagaaatatccaataaaaagtttgaatttgaaaaaaaatatgaggacattcatataaatattgaaaaacgtctgtttcaaataattggtgaagaagctgggtatgttcatacagcaagatctagaaacgaccaagtaataactgactttaaaatctggattaaatcggcaaatcataaaattagcattatgttaaataacgtaattagtaattcaattaatttagctgaaaaaaatgtagatactattatgccaggtttcactcatttgaaaaacgcacaagcagtttcgttcgcacattatctaatggcgtatgtggaaatgtttaaaagagacaaagataggtttaaaagcaatctagaaagtttaaatgaaaacccattaggtgttgctgcattaactggaacttcatttaacattgacaggaattacactacaaaaaaacttggttttgaaagacctactaataattcaatcgatactgtagcggatagggattttgttttggattttctttatagtgtttctgtttgctcattacatctatcaagaattgctgaagaattaattatttggaattctgatggtttcaatctaattaacctttcagacaaaatagtaagtggttcatcgataatgccacaaaaaaaaaatcctgatcttttagaatacttaagaggtaaatcaggaattacgtttggtaatttattttcaatgtttactatattgaaaggattgcctctttcgtattttaaagaccttcaaa

SEQ ID NO: 288096 - DNA, 835 bp, Unknown
  Bacterial polypeptide expressing nucleotide sequence isolated from the Sargasso Sea
tcatcttttagcttgggttgaaatgttattaagagatcgttcacgtttgcaggattgtcgaaaaagaataaacgtgcttcccctagggtcagcagcactagcaggcactacgtttccaattgacaggaattatgttgctaagattctagggttcgatgaggtgacacaaaattcattggatgcagtaagcgaccgagatttcgcagtcgaatttttagcatctggtagtttaattatgatgcatttatctcgtttttctgaggagattgtattttggatgtcgcagcgtaatcatttcattgatctggatgatgcatggtgcactggttcttcgattatgccgcaaaagaaaaatccggatattcctgaacttgtgagagggaaaacggggcgtgtatatggagacctcatggcactattaactttaatgaaatcacaaccgcttgcttataaccgtgataaccaagaggataaagaaaatttattcaatgcagtcgatatagttaaatcatgtttgattgcttataccggcttgatttcggctattagtgttaatcaaaaagccatgtatgaagcagcacaggcgggtttttcaacagcaactgaccttgcagattatttagtggctaaggggctaccatttcgagatgcgcatgaagtagtcggtaaagtagtacagtatttaattgaaaataataaaactttgaaaaaagacgatatgccattatttgagttagaaaaattttctaaccttattgaggctgacgtctttgatattttaaccctcgagggatctgtttccgcgagagatcatattggtgggacttctcctacc

SEQ ID NO: 288097 - DNA, 666 bp, Unknown
  Bacterial polypeptide expressing nucleotide sequence isolated from the Sargasso Sea
aatgtctagaaaaaaaacaaataaaattagaaaaagattttcaaagtcctctagtttaaatttccagaaaattaattcatcaattgaatttgataaatttttatatcaagaagatattgaaggatctatagctcatgcatcaatgcttgcatctcaaaagatcataacgatgcaagaaggtaaaaaaattacaaatggactgaaaaaaatattaaaagaaataaaaacaaataagttaaaatttgatgcaaacttagaagatattcatatgaatattgaaagtaggcttgaagaacttataggtgatactgctggaaaattacacactgccagatctcgaaatgatcaagtggtaacagacctaaaattatggatgaaaaaagacaacgatcttatttctaaaaaaataaaggaattaaaattaattttagttaaaaatgctcaatctaatgtggctaatataatgcctggattgactcattttcaaactgcgcaaccaatttctattggtcattactttatgtcctattatgaaatgtttaatcgagactcaaaaagatttgaagaggcaaaaaatagaatagatgaaaaccctttaggctcatgcgctctagcgggaacaagttttaaaattaatcgaaataaaacttcaaaacttctaggctt

SEQ ID NO: 288098 - DNA, 670 bp, Unknown
  Bacterial polypeptide expressing nucleotide sequence isolated from the Sargasso Sea
ctggagctgctctccgatgcgtcgattggcatggttcacctgtcacgtttcgccgaagatctgattttctttaatacgggcgaagccggttttattgagttatccgatcgcgtcacctccggttcctcgctgatgccgcagaaaaagaacccggatgcgctcgaacttatccgcggaaaatgtggccgcgttcagggcgccctgaccgggatgatgatgactctgaaaggtctgccgctggcctacaataaagatatgcaggaggataaagaagggctgttcgacgcgctcgatacctggcttgattgcctgcatatggcggcgctggtgctggatggcattcaggtcaagcgtccgcgttgcgaagaggcggcgcagcagggctacgcgaatgcgaccgaactggcggattatctggttgcgaaaggggtgccgttccgtgaagcgcaccatattgtcggggaagcggttgttgaagcgattgcccagggcaaaccgctggaagatctggcgctggccgacctgcagaagtttagcggcgtgattgccgacgatgtctatccgattctgtcgctgcaatcttgtctggataagcgctcggcaaaaggcggcgtttcgccgaagcaggttgcccaggcgattgctgacgcgaaacagcgtctggtgtaaa

SEQ ID NO: 288099 - DNA, 736 bp, Unknown
  Bacterial polypeptide expressing nucleotide sequence isolated from the Sargasso Sea
tgaaaaaggtaagtttaatttcaaaaccgaattggaagacattcatatgaacgtggaaagtcggttaaaagaaattattggagatacagcaggtaaattacataccgcaaggtcaagaaatgatcaggtctcaaccgatttgagattatgggttcgtaatgcaatttcaatcttagataaagaattaaaagaattacaaaagagacttattgttcttgctgaaagtaatatttcaacaattatgcctgggtttacacatctacaaaatgctcagccaattacttttgggcatcatttattagcttatgttgaaatgtttggtagggataggtcaaggctgcttgattgttcaaaaaggttaaatattaaccctcttgggtcagctgcattagcgggaacagctttcccaattgacagacaatctacaacaaaagagctaaattttgcagctcccacaactaattcaattgatgctgtttcagacagagactttgtaatggaatttctatctatttctgcaataacttctatacatattagcagactttctgaagaaattgtcatttggtgctctgatcaatttaattttattaagctctctgacaaattttctactggatcatctattatgccacaaaaaagaaatccagatgcagctgagcttgccagagggaagtctggaagaataataggctctcttatttctattttattggttttaaaaggattgcccatt

SEQ ID NO: 288100 - DNA, 733 bp, Unknown
  Bacterial polypeptide expressing nucleotide sequence isolated from the Sargasso Sea
aaaagcaactaaagaaatagttggtaacttaaatcttacaattaaaaatattttaaaaagtgctgacaaaaatattgaaacaataatgcctggttttacacatttaaaaaatgcccaacctgtttcatttgcacattatctattagcttatgtagaaatgtttactagagataaaaaaaaatttaactacaatcttgaaaatttaaatgaaaatccacttggtgtagctgcattaacaggaacttcatttaatattgatagattttacacaactaaaaaacttaaatttacaaaacctacaaaaaattctattgatacagtttcagatagagattttgtaattgattttttatattcctgctcaagatgttcaattcatatttcaagaattgcggaagaatttataatatggaactcagatgcttttaatttaatatctttaaatgataaagttgtaactggatcatcaataatgcctcaaaaaaaaaatccagatccattagaatttttacggggtaaaacaggagggtcgattggcaatctgttttcaatgttaactatattaaaaggtcttcctttatcctatttcaaagatcttcaagatgataaagaattggtatttaaatcttttgatcaattaaaaaggtccttaattattttgaacgatattttaaagaactttactgttaataagaaaagaatgttagaacttgcaaatgaaggatatataact

SEQ ID NO: 288101 - DNA, 885 bp, Unknown
  Bacterial polypeptide expressing nucleotide sequence isolated from the Sargasso Sea
gcgaatgatcaggtgattaccgatatgcgtttatatttattagatgagattacccaaattatttcaaaacttgaagatgtgatgaaagcgttgtggactgtggcggatgaaaaacttggaataattattcctggttttactcaccttcaaccagcacaacccgttttattatcgcatcactttttagcccattttgaaaagttttcacgtgatcgcgggcgttttattcaaaatattcaatcgacagatgtctgtccgcttggttcaggggccttagcaggtaataattatgacttagatcgaaaacttgtagccaaagaactaggttttgatgcaatgacgcgaaatagtatggatgcggtctcagatcgagattttatgttagagttttgtcataatgcgaccgtgtgtatgacccatttaagtcaattttgtgaagagttgattatttggtcatcgcctataactaattttatcgtgattggggatgagtttacgacaggaagttcgattatgcctcagaagaaaaacccagatattgcggagttgattcgtggaaagtcgggtagggtattaggtaactatacggcacttgttcatttaattaagggtttaccattaacatataatcgtgatttacaagaagataaggaaattgtttttgatactgctgtgaccttggctggggcgttaacttgtttttctaaaatgattggatcaataacgtttaataaagaggcgatggatgaagcgttgaaaaagggctttttattggcgacggattttgcagattatttagtgaaaaaaggtgtgccctttagggagtctcatgaaattacgggtaaggtggtgttgtattgccaagaaaataaaaaagagctttgg

SEQ ID NO: 288102 - DNA, 686 bp, Unknown
  Bacterial polypeptide expressing nucleotide sequence isolated from the Sargasso Sea
attgaactcagtaattaaaaatacacttaagttagctgaaaaaaatatttacactataatgccaggttttactcatctcaaaaatgcacaagcaatttcttttgcacattatcttttagcatatgtcgaaatgtttaaccgtgataaaaaaagatttaataataatctagataatttaaatgaaaatcctttaggtgtagctgctcttacaggaacctcttttaatattgatagaaattatacttcaaaaaaattaggatttaataaaccaactaacaattcaattgacactgtttctgacagagattttgttttagattttctttacagtgtgtcagtttgttcaatgcatatttctagaattgcagaggaacttattatttggaactctgatgcttacaacttaataaatttatcagacaaagttgttactggctcatcaataatgcctcaaaaaaaaaatccagatcttttagaattcttgagaggaaaatctggtagtgcttatggaaatttattttctatgttaacaattttaaaaggactgccattatcatattttaaagatcttcaagatgataaagaaatagtttttaaatcctatgatactttaattggctgcttaaaaatttttgaggaagttataaagaacttaagaccaaacaaagaacaaatgcttgaacttg

SEQ ID NO: 288103 - DNA, 589 bp, Unknown
  Bacterial polypeptide expressing nucleotide sequence isolated from the Sargasso Sea
tatgacaaataaaaataagacagtttggtcaggcagatttaaaagctcaacttctaagtcatttcaaagaattggggcctctattaacgtagataaaagactttacgagcaagatatctttgcgtcgaaaattcatactcaaatgctaattaagaaaaaaattataccagctaaagacggtaaaaaaataattaaaggattagataaaattagaagtcaaattaaaaaaggaaaatttatttttaaagaaaaatttgaggacatccatttaaatattgaaaaaaaattatatgaaataattggtaactcagctggctatatgcataccgctagatcaagaaacgatcaagtagtcactgattttaagctttgggttaaagactcatcaataattttaattaaagagttaaactctttaatgaaaaatattgtaagtaaagcagataaaaatgtgagtactgtaatgccgggttttactcatcttaaaaacgcacagcctatctcttttgctcactatctcctagcttactatgaaatgtttaaaagagataagcttagatttaaaaataatttagaattaatagatgag

SEQ ID NO: 288104 - DNA, 293 bp, Unknown
  Bacterial polypeptide expressing nucleotide sequence isolated from the Sargasso Sea
cgccaatgccactgagctggcggactatctggtggccaagggaattccgttccgtgaggcgcaccatatcgtcggcgagaccgtggtctacgcgatccaggtgaagaagccgctggaggagctgaccatcggcgagttccagcgcttcagcccggtgatcgagttcgacgtctaccccaatctggagctggaagcgaccctcgccaagcgggttgccaaaggcggcgtcgcccgtgagcaggttgaggcagccctgactgccgccgaagcttggctggccaagcgcggctgat

SEQ ID NO: 288105 - DNA, 938 bp, Unknown
  Bacterial polypeptide expressing nucleotide sequence isolated from the Sargasso Sea
aattagaagaatcggagaggtgggcaagaaacttcatacaggaaggtctcgcaatgatcaggtagctaccgatttgcggttgtatctgagagatatcacagaccagattactcattatttaaagcacctacagaaagctctcctggagcttgcagaaaaggagaccttcacaatttttccgggattcacgcatcttcaggtcgcacagccggtttcttttgctcatcacattatggcatggtttgaaatgatcgatagagacatagaccgtttcaacgactacagaaaaagattaaacgttttgccgctaggctcagcagcgcttgcagggacttcatacaaaattaacagagatcaagtagcttcaatattaggttttgatagtgtatcgaaaaattcaatggatgcggttagcgatagagatttcgctattgagttttgctcgaattctagtttgcttataatgcacctttctcgatgggccgaagaaataattttatggtccacacctcaatatgatttcgtttctctcccagatagtttttgcaccggctcctctattatgccccagaaaaaaaaccctgatgttcccgagttaattagaggtaagacaggtagagtttacgggtccttattcaatcttttaacactgatgaaagcacagccactcgcctacaataaagataatcaggaagacaaagaacctgttttcgatactgcgaacacaataaaagattgtctgaaggccttaattcttttagtcccagaaatatcagtgaatcgagaaaagatggcaaccgctgccacgcagggattctctactgcaacggacttagctgactatctagtaaaaaaaggcatagctttcagagactctcatgaaactgttgggaaaatagttcagcacgcgattcaatctaattgtctactatctgaga

SEQ ID NO: 288106 - DNA, 592 bp, Unknown
  Bacterial polypeptide expressing nucleotide sequence isolated from the Sargasso Sea
aatgactagaaaaaaaaatagttctttatcaaagcctacaaaaaacaaaaaaaatactcggaacgttatttggggcggtaggtttgaccagaacccaacgaaggctatggtaaatcttaactcatcaatagattttgataaacgcctttataaacacgatatctccgcatcaatagcacactctgaaatgttagctaaaaaagggattatctcaaaaaaggatgagaggtctataaaaaagggattaaaggctattttgaaagaaattgaaactggcaactttggttattctcaaagactagaggatattcatatgaatgtagagtctaggttgaaagagttaatcggggaggctgctgggcgcctgcacattgctagatcaagaaatgatcaagtagctacagactttcgtttgtggataagagaagccctagagaccatggatattttgcttagagactttcaaggaactcttatctctattgctgaaaaacataccgaaaccatcatgcctggctatactcaccttcaaaatgcccaacccgttactcttgggcaccacctgctggcctacgtagaaatgctgggtcga

SEQ ID NO: 288107 - DNA, 585 bp, Unknown
  Bacterial polypeptide expressing nucleotide sequence isolated from the Sargasso Sea
aatgaaaaataaaactgtttgggctaatagattaaaggggaagacatcactttcttttcaaaaaataggctcatcaataggtgtagataaaagactatatgagcaagatatagctgcatctattgttcatacaaaaatgctcgttaaacaaaagattattagcggcaaagatggatctaaaattatcaatggtcttaaaaagattaagtcacagattgataaaggaaagtttaaattccaagaaaaatttgaagatattcatttgaatatagaaaaaaaattatttgaattaattggtccttcagcaggctttatgcatactgcgagatcaagaaatgatcaagttgttacagatttcaaattatggattaaaaaatcatctaaagaaactataggtaacattaactctttaatgaagattttaatcaaaaagtcagagaaaaattttgatactgtaatgcctggtttaacacatcttaaaaatgctcaacctatttcatttgcgcactaccttctttcttactttgaaatgtttaaaagagacataaaaagatttgaaaataatataaaacttttagatgagtg

SEQ ID NO: 288108 - DNA, 872 bp, Unknown
  Bacterial polypeptide expressing nucleotide sequence isolated from the Sargasso Sea
caaaggcttgcaacgtatattacgtgaatgtaatgaagggagctttgagttcagcaatagtctagaagatattcacatgaatattgaaaatcgattacgagaaattgtaggtcctgttgcaggcaaattacatacggcgagaagtcgaaatgaccaagtttgtctcgatttacgaatttatcttcgaaaagaaattgatgatatcgttgttgagttggacaggcttagcaaagccttggtggatattgcgcaaaaaaatattgaacattctattcccggttacactcatttgcaacgagcacaacctgtattactttctcatcatttactggcatatgttgaaatgatgcttcgggataaagaacgttttctggatgcttataaaaggattaatgttatgccgctaggttctgcagctttggctggcactaactttcctattgaccgcaaaatcacagccaaacttttagggttccctgaaatttcccataacagcatggatgctgtggcagatcgggatttcgcagccgaattttgcagtgcatctgcattgaccatgatgcacctaagtaggttttgtgaagaggtagtcatttggaattccagtgaatttggttttttggaactttctgatgcctttacaacgggaagcagtatcatgccgcaaaaaaagaatccggatgccgcagaactcattcgcggaaaatcaggaagggttttcggaaacctcgtatcactacttactatgatgaaaggcctgccgcttgcctataacaaagatttgcaggaagacaaagagcctattttcgatacttccgaaacggtcaaggcttgtcttcgaatatttactgatatgataaaaaccggctaag

SEQ ID NO: 288109 - DNA, 562 bp, Unknown
  Bacterial polypeptide expressing nucleotide sequence isolated from the Sargasso Sea
gactggcagcagtatgatgccgcagaaaaagaatccggattttgctgaattagctagagggaaaacgggccgggtgtttggtaatttattcagaattttgaccattttgaaaggactgccattaacttataaccgggaccttcaagaagataaagaaggattctttgacactatagatacggtattagcaactttagatgtttttgccgggatgattccggctatggagattaacgttcaaaatatgaacgcattatctgaatcttcggaaatgctagctactgatttagctgattatttagtgaataaagggactccttttagaattgcttataatgcagttaaagatttgtgtcagtattgtgaggataataattccaaaccttctgatctgagtttggacgaatttaaaaagttcgctaaagaatttggagaagacgcacttaacataacagctcagtcttcggtagaagcaagagataatccaggcggcacagcgccaaacagagttaaagctgctttggagaatgctaaatctcaggtgaataaaaatgaactgtaa

SEQ ID NO: 288110 - DNA, 898 bp, Unknown
  Bacterial polypeptide expressing nucleotide sequence isolated from the Sargasso Sea
attgggatcaaaagcacacgctagtatgcttgcgagctgcaaaatcatctctgaagcagattatttagctattgatcaaggcctcaatcagatttctgccgaaattgagtctggtgaatttgttttttccgaggaccttgaggatattcacatgaatatagaagcgcgactcgccgaattgattggtgagccagcgctccgccttcatacggcacgttcacgcaatgatcaggttgctacggatttcaaattatgggtgcgtgagctattggatacggttgatgaggcgcttgccgatatgcaatccgccttattggaccaagccgaagcgcatgctgacttacttatgcctggctttacccacctacagaccgcacaaccggtaacatttggttttcatttaatggcatacgttgagatgatagggcgcgatcgaggacgatttagtgatgcaagagcaaggctgaatgaatcgcctcttggcgcagcggcactagccggcacaacctttcctaccgaccgtcacttgacagctaaagcactcgaattcgaccggccagcagctaacgcgatggatgctgtttcagaccgcgattttgcgctggaatttttaacatcggcagcaatctgttcagttcatttatcacgatttgcggaagaactagtaatttggtcatctgaccgttttgggtttatagtcttatctgatgatttcactactggctcttcaattatgcctcaaaaacggaatcctgacgcagccgaacttgtaagagtcaaacctggccgtattattggcgctctcaacggattgctgattgttttgaaaggacttccattagcatacggtaaggatatgcaagaagacaaagaaagtgtttttgatgcagctgattcg

SEQ ID NO: 288111 - DNA, 505 bp, Unknown
  Bacterial polypeptide expressing nucleotide sequence isolated from the Sargasso Sea
aatgaaaaaaaacccttcaagaaatgtccatttaaaaaaaggacctagtaagttacttgaggaaattaattcctcaatagaaatagatcacagactatatcgcgaagatattcaaggatcaattgctcacgcaaaaatgctagctaataaaaaaattatttctaaaaacgaaaaaggtttaattgtaaaaggactcaataaaattttaaaaaaaattgaggctggtaaagtttcttttaaaaaagaattggaagatatacatatgaatattgaatcattgttatattcagaaataggtaaaactgcaggtaaacttcatacagctcgatcaagaaatgatcaagttgttacagattttaaattatggataaaaaacaacagtaaaaatttagataaaaatattcagcaattacaaaaaaatttaataaatatatctaaaaaaaatttaaatacggttttaacaggatatactcatttgcaaattgctcaaccaaatttcaatggc

SEQ ID NO: 288112 - DNA, 781 bp, Unknown
  Bacterial polypeptide expressing nucleotide sequence isolated from the Sargasso Sea
atcatgagtaaaaataaaaacaataaagcagtttggagtttaagaataaaaaaagattcatcctcaatatttaagaaagcaggaagttctataaatattgataaaagactttttaaagaagacatcttagccagcacagctcatgttgagatgctttttaaacaaaaaattatttctttcaaaattaaaaacaaaattgtttggggtttaaataaaataagaaatgaaattataaaaaaaaaattcaactttaaaattgaacatgaagatattcatatgaatatagaaaaaagactttttgatattattggtgatgatgcaggttttgttcacactgcaagatctaggaatgatcaggtaataactgactttaaattgtggctcagaaactctacaaatgaaatcgtcaaactattgaactcttctataaaaataatattaatttgtgctgataaaaatatcaaaacaattatgcctggatttacacatttaaaaaatgctcaaccaatttcttttgctcactatttactagcttatgttgaaatgtttcaaagagataaaaaaagatttaaaagtaatttagataaccttatggaaaatcctttaggtgttgcggcaattgctggaacagcatttaatatagatagaaattttacaacaaaaaaattaaaatttagtacacctacaaaaaattctattgatacagtttctgatagagattttgttattgattttttatacgctgtatctgtttgttctttacatatatcacgttttgctg

SEQ ID NO: 288113 - DNA, 858 bp, Unknown
  Bacterial polypeptide expressing nucleotide sequence isolated from the Sargasso Sea
gaatatagctcttaatccatcctgggggggtaggtttgagaatgcagtaaataggctagcaattagctacacttcttctattgatgttgataaaagattgtatgaacaagacatattgggatctatgaaatatgccttagctttaaaagaagcaaaagtaataaagaatattgattattttaaaatttctaagggtttaaaatcaattctaaaggaaattgagtctggaaagtttcaatggaaagaggaactagaagatgttcacatgaatatagaaaattccctgaaacgaaaaattggaaatgcggctaaaaaactacataccggaaggtctagaaatgatcaagtttctactgatttaaggctttttgttcttaaatctatagatgaaatgggagaacttatttctaatgttcaaactacaattttgaacaaagcaaagaggcattgcgatgatttaatgcctgggtttacccatctgcaagtagcccaacctgtcacttttggacatcatctaatggcttggtatgaaatgctgagtagagattttgctagacttcaagacaccaaaaaaaggactagtattatgcccctggggtccggagctttatcgggtaacagatacaatatagatagacagaagttagctaaaagattaaattttgatggtatctcaaataactctatagatgctgtaagtgatagagatttttctattgaacttttgtctaatataagtattttaggaatacatctttcaagaattagtgaggaactaattttatggtcttcttctcaattcaactatgtagatttaccagatgaattttgcacaggttcttccataatgcctcagaa

SEQ ID NO: 288114 - DNA, 745 bp, Unknown
  Bacterial polypeptide expressing nucleotide sequence isolated from the Sargasso Sea
tatggacaaagaatccgaaaagaagccctggggtgggcgtttctctgaacccaccaatcaatttgttgagcgatttaccgcttcaattgatttcgacaagcggcttggtctttatgacataacaggctctaaggcccacgccgaaatgttagaaagatgcgggataatatcctctgaagagctgaaacaaattgataatggattagaagagattgctgacactattagaaatggaacattcaagtggtcagcggcacttgaggatgtgcacatgaacattgagggcgagttggtcaatcgaataggagaggttggaaaaaaattacataccgcccgatctagaaacgaccaagtcgctactgacctacgccttttcttaagggataagactgatgaatcggtagaaaaattaaaggacttagtaaggagcattgtccaactcgctcacaaagaatcagccactttgatgcctggttacactcaccttcaagtagcacagcctgtaactttcggtcaccacctactagcttgggccgagatgatactgcgagatatatcgagattcaaaaactgccgttcgaggatcaacatccttccgcttgggtctggagcccttgctggaacaactttccctatagaccgtcgcattaccgcagatattttaggtttcgatgacgtctctgaaaactcaatggatagcgtagccgaccgagatttcgtaatagaatttgtttcagcagcaact

SEQ ID NO: 288115 - DNA, 789 bp, Unknown
  Bacterial polypeptide expressing nucleotide sequence isolated from the Sargasso Sea
gatgaaaaaaaatccgtcaagaaatacgcatttaaagaacattccctcgaagttattagaatctattaataactcgatagatattgatcagagaatgtacaaagaagacattgaaggctcaattgcacatgccacaatgctcggaaaacaaaaaattatatcaaaaaaagatcaaacaaaaattgttaatggcctgaaaatcattttacaaaaaattaattctggtaaaattcatttcaaaagtgaacttgaagatattcatatgaatattgaatccttgcttttcaaacaaattggcgaaaccgctggaaaattgcatactgcacgatcacgtaatgatcaggtagttaccgactttaaactttggataagaaataatagtatcaaccttgataagcatcttcaaaacttacaaaaaagtcttattaatgttgctaaaaaaaatactgctactgtaatgcctggctatacacatcttcaggtggcacaaccaatatctttagcgcatcactgtcttgcatatattgaaatgatgggtcgagacagatcaagattaaaagattgcattgaaagattaaatgaaagccctcttggctctggagccttagcaggaacatcattccctattgacagaaatttaacatcaaaattattaaaattttctaaaccaacagctaatgcacttgatagtgtatctgatagagattttgccgttgaatttttatttgtgatatcacttataagtacacatttatcaagaatggctgatgaaattgttctttggtctaa

SEQ ID NO: 288116 - DNA, 757 bp, Unknown
  Bacterial polypeptide expressing nucleotide sequence isolated from the Sargasso Sea
catgcgaaaatgcttggcaaaactcaagttttatcttcttctgaagctttgcaaattattaatggtttagaatccataaaagttgagtatttggagggtaaattttctccgggtccaccttctgaagatattcactattgtatagaagaaaaattgataagtttaattggtgaaactggaaaaaaattacatacaggtagaagtagaaatgatcaagttggtacagatataagattgtggctgagaaaagagatagataatattgaaattttaataaccgatttgcagaaatcttttttaaatagtgcgaaatctaatatttatacattaatacctggatatactcatatgcaaagagctcaaccattgtctttagctcatcatttattagcttatgtagaaatgctccaaagagaccgtgaaaggtttaaagaagtacgtgcaagagttaatatttctcctttaggagctgcagcattagctggaacaaaaataaaaatagacaggcaatttacagctttagaattaggttttgaaaagatttataaaaacagtattgatgcagttagtgatagagatttttgtatagaatttgtttctgcttctgctttgttaatgtctcatttaagtaaaatttcagaggaaataattttatgggtaactgatgaattttcttttgcaaaattaacagataaatgtgccacaggaagtagcttaatgccccagaaaaaaaatcctgacgttccagaattataaa

SEQ ID NO: 288117 - DNA, 847 bp, Unknown
  Bacterial polypeptide expressing nucleotide sequence isolated from the Sargasso Sea
acacatttaaaaaatgcacagccaatttcatttgcacattatttattagcttacgttgaaatgttcaaaagagatagaaaaagatttgttaataatattgattacataaatgagtgtccgctcggagtaggcgcgttagctggaacctcttataaaatagacagaaattttacatccaaaaaactaggttttaaaaaaccaacgaataattcaattgatactgtgtccgatagagattttgctctagattttttatcttcagcttcaatttgcgcaatgcacatatcaagatttgctgaagaattaattatttggaattctgatatatttaaacttgttaaacttgatgataaaatgctcacaggctcttctattatgccacagaaaaaaaacccggacccagcagaattaattaggggtagggcaggaaaaaactttggttctttgcaagcaatgctaacgactatgaaaggtttgccattatcatattataaagatatgcaagaagataaagcattagtattcgaaagttatgatactcttttagaatcgattattatagcaaacgaactcattaaaagtctgaaaccgaacaaagaaagaatgttttctttatctaacgagggatatactactgctactgattttgctgactaccttgtacaaaataataacttatcttttagagaagcatacaaaatttcagctaagttagtgaattacgcagaaaaaaataagaaaaaattgaatcaacttaattttaacgaggtaaaaaaagttaagaataatttagataaaaaagtaatgaatgtgtttaacgttagaaattcggtaaattttaaaactt

SEQ ID NO: 288118 - DNA, 907 bp, Unknown
  Bacterial polypeptide expressing nucleotide sequence isolated from the Sargasso Sea
tccagtagccaacctgtaacttttggacatcacctgctcgcctatgtggagatgttagggagggataagggccggctagaagactgcaggactaggttaaatgaatgtcctcttgggtccgcggctttggcaggaacatcatttccaattgatcgtgattttacagcccattatctaggttttgacaggccaacagcaaattccctagatgcagtctcagatagagattttgcaatggaattcctatctgcagcttcgatttgcgcagttcatttgtctcgttttgctgaagaaattattaactggaacagtattcaatttggcttcgtcagtttgtcggacgcctttacaactggcagttctataatgccgcaaaagcgtaatcccgatgcagcagaactagtacggggtaaaacgggcagggtgttaggctcactaaactcgttactaattatgatgaagggacttccgcttgcctttttcaaggatatgcaggaagacaaagaaccactcttcgatgcatcagatacattagaagtctgtatatatgcatgcattgggatggttgatgatatgaagccaaacgtaaaaaaaatgcgcgctgcttctgatcaaggtttttctacggctacagaccttgcggactggttggttcgtgaattagatcttccattccgtaaagctcatcatgtaactggtgaaattgtaaagcttgccgagcaaaaaagttgtaggttggtagatttaaagatagaagagctgaaaagtattgagacgtccataaatgaaaagatttttgacgttttggatcccgtgaaatcagtctttagtcgagtgagttttggaggtactgcaccaggaaatgttaagaaagcagctgtggaggcaaggaaacggtttctttagg

SEQ ID NO: 288119 - DNA, 610 bp, Unknown
  Bacterial polypeptide expressing nucleotide sequence isolated from the Sargasso Sea
tttatgggtaactgatgaattttcttttgcgaaattaacagataaatgtgcaacaggaagtagcttaatgcctcagaaaaaaaatcctgacgtaccagaattgatcaggggtaagacaggaagagtatatggacatctccaggcattgttaaccatggtcaaaggagtgccactctcttataataaggattttcaagaggacaaagagccaatatttgatactgcagaaacaatatcttcttgtattaaagcaatgactattttaattaatgagggcattgaatttaatattaaaaatctatctgattcagtagagaatgacttttcaaatgctactgatttggcagattacctagttaataaagatgttccttttagaaccgcctatcaagttgttggtcaaatggttaaatattgcttggagagaaaaatgttatttaaaaatcttaaaattgaagaatttaaaaaatttcatccagaatttgatgatgatgtttttgtggatcttaagcctcttaatgtcgttaaatcaaggaatagcgaaggtggtaccagttttgttcaggtagaaaaagagataaataattggcaaaaaagattgttaatttga

SEQ ID NO: 288120 - DNA, 920 bp, Unknown
  Bacterial polypeptide expressing nucleotide sequence isolated from the Sargasso Sea
aaaaaaaatttataaagagattgaaaaaggtaagtttaatttcaaaaccgaattggaagacattcatatgaacgttgaaagtcggttaaaagaaattattggagatacagcaggtaaattacataccgcaaggtcaagaaatgatcaggtttctaccgatttgagattatgggttcgtaatgcaatttcaatcttagataaagaattaaaagaattacaaaggagacttattgttcttgctgaaagtaatacttcaacaatcatgccaggttttacacatctacaaaatgctcagccagttacatttgggcaccatttattagcttatgttgaaatgtttggtagggataggtcaaggctgcttgattgttcaaaaaggttaaatattaaccctcttgggtcagctgcattagcgggaacagctttcccaattgacagacaatctacaacaaaagagctaaattttacatctcccacaactaactcaattgatgctgtttcagacagagactttgtaatggaatttctatctatttctgcaataacttctatacatattagcaggctttctgaagaaattgtcatttggtgttctgatcaatttaattttattaagctctctgataaattttctactggatcatctattatgccacaaaaaagaaatccagatgcagcggagctggccagagggaagtctggaagaataataggctctcttatatctattttagtggttttaaaaggattgccattgtcatatagcaaagacttacaagaagataaagaaggtttatttgatagctttgatagtttgtacatttgtattaaagcatgcacaggcatgatttctgatgtaactatcaacaaagaaaaaatgctagaagcatcaaaaacagcctatactacagccacagatt

SEQ ID NO: 288121 - DNA, 736 bp, Unknown
  Bacterial polypeptide expressing nucleotide sequence isolated from the Sargasso Sea
aacaaacttgggttttgataacccaactaataattcaatagatactgtttcagatagagattttgttttagattttttatttagtatttctgtatgttcaatgcatatttctagaatttcagaagaactaattatttggaattcagatggtttcaatttaattcaactttcagacaaagtcgtgactggatcttctataatgccacaaaaaaagaacccagatctgctagagtatttaagaggtaaatctggttttacttttggaaatttattttcaatgctaacaatactcaaaggtttaccgctctcctattttaaagatatgcaggatgacaaagctttagtttttaaatcatatgatactttaattaatagtctgaaagtattcgatgaaatattaaaaaatatttctccaaataagaaaaaaatgtttgaacttgctgatacaggttttattacagcaactgatcttgcagattatttagttaaaaatcattcaatgtcatttagaaaagcttatcaaaagacggcagaaatagtaaattttgctgaaaaaaaaggaaaaaaatttaaggatctcaaaattgaagaattgaaaaaaattgaaccaaagttgacaagtgaagttttgaaaatttttgaattaaaaaattcaataaattcaaaaaaatcttatggaggaacatcttttgaaaacatcaaaagaatgataatgaaatataaaagaaataaatga

SEQ ID NO: 288122 - DNA, 577 bp, Unknown
  Bacterial polypeptide expressing nucleotide sequence isolated from the Sargasso Sea
atgacaaataaaaataagacagtttggtcaggcagatttaaaagctcaacttctaaatcatttcaaagaattggggcttcaataaacgtagataaaagactctacgaacaagatatttttgcctcaaaaattcacactcaaatgttaattaaaaaaaagattattcctgcaaaagaagggaaaaaaataattaaaggtctagaaaaaatcaaaggacagataaaaaaaggtaagtttatttttaaagaaaaatttgaggatattcatttaaatattgaaaaaaaattgtatgaaataattggtaattcagcaggttatatgcacaccgctagatcaagaaatgaccaagtggtgactgattttaagctatgggtgaaagactcttcgataattatgattaaagaaataaatattttaatgaaacatattttaagtaaagcagaaaaaaatgtaagtacagtaatgccaggttttactcatcttaaaaatgcacagccagtttcttttgcgcattaccttttggcttactatgaaatgttaaaaagggacaaaaaaagatttcaaaataatttagaat

SEQ ID NO: 288123 - DNA, 759 bp, Unknown
  Bacterial polypeptide expressing nucleotide sequence isolated from the Sargasso Sea
cttctgaaattacaaaaggttttaattagtattgtaaaaaaacatactaatacaattatgcctggttacacacacttacaagttgctcaaccaatttcattagcacattattctcttgcttatgttgagatgatgggcagagatagacaaaggttaaagaattgtattgaaatattaaatgaaaatcctcttgggtcgggtgctttggcaggaacatcatttcctattgatagaaattatacttcaagtttattaaaatttaaaaatccaacggttaacgcactagacagcgtttctgacagagattttgctgttgagtttttatttgttttatctcttattagtattcacctatcaagaatggctgatgaggttattctttggactaatcaacaatttaactttgtaaaattgcctgatgaattaaccacaggtagttcgatcatgccgcagaaaaaaaacccagacggtgctgaactagtaagaggtaattctggtaatgtaataagtaatttgagtactttgctaataattcttaaaggattacctttagcctacagtaaagatttacaagatgataaaaaaattattttttcttcatttgataatgtgtctctagccttaaaggttatgacagaaatgtggtcgggcattaccttcaatactcatgtaatgaaagaagctgtaaaaaattctaatgcaacagcaacagattttgctaattggcttgtgcaaaatctgaatttttctttcagagaa

SEQ ID NO: 288124 - DNA, 832 bp, Unknown
  Bacterial polypeptide expressing nucleotide sequence isolated from the Sargasso Sea
agaatagttccaccaaaggaaggtaaaaagattatatcaggactcaaaataattagacagcagattgataaggggaaatttgtttttaaagaaaaatttgaggacatacatttaaatatagaaaaaaaactttttgaaataattggtccctcagcagggtatcttcatactgcaagatcaagaaatgaccaagttgtaacagactttaagctttggataaaaaaatccacgatagaaattgtagaagatgtttcaaaaattatgaaaactttggttaaaaaagctgaaaaaaatattggaactgttatgcctggttttacgcatcttaaaaatgcccagcctatttcatttgctcactatttattggcatattatgaaatgcttaaaagagacaaaaaaagattcttaaacaacctaaaacttttagatgaatcgcctttgggtgctgcagctctttccggaacatcttataaaatagatagaaattacactgcaaaaaagcttggctttaaaaaaccaacagacaattcaattgactcggtatctgatagagattttgcaattgattttctttatgctagcgctgtttgcgcaatgcatttatcaagattagcagaagattttattattttgaactcagatgcgtacaaattaattagttttagagacagaatgcttactggatcatctataatgcctcaaaaaaaaaatccagacccagctgagttaattagaggaagaacaggaattaactatggaaaattaaattcaatcttaacaattatgaaaggtttgccaatttcttattttaaagatcttcaggatgataagt

SEQ ID NO: 288125 - DNA, 844 bp, Unknown
  Bacterial polypeptide expressing nucleotide sequence isolated from the Sargasso Sea
ttcaaagaaaagtatgaagatatacatttgaatatagaaaaaaaattatttgatattattggaccttcagcaggatttctccacacagcaagatcgagaaatgatcaggttgttactgattttaaactttggttaaaaaaatcaactgatgatcttattaaagatatttctgaagtcatgaaagtattagttttaaaagctgaaaaaaatgttgacacagtaatgcctggatttactcatcttaaaaatgctcaacctatctcattcgctcattacctgctggcatattatgaaatgcttaaaagagataaaaaaagatttttgaatagtaaagaacttctagatgaatcacctctaggtgcagcagctttatcaggaacttcttataaaattgataggaattatacttcaaaaaaattaggttttaaaaaaccaactaaaaattcaattgactctgtgtcagatagagattttgctattgatttcctttactcgagcgcagtgtgtgcaatgcacttatcaagacttgcagaagattttattattatgaactctgatgcttataaactaatctcttttagagataacatgttgacaggatcctcaattatgcctcaaaaaaaaaatcccgatcctgcagagttaattagaggcagaactggaattaattatggaaagttaaattcaatacttacaattatgaagggtttacctatttcatattttaaagacttacaagatgataaatctttagtctttgaaggttatgatactttaaaagaaacattgataatgagtattgaattaataaaaagtttaagaccttcaaaagaaaaaatgtata

SEQ ID NO: 288126 - DNA, 724 bp, Unknown
  Bacterial polypeptide expressing nucleotide sequence isolated from the Sargasso Sea
tgccttagcaggaacttctttcaacattgatagaaattatactgcaaaaaaacttggttttaaaaaacctactaataattcaattgatactgtctctgatagagattttgttttagattttttatacgcagtctcagtttgctctatgcatatttctagaatttctgaagagttaatcatttggaattcagaaggttttaatttgataaatttatcagataaaattgtaacagggtcatcaataatgccacaaaagaaaaatccagatatgcttgaatatttaagaggaaaaactggtaaaacctatggaaatttattttctatgcttacaattctaaagggtttgccactatcatattttaaagatcttcaggatgataaagagattgtttttcaatctaatgataatctaattaattgtctaaaaatatttgatgaaattcttaaaaactacagctctaataaaaagcgtatgcttgaacttgctaattgtggatacataactgcaacagacttagctgattatctagtaaaaaatcattcgatgtcatttagaaaagcttatcaaaaaacagcttcaatagttaatttagcagaaaaaaagaaaaaaaatcttaatgatctaacaatagaagaattaaaaaaaattgaaccaaaactaacaaatgacgtcttaaaagtgtttgatttaaagaattctatttattctaaaaaatcgtatggt

SEQ ID NO: 288127 - DNA, 641 bp, Unknown
  Bacterial polypeptide expressing nucleotide sequence isolated from the Sargasso Sea
agctagtggtgcttttaagtcaataaattcatcatttgaaatagacaagtttcttttccgtgaagatatagagggatcaatagctcatgccagaatgcttgaatctaaaaaaattatttcaaagacagattttaaaaaaatttctattggactaaaaaaaatattatctgaaatagaattaggaaaatttacttttaaaagtgattttgaagatattcatatgaatattgaaaatagattagaagaattaattggtgaagtagctggaaagttacataccgccaggtctagaaatgatcaggttgtaactgatgtaaaattatggatgaaaaaagatattgataatattttaagtaaaataactaggcttcaaaaaattattataaaaaaatctgaaaataatatagatactttattcccgggtatgacacattttcaaactgcccaaccagtttcttttgctcatcatttaatggcatattatgagatgtttaaaagagacttagaaagattcaatcaatcgaaaaaaagattagatcagaatcctcttggggcaggagcattggctggtacttcatttgatataaatagatatcaaactacaaagttactaaaatttaaagaaccaacaagaaattctc

SEQ ID NO: 288128 - DNA, 827 bp, Unknown
  Bacterial polypeptide expressing nucleotide sequence isolated from the Sargasso Sea
aactgcatctattgttcatacagaaatgctatttaagcaaaaaataataaactttaaaattaaaaataagattgtgtggggtttgaatagaataaaaaatgaaattataaaaaaaaaatttccctttgaaaaaaatcttgaggatattcacatgaatattgaacaaagattgtttgatttgattggtgaggatgctggatttatacataccgcaagatctagaaatgatcaggtaatcactgattttaaaatatggttaaaaaaatcaacttatgaaataactaaaacacttgatggtcttataagtacaattctgaaagttgcagataaaaatataaaaaccgtcatgcctggttttactcatttaaaaaatgctcaaccaatttcatttgcacattatatgatggcttacgttgaaatgttcaaaagagataaaaaaagatttaagaataatttagatgctcttaatgaaaatccacttggtgtagctgctttatcaggaacttcatttaacattgatagaaacttcactacaaaaaagctcaacttttcaaaaccaacggataattctatagatactgtttctgatagagattttgttttagattttctctatgcatgttcagcctcttcaatacatatatcaagaattgctgaagaatttataatttggaactcagatgcctataatctaattcatttaaatgacaaaattgtaactggatcttcaattatgcctcaaaaaaaaaacccagacccactcgaatatttaagaggtaagacaggatcatcttttgggaatcttttttcaatgctcacgatttaaa

SEQ ID NO: 288129 - DNA, 802 bp, Unknown
  Bacterial polypeptide expressing nucleotide sequence isolated from the Sargasso Sea
atctgatgaggacattcataccgccgtcgagagaagagcaacggaactgacatcggctgccgcaaagatccacaccggccgaagtcgtaatgatcaagtggcaggcgatcttcggttggtcgcgcttgctgaaatagattcgctttcaagcgtgatattcgacttgatagaagtgttgcttaagagagctgaagaagcgcacaaggctggcatctatctccccggctatacacaccttcagagagcgcaaccagtcggtctcgctcatcatttcggcgctttttgctggatgttcctcagggatcttgatcggttagcggatgttcgtcgtagaacagatgtttcggtcttaggcgcgggggcacttgctgggtcatctttgccgatcgacccgatgtttacagcccagaagctcggtttcgctcgcgtgtttgataattcgctcgatgctgtgtcagatcgagacttcgtctcagatttgctctatgtgttgagtctgactggagtccacctatccaagttaggcgaggagatatgtctttgggcgtcaagcgaatttgattttgttgagctcgcagatgaattcgctacgggctcctcgatgatgccacaaaagaaaaacccagatgtcgcggagttggcgcgcggtaaggcaggccggctattgggaaacctcactggattcctagctacacaaaaaggtttaccgcttacatataacaaagaccttcaagaagataaggaacctctattcgacagttgcgacacgatacggctaacgaccctcgctatgacgggtctt

SEQ ID NO: 288130 - DNA, 800 bp, Unknown
  Bacterial polypeptide expressing nucleotide sequence isolated from the Sargasso Sea
tgtcgaaggacgcctgaccgactgatcggcgatgcggccggtcggctgcatacggcgcggtccaggaacgatcaggtggctacagatttccgcctttgggtacgcgatgccatcgatgcggcggatgatgcgcttaagtcattgcagtccgcactgatcgatcaggccgaggcacatgcggactgggtgatgccgggcttcacgcatcttcaggccgcgcagcctgtgacggtcggtcaccatctgctggcctatgtggaaatgttcgggcgcgaccggggccggttctctgatgcgcgggcacggctgaatgaatcgccgctgggtgcaggtgcactggcgggcacgtcttttcccatcgaccgggaggcgacagcgaagacgctgggtttcgaccggcccaccgcgaattcactggattctgtgtcggaccgggatttcgttctcgaatatctgtccgccgcggccatctgcgcgggacatttgtcccggctgggcgaagagctggtgatctggtcgtctgcccagttccggtttgtccggctgtcggattccttttccaccggctcgtcgatgatgccgcagaaacggaaccccgatgcggcggaactgatccggggcaagacgggccgcatcctaggggctttcacggcactggcgaccgtgatgaagggtttgccgctggcctattccaaggatatgcaggaagacaaggagcccgtgttcgatgcggcggaaacgctgatggtttgccttgccgccgcgggcaggcatgacggccgatatggcgttcgaccgtg

SEQ ID NO: 288131 - DNA, 921 bp, Unknown
  Bacterial polypeptide expressing nucleotide sequence isolated from the Sargasso Sea
ttaaaaaaaggacctagcaagttccttgaggaaattaattcctcaatagaaacagatcacagactatatcgtgaagatattcaaggctctattgcacacactaaaatgctagctaataaaaaaataatttctaaaaatgaaggaaatgcaattgtaaaaggacttaataaaattttaaaaaaaattgagactggtaaagtttctttcaaaaaagaattagaagatatacatatgaatatcgaatcgctattatttaaagaaataggtataacagcaggtaaacttcatactgcaagatcaagaaatgatcaagttgttactgattttaaattatggataaaaaacaatagcaaaagtttagataaaaatattcagcaattacaaaaaaatctaataaatgtatctaagaaacatttaaatacagtgttacccggatatactcatttacagattgctcaaccaatttcattggctcatcattgtcttgcttatgtagaaatgtttggaagagatagaacgcgattaaatgattgtgtaaacagattaaatgaaaatcctttaggttctgctgcattagcgggaacatcatttcctattgatagaaatttaacatcaaaattacttggatttaaaaaaccaacagttaatgcgcttgatagtgtttctgacagagattttgcagttgagtttatttttgttttatcactattgagtttacatttatcaagaatggctgaggaaataattttttgggcaaattcacaatttaattttatagacttacctgatgatttagcaactggtagctctattatgccacaaaaaaagaatcctgatggtgctgaattagtaagaggtcaatcaagtttaatcattggtaatttaagtagcttgttaattattctaaaaaggattgccgtt

SEQ ID NO: 288132 - DNA, 634 bp, Unknown
  Bacterial polypeptide expressing nucleotide sequence isolated from the Sargasso Sea
ctgtcgcgcctggcggaggaaatcgtcctttgggcatccccgcaatttggcttcgtaaaattatccgatgccttttcgaccggctcctcaattatgccacaaaaacgcaatccagacgctgccgaacttgcgcgcgcgaaagttggccgtattcttggtgcttttacggctttaaccgttgtcatgaaaggcctaccccttgcatacggcaaagatatgcaggaagacaaggagccaaccttcgatgcgacagacagtctgtcacttgccatcacagccatggcaggcatgatcaccgatctcaaagccaattccgatgcgatgcgggctgcccttgaagtcggatttcccacagcgaccgatttggcagattggctcgtgcgggaactcgatctcccgttccgaaaagctcatcacatcaccgggcgcattgtctccatggcggaggagcgggggtgcctattggaagatttaccgctcgaagtgatgcaaaccgtggaatctgggatcaatagcagcatttattccgtgctttccatcgatgcatccgcgaaaagccgaaccagttttgggggaacggcgccggagaatgttcgcgccgcagtggcaaaagccagggagcgtttcctttgat

SEQ ID NO: 288133 - DNA, 835 bp, Unknown
  Bacterial polypeptide expressing nucleotide sequence isolated from the Sargasso Sea
tcgccttaaaagttgtcagcaaagattaaatgaatcaccattaggttcaggcgctcttgcaggtacaacctttgatatagatagatttcaaacatcagagaagctagagtttaataatcctatgaagaattctttagatgctgtttcatccagagactttgctattgagtttctttcatcagcctcaatctgctcaataaatttatcaagaatagcagaggaaattattttatggactagtgaacaatttaaatttgtaaggctatcagatgaatttacaactggctcatccatgatgcctcaaaaaagaaaccctgatgcagcagagttaataagagcaaaatctgctcgaattataggtaatcttaattcattaatgattgttatgaagggacttcctctgtcatactctaaagacctacaagaagataaggagcctgtttttgatacatttgacaatttaattttgtcaatctctgcaatgtcaggaatgataaaagacttaactgcgaatagcaatgaaatgtatagagctactgaaagtggctttattacagctactgaccttgcagactggttagtcattaatataaatattccttttagagaatctcattcaatcacaggaaaaattgttaagcttgcagaaaaaatgaattgctctctagaccaaattcctattcaagaattaaaaaatattgaaccaaggattaatgataaaatatataatgcattagagataaatagctccctaaataatagaaaaagctatggaggaactgcaccaaagcttgtactcgatgctataaataaatataaggaaatatatttatga

SEQ ID NO: 288134 - DNA, 685 bp, Unknown
  Bacterial polypeptide expressing nucleotide sequence isolated from the Sargasso Sea
gatactgtatctgatagagattttgttttagattttctttattcttcatctgtttgttcaatgcatatgtcaagaattgcagaagaattaattatatggaattcagatggatttaatttgataaccttatcggacaaagttgttacaggttcctctataatgccccaaaaaaaaaatcctgatttattagaatatttaagaggaaaaactggttcttcatatggaaatttattttcaatgctaacaattctgaaaggattaccgatttcttattttaaagatcttcaagatgataaacaattaatattcaatacatttgatacacttataaactgtataaaaatattagatgaggttctaaacaatctgagtccaaataaaaaaaagatgttagaattggcagaaacaggttatatcactgctactgacctagcagattatcttgttcaaaacctttcaatgtcatttagaaatgcctatcaaataacagcgactatagtaaatattgcagaaaaaaagaaaaaaaagttggaagaacttgatattatggaactaaaaaaagtcgaacctagattaacaaaagaagttatgaaagtatttaacctaaaaaattctttaaattcaaaaaaatcttatggtggaacatctttttataatattaaaaaaatgatacttaaatataaaa

SEQ ID NO: 288135 - DNA, 860 bp, Unknown
  Bacterial polypeptide expressing nucleotide sequence isolated from the Sargasso Sea
gtgataactgattttaaattatggttgagagcttcaactaatgaggtgatcaatcttttaaataatttagaaaaagttattataaaaagtgcagaaaaaaatgttaaaacagtaatgccgggttttacacatttaaaaaatgcacagcctatttcatttgctcattatttgttagcatatgtcgaaatgtttaaaagagacaaaaaaagattccaaaataatttagaaaatttattggaaaatcccttaggcgttgctgctttatcaggaacaagttttaatattgatagaaactacacttctaaaaaattaaaatttaaaaatccaacaaataattcaatcgatacaatttcagatagagattttgtattagattttttatattcagtctcagtttgttccatacatatttcaagaattgctgaggaatttataatatggaattctgatgcttttagattaataaaattaaacgataaagtagttactggatcgtctattatgccacaaaaaaaaaatcctgacctattagagtatcttagaggaaaaacaggaaatagttttggtaacttattttcaatgcttaccattttaaaagggttgcctctttcttatttcaaagacttacaagatgataaagaattagtgtttaattcatttgatcaattaaaaaattcagttttaatacttatagacgtattaaataattttattccaaataaaaaaagaatgtatgaattggctaatattggttatacaacatcaacggatcttgcagattatattgttaaattttataatttatcatttagaaaagcatatcaaattacttccaaaattgtaaattatgcagaaaataa

SEQ ID NO: 288136 - DNA, 723 bp, Unknown
  Bacterial polypeptide expressing nucleotide sequence isolated from the Sargasso Sea
aaaagcctactaataattcaattgatacagtatctgatagagattttgttttagattttttatacaatgtttcaatatgttcaatgcatatttcaagaatttctgaagaaatgattatttggaactctgatcaatttaattttataaaactaaaagataatttgacaactggctcctctattatgcctcaaaaaaaaaatccagatacattagagtatttaagaggaaaaacaggttttagctatggttctttaatttcaatgatgacaatagtgaagggactaccgttatcttattttaaagatttgcaagatgacaaggaattagtttttaagtcgtttgacacattgaaaaatagtttgatattatttgatgaagttttaaaaggactaataattaacaagcaagaaatgcttaaaacagccggcaaaggttatacaacagctactgacctagctgacaacatggtgaaaaatttaaatattactttcagagaagcatataaaataacctcaaaaattgtaaatttagctgaaaaattaaatttaacatttgaagaattaaatatagatcaaattaaaagtatagataaaagactaaattatgaaattttggaacaagcagagttgaaaaattcagtcaactcaaagaaatcttatggaggaacatcttttgaaaacattaggaagatgataaataaacttaaaaaagaaattaaatgaa

SEQ ID NO: 288137 - DNA, 910 bp, Unknown
  Bacterial polypeptide expressing nucleotide sequence isolated from the Sargasso Sea
gaaattaacattttattaaataccgttattaaaagtgtaataagagcagcagaaaaaaatatacatactcttatgccaggatttactcatttaaaaaatgctcagccagtttcatttggccattatttgatggcttatgttgaaatgtttaaaagagataaaaaaagattcataaataatctagacagtttaaatgaaaatcctttaggggttgctgctttaactggaacctcttttaatattgatagaaattacactacaaaaaaacttggatttacaaaaccaactaataactcaatagatacaatctctgatagggattttgtgttagattttctttactccacttcagtctgttccatgcatatttctagaatagcggaggaacttatcatatggaactctgatgctttcaagttaataaatttatcagataaagttgtgactggttcttcgataatgccacaaaaaaaaaatccagatctattggaatttttacgaggcaaatctggaattacttatggtaatttgttttctatgcttacagttttaaaaagtttacctttatcttactacaaagatcttcaagacgataaagaaattgtttttaaatccaatgatacactacaaaattgtttaaagatacttgatgaaattcttaaaaattttacgccaaataaaaaacaaatgatagaattagctaacacaggatatttgactgcaactgatcttgcagattatctcgtaaaaaatcactcaatgccatttagaaaagcatacaaagtaactgctaatattgtgaactttgctgaaaagaagaaaaaaaatctcgatcaattaacactggctgaacttaaaaaaattgaaccaaaactatcaaatgatgtattaaaagtgtttgatttaaaga

SEQ ID NO: 288138 - DNA, 567 bp, Unknown
  Bacterial polypeptide expressing nucleotide sequence isolated from the Sargasso Sea
catgagtaaaaataaaaacaataaaccaatttggaatacaagaattaaaaaagtttctacaaacctttttaaaaaggttggtagctcactgtggatcgacaaaagattgtttaacgaagatattgaagcttctgttatccatacagaaatgttgtttaaacaaaaaataattaactttaaaataaaaaataaaattatttggggattaaatagaataaaaaatgaaatcataaaaaaaaaattcttatttgatgaaagtcttgaagatatacacatgaatatagaaaatagactttttcaattaattggggaagatgctggatttgttcatattgctagatcaagaaatgaccaggttattactgactttaaaatttggttaaaaaaaggaactaatgaaataattaaaagtttaaatcttacaaataaaactattttaagtattgcaagtaaaaatattgaaacaataatgcctggctttactcatctaaaaaatgcacaaccagtttcatttgcacactatctattagcttatgtagaaatgttttctagagacaaaaaaaaatt

SEQ ID NO: 288139 - DNA, 658 bp, Unknown
  Bacterial polypeptide expressing nucleotide sequence isolated from the Sargasso Sea
cgccgccgccgcgctgtgtctgacccatatgtctcggtggtgtgaggagatggtgctctggtcgtctcagcagtttaatttcatcacattgccggaccgcttttgtaccggctctagcatcatgccgcaaaagaagaatcccgacgtgcctgaattgattcgcggcaagaccgggcgcgttaatgggcatctgatatcgctgttaacgctcatgaagggtcaaccgttggcatacaacaaagacaatcaagaagataaagagcctctattcgacgctgttgataccctgggtaacagcctgacggccctcatcggcatggtccccaatatcgaagcgaataagagcgtcatgctgcaggcgacactgcgaggtttcaccaccgccacagaccttgctgactacctggtgcgcaaaaacgtgccgtttcgcgatgctcatgacatggttggacaagccgtgcagctggccgtgagtcaaggcaaagccttagaggagttgagccttgctgaactcaacggcaatgagacgaacgtgattgagcaagacatctatgaggtactcacgcttcaaggctctattgcatcgcgcgaccatttgggcggcacagcgcccacccaggtgcgcgccgccatcgctcgggccaggctgcaaatttga

SEQ ID NO: 288140 - DNA, 575 bp, Unknown
  Bacterial polypeptide expressing nucleotide sequence isolated from the Sargasso Sea
attgattaaatctcttttaaaaaaagcatctggaaatattgacactgtcatgcctggctttactcatttaaagaatgcacaaccaatttcttttgcacattatctgctcgcttatgttgagatgctttatagagataaaaaaagatttaaaaataatataagtttaattgatgaatgtcctttaggatctgcagctttggctgggacctcattcaatattgatagaaattatactgctaaaaaacttggttttaaaaaacctactagtaattcaatcgactcggtttctgatagagattttgccatagactttttgtctgcatctgctacttgcgcaatgcatttatctagattggctgaagattttataatctttaattcagaagcttttagttttattgaattcactgataaggttcttacaggatcgtcaataatgccccaaaagaaaaatccagaccctgctgaattaataagaggaagaacggcaataaattacggaaatttaaattctatgcttacaatcatgaagggtctaccaatttcttattacaaagatttgcaagatgataaag

SEQ ID NO: 288141 - DNA, 903 bp, Unknown
  Bacterial polypeptide expressing nucleotide sequence isolated from the Sargasso Sea
tatggcaaaagtttggagtaaaaggtttgataatgcacttgacccttttattgaaaagtttaatgcctcaattggttttgatagaaagcttattttagaagatttagattgctcgattgctcatgcaaaaatgcttggcaaaactaaagttttatcctcttctgaagctttgcaaattattaatggattagaatcaataaaagttgagtatttggagggtaaatttagtcctggcccaccttctgaagatattcactattgtatagaagaaaagcttataagtttaattggtgaaaccggaaaaaaattacatacaggtagaagtagaaatgatcaagttggcacagatatacgattgtggctcagaaaagagattgataatattgaaattttaataactgatttacaaaaatctttcttacatcttgcgaaatccaatatttataccttaattcctggatatactcatatgcaaagagctcaacctttatctttggcccatcatttattggcttatatagaaatgctccaaagagaccgtgaaaggtatacagaagtacgctcaagagttaatatttctccgttaggagctgcagctttagctggaacaaaaataaaaatagataggcactttacagctgcagaattgggttttgaaaagatttataaaaacagtattgatgcagtaagtgatagagatttttgtatagagtttgtttctgcctctgcgttgttgatgtctcatttaagtaaaatttcagaggaaataattttatgggtaactgatgaattttcttttgcaaaattaacagataaatgtgccacaggaagcagcttaatgccgcagaaaaaaaatcctgacgttccagaattgataagaggtaagacaggaagagtgtatgg

SEQ ID NO: 288142 - DNA, 595 bp, Unknown
  Bacterial polypeptide expressing nucleotide sequence isolated from the Sargasso Sea
gatgaaaaaaaatccgtcaagaaatacaaatttaaagaacggtccatcgaagttattagaatctattaataactcgatagatattgatcaaagaatgtacaaagaagacatttatggctcaattgcacatgccacaatgcttggtaaacaaaaaattatatcaaaaaaagatcaaacaaaaattgttaatggcctgaaagtcattttacaaaatattaattctggtaaaattcatttcgaaagtaagctagaggatattcatatgaatattgagtctttgctcttcaaacaaattggaaacactgcaggaaaattgcatactgctagatcacgtaatgatcaggtagtaacagactttaagctttggataagaaataatagtattaatcttgataagcatattcaaaacttacagaagagtcttattagtgttgctaaaaaaaatactgttactgtaatgcctggctatacacaccttcaggtagcacaaccaatatctttagcacaccactgtcttgcctatgttgagatgatgggtcgagacagatcaagactaaaggattgcatacaaaggttaaatgaaagtcctcttggc

SEQ ID NO: 288143 - DNA, 797 bp, Unknown
  Bacterial polypeptide expressing nucleotide sequence isolated from the Sargasso Sea
caggttcgaggaagccacatcgccatttgttgagcgattcacctcttcggtttcatttgataacagcctctatcaatatgatattgacgggtctattgcgcacgcaaaaatgcttgaaaaagtcggcacactaacaaaaaaggaagtgacagacatcatagacgggcttgaggaaattcgtgaagaaataagcaatcaaaattttgattggtctaccgagcttgaagatgtccacatgaatatcgaatctgctctaacaaaaaaaataggtgaggctggcaaaaaacttcatacgggaaggtcgagaaatgatcaaattgcaacggaccttagattatatgcaagaagccaaatagatgagatttgcaaattaatcaccgattttcaaagagcgatagtaaatttggctgaaaaagaagctaacactattttgccaggatttacgcatctccaaacagctcaacctgtaacatttggccatcatatgatggcttggtttgaaatgctgagtagagattttgatcgctttcaagattgtaggaagagagtcaatcaatctccacttgggagtgcagctctagcaggcacaactttccccatagacagaaactatacttcagaaatgctggattttgattccccatgtgctaactctctagatgcagtcagtgatcgagactttgttattgagttcgcttcaactgcaaccttattaatgacccacctgtcgaggttttcagaagaaatagtcttgtggacttccgctcactttgattttattgacctcccccgatagc

SEQ ID NO: 288144 - DNA, 820 bp, Unknown
  Bacterial polypeptide expressing nucleotide sequence isolated from the Sargasso Sea
atgaaaaaaaatccgtcaagaaataaaattttaaaaaaaggtccttcaaagttattggaaactataaataattccattgatattgatcaaagaatgtacaaagaagatattgaaggctctatagcgcatgctacaatgttgggtaaacaaaaaattatttcatcaaaagatcaggccaagattgtcaaaggtcttaaagtaattttgcacaatattaattctaataaagtcagtttcaaaagtgagctagaagatgttcatatgaatattgaatccttgcttttcaaacaaataggtaaaactgctggcaagttacatactgcacgttcacgcaatgatcaagttgttaccgactttaagctttggataagaaataatagtatagatcttgataggcacattcaaaaattacaaaaaacccttattaatatagctaaaaaaaatatatttacagcaatgcctggttatacgcacctgcagattgcacaaccaatatctttggcgcatcactgtcttgcctatgttgaaatgatggggcgagatagatcaaggttaaaagattgtatggaacgattaaatgaaagtcctcttggctctggagctttggcaggaacttcatttcctattgatagaaatttaacagcaaaattattaaaattttctaaaccatctgcaaatgcgcttgatagtgttgcagatagagattttgctgttgaatttatatttgttatatcacttgttagtacccatttatcaagaatggctgatgaaattattctttggtctaatcagcaatttaattttattaaattgcccgatg

SEQ ID NO: 288145 - DNA, 535 bp, Unknown
  Bacterial polypeptide expressing nucleotide sequence isolated from the Sargasso Sea
gatgacggacgataagacaaaaccgccggccgaggccagttccatctggggcgggcgcttctcctccggctccgacgtggtcgtggaagcaatcaacgcctccattgattttgacaagcggatgtatacccaagatattgtcgcgtcaatggcgcacgcccgtatgttggcatcccaggaaatcatttccgccgctgatgctgataccatcgtgtcaggcctggaaaccatccggggcgagatcgaaaacggtgatttccagtttagccgggcgctcgaagacatccacatgaacgtggagagccgcctttccgcattgattggcgacgcggccgggcgcctgcacacggcgcgttcccgcaacgatcaagtggccaccgatttccgtctctgggtgcgggacgccctagatcacttggatagggaaatgaaggaactgcaggccgcgcttttacgacaggcccacacccacgctggctccgtaatgcctggtttcacgcatctgcagccggcgcagccgggacgctcggtcatc

SEQ ID NO: 288146 - DNA, 703 bp, Unknown
  Bacterial polypeptide expressing nucleotide sequence isolated from the Sargasso Sea
gcagtggctgatcgcgaccttttcgtcgagttcgccggggcttgttcgatttgcggcctgcacatctctcgttttgcggaggacttgatattgtggaattcaagtgagtttggattcgtggaattacctgaatcctttactaccggatcgtctctgatgcctcagaaaaagaatccggattcacttgaattgcttcgaggaaaaacggggaggctgattggaaaccttcagtctctatacgtggcaatcaagggcttgccgctcacctacaacagggatttgcaagaagacaagcccccgatcttcgattcattcgaccagttgggcatgggccttgccgttcttgccggaaccattgacggcatgtcgatgaacgagagaacttgtcgcgaagctgcctcagatccagctttgcttgctaccgaccttgccgattatcttgtggagaaaggcgtacctttccgtgacgcgcaccatgcggtgggttcacttgtcgcctgtgccgaggaacaaaaaacaagcatattagaacttacggacgaaatggttcggtccgcacatcctgcctgcgaaaaattggccgacgactggcgagatgttttcgacttgcagcgagccttttcaatgcgagaaaaaccaggtatgcccggcccggggcaagtatcttccagaattcttcactgggagcgactcctcggctgaa

SEQ ID NO: 288147 - DNA, 980 bp, Unknown
  Bacterial polypeptide expressing nucleotide sequence isolated from the Sargasso Sea
aaaaaagaaatcgaaaataacaaattttgtttttaataaaaaatttgaagatatccacttaaatatagaaaaaagactttttgcaattattggagaagatgcgggttatttgcatatagcgagatctagaaatgatcaagtaattactgatttcaaactatggattaaaaaagcttcaaacgaagtaattactaatttagataatttaattaaaagttttttaaaaaaagcagaaaataatatccatacaattatgccaggttttacccatctaaaaaatgcacaacccatttcatttgcacattatttgctagcttatgttgaaatgtttaaaagagacaaaaagaaatttaaaaataatattaattatattaatgagtgccccttaggagcgggagcattggcaggaacttcatataaaattgacagaaattttacatctaaaaaactaggatttgctaaaccaaccaacaactccattgattctatttctgatagagattttgctttagattttctatcaacatcatcaatttgtgcaatgcatatttcaagatttgctgaagaattaattatttggaattctgatatattcaaacttattaaacttgatgataaaatgttaactggttcttcaataatgccacaaaaaaaaaatcctgatccagctgaattaataagaggaagagctggaaaaaattttggcgcacttcaagcgatgctaacaactatgaaaggtttgccgctatcatactacaaggacatgcaagaagataaagcattggtatttaatagttatgatactattttacaatcaatcatcataaccaatgaacttgttaaaagtttaaaaccaaacaaacaaagaatgcttgatttgtcaaatgaaggttacactactgcaacagattttgctgattactttggtagaaaaataaattatctttcagagaatcttataaaatttcagctaaattggt

SEQ ID NO: 288148 - DNA, 604 bp, Unknown
  Bacterial polypeptide expressing nucleotide sequence isolated from the Sargasso Sea
tttgcttgaggaaattaattcttcgattgatgtggatcagcgtcttttttttgaagatatagaagtatcaattgctcacacaacaatgctagctaaacaaaaaattatttctaatcatgatgaaaaaaaaattattaaaggtttaaaggaaataataaaagattttaaaaatggaaaaataaattttaacaaaaaatatgaagatatacatatgaatgttgaaatgcttttacataaaaaaattggaaatatagctggaaaagtacatactgctcgctcaagaaatgatcaggtagttacagattttaaattatggataaagaaaaatggatttgaattagacaatataataaaacaatttcaaaaaacacttattaaaatctcaaaaaaacatattgatagcgttatgccaggttatacacacttacaagtagcacaacctatttcacttgctcatcattgtctagcttatgttgaaatgtttggaagagatagaagtcgtttaaaaaattgtttagatttactaaatcaaaatccacttggagctggtgctctagcaggaacatcgtttccgattgatagatatttaactacaaagcttaaa

SEQ ID NO: 288149 - DNA, 718 bp, Unknown
  Bacterial polypeptide expressing nucleotide sequence isolated from the Sargasso Sea
atacctacaaataattctattgatacagtttcggatagggattttgttttatattttttatacgcttcatctgtgtgtgctatgcatatttctagaattgctgaagagttaattatttggaattctgatggttttaacttgatcaatttatctgataaagttgttactggatcatcgataatgccgcaaaagaagaatcctgatcttttagagtacttgcgtggaaaatcaggaagcgcttatggaaatttattttcgatgcttactattttaaaaggcttaccattatcttattttaaagatttgcaggacgataaggagattgttttcaagtctaacgacaatctaaataattgtttaaaaattttcgatgaaatactaaaaaattgtaatccaaataagagtaaaatgttagaacttgctaattctggatatattacagcaactgatttagctgactatcttgtgaaaaatcactcaatgtcttttagaaaagcatatcaaaaaactgctgctgtagttaattttgctgaaaaaagaaaaaagaaattagatgaattgactttagaggaattaagaaaaattgaacctcaacttaaagatgacgtattaaaagtatttaatttaaaaaattcaattaattcaaaaaaatcttatggcggaacttcttttgataatattaaaaaaatgataatgaaatataaaaaagaaaaatgat

SEQ ID NO: 288150 - DNA, 928 bp, Unknown
  Bacterial polypeptide expressing nucleotide sequence isolated from the Sargasso Sea
catatgaatatgaaaaaaagactttttcaaattataggtgaagaggcaggatatattcatactggccgttcaagaaatgatcaagttataacagattttaaaatttggataagatcctcaattaaagatattaatatgttaattgataaaattatttatagcaccttaaacttagcatcaaaaaatatagatactataatgcctggatttactcatcttaaaaatgcgcaacccatttcttttgctcactatctaatggcttatatagaaatgtttgaaagagataaaaaaagatttcatcatactctaaatattcttgatgaaaatccattaggcgttgcggctttgacaggaacttctttcaatatagacaggaattatacaagtaagaaacttggatttcaaaagccaactaataattcaattgatacagtttctgatcgagattttgttttagattttttatacgatgtctcagtctgctcaatgcatatttctcgaatagcggaggaattaatcatatggaactcagatggttttaaactaataaatttatccgacaaaatagtgatgggctcatcaataatgcctcaaaaaaaaaatcctgatcttcttgaatatttaagaggtaaatcaggaagtgcttatggcaatttattttcaatgttaacaatattaaaggggcttccattatcttattttaaagacctccaggatgacaaaaaacttatttttgactcaaatgatatactagtaagttgtcttaaaatattaaatgaaattttaaagaatcttaaccctaataagaaaaatatgttagagctagcaaacgttggttatattactgcaacagatctagcagattattttgttagaaatcattcattatcatttagaaaagcatatgagaaaacagcctcaatagtaa

SEQ ID NO: 288151 - DNA, 951 bp, Unknown
  Bacterial polypeptide expressing nucleotide sequence isolated from the Sargasso Sea
aaatatgaattagaagacattcatatgaacattgaatcacgcctgactgaactcactggtgacattggagctaagcttcatactgggaggtctagaaacgaccagatagctttggatttacgtctttacactagagatgtaattaaagagacggtgaacaaactaaatgctgttcagaaagcgatagttgagctttgcgaaaaaaacatagatgtgattatgcctggatatacgcatttacagagagcgcagccagttttattcgcgcatcacatgcttgcatatttcaatatgttccagcgtgatatagagcgttatcaagatagcctaaaacgagtaaacgtatgtcctctgggaagcggagctattgcaggagttacctataatacagatagagaatgggtagcaaaagaacttggatttgattctataacaactaacagtatggatgcggtttctgaccgtgattatgtgattgaactgagttcggcagcttcgattctgatgatgcatttttcgagattgtcagaagaaataattctttggaacagccaagaatttggcttcataagattgccagatcagttcgtgactggcagcagtatgatgccgcagaaaaagaatccagattttgctgaattagctagggggaaaaccggccgggtgtttggtaatttattcagaattttgaccattttgaaaggactgccattaacttataaccgggaccttcaagaagataaagaaggattctttgacactatagatacggtattagcaactttagatgtttttgcagggatgattccggctatggagattaatgttcaaaatatgaacgcattatctgaatcttcggaaatgctagctactgatttagctgattatttagtgaataaagggaccccttttagaattgcttataatgcagttaaagatttgtgtcagtat

SEQ ID NO: 288152 - DNA, 724 bp, Unknown
  Bacterial polypeptide expressing nucleotide sequence isolated from the Sargasso Sea
attaaaaaaacctacaggtaattcagttgatacagtttcagatagagattttgttttagattttctttatgcaatctcggtttgttcaaatcatatatcgagatttgctgaggaatttattttatggaattcagatgcattcgatttaattaaattaaaagataaagttgttactggttcctcaataatgccacaaaaaaaaaatccagatacacttgaatatttaagaggaaaaactggaaatgtttatggaaatttattttctatgcttacaatactaaaaggtttacctttatcatattttaaagatttacaagatgataaagaattagcttttaaatcttttgatcaaattaaaatttctttacagattatgagagagattctgaataattttatagtcaataaaaaaaaaatgatacatctagctgaacagggttatactactgctacggatcttgccgattatattgtaagagaacacaaatatccatttagaaaagcgtattttataacctcaaaaattgtaaatttggcagagcaaaaaggtaaaaaacttgatcaactaacagtcccagaaataaaaagtatcaataaaaatcttaatgaaaatgtacttaaattaattactctagaaaattcagtaaaatcaaaaaaatcttatggtggaacttcttttgaaaatataaagaaaatgataaaaaaatataaaaaacatgtttaa

SEQ ID NO: 288153 - DNA, 472 bp, Unknown
  Bacterial polypeptide expressing nucleotide sequence isolated from the Sargasso Sea
atgacaaaaaagaaatctacatcaaatgatgccacaaaatccagtatctggggtggccgttttgcatctggcccctcgcaactaatgcaggatattaactcctctatcagctatgaccagcgactataccaacaggacatcgccggatcaaaggcacatgcaacaatgctggccgcctgcggcatcatcacgccgatagattgtgaagcaattcacaaggggcttgggcagattgcgattgaaatcgaacaaggaaaatttgtcttttcagattcgcttgaagatattcacatgaatattgagtcacgccttgccgaattgattggcgaaccagcacaccgtctacatacggcacgctcgcgtaacgatcaggtggcaacagatttcaaattatgggtgcgcgatgcaatagatgcaattaatcacgcactggcagatatgcaaattgcactgatcgagaaagccgcaagcc

SEQ ID NO: 288154 - DNA, 871 bp, Unknown
  Bacterial polypeptide expressing nucleotide sequence isolated from the Sargasso Sea
gcggactgggtgatgccgggcttcacccatcttcaggccgcgcagcctgtgacgatcggtcaccatctgctggcctatgtggaaatgttcggacgcgaccggggccggttcgccgatgcgcgagcacggctgaatgaatcgccgctgggcgcaggtgcactggcgggcacgtcttttcccatcgaccgggaggcgacggcgaagacgctgggtttcgaccggcccaccgcgaattcactggattcggtctcggaccgggattttgttctcgaatacctgtcggctgcggcgatctgcgccggccatttgtctcggctgggcgaagagctcgtgatctggtcgtccgcccagttccggttcgtacggttgtcagattcgttttccaccggctcatccatgatgccgcagaaacggaacccggacgcagcagagttgatccggggcaagacgggccggattctgggagcgttcatggccctggcgaccgtgatgaagggcctgccgctggcctattccaaagacatgcaggaagacaaggaacccgtgttagatgcagtcgaaacgctgatggtttgcctggccgcggcagcgggcatgacagccgatatggcattcgaccgtgaacggctggcggctgctgcgggcgaaggttacaccaccgccaccgatttggccgactggctggtgcgggaagctggcgttccgttccgagaatcccaccacatcatcggtcgcgtcgtggcgctggccgaagaaaagggctgcgggctgaaagatctctcaattgcagatctgcaggccatcgatgaccggattgatgacaaagtctttaatgtgctgggggtggacaattccgtccgcagccgcacca

SEQ ID NO: 288155 - DNA, 549 bp, Unknown
  Bacterial polypeptide expressing nucleotide sequence isolated from the Sargasso Sea
tttgaaagttacaacttcaaatctccttgattcaattaatagctcaataaatattgataaaagattatacaaggaagacatcgaaggatctattgctcattgtaaaacattaatgaaatcaaaaatcataaatctcaaagatggtaaattaataataaaaggtcttttagagattgaaagagaaatagaaaaacaaaaaataaagtttgatattaaattagaagatatccatatgaatattgagtcaattcttcataaaaaaattggtaaagtatctggaaaacttcacacagcgagatcaagaaatgatcaggttgttactgatttaaaattatggattaaaaaaaatattttgtttttagatgatgaattaaaaaattttcagaaaacactaattaaaatttcaaaaaaaaatgtaaatacagttatgcctggatatactcatcttcaagtagcgcaagcaatttctttaggccatcattttatggcatatgttgaaatgattggtagagataggcacagactaaataactgctttgaaagaactaa

SEQ ID NO: 288156 - DNA, 873 bp, Unknown
  Bacterial polypeptide expressing nucleotide sequence isolated from the Sargasso Sea
tcaattgctcatgttgaaatgctttttaagcaaaaaataatttcatttaaaataaaaaataaagttatttatggactaacaaaaattgataaggaaattacaaataataaatttgagttcaataaaaaatatgaagacattcatatgaatatcgaaaaaagacttttccagattataggtgaggaagctggctatgttcacactgcaagatcaagaaatgatcaagtaattactgactttaaaatttggatgaaaaattcaactcacgaaataaataataatattaataaagttattaagagcaccattaagttagctgaaaaaaatgttgagactataatgcctggttttacacatcttaaaaatgcccaagctatctcttttgcacattatttaatgtcttatgtagaaatgtttaatagagacaaaaagagattttctaataatttaaacagtttaaatgaaaatcctctaggtgttgcagctttagcaggaacatcatttaatatagatagaaattatacaaccaaaaaacttggttttaaaatacctacaaataattctattgatacagtttcggatagagattttgttttagatttcttatatgcttcatctgtgtgtgctatgcatatttcaagaattgctgaagatttaattatttggaattctgatggttttaacttgatcaatttatctgataaagttgttactggatcatcaataatgccacaaaaaaagaatcctgatcttttagagtatttgcgtggtaaatcaggaggcgcttatggaaatttattttcgatgcttacaattttaaaaggtttaccattgtcttattttaaagatttacaagacgataaagagattgtt

SEQ ID NO: 288157 - DNA, 909 bp, Unknown
  Bacterial polypeptide expressing nucleotide sequence isolated from the Sargasso Sea
tcaattcatgtcgataaaagactttataaggaagatatttttgcatctattgttcacacaaaaatgcttataaggcaaagtattattcctaaaaaagatggattaaaaataattaaaggacttaaaaaaatagaaaaagaaattgttaaaaataaatttaaatttaaagaacaatttgaagatattcatcaaaatattgaaaaaagattatttcaaataattggtgagtctgcaggttatttacataccgcgagatctagaaatgatcaggtagttactgattttaaaatgtgggtcaaagactcctctaaagatattatgaaaagtttaaatgggcttgttaatgaaatattaaaaaaagcagaaaaaaatattaatacagttatgcctggttttacccatcttaagaatgcacagccagtttcttttgctcactatttgcttgcatatgttgaaatgctaaacagggataaaaaaagatttgccaataatattaatttgatagatgaatgtccccttggatcagccgcgctagctggaacttcttttaatatcgatagaaaatttacagcaaagaagcttggttttaaaaagccaacaaataattcgatcgactcagtatcagacagagattttgctatagatttcttatcagcagctgcaacttgtgcaatgcatttatctagattggcagaagattttataatttttaattcagaagcttttggttttgttgagttttcagataaagtcttaactggttcatcaataatgccgcaaaaaaaaaatcctgatcccgcagaattaataagaggcagaacggcaattaactatggaaatttaaattcaatgctaacaataatgaaggggctaccgatatcttactataaagatttacaggacgataaa

SEQ ID NO: 288158 - DNA, 654 bp, Unknown
  Bacterial polypeptide expressing nucleotide sequence isolated from the Sargasso Sea
tatgacaaataaaaataagacagtttggtcaggcagatttaaaaactctacttctaaatcatttcaaagaattggggcttctatcaatgtagataaaagactgtacgagcaagatatctttgcctcaaaaatacatacgcagatgctaataaagaaaaagattatacctgcaaaagagggtaaaaaaatacttaaaggattggataaaattagggggcaaattaaaaaaggtagatttgtttttaaggaaaagtttgaagatattcatttaaatatcgaaaaaaaattattcgaaataattggtgcttcagcaggctatatgcacactgctagatctagaaatgatcaggtagttaccgattttaaactttgggtaaaggactcatctttaatcttaatcaaggaattaaattctttaatgaaaaatatagtaaacaaagcagatagaaatattggcactgtaatgccaggttttacgcatcttaagaatgcacagccagtctctttcgcacattatcttttagcttactatgaaatgtttaagagagataaacaaagatttttaaataatttagaattgattgacgagtcgcctttaggaacagctgctttatccggaacttcttataatatagacagaaattttacgtctaa

SEQ ID NO: 288159 - DNA, 943 bp, Unknown
  Bacterial polypeptide expressing nucleotide sequence isolated from the Sargasso Sea
agaattagaagacatacatatgaatatagagaatagactacatgaaataattggagaggatgctggctttgttcatacaggaagatcaagaaatgatcaggtaattactgatcttaaaatatggatgaaaaaatcaactctagatctaataaagcttttagaaaatctaaataaaaattttttaaaagttgctgaaaaaaatattgaaacgttaatgccaggttttacgcatcttaagaacgctcagccaatatcttttgcacattatttgttggcatattttgaaatgtttaaaagagataaagtaagatttactaataatttgaaaagcctaaatgaaaatcctctgggtgttgcagcttttgctggtacaaattttaatatcgatagattttttacaactaaaaaattaaaatttgaatatccaacaaataattcaatagatacagtttctgatagagatttcgttttagattttttatacaccgtttcaacatgttcagttcatatttcaagaattgccgaggaatttataatttggaattcagatgcatttaaattaattaaattaaatgacaaggttgtaacaggttcttctattatgcctcaaaaaaaaaaccctgatcctttggaatttttgagaggtaatagcggatcaagttttggaaacttattttctatgcttacaattttaaaaggtctgccactatcatatttcaaagatatgcaagatgataaaaaactagtgttcaattcttatgatctattaaaaaactcaattcaggttcttattgatattctaaataatttttctccaaataaaaaaagaatgttagaactggctaatgaaggatttatattgtctactgatttagcagattaccttgttcaaaatcataatttgccatttagaaaagcatatatggttactgcaagaattgtt

SEQ ID NO: 288160 - DNA, 613 bp, Unknown
  Bacterial polypeptide expressing nucleotide sequence isolated from the Sargasso Sea
atgaatatagagaatagactttttgaacttattggtaatgatgctggttatttacatacagcaagatctagaaacgaccaagtggttactgatttaaaactatggttaaaaaaatccacagtagaaattgatagtttattattaaagctaataaaatctttaatcaaaatttcagagaaaaatatattttctatcatgccaggttttactcatcttaaaaatgctcaaccaatttctttagcacactattttttatcaaacgttgaaatgttcaaaagagatagatttagattttcttctaatatgaaaagtttgaaccaaaatcctttgggggctggtgctttttctggaacatcttttaatattgatagatggtataccactaagaaactgaaatttgtagaaccaacaaataactctttagatacagtatctgacagagattttgttttagattttttgtacagttcatctatatgctcaatgcatatatcaagaattgcagaagagttaataatttggaattcagaccaatttaaattcattagcttaaaagataatattgtaacaggctcatcgataatgcctcaaaaaaagaatcctgatactttag

SEQ ID NO: 288161 - DNA, 569 bp, Unknown
  Bacterial polypeptide expressing nucleotide sequence isolated from the Sargasso Sea
tgaaattatcggagatgaggctggctttattcataccgcgagatctagaaatgatcaaatcataacagattttaaaatttggataaaatcatctaatgaaaaaatccacaaaaatttgaacagagttattaaaactactctaaaagtggctgagaagaatattaaaactatcatgccaggtttcactcatttaaaaaatgcacaaccaatttctttaggacattatttaatggcgtatgtagagatgtttataagagataaaaaaagattcattaataatttagaaagtcttaatgagaaccctttaggagtttgtgccttttcaggcacgtcttttaatatagatagaaattttacaacgaaaaaattaggttttaaaattccaacaaacaattcaattgatacagtatctgatagagattttgttttagattttttatatagttcatctgtttgttcactgcatatttctagaatagcggaagacttgataatattaaattcggatggatttaatctaataagtttatctgaacaaattgttactggatcttcaataatgcctcaaa

SEQ ID NO: 288162 - DNA, 960 bp, Unknown
  Bacterial polypeptide expressing nucleotide sequence isolated from the Sargasso Sea
tgaagatattcatatgaatatagaaatggaattacataaactgataggcgatactgcaggaaagttgcatactgcaagatctagaaatgatcaagtggctacagatttaaaattatggatttcagagtctataaaagatatatgtgcaagtttagaaactttacaaaagaatatagttaaaaaagccaatttacacgtttatacaattatgccaggacttactcatttacaatcagctcaaattgtaagttttgcacaccatttaatggcttattatgagatgctaaaaagagataagaaaagatttttaaataatctagctggacttaatgaatgtcctttaggatcagcagcattagctgggacttcttttccaattgataggatgtttacagctaaaaatttaggttttaaaaaaccaacttctaattcaatggatagtgtttctgatagagattatgctttagaatttttatcaaatattgctatttgtggttcacacttatcaagattaagcgaagacattgtaatatgggcaagtgaccaatttaattatgtttcattgtctgatgatttttcaactggtagttcaattatgccgcaaaaaaaaaatccagattctgctgaattagtaagaggtaaaatgggaagatttgcaggaaatttttttagccttttaactactattaaaggtttgccattaacttatagtaaggatttacaagaggataaagaaccaatttttgatagctttgataatctattgttggttttaaaagtgataaatgggataatcaacggacttaaaataaacaaaaatgaaatgtttaatgcttgtaaaaaaggtaatttaatggctacagacctagcggattggttggttataaattataatatgccgttcaggaaagcatataaaataacagcaaaaattgttggcttagctaataaaaaaacatg

SEQ ID NO: 288163 - DNA, 853 bp, Unknown
  Bacterial polypeptide expressing nucleotide sequence isolated from the Sargasso Sea
actgttttggtcaaatagacttagcaaaaacaattctagaagttttcaaagaattggatcttctataagtgtagataaaaggctttacaatgaagacattgaagcttctactgttcacgcaaaaatgcttatgaagcagaatattattccaaaaaaagacgggaaaaaaattattaatggattaaaaaaaataaaaaaagaaattgatagaaataaatttaaatttaaagaaaaatttgaagatattcaccagaatattgaaaaaagattattccaaataatcggggactcagcgggctatttacacactgcaagatcaagaaatgaccaagtcgtaacagattttaaaatttgggttaagtctgcatcggaagatataaataaaactctagatgaacttatgagatcaatattaaaaaaagcttcaaaaaatgttgatactgtaatgcctgggttcacgcatttaaaaaatgctcaacctgtttcttttgcacattatcttctcgcttacattgaaatgttaaatagagataaaaaaagatttaaaaataatattgacctaattgatgaatgtcccttgggttctgcagcgctcgctggaacttcatttaatatagatagaaaatttacagcaaaaaagcttggatttaaaaaaccaacaaataactctattgactctgtatcagatagggattttgctatagactttctatacgcagcagcaacatgtgctatgcatctttcaaggcttgcggaagattttataatttttaattctgaggcttttggttttgtagaattttctgataaagttctaactggttcttctataatgcctcagaaaaaaaatcct

SEQ ID NO: 288164 - DNA, 851 bp, Unknown
  Bacterial polypeptide expressing nucleotide sequence isolated from the Sargasso Sea
gaaaaaaataaagtaaaattttctaaaaaacttgaagatattcatatgaatatagaaagcttattattaaaaaaagttggtaaggttgcagaaaaattacatactgcaagatcaagaaatgatcaagtggttacagatttaaaattatggatcaaaaataatgcagaagaactcgataaagaattaaaaaattttcaaaaaacacttatcagtttgtcaaagaaaaatacttatacaattatgcctggctatacacatatgcaagtagcacaaccgattacacttgctcatcatctattagcttatgttgaaatgattggaagagatagatcacgacttaaagattgtttgtatcgacttgatgaaaatcctctgggatcagctgctcttgctggtacatcatatccaattaatagaacatatacaactaaagaacttggttttagagagcctactaaaaatgctatggatagtgtttcagatagagattttgccgttgaattcattttttctctctcattgattagtgttcatttatcacgactcgctgaagaaataattttatggtctaatcaacaatttaattttatttttttaccagatgaactttcaactggaagttcaataatgccacaaaaaaagaatcctgatggtgctgaacttgttagagcaaaatcaagtcttatgattggtaatttaagctctattttaaatattttaaaaggacttcctttgtcatatagtaaagatctacaagaagataaaaaacttatttttgattcatatgataatttaatactttccttgaaaataataaatgaaattttatttaaatcaaaattttatcagcc

SEQ ID NO: 288165 - DNA, 670 bp, Unknown
  Bacterial polypeptide expressing nucleotide sequence isolated from the Sargasso Sea
atttatttcctgtctctcgttgaccgccacccattttagtcgattcgcagaagatcttacaatctggacttctgatcagttcgattttgttagattgcctgaggcctttacctctggttcttcaataatgccacaaaaaagaaatccagatgctgctgagttggttagagggaaggttggacgtgttaacggtgcactgatttctatgcttaccgtgatgaaaggtttgccattaagttattcaaaagatatgcaggaagataaagagcagctttttgatgcctttgatacggtacttttaatgattaaagttatgactggaataatttcagatattacgcctaataagaaaaacctattaagcgcagcatctatgggatattcaacagcgacagatttggcagattggctaacaaaagagctaaatattccgtttagagattcccacaaaattacaggaagaatagtaagttatgctgaaagaaataatctcaaattgaacgaggttccgatagagtttatgcacaagctggatggaagcataactaaagatatttataaggtaatggaggttaaatattcggttgggtctcgaaaaagttttggaggaacatccccgagggaggtattgaaaagatgttctgactggaggataaaacttcatggctag

SEQ ID NO: 288166 - DNA, 691 bp, Unknown
  Bacterial polypeptide expressing nucleotide sequence isolated from the Sargasso Sea
catggcaaaaaataaaaacaaccaagcaatctggaatacacggataaaaaaaagtgcatctaatttgtttcaaaaagttggtaattcaatagatattgataaaagactttataaagaagatattcagggatcaattgctcatgttgaaatgctttttaaacaaaaaataatttcattcaaaataaaaaataaaattatttatggacttattaaaatagaaaaggaaattacaaaaaacaaatttgtttttaataaaaaatatgaagatattcatatgaatatcgaaaaaagactttttcaaattataggtgaagaagctggctatgttcacactgcaagatcaagaaatgatcaagtaattactgattttaaaatttggataaaaaattcaactaaagaaataaataataatattaataaggttattaaaagtacaattagactagccgaaaaaaatgtagaaaccgttatgcctggatttacacatcttaaaaatgctcaagctatctcttttgcacattatttaatgtcttatgtagaaatgtttaatagagacaaaaaaagattttccaataatttagacagtttaaatgaaaatcccttaggtgttgcagctttagcaggaacatcttttaatatagatagaaattatacaaccaaaaaacctttggttttaaaatacctacaaata

SEQ ID NO: 288167 - DNA, 854 bp, Unknown
  Bacterial polypeptide expressing nucleotide sequence isolated from the Sargasso Sea
tggatcttctattgaggtagataaaaggttgtacaaagaagatatattagcatccgtttcacatgctgaaatgttatacaagcaaaagattataactatcaagattaaggataaaattttatggggattgaaaaaaatccaaaatgaaattgagagaaaaaacttcaaatttgacgaaaatttagaagacattcatatgaatatagagaatagactttttgaacttattggtaatgatgctggttatttacattcagcacgatctagaaacgatcaagtagttacagatttaaaactatggttaaaaaaatcaacagtagaaattgatggtttattattaaagctaataaaatctttgatcaaaatttcagagaaaaatatattttctataatgccaggttttactcatcttaaaaatgctcaaccaatttctttagcacattattttttatcaaacgttgaaatgttcaaaagagatagatttagattttcttctaatatgaaaagtttgaaccaaaatcctttgggagctagtgctttttctggaacatcttttaatattgatagatggtataccactaaaaaactaaaatttgaggaaccaacaaataactctttagatacagtttctgacagagatttcgttttagattttttgtacagttcatctatatgctcaatgcatatatcaagaattgcagaagagttaataatttggaattcagaccaatttaaattcattagcttaaaagataatattgtaacaggctcatcgataatgccacaaaaaaagaatcctgatactttggagtttttaagaggaaaaactggatcaatttttggaaatctttttt

SEQ ID NO: 288168 - DNA, 880 bp, Unknown
  Bacterial polypeptide expressing nucleotide sequence isolated from the Sargasso Sea
aatgttatttaaacaaaaaattatatcatttaaaattaagaataaaataatttggggattaaatagaataagaaatgaaattattaaaaagaaatttagttttaattctaatcttgaagacattcatatgaatattgaaaataggttgtttgaaattattggagatgatgcgggatatattcatacagccaggtcaagaaatgatcaggtcattactgattttaaaatctggttaagaaattcaactagtgaaataattaaacaactaaatgatttaataaagatttttgttaataatgcagaaaagaatgttgaaactataatgcctggtttcacacatttaaaaaatgctcaacctatatcctttgcccactacttattagcttatgtagaaatgtttaaaagagataaaaaaagattcaaaaataatttggagaatttatcagaaaaccctcttggagttgctgcgcttgcaggaactagttttaatatagacagaatatatacatcaaaaaaattaaaatttaaaaatccaacaaacaattcaattgatacagtttcagatagagattttgtgttagattttttatattcagtatctgtttgttctactcatatatcaagactggcagaagaatttattatatggaattctgatgcttttaaattaattaaactacatgataaagtagttactggatcttctataatgccacaaaaaaaaaatccagatccactagaatacttaaggggaaaaacaggaattagctttggtaatttattttcaatgcttactattttaaaaggtttgccactttcttattttaaagatctgcaagaagataaagaacttgtatttaactcatttgatcaaataaaa

SEQ ID NO: 288169 - DNA, 591 bp, Unknown
  Bacterial polypeptide expressing nucleotide sequence isolated from the Sargasso Sea
agttcggatggtttaatttgatctacttatcggataaagttgtaacaggttcatcaataatgcctcaaaagaaaaatccagatctactagaatatttaagaggaaaatctggaagtagttatggtaacttattttcaatgcttactattctaaaaggccttccgctatcttactttaaagatcttcaagatgataaagagattgtttttaaatcaaatgatactttgattaactgtcttaaaatctttgatgaaatacttaaaaataccagtgctaataaaaaaaagatgcttgaactagcaagctctgggtacatcacagcaactgacttggcagattatcttgtaagaaatcattcaatgtcttttagaaaagcttatcaaaaaacagcagctatagttaatttggctgaaaaaaagaaaaagaaacttgatgaattaagtatagaggaattaaaaaagattgaaccaaagttaacaaatgatgttttaaaagtgtttgatttgaagaattctgttaattcgaaaaaatcttatggaggaacatcttttgaaaatattaaaaaaatgataatgaaatataagaaataaa

SEQ ID NO: 288170 - DNA, 754 bp, Unknown
  Bacterial polypeptide expressing nucleotide sequence isolated from the Sargasso Sea
cggattcattcatactgccagatctagaaatgatttaattgttacagacttcaaaatttggctaaaaaaagcaactaaagaaattattagtaatttagatcttacaattaaaaatattttaaaagttgcagacaagaatattgaaacaataatgcctggttttacacacttaaaaaatgcccaaccagtttcatttgcacactatctactagcttatgtagaaatgttttctagagataagaaaaaatttaatagtaatcttgataatttaaatgaaaatcctcttggtgtagcagctttaacaggaacttcttttaatattgatagattttatactacaaaaaaacttaaatttaataaaccaacaaaaaattctattgatacagtatcggatagagattttgttattgattttttatattcttgctcggcatgctcaatccatatatcaagaattgctgaagagtttataatatggaattcagatgcatttaatttaatttctttaaatgataaaattgttactggatcatctataatgccacaaaaaaaaaatccagacccattagagtttttaagaggcaaaacaggtggatcaattggtaatttgttttctatgttaactatattaaagggtcttcctctatcctacttcaaagaccttcaagatgacaaagaattagtatttaaatcttttgatcaattaaaaaactctttaattattttaaatgatgttttaaaaatttttttgtaa

SEQ ID NO: 288171 - DNA, 739 bp, Unknown
  Bacterial polypeptide expressing nucleotide sequence isolated from the Sargasso Sea
aagaaattacacacaggtagatcaagaaatgatcaagttgcaacagaccttagattgttccttatgagaaaaatagatctgattcttcatgaattaagctcgactcaaaagagggtaactaaattagctaaaagatatcataaagccttaatgcctggacttacgcatactcaaattgctcaaccaatcacttttggtcatcaccttttagcatggaatgagatgctagaaagagactattcaagatttacagaagtaagaaagagaacaagcattcttcctttaggttcttcggctctatcgggcaatagctacggattagatagagaaaaaatggctaaaagacttgggtttgattcagcttcaaataactctatggattcagtaagtgatagagactacgtaatagaatttctgtctgctgctagcctcttaggaatacatctgtctaggataaatgaagagcttatattgtggtcatcatcacaatttaactatattgaaatcagcgaagagttctgcactgggtcttcaataatgccgcaaaaaaagaatccggatattgctgaactcttaagaggaggttcctcaaagcctatttcttatttgatggggattctgactttaatgaagaatttaccgctttcctacaatagagacctacaagaagacaaatatttcttatttaatggtatagattactgtctaagcagcttagagatattttctctaatgattc

SEQ ID NO: 288172 - DNA, 526 bp, Unknown
  Bacterial polypeptide expressing nucleotide sequence isolated from the Sargasso Sea
gatgttgctgagttgggcagaggtaagacagggaggctcattggtaacctgatgtcgattctgacactgctcaaaggtcttccgacgagctataaccgggatctgcaagaagataaggaaccgcttttcgatacgattgatacgttatcactaactcttcccgcgctcaaaggtgcggtttccactgcgtcattctgtcctgagcgcatgtcagaagtgatggatgtccagctgctggccacggatttagctgactatctggtgcggcgtggtgttccgttccgcacgacccatgaagttgtgggaagactggtccggagtgcagaagaaaaaggtgtggcgctctctgagctgagcctagaggcattcactaccgagaacccggtctttaaagaagacgtttttgacgttttcgactgggaggcgtctgtagaggcgcgtcttgcacctggtggtaccgcgctcgagtcggtcgactcgcagcttcgtgatgtccgagcccagatcgagggattccgatcttaga

SEQ ID NO: 288173 - DNA, 631 bp, Unknown
  Bacterial polypeptide expressing nucleotide sequence isolated from the Sargasso Sea
catggcaaaaattaaaaacaataacgcaatttggaacaaacgaattaaagtaaaaccctcaactttgcttaagaaatttggaaactccataaatattgataaaagattgtatcgtaaagatattgatgcttctatagttcatgtagaaatgctttatagccaaaaaataataagcttaaaaattaagaataagatagtatggggattaaaaaaaattcatacagaaattaaaaataataaatttttttttaatgaagagcttgaagatatacatatgaatatagaaaatagattatcagtattaatcggagaagatgctggttatattcatactgcaaggtcaagaaacgaccaagttataactgatttaaaactttggatgatagatgcaacaaatgaaattttaaactgtcacaatcagataattaaaagttttctaaatctagcagaaaaaaatattaaaactattatgccaggttttacccatttaaaaaatgctcaacctatttcgtttgctcattatcttctagcatatgtagaaatgtttattagagacaaaaaaagacttaaaaataacttatatgatttaaatgaaaatccacttggtgcagcagcgttatctggaacatct

SEQ ID NO: 288174 - DNA, 877 bp, Unknown
  Bacterial polypeptide expressing nucleotide sequence isolated from the Sargasso Sea
gatgtccattttcgccgttgagcgccggctgattgagttgctgggcccactgggcaaaaagctgcacaccggccgcagtcgcaacgatcaagttggtaccgatctgcggctctggttgcgccagcaaattgatgccatcgatgcctctttgctgcgttttcagcgcgccctctttggccatgccgagcagcatctccataccctgattcccggttacacccatttgcagagggctcaacccctgtccttagcccaccatctgctcgcctacatcgaaatggctggccgagatcgtcaccgtctgcaggatgtacgccaacgggtcaatctctgcccccttggagcagcggctttggccggtacgccgttaccgatcaatcgccgacagaccgctgaggacttgggctttgaaggcctttatgccaacagcctggatgccgtgagtgatcgggatttcgcggtcgagttcagtgctgccgcctcactggtgatggtgcatctcagccgccttagtgaagaggtgattttttgggcgagcgaggaattcgcgtttgtccggctcacggatcgctgtgccacgggcagcagcttgatgccgcagaagaagaatcccgacgtgccggagttggtgcgcgggaaaaccggccgcgtctttggtcatttgcagggtttgctgacgatgatcaagggcttgcctttggcctacaacaaggattttcaggaagacaaagaggccctgttcgatgtggtgcggacgacccaggactgcttggaggcgatggcgatcttgatggaagagggcattcgtttccgccccgaacggctggagcaggcggtgaccagcgacttctccaatgccacagacgttgctgattac

SEQ ID NO: 288175 - DNA, 1390 bp, Unknown
  Bacterial polypeptide expressing nucleotide sequence isolated from the Sargasso Sea
catgagtaaaaataaaaacaatcaaccaatttggagtaatagaataaaaaaaagctctaaaaatttatttaaaagaataggcggatccttatcgattgataaaagattgtttaaggaggatattgaagcatcaatagttcatgtagaaatgttatttaaacaaaaaataattaattttaagataaaaaataaaattatttttggattaaatagaattaaaaatgaaattataaaaaaaaaatttatatttgatgaaaaccttgaagatatacatatgaatattgagaatagactttttgatttaattggtgaagatgctggatttattcatactgcaagatctagaaatgatcaggtaattacagatctaaaaatttggttaagaatcgcaactaatgatattattaaaaatatagatattgtcataaataacattttaaaaaatgcaaataaaaatattgaaacaattatgcctggatttacacatttaaaaaatgcacaaccaatatctttttctcattatttattagcatatgttgagatgttcactagagataaacaaagatttaacaacaatctagaaaatctttctgaaaaccctttaggtgtatctgctttaactggaacatcatttaaaattgatagattttatacaacgaaaaaactaaagtttaaaagaccaacaaaaaactcaatagatactgtttcagatagagattttgtggtggattttttgtcttcttgttcaatttgtgcagttcatatttcaagaattgctgaagaatttattatatggaattcagatgcattcaaacttattattttaaatgataaaatagttacgggatcttcaataatgcctcaaaaaaaaaatcctgatccgttagaatatttaagaggaaaatctgggggaatatttggcaatctattttctatgttaacaatattaaaaggcttgccattatcatattttaaagatctacaagatgataaggaactggttttcaattcctacgatcaattaaaaaattcattattaattctaaatgatatattaaaaaatttttcagttgataaaaaaagaatgctagagcttgcagaggaaggttttttaactgctacagatcttgctgattatatggttaaagaattaaaatatccatttagaaaagcttatttgcaaactgcaagaattgttaattttgcagaaaaaaataaaaagagacttagcgatcttaaaataaatgaaataaataaaattgaaccaaagttaacaatagatgtatttaaagtttttgatcttaaaaattcaataaattcaaagacctcatatggaggaacttcttttgacaatataaagaaaatgataagaagttataaaaaaaaataa

SEQ ID NO: 288176 - DNA, 1396 bp, Unknown
  Bacterial polypeptide expressing nucleotide sequence isolated from the Sargasso Sea
aatgaataaagtaagaaaaaataaatcagtctggggttctagaattacaaatgaaacctcatataattttaaaaaatttggggcttcaatagatgtagataaaagattatttagagaagacattgaggcatcgatagtacatgtagaaatgttatctaaacaaaaaattataacattaaaaataaaaaataaaataatttggggattaaaaaaaatatccaacgaaataaagaaaaaaaaatttaaatttaattcaagatatgaggatattcatatgaatattgaaaacagattatttgaaataattggagaagatgcaggttatttacacacagcaagatcaagaaatgatcaagtgattacagactttaaattatggttacgaaaagctaataaagaaattataaaaagcttaactactactataaaaattataataaacaattctgaaaaacatgtttatacggttatgccaggttttacacatttgaaaaatgcacaaccaatatccttggcacattatcttcttgcctatgttgagatgtttaatagagacaaaaagcgatttcaaaataattttttagatttaatggaaaatcctcttggtgtaggagctatatctggaacctcattcaatatagatagaaattatacttcaaaaaaacttaaatttacaaaaccgacaagaaattcaattgatactatttccgatagagattttgtggttgattttttacatgcttcatcactgtgctcaatgcatatttcaagaatttccgaagaatttataatttggaattcagaggctttcaaccttatttccttaaatgataaaattgtaactggatcttcgattatgcctcagaaaaaaaatcctgacccgcttgaattgattagaggtaaaactggtgcaatttatggaaatttattttcaatgtttactgttttaaaagggcttccattatcctactttaaagacctacaggatgataaaaaatttgtatttgatacttttgatcaattaaaaaattctattttagttttaaatgacgttttaaagaatgttttatttaataaaaaagaaatgaaaaatcttgctgaaaagggatatattacatcaacagattttgcagattatttagtaagggaacttaaatatccgtttagaaagtcatataaaatcacagcagaattagtaaattattgtgaaaaaaaaaaaaaaacgttaagcgaattaaatctcaatgaaattaagaaaatagaaccaagagtaaatgataatgttttggatgtttttaatttaaataattctgtaaattcaaagaaatcatatggaggaacttcttttggtaatataaaaaaaatgataagtaagtacaaaaaagaaataaaatga

SEQ ID NO: 288177 - DNA, 1396 bp, Unknown
  Bacterial polypeptide expressing nucleotide sequence isolated from the Sargasso Sea
tatgaagaaaaaaataaaatctatttggagtaccagaattaacaaaaaaacctcatctttattccaaaaagtggggtcttctattgaagtagataagagattatttaaagaagatatagatggatcaatagctcatgtggaaatgctttgtaaacaaaaaataatctcttttaaaattaaaaataaaataatttggggtttaaaaaaaattggaaatgaaattaaaaaaaaaaaatttatttttaaaactgaatatgaagatattcatatgaacatagaaaaaagattatatgatattattggcgaagatgcaggtttcatgcattctgctagatctagaaatgaccaggttttaactgatttaaaattatggatgagaaaatctacaaatgaactgattgaagtattaaaaaatttaaataagcattttgttaacttagctgaaaaaaatgtttatacaattatgcctggatttactcatttaaaaaatgcacagccaatttcattgggtcattatttgttagcatatgtggaaatgtttgacagagacttaaatagatttaattacaatttaaataatctaaatgaaagccctttaggtgttggagcattatcaggaacatcttttaatattgatagaaaatttacagccaaaaaactaaaatttaaaaaaattagcaataactctatagatacagtgtcagatcgtgatttcgcacttgattttctattttcttgtgcaacttgctcgatgcatatatctcgattatcagaagaatttattatttggaattctgatgcattcaatttcatatctttaaaagatagtttagtaacaggatcttccatgatgccacaaaaaaaaaatccagatccactagaatatttaagaggaaaaagtggcaacgcttacggtaatttattttcaatgtttacaatattaaaaggtttaccattatcatattttaaagatttacaagatgacaaaaacttaatatttaaatcatttgatgatctaaaaaattcaattttaattctgagtgagataattaaaaatattaattttaataaaaaaaaaatgcttcaattagcttctattggatatattacatcaacagatttagcagaacatattgtacaaaaattgaaaattccatttaggaaatcttatgaaattacagcaaaaatagtaaattatgcagaaaaaaataataaaacactagatcaaattagtataaaggaaataaaaaaaattgaaaaaaaattagactctgatgttttaaaaattttaaatctagaaaattcaataaaatcaaagaaatcatatggaggaacatcttttgaaaatgtaaatagaatgataaagaaatataaaaaaggaattaatgttaaataa

SEQ ID NO: 288178 - DNA, 985 bp, Unknown
  Bacterial polypeptide expressing nucleotide sequence isolated from the Sargasso Sea
cttgaatttattaataaaatctattttaaaaaaagctgaaaaaaatatagatacagtgatgccaggttttactcatttaaaaaatgcgcaaccaatctcatttgcacattatcttttggcttatgtcgaaatgctaataagagataaaaagagatttttaaataatttggagttaattgatgaatgtcctttaggatctgcggccttggctggtacttcatataatatagatagaaaatttacggcaaaaaaacttggttttaaaaaaccaacaggtaattcaattgactctgtttgtgatagagattttgcgattgattttttgtcagctgcagctacttgtgcaatgcacatgtctagattggctgaggattttataatatttaactcagaagcttttagttttataaattttagtgataaagttcttacaggttcttctattatgcctcaaaaaaagaatccggatccagccgaattgataagaggaaaaacagcaattaattatggaaaattaaattcaatgttaactattatgaaaggtttgccgatttcttactataaggacctacaagatgataaaggtcttgtatttgatagttatgatactttaaaggatactttagtaatgggtaatgaacttattttaaacctaaatacaaataaaaataatatgaaaaaaatggcccaaaaaggatatacgactgcaaccgactttgcagattttttagttaaagataaaaatattccttttagagaagcttatatcatttcatctaaacttgtaaattttgcagaaaaaaagaaagttagactagatgagatcccattaaaagatattaataaatttttaaaaaaaattaatattaataatataaaaatttttgatgtagttagttcaatgaattcaaaaacttcatatggtggaacagcaacaaaaaatattaaaggaatgataaaaaaatatagaaaagaagctttatga

SEQ ID NO: 288179 - DNA, 1108 bp, Unknown
  Bacterial polypeptide expressing nucleotide sequence isolated from the Sargasso Sea
aatcataggcgatgttgctggtaagcttcatactgcgcgttcaagaaatgatcaagtgataacagatctgaaactatggatgaaaaaagataatgtattaatttcaaaaaaaataaaaagattgaaaaactctttagtgaagtctgcaaataaaaatattgaaatattgataccagggcttacacactttcagtctgcacagcctatatctgctggccattattttatggcatactatgaaatgttttcaagagacactactaggtttggggactcattaaaaagacttgatgaaaatcctctaggtgttggcgcactcgcaggaactaatttttctataaatcgaaacaaaactactaaaaccctaggcttcaaaaaacctacaagaaactctctagatacagtttcggacagagattttgttattgattttttatcaagtgcttcgttactttctatgcacctgtcaaggatcgcggaagaagttgcgctttattcttcagatctaattaacttcttcaaaattggtgatcaattaatgtctagctcctctataatgccgcaaaaaaggaatccagatggtgccgagcttataagagccaaagcttctattgcaataggaaatctttcgtcgatgctaaatctaatgaagtcactgcctctgacttacagtaaagatcttcaagaagataaaatcttagttacatcaacaagtgagacgttgcatatttgtttagattgtatggttgaaatcattgactcattagaaattaacaaaaaatctgcagagaagattatctctaaaacctacataaatgctactgaattagcagattggcttgtaattaagctaaattatactttcagagatgcgcacagtcttactggaaaaattgtaaattttgctgagaaaaagaaattattcttaaaagatattacacttcgtgattataaatcatttgatcaaaatattgataaatctttatatgatttccttagtataaaaaaaagtgttaataataaacagagttacggtggcactgctataagtcaaataaaaaaaatgattgccattgcgcgtaaggagatcaaaaatgaaaagtattag

SEQ ID NO: 288180 - DNA, 991 bp, Unknown
  Bacterial polypeptide expressing nucleotide sequence isolated from the Sargasso Sea
tatgacttcaaaaaatacaaaaaaaccctggggcggccggttttcaggtccaaccgatagttttgttgagcaattcactgaatcagtatcttatgatcagcgtttggctcactatgacattatgggatccattgctcatgctcagatgctggaaaaaataaaagtaatatctaaaaaagaatctagtgagattgttaatgcgctaaaagagatcgagaaagaaattcaatccgatcgatttgtttggtccacagctctcgaagatgttcatatgaatattgaaagtgctcttgttgatcgtatcggcgatataggtaaaaaattacacacagctcgttcaagaaatgatcaggttgctacagatattcgactttatctaagggatgaggtggatgagattacactcaaaataaatgaagttataaacgctttgcttaatcttgcggaagagcatcacgggaccattatgccgggaatgactcacatgcagtctgcacaacctgttacttttggacatcatcttttagcttgggttgaaatgttattaagagatcgttcacgtttgcaggattgtcgaaaaagaataaacgtgcttcccttggggtcagcagcactagcaggcactacgttcccaattgacaggaattatgttgctaagattctagggttcgatgaggtgacacaaaattcattggatgcagtaagtgaccgagatttcgcagtcgaatttttagcatttggtagtttaattatgatgcatttatctcgcttttctgaggagattgtattttggatgtcgcagcgcaatcatttcattgatctggatgatgcatggtgcactggttcttcgattatgccgcaaaagaaaaatccggatattcctgaacttgtgagagggaaaacggggcgtgtatatggagatctcatggcactattaactttaatgaaatcacaaccgcttgcctataaccgtgataacacaagaggataa

SEQ ID NO: 288181 - DNA, 856 bp, Unknown
  Bacterial polypeptide expressing nucleotide sequence isolated from the Sargasso Sea
gatgctttatagagataaaaaaagatttaaaaacaatataattttgattgatgaatgtcctttgggatctgcggctttagctggaacctcattcaatattgacagaaattacactgctaaaaaacttggttttaaaaaacctactggtaactctattgacgcagtttctgatagagattttgctatagactttttgtctgcatctgccacatgtgcaatgcatttatctagattagctgaagattttataatctttaattcagaagcttttagttttattgaatttacagataaggttctaacaggttcatcgataatgccgcagaaaaagaatccagaccctgctgaattaataagaggaagaacagcaataaattatggaaatttaaattctatgctcacaataatgaagggtttgccaatttcttattataaagacttacaagatgataaagagttagtttttgatagttttgatactttgaaagatagtttgtcgatgtctatcgagcttatcgataatttaaatacaaaaaaaaataatatgaaaaatatggctcaaagaggttatacaactgcaactgattttgctgactatttggctcagaaaaaaaatctgccttttagaaagggctatgctatatcctcaaaactagtaaattatgctgagagaaaaaaaataagattggatcaactttctttgaaagagataaataaatttattaaaaatactaaaataaatattccaaaaatatttgatgtagtgaattcaatgaattcaaagacctcatatggaggcacatcaacaaaaaatataaaaaaaatgattaaacaatataaatcttacttaagataa

SEQ ID NO: 288182 - DNA, 928 bp, Unknown
  Bacterial polypeptide expressing nucleotide sequence isolated from the Sargasso Sea
catgagtaaaaataaaaacaatcaaccaatttggaacactagaattaaaaaagaaacaaaaaacctttttaaaaaggttggtggatcaatagaaattgataaaagattatttagagaagatattgaagcttcaattgtacatgttgagatgctgtttaaacaaaaaattataaattttaaaattaaaaataaaatagtttggggattgaatagaattaaaaacgaaattataaaaaaaaaatttatttttgatgataggcttgaggatattcatatgaatatagaacatagactttttgagctaattggagaagaagcggggtatattcacactgcaagatcaagaaatgatcaagttgtcacagattttaaaatgtggttaagaaaagctaataaagaaattgtaaaaaatattgatgcaacaattaaaaatattttaaaaaaagcagaaaaaaatgttgagacgatcatgccgggtttcactcacctaaaaaatgcacaaccagtttcttttgctcattacttaatggcgtacttagaaatgtttaacagggataaaaaaagatttaataacaatatagagagtcttaatgaaaatccacttggtgtggctgctctaacaggtacttcttttaaaattgacagattttacacttcaaaaaaactaggtttccacagaccaactaaaaactcaattgacaccgtttccgatagagattttgtaattgattttctttattcttgttccacatgtgctgttcatatctctaggattgcagaggagtttataatctggaattcagacgcttttaaacttattaatttgaatgataaaattgtaactggatcatctattatgcctcaaaaaaaaaatcctgatcctttagaatacttgagaggtaaaacaggtttgatgtttggaaatcta

SEQ ID NO: 288183 - DNA, 616 bp, Unknown
  Bacterial polypeptide expressing nucleotide sequence isolated from the Sargasso Sea
atgtctaagaaaataaataaaaaaaaccctttgtggggaggtagatttgaaggaagtactgacagcttaactcagtccttctcagcatctattgatattgataaagaactttatgcagtagatataaaaggctctattgcatatgcagaagctttgaaagaagcgaaagtaatcactccaaaagaattccaaaaaattaaaagaggattaagtaagattctcgcagaaatagaggatgaaaagtttgaatggaatgaaagcttagaagatgtgcatatgaatattgaaacagccttagtaagaaaagctggaaatgctgctaaaaaaattcatacgggcaggtccagaaatgatcaagtttcaactgatttaagaatgtacttaagccttaagatagacgaaacattaaagaatataacccttttacaaaagagtatagttaagcaagctgaaaaacatacttcttcgattatgcctggtttcactcatctgcaaatagctcaacctgtcacttttggacatcatttgatggcatggtatgaaatgctagacagggactttgcgaggcttgcagatgcaaaacatagaatgagtgtacttcctttaggttcggctg

SEQ ID NO: 288184 - DNA, 1270 bp, Unknown
  Bacterial polypeptide expressing nucleotide sequence isolated from the Sargasso Sea
aatgaaaaataaaactgtttgggcaaatagacttaagggaaagacatcattatcttttcaaaaaataggctcatctattagtgtagataaaagactatatgagcaagatgtagctgcgtctattgttcatgccaaaatgttggttaaacagaagataatttctagaaaagaaggaactaaaattattaatgggcttaaaaagataaaatcacagattaataaaggaagatttaaattccaagaaaaatttgaagatatacatttgaatatagaaaaaaaattgtttgaattaattggttcttcagcagggtccttacacacagctagatcaagaaatgatcaagttgttacagatttcaaactatggattaaaaaatcatccaaagatactattggtaatattaattctttaatgaaaattttaataaaaaaagcagaaaaaaatgtcgatactgtaatgccaggcttaacacatcttaaaaatgcccaacctatatcatttgcacattaccttctctcttactttgaaatgtttaaaagagacattaaaagatttgaaaataatataaaacttttagatgagtgcccattaggatcagctgcacttgcaggcacttcttataacatagatagaaattatacctccagacaactcggtttcaaaaagccaactgataattcgattgactcggttgctgatagagattttgcagtagattttttatatgcatctgcattatgtgcaatgcatttatcaagattagccgaagattttataatttataactcaaatgcatttaatttgatctcattcgacgacaacatgttaacgggatcttcgattatgccgcaaaagaaaaatcctgatcctgctgaattaatcaggggaagagttagtttgaactatggaaatttaaactcaatgcttactataatgaaaggacttccaatgtcttacttcaaggatcttcaagatgataaaaaacttatctttgatggatttgacactttgaatgattcattaattttaagttttgagttattgaattcaataaaaccgaataaaaaaaatatgctaaaaatggcaaatgagggttatacaacagcgactgactttgctgattatttagtaaaagaaaagaaactcacttttagagagtcttatgcagttgctgcgaaattagtaaactacgccgaaaagaaaaataaattattatttgagctatctttgcaagaaataaagaaagtgtataaaaatttagataaaaaa

SEQ ID NO: 288185 - DNA, 529 bp, Unknown
  Bacterial polypeptide expressing nucleotide sequence isolated from the Sargasso Sea
atgaaaaataaaactgtttgggcgaatagactaaagggaaagacatcactttcttttcaaaaaataggctcatctataagttctgataatagactttatgagcaagatatagctgcgtccattgttcataccaaaatgctcgctaaacaaaagattattggcaaaaaagaaggaactaaaattatcaatggtcttaaaaaaattaaatcaaagattgataagggaaagtttaaatttcaagaaaaatttgaagatatacatttgaatatagaaaaaaaattatttgaattgattggcccttcagcaggctttttgcacacagccagatcaagaaatgatcaagttgttacagatttcaaattatggattaaaaaatcgtcaaaagaaactatagataatattaactctttaatgaaaattttaatcaaaaaagcagagaaaaatgttgatactgttatgcctggcttaacacatctcaagaatgctcaacctatttcatttgcacattatcttctatctctactttgaa

SEQ ID NO: 288186 - DNA, 907 bp, Unknown
  Bacterial polypeptide expressing nucleotide sequence isolated from the Sargasso Sea
atgagtaaaaataaaaacaacaaaccaatttggaacacaagaattaaaaaagtttctacgaaccattttaaaaaggttggtggctcattatctgttgataaaagattattcagagaagatattgaagtatctatcgtacatacagaaatgttatttaagcaaaaaataattgattttaaaataaaaaataaaattgtttggggactaaatagaataaaaaacgaaattataaaaaaaaaatttatatttgacgaaaatcttgaagatatacacatgaatatagaaaatagactttttgaaatcattggagaagatgctggatacattcacactgctagatctagaaatgatcaaattattacagactttaaaatttggttaaaaaaagcaactaatgaaataattaataatttaaatcttacaattaaaaatattttaaaaaatgcagataaaaatgttgaaacaataatgcctggatttacacacttaaaaaatgctcaaccagtttcatttgcacattatttattagcttatgtagaaatgtttgatagagacaaaaaaaaatttaataacaatctaaataatttaaatgaaaatcctcttggtgttgccgctttaacaggtacttcttttaaaattgatagattttacacaactaaaaaacttaaatttaataatccaacaagaaattctattgatacagtttcggatagagattttgttattgattttttatattcgtgttcaacatgctcaatccatatttcaagaattgcagaagaatttataatatggaattcagatgcatttaatttaatttctttaaatgataaaatcgtcaccggatcatctataatgcctcaaaaaaaaaatccagatccattagaatttttaagaggtaaaacag

SEQ ID NO: 288187 - DNA, 811 bp, Unknown
  Bacterial polypeptide expressing nucleotide sequence isolated from the Sargasso Sea
catgggtaaaaataaaaacaatctgccaatttggaacactagaataaaaaagaattcaacaaatttgttcaaaaaggttggtggatcattatcagttgataaaagattattcagagaagatatagaagcatcaattgttcacgttgagatgctttttaaacaaaaaataataaactttaaaattaaaaataaaatagtttggggccttaatagaattaaaaatgaaattttaaaaaaaaaatttatttttaatgaaaaacttgaagatattcatatgaatatagaaaacagactttttgaacttataggagaagatgctgggtttattcacactgcaagatctagaaatgaccaggtagtcacagattttaaaatttggttaagaaaagctaataaagaaataattaaaaatatagatgtaactattaaaaatattttaaaaaaagctgaaaaaaatattgagacaattatgccaggctttacacatctaaaaaatgcccaaccagtttcttttgctcattacttgatggcttatttagaaatgtttagtagagataaaaaaagatttgaaaacaatttagaaggtctaaatgaaagtccactaggtgcggctgctttgactggaacctcgtttaaaattgatagattttatacttcaaaaaaattaggttttaaaaatcccactaagaactcaattgatactgtttctgacagagattttgtaattgattttctttattcttgttcagcatgtgcagttcatatttctagaatagctgaagaatttataatttggaattcggatggttat

SEQ ID NO: 288188 - DNA, 661 bp, Unknown
  Bacterial polypeptide expressing nucleotide sequence isolated from the Sargasso Sea
aatgacgatgatgcatctttcaaggatatcagaggaactagttttctggatgaacagtcatatcaagcttgtagatatagacgaagcattttgtactgggtcatcaattatgcctcagaaaaaaaatcctgatgtacctgaattagtgagaggtaaaacaggtgcagtaatagggtcattaacatcgttatttgttttactaaaagggctgccattaacatacaatagagatcttcaagaagataaaagtatcatattagaagctattgggactgtggtttcatgcttagccttaatgccaagactgatattaactctaaaagtcaataaggaaagagctttgatattttctaaacaagattattcaaatgctactgatttagctgactacatgtcaatgaaaggtattccgttcaggacctctcatgaaatcgttggaaaaatagttaaatatgctgaatcaaaaaacataagtcttcatgagatttcactggatgtctttaaaacattttctaataaaattaataaggatgtatatacctcaattgatgttgaaaagtctatacataaaaaaaaatcagtaggagcatcatcgccagctaatgttagaaaagaagcaaaaaaaatattatctgcactaaagattcatggctataaataa

SEQ ID NO: 288189 - DNA, 745 bp, Unknown
  Bacterial polypeptide expressing nucleotide sequence isolated from the Sargasso Sea
atgagcaaaaataaaaacaatcaggctatttggaataatagaataaaaaaaaaaacttcttcaatttttcaaaaagtaggaagttcactcaatatagataaaagactatttaaagaagatatagaagcttctattgcccatgttgaaatgctttttaaacaaaaaatcatttcttttaaaattaaaaacaaaatcgtttggggtttaaacaaaatacgaaatgaaattataaaaaaaaaatttatttttaatccaaattatgaagatattcatatgaatgttgaaaaaagattatttgaaattattggagatgatgctggatatttacacacaggaagatctagaaatgatcaagttataactgattttaaattatggttaagatcatcaactactgaaataataaaacttttaaactcttcaattaaaataatcattaggactgctgaaaaaaatatagaaactattatgccaggatttacccatttaaaaaatgcacaaccaatttcatttgctcactatatgttagcttatgttgaaatgtttaatagagataaaaacagatttaaaaataatatggaaaatttattagaaaatccacttggtagttcagcattatctggaacatcatttaatattgatagaaattacacaacaaaaaaactaaaatttaaacagccaacaaataattctattgatactgtttcagacagagattttgtaatagattttttatatgctgtat

SEQ ID NO: 288190 - DNA, 1369 bp, Unknown
  Bacterial polypeptide expressing nucleotide sequence isolated from the Sargasso Sea
tatggctttatggggtggaagatttcagggcgaaaccagcgcgctatttaaattattcaacgattcactgccagtggattaccgtttgtttgagcaggatgtggttggctctatcgcgtgggccgatgcgattgccagtgtcggcattatcactgctaccgagtgcagcgacttaaagaaagcgctgaacgagctgctggtggaagtgaagggcgatcctgcgattattctcgcctcgggcgcggaagatattcatagcttcgtggagtcggcgctgatcgctaaagtcggcgatctgggtaaaaaactccatacgggccgtagccgtaacgaccaagtcgcgaccgatttaaaactctggtgccaatccgaaggtgcggcattagtggctcgcctgcaaaccttacgcagcgaacttattgcgcttgcagagcgtgaattcgacgccgtgatgccaggctatactcacttgcaacgtgctcagccagtcacattcggccattggtgtttagcctatgtggagatgattgagcgtgatcttagccgcttaaccgatgccttaaaacgcgccaatacctgtccgctcggttcaggcgctttggcgggtacagcctatcaaatggatagacatgcgctggctgcggcactgaactttgcttcgccaaccttaaacagtttggacagtgtgtcggatcgcgaccatgtggttgagctatgttctacggcctcaatcagcatgatgcacttaagccgcatggctgaagatttgattttcttcaactcgggtgaagcgggctttatctcattaagtgatgaagtgacctcgggttcatctttgatgccacaaaagaaaaaccccgatgcgctggaacttattcgcggtaaaacgggccgtgtgtacggcagcttagtgggcattctcaccaccatgaaagccctacctctggcctacaacaaagatatgcaggaagacaaggaaggcctgttcgatgtggtcgacagctgggcaatctgcttggatatggcggcgttagtattatctggcttagtagtgaatcgcccgaatgcactgttagccgcgcagcaaggttatgccaacgcgaccgaattggctgattatctggtttctaaaggcatgccattccgcgaagcgcaccatgtagtcggtgtggctgtagttgcggcgatcgccaagaagatcccgttagaaggttttacgttggccgagtttaaaacctttgccgagattatcgaagatgatgtctatcccaacctcaccatcgaagcctgtttggcaaaacgtgatgtcctcggcggcacggcgctgactcaggtgaagcaagccatcgcggcgaagcaagcaggctaa

SEQ ID NO: 288191 - DNA, 1153 bp, Unknown
  Bacterial polypeptide expressing nucleotide sequence isolated from the Sargasso Sea
atttgagtttaataaaaaatatgaagatattcatatgaatatcgaaaagagactttttcaaattataggtgaagaagctggctacgttcacactgcaagatcaagaaatgatcaagtaattactgattttaaaatttggatgaaaaattcaactaacgaaataaataataacattaataaagttattaagagtacaattaagttagctgaaaaaaatgttgagactattatgcctggatttacacatcttaaaaatgctcaagctatctcttttgcacattatttaatgtcttacgtagaaatgtttaatagagacaaaaagagattttctaataatttagacagtttaaatgaaaatcctttaggtgttgcagctttagcaggaacatcatttaatatagatagaaattatacaaccaaaaaacttggttttaaaatacctacaaataattctattgatacagtttcagatagagattttgttttagattttttatacgctacatctgtgtgtgctatgcatatttctagaattgccgaagagttgattatttggaattcggatgcttttaacttgatcaatttatctgataaagttgttaccggatcttctataatgccacaaaagaagaatcctgatcttttagagtacttgcgtggtaaatcaggaaccgcttatggaaatttattttcgatgcttacaattttaaaaggcttaccactgtcttattttaaagatctgcaagacgataaggagattgttttcaaatctaacgacaatttaaataattgtttaaaaatttgcgatgaaatactaaaaaattgtaatccaaataagagtaaaatgttagaacttgctaattctggatatattacagccaccgatttagctgactatcttgtgaaaaatcactcaatgtcttttagaaaagcataccaaaaaactgctgctgtagttaatttggctgaaaaaagaaaaaagaagttaaatgaattaactttagatgagttaaagaaaattgaacccaaacttaaagaagatgtattaaaagtatttaatttaaaaaattcaattaattcgaaaaaatcttatggtggaacttcttttgataatattaaaaaaatgataatgaaatataaaaaagaaaaatga

SEQ ID NO: 288192 - DNA, 892 bp, Unknown
  Bacterial polypeptide expressing nucleotide sequence isolated from the Sargasso Sea
gctttatctttaggtcattacttaatgtcttatgttgaaatgtttactagagatagaaaaagatttttaaataatttcgaaagtcttaatgaaaatcctcttggtgtatgtgcattaacaggaacttctttcaatattgatagaaaatttacaacaaaaaaattaggttttaaaagccctaccaataattctgtagatacgatatcagacagagattttgttacagactttttatatagttgttctgtatgtgcaatgcatatatctagaatagctgaggaattaataatttggaactctgatggttttaatttaataaatttatcagacaaaattgtaacaggatcttccattatgcctcaaaaaaaaaatccagatatgctagaatttttgagaggaaagacgggaggaatgtacggaaatttattttcaatgttaactgtgcttaaaggtttaccattatcttattataaagatcttcaggaagataaagagataatttttaaaactaatgatactttaaataactgtttaaaaattcttgacgaaattttaaataattttagcccaaataaaaaaaaaatgttagaactggccagcagtggttacattactgcgaccgatttagctgactatattgttaaaaatcattctagatctttcagagaagcttaccaaaaaacagccgctataataaatatggctgagaaaagaaaaaaaaggctagatgagttaacattatatgatttaaaaaaaattgaaccaaatttgacaaaagatgttctaaaagtattcgatttaaataattctgtaaattcaaagaaatcttatggaggaaccgcttttgataacattaaaaaaatgataataaaatataagaaacgattatgat

SEQ ID NO: 288193 - DNA, 1210 bp, Unknown
  Bacterial polypeptide expressing nucleotide sequence isolated from the Sargasso Sea
catggcgttgtggggtggccggtttgaatccggtgcaagtagtatgtttaaacaggttaacgactcgctgccgtttgaccaagttatggcaagccaagatattcaaggctctatcagttggtcgcgtgcgctgcaaaaagcaggcgtattgaccgttgacgaacaagcccagcttgagtctgcattgagcgagttaaaagcgaaagctgatgcaggtgaactagactttaacgcatctagcgaagaagacattcacagctttgttgaagcagcgcttatagagaagcttggtgacattggtcgtaagcttcataccgggcgtagccgaaacgatcaggttgccaccgactttcgcttgtgggtacgtgaacatattgcctcacttcgcgctgatgttttaggtgtaataaagtcgcttcttaatgccgctagccgtcatcaagaagcgataatcccaggttacacccacttacagcgtgcacagcctattcactttgcacactggtgcttggcttacgttgaaatgctaaagcgtgacttaagccgtttagacgacttgaaagtacgcatgaatcagtgccctttaggttcaggcgcattggcaggtactactttccctgtagaccgtcatgccattgctgaagaactgggctttgactctccatgccttaacagcctagacgctgtgtcggacagagactttgttctagagcttttgtttgtagccagcaccagcatgatgcacttgtcacgtcttgctgaagacatgattttctataactctggcgaagcaggattcttacagcttggcgatagcgtaacctctggttcatcgcttatgccgcagaagaaaaacccagatgcactagagttaatgcgcggcaaatgtggccgtgtgtttggctcattgcaggccctgctagttaccatgaaaggccttcctcttgcctacaacaaagacatgcaagaagacaaagaaggcgctatcgatacggttaatcagtggcatatttgtttatgtattgccagcgaagtgcttgattcactgcagttaaacgaagagcgctgtcgtgttgcggcaacccaagggttctctaacgccactgaacttgccgattatctggtaggtaaaggtgtaccgtttagaacaggccacgatattgcaggacgagttgtgcttcaggccatcgacaaaagctgtgccatttga

SEQ ID NO: 288194 - DNA, 1132 bp, Unknown
  Bacterial polypeptide expressing nucleotide sequence isolated from the Sargasso Sea
atggtaaaaaataaaaacaaccagacaatatggaatacaagaattaaaaataattctaatctctcacaaaaaataggtagctctattgatgtagataaaagactgtataaagaagatataaatggttctattgctcatgtagaaatgttatttaaacaaaaaataatttcttttagaacaaaaaataaaattatttatggactaaataaaattgaaaaagaaatatctaataaaaaatttgaatttaacaaaaaatacgaggatattcatattaatattgaaaaacgactgtttcaaataattggtgaagaagcgggttatgttcacacagcaagatctagaaacgaccaagtaataactgactttaagatctggattaaatctgcaaatcaaaaaattaatgtgatgttaaataacgtaattaaaaattcaattaatttagctgaaaaaaatgtagatactattatgccaggttttactcatttgaaaaatgcacaagcagtttcatttgcacactatctaatggcatacgtagagatgtttaaaagagacaaagacagatttaagaataatttagacagtttaaatgaaaacccattaggtgttgctgcattaactggaacttcatttaacattgacaggaactatacgacaaaaaaacttggttttgaaaaacccacaaataattcaatcgacactgtagcggatagagatttcgttttagattttctttatagtgtttctgtttgttcgttgcatttatcgagaatttctgaagaattaattatctggaactctgatggttttaatctgattaacctctcagataaaatagtaacaggttcatcaattatgccacaaaaaaaaaatcctgatcttttagagtacttaagaggtaaatctggaattacttttggtaatttattttcaatgcttactatattaaagggattgcctctttcatatttcaaagatcttcaagacgataaagaaattatttttaaatcatatgatgttcttgttcaaagtttaaaaatatttaatgaaattcttaaaaatgtgagtcctaataaaaaaagaatgcttgaattagcatactcaggttacattactgcaacagatttagcagact

SEQ ID NO: 288195 - DNA, 1209 bp, Unknown
  Bacterial polypeptide expressing nucleotide sequence isolated from the Sargasso Sea
aatgaaaaataaaactatatggtcaaatagatttaaaggcaaaacctctaaatcgtttcaaagaattggatcctcaataaatgtagataaaagactctacaaacaggatattatcgcttcaatcgcgcatgttcaaatgcttatgaaacaaaaaataatcaataatattgatggtaaaaaaattattaatggactaaataaaattaaatctcaaattgatagagggcaatttaactttcaagaaaaatttgaggatattcatctaaatatagaaaaaaagttatttcaaattataggatcctctgctggttatatgcatacagctagatcaagaaacgaccaggttgtaactgattttaaattatgggttaaagagtccacgacagatattctaaagcatattgctctagcaatgaagtgtatattaaaaaaagctgaaaaaaataccgatactgtaatgcccgggcttacgcatttaaaaaatgctcaaccaatttcattcgcacatcaccttttagcttattatgagatgttaaaaagagacaagaaaagatttgaaaataatatcaatcttctcaatgaatgtccgcttggttcagcagcgctatcaggcacttcttataagatagatagaaagtatactgcaaaaaaacttggatttaaaaaaccaactgataattcaatagactctgtttccgatagagattttgctattgattttttatattctgctgcaatttgtgctatgcatttatctagattggcagaagattttattatctttaattctgatgcttttaacttaataggttttaaagacactatgttaacaggttcatccatcatgcctcaaaaaaagaatccggatcctgctgagttaattagaggaagagttggaattaattatggaaaattaaattctatgcttacaataatgaaaggtctaccgacatcatattttaaagatttacaggatgacaaaaaattagtttttgaaggctatgataccttaaaagatactttgattttgagcacggaactaatcgactctgttatgcctataaaagatagaatgttaaaaatggctaataaaggttttactacttctaccgattttgcagattatcttgtaaaagaaaaaaaaattaattttagagagtcatatagcctagctgcaaagttagtgaatttcgctgaaaaaaataataa

SEQ ID NO: 288196 - DNA, 1462 bp, Unknown
  Bacterial polypeptide expressing nucleotide sequence isolated from the Sargasso Sea
atgtatcgttctagactaggaaaagatcttgatgacattacgctaagttatgtatcatcaatcaaagatgattctgatattgcattttatgatatcattggaagcgaagcacacgtaatcatgttgtatgagaataaactcttaacaaaaaatgagacaaaaaaaattcttactgccttggaagaactcaaaggtggaaatatctcccagcctgattttgaacctgaagatatacacgaactaatagaatctcttgtcataaagaaaactggaattgaaaatggtggaaaaatgcatactgcacgttcacgaaatgatcaagttgcacttgacattagactaaaaattcgtgatgacattaacatcttgttacaatgtttaattgaaacaatttccaccttgttaaaaactgcaaaagaaaatactaaaaccattatgccattgtatactcatctacaacaagcacaagtaggcgtattttctcactatctgttatcatatgctgattcattactgcgtgatttagatagattcatgtcactatacacccgtgtaaatcaaagtccattaggtgcaggtcctgttggaggaacaagtttaccaatagacagagacagtactgcaaaaatgcttgggtttgcatctttaatagaaaattcaattgatgcaacaagtactcgtgactttgttgctgaatatgttgcaagtgctgcaataatgatgacaaaccttagtcgtttagctgaagattttattatttggtcatcagctgaattttcatttattgaattgtctgatgactttacatctccctcaagtgttatgcctcaaaagaaaaaccctgacatcttagaattaactcgtggaaaaacatctcaagtaataggatacttgacatctattctaactacaactaagggattatcttctggatatagtagagacttacaacaaattaaatcatcaatatggtcaacatcaaaaacatcaatcactgcactaatcataataaaatcaatgttatctgatttaacagtaaatcaagaaaagatgcaaaaagcaacagaagaaggttttcttgttgcattggatttggcagaaaatcttgttatcgaaaaaattccattccgtagtgcacataacattgttggaaatcttgttcaattatcacataattcaaaaaaattactgtccgatcttgatttagatgaaattgactgtcttgatattaaagaaattaaacctgcaaaactctttgaactaatccaaaaaactactatctcttcatcactaaaacaacgaaaatcaaaaggatctgctggtacctctgaacaaactagaatgattggacaaagaacccgcaaacttgtatcattgaaaaattctgtcaaatctcaaaatgacagtgtaaaaaaatctctcacattactggaaaaacgtgttaaaacacttacaaaataac

SEQ ID NO: 288197 - DNA, 1010 bp, Unknown
  Bacterial polypeptide expressing nucleotide sequence isolated from the Sargasso Sea
tatggcaaaagtttggagtaaaaggtttgataattcacttgacccttttattgaaaaatttaatgcctcaattgattttgatagaaagcttattttagaagatttagattgctcgattgctcatgcgaaaatgcttggcaaaacaaaagttttatcttcttctgaagctttgcaaattattaatggtctagagttaataaaagttgagtatttggagggtaaattttcccctagtttaccttctgaagatattcactactgtatagaagaaaaactgataagtttaattggtgaaactggaaaaaaattacatacaggtagaagtagaaatgatcaggttggtacagatataagattgtggctaagaaaagagattgacaatattgaaattttaataaccgatttacaaaaatcctttttaaatcttgctaaatctaatatttataccttaattcctggatatactcacatgcaaagagctcaaccactatctttagctcatcatttattggcatatatagaaatgcttcaaagagaccgtgaaaggtttaaagaagtacgcgcaagagtaaatatttctcctttaggatctgcagcattagctggaacaaaaataaaaatagataggcactttacagctgcagaattgggctttgaaaagatttataaaaacagtattgatgccgtaagtgatagagatttttgcatagagtttgtttctacatctgctttgttaatgtctcatttaagtaaaatttcagaggaaataattttatgggtaactgatgaattttcatttgcaaaattaacagataaatgtgctactggaagtagcttaatgccgcagaaaaaaaatcctgatgttccagaattgataagaggtaagacgggaagagtttatggacatcttcaggcattgttaactatggtcaaaggagtaccactttcctacaacaaggatttccaagaggataaagagccaatatttgatactacagagacaatatctt

SEQ ID NO: 288198 - DNA, 853 bp, Unknown
  Bacterial polypeptide expressing nucleotide sequence isolated from the Sargasso Sea
atgggtcgagacagatcaagattaaaagattgcatagaaaggttatatgaaagtcctcttggctctggagccttagcaggaacatcattccctattgacagaaatttaacatcaaaattattaaaattttctaaaccaacagctaatgcacttgatagtgtatctgatagagattttgccgttgaatttttatttgtaatatcacttataagtacacatttatcaagaatggccgatgaaattattctttggtctaatcaacaatttaattttatcaacttgccagatgaattagaaacaggtagttccattatgcctcagaaaaaaaatcctgatggggctgaattagtgcgaggaaaagcaagtggtattattagtaatttaaatgcgttactagttatactaaaaggcctcccattagcttacagtaaagatcttcaggatgacaaaaaaatagttttttcagcatttgatgatgtttgcctaacattagaagtaatgaaagaaatatggtctaaggttagttttaataaaaatattatggctgaagcagttaataattctaattctacagccacagattttgcgaattggttagttcaacatatagaattatcttttagagaagcttatcaattaactggtagaattgttgcacatgctaataaaaataataaaagactggatcaacttggtttagaagaacttcaaaaatttaataaaaaaattactcaagatgctcaaaaaactctttctattaatgaaagtataaaaaataaaaagagttttggtggaacatcgccacaaagggttaaacaatcaattaaatatgctataaaaaaatatctttaat

SEQ ID NO: 288199 - DNA, 1393 bp, Unknown
  Bacterial polypeptide expressing nucleotide sequence isolated from the Sargasso Sea
catggcaaaaaataaaaacaaccaggcaatatggggtattagaattaaggataatacatctaatctttttcaaaaaattgggagctctataaacattgataaaagactttataaagaagatatagctgtgtccattgctcatgtagagatgttatttaaacaaaaaataataacttttaaaattaaaaataagattatttatggacttaataaaatagaaaaagaaatatcaaaaaataaattagaatttaataaaaaatatgaggatattcatatgaatattgaaaaaagactttttcaaatcattggtgatgaagcgggatatgtacacacggcccgatcgagaaatgatcaggttttagctgactttaaaatatggattaaatcagcaaataaagaaataaactctaaattgaattcattaattaaaacttcgcttaaattagctgaaaaaaatatttacactataatgccaggttttacacatctcaaaaacgcacaagcaatttcttttgcacattatattatggcatacatcgaaatgtttaaccgtgataaaaaaagatttaataacagtctagataatttaaatgaaaatcctttaggcgtggctgcacttactggaacatcttttaatattgacagatactatactacaaaaaaattaggatttaataaaccaactaacaattcaattgacactgtttctgacagagatttcgttttagattttctttacagtgtttcagtttgttcaatgcatatttctagaattgcagaggaacttattatttggaattctgatgcttacaatttaataaatttatcagacaaagttgttactggctcatccataatgcctcaaaaaaaaaatccagatcttttagaattcttaagaggaaaatcagggagtacttatggaaatttattttctatgctaacaattttgaaaggattaccattatcatattttaaagatcttcaagatgataaagaaatagtttttaaatcctatgatactttaattggttgcttaaaaatttttgaggaagttataaaaaacttaagaccaaacaaagaacaaatgtttaaacttgcaaatgatggttacattacagcgacagacttagcagattatcttgttaaaaatcactctttgtcttttagaaaagcttatcaaaagacagcaggaatagtaaatctagcagaaaaaaagaaaaaaaatcttaatgaattaagtttagatgaaatgaaaaaaattgtaccagggctgaaagatgatgtttttaaagtatttgatttaaagaattctgttaattctaaaagatcttatggaggaacatcttttgataatattaaaaaaatgataatgaagtataaaaaaactcaatga

SEQ ID NO: 288200 - DNA, 952 bp, Unknown
  Bacterial polypeptide expressing nucleotide sequence isolated from the Sargasso Sea
atgacaaaaaataaaaacaaccaaacaatatggagaactagagtcaaaaaaaagggttcagtattattccaaaaaattggaagctctatagaaattgataaaaatctttataagcaggatatccttggttctatagtgcacgtagaaatgttgtttagacaaaaaataatatcttttaaaataaaaaataaaataatctttggtttgaaaaaaattgagagtgaaataaagaaaaaaaaatttgtttataagagtgaatatgaagatattcatatgaatattgaaaaaaggttatttgaaataattggtgatgatgcaggttttattcatacagcacgatcaagaaatgaccaagtaataacagattttaaaatgtggttgaaaattgagactcaggagttaattaaaaaattagaaaatcttaataagaatatacttaaagttgcacaaagaaatattaatacaattatgcctggttttacacatttaaaaaatgctcaagctgtttcgtttgcgcactatatgatggcatatattgaaatgtttaatagagataaacatagatttaaaaataatttagaaagtctaaacgaaaatcctttgggtgttgcagccttgactggaacatcttttaatattgatagaaattttacttcaaaaaaacttggttttaaaaaagctacgaacaattcaatagatactgttgcagatagggatttcgtattagatttcctctatagtgcatccgtatgttcattacatatttcaagaatatcagaagaatttataatctggaactctgatgctttttgtttaatcaacctttcagataaagtagtcaccggatcgtctattatgcctcataaaaaaaaatccagacacgctagaatttttgagaggaaaaactggaaaaacttttggaaaccttttttcaatgctaacaattcttaaa

SEQ ID NO: 288201 - DNA, 791 bp, Unknown
  Bacterial polypeptide expressing nucleotide sequence isolated from the Sargasso Sea
tatggcaaaagtttggagtaaaaggtttgataatgcacttaacccttttattgaaaagtttaatgcctcaattggttttgatagaaaacttattttggaagatttagattgctcgattgctcatgcgaaaatgcttggcaaaacaaaagttttatcttctgctgaagctttgcaaattattaatggattagagttgataaaagtagagtatttggaggggaaattttctcctggtccaccttctgaagatattcattattgcatagaagaaaagctgattagtttaattggtgaaactggaaaaaaattacacacaggtagaagtagaaatgatcaagttggtacagatataagattgtggcttagaaaagagattgacaatattgaaattttaataaccgatttgcaaaaatccttcttaaatcttgcgaaatccaatatttataccttaatacctggatatacccacatgcaaagagctcaaccattatctttggctcatcatttattggcttacatagaaatgcttcaaagagaccgtgaaaggtataaagaagtacgctcaagagttaacatttcgcccttaggtgctgcagcattagctggaacaaaaataaaaatagataggcacttcacagctgcagaattgggttttaaaaagatttataaaaacagtattgatgcagtaagtgatagagacttttgtatagagtttgtttctgcatctgcgatattgatgtctcatttgagtaaaatttcagaggaaataattttgtgggtaactgatgaat

SEQ ID NO: 288202 - DNA, 1405 bp, Unknown
  Bacterial polypeptide expressing nucleotide sequence isolated from the Sargasso Sea
atggcaaaaaaagaaaaagaaataaatcctctatggggaggtagatttgaatctgggactgacgatctagctcagtcattttctgcatctattgatatagataaaagactctttgaagtcgatatccaaggttcaattgcatatgccgagatactaaatgtggcgaatttaataaattcctctgaacttaaaaaaataaaaaaaggtctcaataaaattttagatgagataaagcacgataaatttaattgggatccaagcctagaggatgttcatatgaatattgaggcaaggcttgtaaaaattgctggtacagctgcaaaaaaaattcatactggcaggtctagaaatgatcaagtagcaacagatttaaggctatttctaaagaaccaaatagacgagattctaaatttaactatcttgcttcaaaaatctttattaaaaaaagctgacgaaaataccgatactttgatgcccggtctaactcatcttcaaattgcacagcctgtgacttttgggcatcacctaatggcatggttcgaaatgctgtctagagattattcgaggttagaagatgtaaaaaaaagaatggatgtcatgccgttaggttcagctgcattatctggaacaaggttcaatatagataggaaatatcttgccaagaagctgggctttgaaaagataagtagaaattctatggatgcagtcagtgacagagactttgttctggagttggcttcttctttatcaatagtaggaattcatctttcaagaatttgtgaggagataataatttggtcttcaagccaatatagttatatccatttatctgatgaagtgtgtacgggctcttcgataatgcctcaaaaaaagaatcctgatatggcagaactaattagaggaggtgcctccaaaacaatcgctaatcttatggggcttctatcattgatgaaaaatcttccattaacttataacagggatttacaagatgataaggaatacatttttagtagtatagatttcaccaaagatagccttgaattactatcgctaataattgaagggatggagcctaatattgaaaaaatgaagattgattgttttactggtcaaataactgcaaccgatttagcagactatctagttgaaaaaggtattgcatttaggaaggcgcatgaaatagttggtaggattgttgcacatgcagaaaagaagaaggttcaaatctttgaattggaaatttctgagttaagaaaattttctaaaataataaacgaagatgttacaaattacctgaatcctcagaaaacaatattatccagaaaacaggtaggtggtacggcgccctcacaagttaagaaagaaatacaaatagccaagaaagaattaatcaggaagcaatgat

SEQ ID NO: 288203 - DNA, 1390 bp, Unknown
  Bacterial polypeptide expressing nucleotide sequence isolated from the Sargasso Sea
atgagtaaaaataaaaacaataaaccaatttggggtacaagaattaagaagaatgcgtcaactttatttaaaaaagttggtggttcattaccaatagataaaagactatttaaagaagatatcgagggatcaattgctcatgtcgaaatgcttcacaaacagaaaattataaatttcaggataaaaaataaaataatttggggattaaaaagaattaaaaatgaaattgtaaaaaagaaattcaattttaattatgatttagaggatattcatatgaatatagaaaacagattatttgaacttattggtgatgatgctggatatgttcatactgctagatctagaaatgatcaggtaattaccgaccttaaattatggttaaaagaagcaacaaaaaaaataataattttattagataatacaaattcaaatattttaaatcttgcacaaaaaaatatcagaacaattatgccaggatttacacatttaaaaaatgcacaaccactatctttagcacattatctactagcatatgttgaaatgtttaagagagataggaaaaaatttgagaataatttagaatttttagatgaaaatcctctaggtgtaggggctttatctggcacctcttttaaaattgacagaaattacaccacaaaaaaacttaaatttaaaaaaccaacaaacaattctgtagatactgtatctgatagagattttgttttagattttttgtattcttctctggcttgctctttacacatttctagaattgctgaagaactaataatttggaattctgatgcatttaacttggtgactttgaatgataaattagtaaccggttcttctataatgccacaaaaaaagaatcctgatccattggaatatttgagaggtaaaactggaatatttattggaaatatcaattctatgatttcaatattaaagggcttacccttatcatattttaaagatttacaggatgacaaagaaattgtttttaaaacaaatgatcaattaaaaatatcgctatcattattgaatgatgtattaaaaaattcaataataaataaaaaaagtatgctatcccttgcggaaaaaggatttactacagctacagatttatctgattacattgtaagagaacttggatatccatttagaaaggcatacatacaaacagcgaaaataattaatctagctgaaaaaaaaaacaaaaaacttcacgaactagaattgaaagaaataaatcaaattgagccaaaacttacattaaatgtttataaaatactaaatctagaaaattcaattaattcaaaaaaatcttatggcggaacttcttttgagaacgttaagaaaatgataaaaaaagcaaaaaatgagtaaa

SEQ ID NO: 288204 - DNA, 1342 bp, Unknown
  Bacterial polypeptide expressing nucleotide sequence isolated from the Sargasso Sea
tatgtttaaacaggttaacgattcgctgccgtttgaccaaggtatggcaagccaagatattcaaggctctatcagttggtcgcgtgcgctgcaaaaagcaggcgtattgaccgttgatgaacaagcccagcttgagtctgcattgagcgagttaaaagcgaaagctgatgcaggtgaactagactttaacgcatctagcgaagaagacattcacagctttgttgaagcagcgcttatagagaagcttggtgacattggtcgtaagcttcataccgggcgtagccgaaacgatcaggttgccaccgactttcgcttgtgggtacgtgaacatattgcctcacttcgcgctgatgttttaggtgtaataaagtcgcttcttaatgccgctagccgtcatcaagaagcaattatcccaggttacacccacttacagcgtgcacagcctattcactttgcacactggtgcttggcttacgttgaaatgctaaagcgtgacttaagccgtttagacgacttgaaagtacgcatgaaccagtgccctttaggctctggcgcattggccggcactactttccctgtagaccgtcatgccattgctgaagaactgggctttgactctccatgccttaacagcctagacgctgtgtcggacagagactttgtgctagagcttttatttgtagccagcactagcatgatgcacttgtcacgtcttgccgaagacatgattttctataactctggcgaagcaggattcttacagcttggcgatagcgtaacctctggttcatcgcttatgccgcagaagaaaaaccctgatgcactagagttaatgcgcggcaaatgtggccgtgtgtttggttctttacaggcactattggttaccatgaaaggccttcctcttgcctacaacaaagacatgcaagaagacaaagaaggcgctatcgatacggttaatcagtggcatatttgtttatgtattgccagcgaagtgcttgattcactgcagttaaacgaagagcgctgtcgtgttgcggcaacccaagggttctctaacgccactgaacttgccgattatctggtaggtaaaggtgtaccgtttagaacaggccacgatattgcaggacgcgttgtgcttcaggccatcgacaaaggctgtgccattgaagatttaccactcagcgacatgcaggctatttgcgacaaaattgaagacgacgtatacccggtactacagctagagtacggcgtgaatcaacgcaatatcttgggcggcaccagcaaagaaaccgtgacgaaagcactgtatcaagagctggaagacttggataagcaagggtag

SEQ ID NO: 288205 - DNA, 785 bp, Unknown
  Bacterial polypeptide expressing nucleotide sequence isolated from the Sargasso Sea
catgagtaaaaataaaaacaaccaggcaatatggagcaaaagaataggaaaaaaaacatcagtactttttgaaaaagttggtagttcagttaatattgataaaagactttttagtgaagacattaatgtttcaataacccatgttgaaatgttgtttagacaaaaaattatatcttttaaaattaaaaacaaaattgtttatggattaaaaaagattgaaaaagaaattttaacaaaaaaatttgaatttaataataagtatgaagatattcacatgaatattgaaaaaagattacatgaaataattggggatgatgcaggatatatacatactgcaagatcaagaaatgatcaggttattacagactttaaactatggattagaaaatcaacaaaagaaataattaataatttagatataattaataaaacaattttaaatgtttctgaaaaaaatatttatactattatgccagggtttacacatttgaagaatgcgcagccaatatcttttgcgcattacttaatggcatatatagaaatgtttaaaagagataagaaaagatttactaataatctagaaaatttaaatgaaaaccccctcggagtagctgcactgacaggaacttcatttaatattgatagaaattttactgctaaaaagctaggctttaaaacatctacaaataattcaatcgatactgtttccgacagagattttgttttagattttttatactgtatatctatatgttctttgcatatttcaagattagctgaggaat

SEQ ID NO: 288206 - DNA, 1405 bp, Unknown
  Bacterial polypeptide expressing nucleotide sequence isolated from the Sargasso Sea
atgtctgttaaaaaatccctcaagaacaaaaaactttggggtggcaggttcgaggaagccacatcgccatttgttgagcgattcacctcttcggtttcatttgataacagcctctatcaatatgatattgacgggtctattgcgcacgcaaaaatgcttgaaaaagtcggcacactaacaaaaaaggaagtgacagacatcataggcgggcttgaggaaattcgtgaagaaataagcaatcaaaattttgattggtctaccgagcttgaagatgtccacatgaatatcgaatctgctctaacaaaaaaaataggtgaggccggcaaaaagcttcatacggggaggtcgagaaatgatcaaatagcaacggaccttagattatatgcaagaagccaaatagatgagatttgcaaattaatcaccgatttccaaaaagcaatagtaaatttggctgaaaaagaagctaacactgttttgccggggtttacgcatctccaaacggctcaacctgtaacttttggccatcatgtaatggcttggtttgaaatgctgagtagggattttgatcgctttcaagattgcaggaagagagtcaatcaatctccactcgggagtgcggctctagcgggcacaactttccccatagacagaaattatacttcagagatgatgggttttgattccccatgtgctaactctctagatgcagtcagtgatagagactttgttattgagttcgcttcaactgcaaccttattaatgacccacctatcgaggttttcagaagaaatagtcttatggacttccgctcactttgattttattgaactccccgatagcttttgtactggttcatcaatcatgcctcaaaagaaaaatcctgatgtgcctgaacttattcgaggaaaattcggtcgagtagcaggagcccacactgctcttataagcattatgaaatcccaaccccttgcatacaataaggataatcaagaagacaaagaacctctttttgacatagtagatactattaaagattgcttatatgcttatgcgcagatgatgccagctattaaatgtaataggggcaatatggaaaacgcggctttaaaaggatttgctacagctactgacctagctgattacttggtcaagaaaggagctacttttagggacgcacatgaaattgtcggcaatgtagtatcctatgcaataagagaggatctgctcttgacagaaattccattgagtaagttagttgagtttacttcaataattacagaggatgtttcaacaattcttactttggaaggatcagttcgcgctcgaaaccattttggaggaacctcgcccgagcaggttttaaatgctgtaactaatgcaaaaattctgcttgatcaacgttaaa

SEQ ID NO: 288207 - DNA, 1405 bp, Unknown
  Bacterial polypeptide expressing nucleotide sequence isolated from the Sargasso Sea
catgccgagtaatgatacacccaatagaacaaataaacggctacttaaaggtaggttacagtcttctacaaatgagtttgtccaggagttcacggcatcgataagttttgataaaaggctctataaagaggatataacggcgtccatcgcacatgctgagatgttgtctgaaattggagtactaaaaaaaacggaaacgcaaaaaatcatcaagggtctgaataaaatcgagaaagaaattgaaactggagattttctttggacaaattctctggaagacattcatatgcacatcgagcatcgcctaatcgaaattacgggcgacctaggaaaaaaactacacacaggccgatctcggaatgaccaaatagctaccgatatgcgcctatttctccggaagtctatagatgaaatcctggcgcttgaaaacagtctcttacactccttgctggacttggcgagctcgcacataaatacgattatgccgggctttacacacctgcaagttgcacagcctgtcacctttggccatcacatcatggcatggttcgaaatgttattaagagatagagacaggctaatcgattgtcgaaaaagaaccaacgttatgcctttagggtcggccgcacttgctggaacttcattcaaaccaaaaagaaaaatagtggccacgcgtctaggcttcgatcaacttactcgcaattcgttagatggagttagcgatcgagatttcttaatcgagttttcttcttgcgtggctattacgatggttcacttctcgagatggtgcgaggaaatcgtactttggtcatcccaacaatttaattttgtcgtcttacccgatgctttttgcacgggctctagcatcatgcctcaaaagaaaaaccctgatgtaccagagttaatcagaggcaaaacgggcagatctataggcaacttgaactctttactggtactgatgaaatcacaacccctcgcttacaacaaagataatcaagaggataaggaacctctatttgacaacgtagacacgataaaaagttgtttaaccgcacttttgggaataatcgatgagatcgaagtaaatgaggagaatatgctgaagcacgcgcaagaaggttacagcacggccacagatcttgcagactacttagtcagcaagagcgttccgtttagagaagcccacgaaatagtaggcaaagcagtggctaaagcgatctcaatgaacaaaaagcttcacgagctggatttgcatgaacttaatgaagaagatagtgactttatagggccagacgtctatgacgtcctttcagtagaaggatcgataaaatctagagatcatgagggagcaaccgcacctaaacaggttaggagagcaattgatagggctagaaaactgatatag

SEQ ID NO: 288208 - DNA, 1381 bp, Unknown
  Bacterial polypeptide expressing nucleotide sequence isolated from the Sargasso Sea
aatgtggggaggaagattcagttctgaccaagatagaataatgcttgaaatgaattcttctattggatttgactctagattatatgctgaagatattaatgcttctattgcacacgcaaaaatgttggcaaaacaaaaaattatttcttggaaagaatctcaaaaaattgtttctggtttaaagaaaatcaaagttgaatttgaaaaaggtacttttaatttagatcctcttctagaagatatacatatgaatatagaatcaaatcttcaaaaaaaaatcggcaatgtagctaaaaaactacatacaggtagatcaaggaatgatcaagtggcaacagatatgagattgtatatgaggagccaatgccaagaaattataaaaaaaatcaatatcattcaaaaagaattgagtaaaaaagcaagcaaatactatgatcttattatgcctggatacactcatatgcaaattgctcaacctgttacatttggccaccatcttcttgcttatgtagaaatgcttgatagagataaaaataggtttaaagatgccttgaaaagaattaatcaaagccctcttggtgcggctgcattagctgggacaacctttccaattgatagacaaatgacagccaaagccttaggtttcacaaatccaatggctaactcaattgatgcagtttcagcgagagattttataattgagcctttagctgcttcatcaatacttgcctctcatctttcaagattttctgaagaaattatcctttgggtatcagatggttttgattttattgagcttccagacagtcttgccactgggtcatcaataatgcctcagaaaaaaaatcctgatattgctgaattagtaagaggaaaaaatggaagagttattggtgcattaatgtctatcctagttgttatgaagggattgccattagcttattcaaaagatcttcaagaagacaaagagcttacatttgatgctatggacaatatcttaaattctttagaagcaattaatgccatagtaaaaaaattaatacctaaaaaagataatttatcttctgctgctcagaaaagttactctaccgcaaccgacttagcagattggcttgttgctaatttagatattcctttcagagaagcacacaaaatcactggtaatatagtgagatattgtgaaaaaagaaaaattaaactttctgaattaacaattcaagagcttaaaggttttaataaaaagattaatgatgatatttttaatgtgttgaatgctgagcaatctgtgaatcaaaaaaaatcttttggtagcacttcaccatcaatggtaaaaaaatcagcgtcaaaatggataaagaaactacagaatgaaaaaaaatag

SEQ ID NO: 288209 - DNA, 1414 bp, Unknown
  Bacterial polypeptide expressing nucleotide sequence isolated from the Sargasso Sea
aatgaataaatcaaaatctaaaaaaaataaacaaacttcttctatatggggaggaagatttataaaagattcctctgaaattatgaaaaatataaatgcttccatatggtttgataagagattggcatttcacgatatagttttaagtaaagagcattctaatatgctgtataagcaaaaaattatttcccataaagaaaatagaattattcaaaaaggtttgaaacaaatagagagcgaaatgattaatgatcaattttacttttcagatgagcttgaagatattcatatgcatattgaagcaaggttaatagaattaattggagatactggaaaaaaattacatactgcaagatccagaaatgatcaagttgcaacatcatttaaaatgtgggttagagatgaattagatactttattaattttaataaaaaatcttcaagcatccataattaagcaagcagaggcccatataaatactattcttcctgggtttactcatcttcagcctgcccaaccaattagtttggctcatcatttattagcctatgttgaaatgctaggaagagatagaactagacttgaagatgcaaaaaatagattaaataaatctcctttaggagccgcagctttagctggcacttcttttcctattgatagattttatactgctaaggcattaggttttgataatcccatggaaaattcaattgatgcagtaagtgatagagactttgttttagaagtactatctaatgcatcaattattatggtgcatttatcaagactggctgaagaattagttatatggtcttctccaggttttaactttattgctttgccagattctttttcgactggatcttcgattatgcctcaaaaaaggaatccagatgctgcagagttaataagaggtaagacaggaagagtatcaagtgcttttaataatgttttaacaatgctgaaaggattacccttagcatattcaaaggatatgcaagaagacaaagaacctttttttgatgctattgataatttaaaattatgtttgtctgtttctgaaggattaattaaagagataagttttaatgttgatgaaatgaaaaaaatggcagaactgggatatattacagctacggacattgctgattggcttgtaaaagaatgcaatattccttttagagatgctcattcaattactggaagagttgttaaatacgcagaaaaaaataatttaactttagacgaagtttctataaatgaatttaaaaaaatagataaaagaataactaataatatattaaaagttcttacgttacaaaattcattagaaagtagaaatagctatggcggaacggcacctaagttagtgaaaaaagccttaaagaaagcaaaaacaaaatggctaaaataa

SEQ ID NO: 288210 - DNA, 931 bp, Unknown
  Bacterial polypeptide expressing nucleotide sequence isolated from the Sargasso Sea
tatgccgggcttcactcacctacaaatagctcaacctgttactttcggacaccacttaatggcatggtatgagatgttggagagagactatacaagattgattgatacaagaaatagaatgagcgtcctccccttgggctctgccgcactagccggatcaaagtatccaattaacagaaactttttagccatgaaacttggatttaaagccttatctagaaactcaattgatgcagtaagtgacagagattttgtgatagaaacagcttcagctctctctatactcggtatccacttatcaagaatttgtgaagaaattgttttatggtcttcttcacaatttgaatacgttcacttgtctgatgaagtttgtactgggtcttcaattatgcctcaaaaaaagaatcctgatgttgcagaactaattagaggtggctcatcaaagactatagctaatctaatgggcttattgtccttgatgaaaaatctacctctttcttacaacagagacttacaagaagataaagaatttatttttgaaagtatggattattccaatgatagcctacttctacttagccttttaattcaaggcatgaaagcaaatgtaaaaaaaatggaagaagactgtagccttggacaaattactgccacagatttagcagactacctggtggacaagtctatgccttttagaaaagctcatgaaactgtcggcaagatagtggcttatgctgaatctaagaaagtgcaaatatttgaattagagattacagaattaagaaaattttctaaattaatctctgaagatgtaagttctcacttagaccccttgaaatcaataaattctagaaaacttgttggaggtactgctccctctcagattagaaaagaaataaattttgcaaaaaaggtcctagctaaacggtaa

SEQ ID NO: 288211 - DNA, 801 bp, Unknown
  Bacterial polypeptide expressing nucleotide sequence isolated from the Sargasso Sea
aatgacaaataaaatgtggggtggtaggttttctaaagccacaaatgagctactggaagatcttaacgcatcaataaaatatgactatcgtcttgcaaaatatgacattgaagtatcaattgctcatgtaatgatgcttgcaaaatcgggtgttatcaggaaagaagaatgccagttgattgttaatggattaaaaaaagtacaaaaagaaatcagtgacggaaaatttgaatttaagaaaaaacttgaagatattcatatgaatattgagagtagactcacagagattattggtcctattgcgggtaaacttcatactgcaagatcgaggaatgatcaagtcgcaactgatatcagattgttcctaatcgaaaaaataaacggcctcgtaacgctaattgaagaaaatcaaaaaacgctttcacagcaagctctagataattttgatgctataatgcctgggtacacccatctacaaattgcacaacctattacactcggacatcacctgctttcctatgttgaattgttaaatagagataagcttagattgacagatagtctaaagagattagatgagagccctctcggcgctgcagcaatggccggcacatcctatccagtagacagagagtattctgcaaaattacttggctttaataaaccaatgtcaaactctattgatgctgtgtcatctagagacatgcttcttgagacattatcgaatattgctattctatcggtaaatttatccagactcgcagaagaaatcatcctatgggtttctacagaatttaattt

SEQ ID NO: 288212 - DNA, 1411 bp, Unknown
  Bacterial polypeptide expressing nucleotide sequence isolated from the Sargasso Sea
atgacgtcccaactgcacaaaaagggcgaggcctggtcggcccgcttctcggaaccgatgtccgagctggtcaagcgctacacgtcgtcggtgtttttcgacaagcgcctcgcgctcgtcgacatcgccggctcgctcgcgcacgcgaacatgctcgccgcgcagaagatcatcagcgccgacgacctggctgcgatcgaacgcgggatggcgcagatcaagggtgaaatcgagcgcggcgaattcgaatggcagctcgacctggaagacgtccacctgaacatcgaggcgcgcctgaccgcactgatcggcgacgccggcaagcgcctgcacacgggccgctcgcgcaacgaccaggtcgcgaccgacatccgcctgtggctgcgcggcgagatcgaccgcatcggcggcctgctgaacgacctgcgcggcgcgctgctcgatctcgcggaacagaatgccgacacgatcatgccgggcttcacgcacctgcaggtcgcgcagcccgtcacgttcggccaccacctgctcgcgtacgtcgagatgttctcgcgcgacgcggagcgcatgcgcgactgccgcacccgcgtgaaccgcctgccgctcggcgcggccgcgctcgccggcacgagctacccgatcgatcgtcacgccgtggcgaagacgctcggcttcgatggcatctgcgcgaactcgctcgacgcggtatcggatcgcgacttcgcgatcgaattcacggccgcctccgcgctcgtgatgacgcacgtgtcgcgcttctccgaagagctcgtgctgtggatgagcccgcgcgtcggcttcatcgacatcgccgaccgcttctgcaccggcagctcgatcatgccgcagaagaagaacccggacgtgcccgagctcgcgcgcggcaagacgggccgcgtgaacggccacctgatggcgctgctgacgctgatgaagggccagccgctcgcgtacaacaaggacaaccaggaagacaaggaaccgctgttcgacacggtcgataccgttgtcgacacgctgcggatcttcgccgagatggttgccggcatcaccgtgaagccggacgcgatgcgtgcggccgcgctgcagggcttctcgaccgccaccgacctcgccgactacctggtgaagcgcggcctgccgttccgcgatgcgcacgaagccgtcgcgcacgcggtgaagatctgcgacgaccgcggcatcgacctggccgacctgacgctcgacgagatgaagcaggaactgccgaacgtcgcgcacctgatcggcgaagacgtgttcggctacctgacgctcgagggctcggtcgcgagccgcaaccacccgggcggcaccgcgcccgaccaggtgcgtgcggcggtcaaggctgcgcgcgccgcgctcggccagtaag

SEQ ID NO: 288213 - DNA, 1387 bp, Unknown
  Bacterial polypeptide expressing nucleotide sequence isolated from the Sargasso Sea
gatgaaaaagaatagaacagtttggtcaaatagaatcacaaaaggaaattcgaaaaatttccaaaggataggttcatccataaatattgataaaagactttataaagaagatatttttgcatcaatagtacatgcaaaaatgcttattaaacaaaaaataataccaaaaaaagatggttttaaaataataaatggtcttaaaaaaatagaaagagaaataagcaaaaaaaaatttaaatttaaagaacagtttgaggatattcatcaaaatattgagaaaagattatttcaaattattggggagtctgctggctatttgcataccgcgaggtcaagaaatgaccaagttgtaaccgactttaaaatttgggtaaaagactcatcacaagatactattgatacaataaatgatcttatcaaatgtattttgaataaggctgagaaaaatatcaatacggttatgccaggtttcacgcatttaaaaaatgctcaacctgtttcttttgcacattatttgcttgcatacgtggagatgcttaatagggataaaaaaagatttttaaataatattcttttaattgatgagtgcccccttggctcggcagctctggctggcacatcatttaatattgatagaaaatttactgcaaaaaaactaggttttaaaaaaccaacaaataattcaatagattctgtttcggatagagattttgcaattgacttcttatctgcggctgcaacttgtgcaatgcatttatcgagattagcggaagactttattatttttaactctgaagcttttagttttcttgagtttaaagaccaagttttaacaggctcttctattatgcctcaaaaaaagaatccggatcctgctgaattaataagaggaagaacggctattaattatggtaatttaaattctatgttaactataatgaaaggattgccaatatcgtattataaagatcttcaagatgataaaggattggtttttgatagctacgatacacttaaagacagcttgatgatggccattgaacttattcaaaatttaaataccaaaaaaaataatatgagagatatggcgcagaaaggatacacgactgccactgattttgctgattttctctcgatgaaaaaaaatctacctttcagaaaaggctatagtatttcatcaaaattggttaattatgcggaaaaaaagaaaattagattggatcaactttctaaaggtgaaataaataaatttgttaaagaggttaacataaatatacctaaaatgtttgatgtggtgaactctatgaattcaaaaacatcttttggcggaacatctgcaaaaaatgttaaaagaatgattgcaaaatgcaaaaaagaactgaaatga

SEQ ID NO: 288214 - DNA, 961 bp, Unknown
  Bacterial polypeptide expressing nucleotide sequence isolated from the Sargasso Sea
aaaagctgaagaaaatagcgaaactattatgccaggtttcactcatttacaaatggcccagcctgttaccttcggtcaccatctcatggcttggtatgaaatgctatctagagattattctagattacaggatgcaagtgaaagaatgagtgttttgcccttaggctcggcagcattatctggaacaagatttgacataaatagggaattgctaaaaagcaaactgggatttaaagatataagcaagaactccatggacgctgttagtgatagagactttgtattggaattggcttcagtattatcgataattgggatacatctctcgagaatctgcgaagaaatagtgatttggtcttcaagtcaatttaattatgttgagttatctgatgaggtttgcaccggttcctcaatcatgccgcaaaagaaaaatcctgatatggccgaactaattaggggaggttcctcaaaaactatagctaacttgactggtcttcttgctttgatgaaaaacttacctctgacttacaacagagaccttcaggatgataaggaatatatctttagtagtattgatttttcagaagacagcttggcccttcttactgtagtggtaaacggtatggaaccaaataaagctaaaatgaagcaagattgctttcaaggccagataactgcaactgacttggctgattatttggttgaaaagaatatgccttttaggcaggctcatgaggttgttggaaaaatagtagcccttgctgagagtaaagatttgcagatttttgaacttgatttttctgaattaagaaagttttctaaattaatacaggaagatgtaaaagactatttagatccgcagaaaactattctatctagaaaacaaacaggagggacagcgccctcgcaagttaaaaaagaaattaaaaaagctaaattaacgttagagaggagaaaataa

SEQ ID NO: 288215 - DNA, 1393 bp, Unknown
  Bacterial polypeptide expressing nucleotide sequence isolated from the Sargasso Sea
atgaaaaataacacctggtcaggcagatttattaagggtatcgactctgatgttttagatttcagccaaagcttatcagtagatttggtgctctacgatgtagatattcgtgtaacagaagttcatgttgagatgttgtataaatgcaagcatcttacaaaatcggatttccaaaagattgtatctggtctaaaaaaagtaagaaagctagctgatagcggtaaactgccatggtctgttaagcttgaagatgttcatatgaatatagaaaattcactcgtaaagataattggacctgtcggaaaaaaaatccaccttggtagatcaagaaatgatttagttactacagacttaagattatacttgagagaattatctgaattcatcattattaggttaagaaacttgagattttctctagcgaaacttgctaaagtatattcttcagatttatttcctggttacactcatttacagatagctcagcctgtggtttttgggcatcacttgcttgcttgggctgaaatgtttgcaagagacgaaaaaagaattgaaaatgtaatgtcacttatgaatactcttccattggggtcagccgcaatgtccggtacctctctcaaaattgatagaaaatttgtagcaaaaaaacttggctttacgagtgtttcaaataattctatggatgctgtgtctgatagagactatgtcattgacctggcatatagcaattcaatgataatgatgcacctctcaagagtctgtgaggaaatagtattgtggatgaatccccagtttaacctcattgatcttgaccaaggtttttgcactggctcgtctattatgcctcaaaaaaagaatcctgatgtagctgaactcgttagaggaaagactggcagcgtatatggtaacttggtaggattgctcactttaatgaaaggcttgccactcacttacaatagagatctccaagaggataaggaacaaatttttacctctgtggatacaactcttagctgtatcgaaataatatctaagatgattccaacaattgttttaaataagcaaagagcatcggaactatcgagcacgtctttttcaacagcgacggatattgccgaatacctctcattgaaaggaatgccatttagagaggcacaccaccttgttggaaagattgttaagtactgtgaggacaaacattgttctttaggagaaatacctgaatctgagtttcaaaaattctcaagtctgatagagattgatatttataaaaaaataattccaagcaatactgtaaagatgagagctaataaaggggacactgcaccaaaacttgttgaaaaagaagcgagcattctcatcaaagcactaaaaaaatatgaacagaagtaat

SEQ ID NO: 288216 - DNA, 505 bp, Unknown
  Bacterial polypeptide expressing nucleotide sequence isolated from the Sargasso Sea
tatgacaaataaaaataagacagtttggtcaagtagatttaaaagctcaacttctaaatcatttcaaagaattggagcatcaataaacgtggataaaagactttacgcgcaagatatttttgcatctaaaattcatactcaaatgttaattaagaaaaaaattatacctgctaaagaaggtaagaaaatacttagaggactagataaaattgaggggcagattagaaaaggtaaatttatttttgaggaaaaatttgaagatatccatttaaacattgaaaaaaaattatatgaaattatcggtcattctgcaggctatatgcatacagctagatcaagaaatgatcaggtagttactgactttaagctttgggtaaaagattcgtcgcaaattttgattatggaattaaactctttaatgaaaaatattgtcgccaaagcagataaaaatgtgagtacagtaatgccaggttttactcatcttaaaaacgctcaaccaatttct

SEQ ID NO: 288217 - DNA, 1366 bp, Unknown
  Bacterial polypeptide expressing nucleotide sequence isolated from the Sargasso Sea
tttgacaaagaatttaaacaataaaacttcttcagttcaaggtggagaaatatatggagattttactagctcattcgactcagatatccgaatgtactctgaagatatagatgtttccatagcatactctaatatgttgaataagattggagtattgactctagatgaaacgaatcttataaatacagcgttagaagaaattagaaatgaaataaagaatagtgcttttaattgggataaaaaacttgaagatattcacttaaatattgaaaattcaatgtacgagaaaataggcgaagttgcaggcaagcttcattttggaagatctagaaatgatcaagttgcaactgattcaagattatacttcataagaaaaatagattttctaaatacacttataattgatttccttgaagaattagtaaaattatctgaaaaaaatatttcaataatattacctggctatacgcatcttcaaaaaggtcaaccaatattgatttcccataatttaatgtcatatttttctataatttcaagagatttacaacgatttcttaatgctagaaataacttagataatatgccccttggatctggtgcatttgctggagttacaattccaattgatagagaatatttagcaaatgagctaggcttttcaaatatctctagtaattcaattgatggggtatcttcaagagatcatattttagatatactttattcttgctcatcaataatgattaatctatcaagaatttctgaagaacttataatctggaattctgaagaatttgattttataaatattcctgatgaatttacaacaggatccagtataatgcctcaaaaaagaaatcctgattatttagaattaattagagggaaaacaggtcattctttaggacaattggtaaacttagcaacttctctcaagggattaacttttacctacaatagagatttacaagaagatagaaaaggagcaatggactccatagaattagttactcaatcattagaagttattaagaatttattttctaaaatttcttttaatgaagaaaaaatgaataattctgctaataattcaaatattttagcaacagattttgcagattatttggctaataaaaaaataccttacagagaggcttacaagatcataaaagatatttccttaaacctaaaaggaaaatatatacacgagctttcattagacgaattaaggcaattttctaaactttttgaaaaagatgttcttgatatttccctgagaaattccatagaaaatagaaactcaattggtggaacctcaactaattcagttgaaaatcaaattatagaagctaagaattttttaaaa

SEQ ID NO: 288218 - DNA, 925 bp, Unknown
  Bacterial polypeptide expressing nucleotide sequence isolated from the Sargasso Sea
atgcctggatttactcatcttaaaaatgctcaagctatctcttttgcacattatttaatgtcttatgtagaaatgtttaatagagataaaaagagattttcaaataatttagtcagtttaaatgaaaatccattgggtgttgctgcattagcaggtacatcgtttaatatagacagaaattatacaactaaaaaacttggttttaaaatacctacaaataattcaattgatacggtttcggatagagattttgtattagattttttatacgcttcgtctgtatgtgctatgcatatttctagaattgctgaagagttaattatttggcattctgatggtttcaacctgattaatttatctgataaagttgttactggatcatcaataatgccgcaaaagaagaatcctgatcttttagaatacttgcgtggaaaatcaggaaacgcttatggaaatttattttcgatgcttacaattttaaaaggcttaccattgtcttattttaaagatttacaagacgacaaggaaattgtttttaaatcaaacgataatcttaatagttgtttaaaaatttttgatgaagtactaaaaaattgcaatccaaataagagtagaatgttagaacttgctaattctggatacattacagcaactgatttagctgactatcttgtgaataatcactcaatgtcttttagaaaagcatatcaaaaaactgctgcaatagtaaattttgctgaaaaaagaaaaaagaaattaaatgaattgactttagaggaattaagaaaaattgaacctaaacttaaagatgacgtattaaaagtatttaatttaaaaaattcaattaattcaaaaaaatcgtatggtggaacttcttttgataatattaaaaaaatgataatgaaatataaaaaagaaaaatgat

SEQ ID NO: 288219 - DNA, 784 bp, Unknown
  Bacterial polypeptide expressing nucleotide sequence isolated from the Sargasso Sea
tctgggaacaagatttgacatcaatagggaattgctgaaaagtaaactggggtttaaggaaataagcaggaactccatggatgctgttagtgatagagactttgtgttggaattggcttcagtgttatcgataattgggatacatctctcaagaatctgtgaagaaatagtggtttggtcttcaagccaatttaactatgttgagctgtctgatgaggtttgcactggctcctcaatcatgccgcaaaagaaaaatcctgatatggccgaattaattagaggaggttcttcaaaaactatagccaacttgattggtcttcttgctttgatgaaaaacttgcctctgacttacaacagagaccttcaggatgataaggaatatatctttagtagtattgatttttcagaagacagccttgctcttcttactatactaataaacggtatggagccaaataaagataagatgaagcaagattgctttcaaggccagataactgcaactgacttggctgattatttagttgaaaaaaatatgccttttaggcaggctcacgaggttgttggaaaaatagttgcccttgctgagagcaaaaatttacagattttcgagcttgatttttctgaactaagaaagttctctaaattaatattggaagatgtaaaagactatttagacccacagaaaactatcctgtctagaaaacaaacaggagggacggcgccctcgcaagttaaaaaagaaattaaaaaagctaaattaacattagaaaggagaaaataa

SEQ ID NO: 288220 - DNA, 1381 bp, Unknown
  Bacterial polypeptide expressing nucleotide sequence isolated from the Sargasso Sea
tatggcaaaagtttggagtaaaaggtttgataatgcacttgacccttttattgaaaagtttaatgcctcaattggttttgatagaaagcttattttagaagatttagattgttcgattgctcatgcgaaaatgcttagcaaaacaaaagttatatcctcttccgaggcgtaccaaattattaatggtttagaattaataaaagttgagtatttggagggtaaattttctcctagtccaccttctgaagatattcactattgtatagaagaaaagctgataagtttaattggtgaaactggaaaaaaattacacacaggtagaagtagaaatgatcaagttggtacagatataagattgtggctaagaaaagagattgacaatattgaaattttaataactgaattgcaaaaatctttcttgaatcttgcgaaatctaatatttataccttaattcctggatatacccacatgcaaagagcgcaaccattatctttggctcatcatttattggcttacatagaaatgctccaaagagaccgtgaaaggtataaagaagtacgctcaagagttaatatttctcctttgggagctgcagcattagctggaacaaaaataaaaatagatagacattttacagctgcagaattgggttttaaaaagatatataaaaacagtattgatgcagtgagtgatagagatttttgtatagagtttgtttctgcatctgctatattgatgtctcatttaagtaaaatttcagaggaaataattttatgggtaactgatgaattttcttttgcaaaattaacagataaatgtgccacaggaagtagcttaatgccgcagaaaaaaaatcctgacgttccagaattgataagaggcaagacaggaagagtgtatggtcatcttcaggcattgttaacgatggttaaaggggtaccgctttcatataataaagattttcaagaggacaaagagccaatatttgatactgcagaaacaatatcttcttgtattaaagcaatgactattttaattaatgagggcattgaatttgatattgaaaatctatctgattctgtagaaaacgacttttctaatgctactgatttggcagattacttagttgataaagacgtccctttcaggaccgcttatcaagttgttggtcaaatggttaaatattgcttggagagaaaaatgttatttaaaaatcttaaaattgaagaatttaaaaaatttcatcccgaatttgatgaggatgtttttgtagatcttaaacctcttaatgtcgttaaatcaagaaatagcgaaggtggtacaggttttgttcaagtagaaaaagaggtaaataattggcaaaaaagattgttactttga

SEQ ID NO: 288221 - DNA, 1342 bp, Unknown
  Bacterial polypeptide expressing nucleotide sequence isolated from the Sargasso Sea
atgaatgaagagcggaaaaccctttggggggggcatctgatccagaatcccgcgcagcagaacgtccaattctgtgcaggacgcgatgtccgtgaagtgccaatggcggatgagatccttctgcctttcgacatttggaccaaccgcgcccattgcatcatgctggaacaatgcgggctgatccaaggcatgcatctgaccaggatcctgaacggattgcgggaactcgaagattcgatcgagaaaggaaccttcagactgaaaccggagttggaagacgttcataccaacgttgaggtatttgtcagcgaagcccagggagcggatgctggaggacggatgcacatcggcagaagccgtaacgaccagtcagcctgcgatatgcggctttatcttcgcaacacagcaatcgggctgttcggggaggtgaaaagttttgctgaaaccctgctcgatctcgctgaagaacataccgggacggtgatgccgggttttacccattaccaacctgccatgatcaccagttgggggcactggctctgtgcttatgttcaggggctttgcagggatctggaacggctcgtttttaccctcaggctggtcaaccgtaacccgttgggagccgctgccggattcggaagttcctggcccctcaaccgtgaattgaccaccgagttattggggtttgatcatgtggaaagcaactcactggactgcatcgtttcccgttgggaaaacgaagcccagctggcccatgccttcagcatgttgatgaaccgcctcagcgtcatctcccaggacctgatcattctcagtctgccctacctgaagatggtccgcatcgatgacggattcgtcaccgggtcctcgatcatgccgcagaaaaagaatccggattttgcagaagtgatccgttccaaggcggcttttgtccagggacagctgcagagcctgctgggaattcagaaaggcgccctgagcggctataaccgggatacccaatggacgaaatacttgattatggatgtggtacgggaatgtgaagatgctcccggaatcctctgtgaagtataccgtaccctggaagtcgacatggatgcaatgcggcggcattgtcaaagcggattcatgaatgccgttgacctggcagatttgctctgtcgggaaaacggtcttgccttccgcgaagcccacaacatcattgcccgggccgtcaagttgagttcagaatccggctccatttccacggattctctgaaaaaggcttttcaggaatcgggacgagatccgcaagaacttcctgaaaacatcgaagcctaccaaaatccctcgactctgatcg

SEQ ID NO: 288222 - DNA, 826 bp, Unknown
  Bacterial polypeptide expressing nucleotide sequence isolated from the Sargasso Sea
tatgactaaaaaaatttggggtggtagatttactcaggaaactgacaatgatgcagagaattttacgtcctctattaaaatagataagaatctttataattttgatattttgggatctattgcccatgtcgaaatgctttcaaaacaaaaagttatatcaccatcggacaagaataaaattatagttggtctaaaaaaaatcttaaaagaaattgaatcagataattttatcttttctcatcaacttgaagatattcatatgaatattgaaaattcattaataaataaaattggaacagctggcaagaaagttcataccgctagaagtagaaatgatcaagtagcaacagatataaaactattcattaaagatatggctataaaactaaagaatgacttaataaaacttcaaaaagtaattattaaaaagtctgaaaaaaacatcaacgttataattcctttttatacacatctacaaagggctcaacctatattagcttctcattatttactagctttctttgaaatgtttgccagagatattgaaaggattgatgatacaataaaaaggcttgatgaaagccctttaggagcttgtgctggttcagggacgtcttttaatatagatagatttcatacctccaagaaattaggctttaaaaaacccaccagaaatagtattgattctgtcagcgatagagattatgttgctgattcaatctatacctgctcaattataatgatgcacctttctagattctgtgaagatttaatcttatggaatagtgcagaatttaatttcataaaaattggagatagcttcaca

SEQ ID NO: 288223 - DNA, 595 bp, Unknown
  Bacterial polypeptide expressing nucleotide sequence isolated from the Sargasso Sea
atggctggcggggttacgggtggctcggatggaacctggagcgatcggtttgagcagggacttcatccttttattgagcgcttcaacgcgtcgatcgggtttgatcttgcgcttctccaggaagatttagatggttcgatcgcccatgcccgaatgcttgcgggttgcggagtgatcacaactgacgaggcggatcagattgtcgggggcttagagacgatccgtgctgaagcggccagcggcgtttttcagccgggactggcggatgaggatgttcatttcgccgtcgaacgccgtttaatcgccttactgggaccaatcggcaaaaagctccataccggtcgcagtcgtaatgatcaggtcgggaccgatctccgactctggcttcgtcgtcgtcttgatgaactcgatcctggtctgggccgattgcagacggcgttgtggcggcaggcggatcgccatcgcagcacgttgattcccggttacacacacctgcagcgggcacagccgctctgtcttgctcaccatctgctggcctacatcgaaatgcttcagcgggatcgcgatcgtcttggagatgtccgcaaacgggtga

SEQ ID NO: 288224 - DNA, 815 bp, Unknown
  Bacterial polypeptide expressing nucleotide sequence isolated from the Sargasso Sea
aatgaaaaataaaaataagacggtttggtctaatagatttagtaaaggaaattctagaaattttcaaagaattggatcatcaataaatatagataaaagactttataaagaggatatttttgcgtcaattattcacgctcaaatgctagttaagcaaagaattatcccaaaaaaagatggagctaaaataataaaaggtctaaaaaaaatagaaaaagaaattgaaaaaaataaatttaaatttaaagaaaaatttgaagatattcatcttaacattgaaaaaagactgtttgaaattattggtcaatctgcaggatatctccatactgctagatcaagaaatgaccaagtagtaactgattttaaaatttgggttaaaaaggcatcatttgatattaatgatactttaaatttattaattgaatctattttgaaacaagcagaaaaaaatattgatactgttatgcctggttttactcatctaaaaaatgcacaacctatttcttttgcacactatttattagcctatgtagaaatgcttaacagagataaaaaaagatttttaaataatattgaattaattgatgagtgccctttagggtctgcggcattggctggaacatcttacaaaatagatagacaatttactgcaaagaaacttggttttaaaaagcctactggtaattctattgatgctgtttgtgatagagattttgcaatagattttttatcagcagcagctacatgtgcgatgcatatgtcaagattagctgaggattttattatatttaattctgaagcttttaattttttaa

SEQ ID NO: 288225 - DNA, 574 bp, Unknown
  Bacterial polypeptide expressing nucleotide sequence isolated from the Sargasso Sea
catgagtaaaaataaaaacaataaaccaatttggaatacaagaataaaaaaagagtccacaaacctttttaaaaaggttggtagctcattatcagtcgacaaaagattatttaatgaagatattgaaggatctattgtacatgtggaaatgctatttaaacaaaaaataattaattttaaaataaaaaataaaattgtttggggactaaaaagaataaaaaatgaaattataaaaaaaaaatttatgtatgatgaaagtctagaagatattcatatgaatatagaaaatagactttttgaattaattggtgaagatgctggatttattcatacagcaagatctagaaatgatcaggttattacagattttaaaatttggttaaaaaaagcaactaaagaaataattgggaacttaaatcttacaattaaaaacattttaaaaagtgcagacaagaatgttgaaacaataatgcctggctttacacatttgaaaaatgctcaaccagtttcatttgctcattatctattagcttatgtcgaaatgtttaatagagacaagaaaaaattatcaaca

SEQ ID NO: 288226 - DNA, 1254 bp, Unknown
  Bacterial polypeptide expressing nucleotide sequence isolated from the Sargasso Sea
atgttgaaatgctttttagacaaaagataatttcctttaaaataaaaaacaaaattatttatggtctaaataaaatttataaagaaataacttacaaaaaatttgaatttaataaaaaatatgaagacattcatatgaatatagagaaaagattatttcaaataattggtgatgaagctggatacattcatacagctagatcaagaaatgatcaggtaataactgattttaaaatttggattaaaactgcaacaaaagacattaataataatatagataaagtaatcaaaagcacaattaaactggctgaaaaaaatatagagactatcatgccaggatttactcatcttaaaaatgctcaagctatatcatttggccattatttaatggcatatgtggaaatgttcactagagataaaaaaagatttttaaacaatttagataatttagatgaaagtccattaggtgtagcagctctatcaggcacttcgtttaatatagatagaaattttacatctaaaaaacttggatttagaagaccaaccaataattcaatagatacagtttcagatagagactttgtgctagattttctttatgctatttcagtatgttcaatgcatatttctagaattgcagaggaattaattatatggaattcagatggatttaacttgatcaacttgtcagataaagttgttacaggctcttcgattatgcctcaaaaaaagaatcctgatctcctagaatatctaagaggaaaaactggcatttcttatggaaattttttttctatgctaaccatactaaagggcttgccactatcctactttaaagatttacaagatgataaggaattagtttttaactctaatgacactctaataaattgcttaaaaatatttgatgaagttttaaaaaattgcagtgcgaataaaaagaaaatgcttgaacttgcaaatacaggtcatattacggcaacagatttagctgattatttggttagaaaacacaacatgtcatttagaaaggcatatcaaaaaacagctgctattgttaacatggctgaaaaaagaaagaaaaatttaaacgaattaagtttaaatgaactcaaaaaaattgaaccaaaattgacagaagaggttttggaaattttcaatttaaaaagctctataaattcaaaaaaatcatttgggggaacttcttttgaaaatattaaaaaaatgataactaaatataagaatctaaaatgat

SEQ ID NO: 288227 - DNA, 609 bp, Unknown
  Bacterial polypeptide expressing nucleotide sequence isolated from the Sargasso Sea
taattatatggaattcagatggatttaacttaatcaacttgtcagataaagttgttacaggctcttcaattatgcctcaaaaaaagaaccctgatcttctagaatatctaagaggaaaaactggtgtttcttatggaaattttttttctatgctaactatactaaagggcttgccactatcctattttaaagatttacaggatgataaggaattagtttttaattcaaatgacactctcataaattgcttaaaaatatttgatgatgttttaaaaaattgcagttcgaataaaaagaaaatgcttgaacttgcaaacacaggtcatattacggcaacagatctagctgattatttagttagagaacacaacatttcatttagaaaggcatatcaaaaaacggctgctattgttaacatggctgaaaaaagaaagaaaaatttaaacgaattaactttaaatgaacttaaaaaaattgaaccaaaattgacagaaaaggttttagaaattttcaatttaaaaaactctgtaaattcaaaaaaatcatttgggggaacttcttttgaaaatattaaaaaaatgataactaaatataaaaaactaaaatgat

SEQ ID NO: 288228 - DNA, 951 bp, Unknown
  Bacterial polypeptide expressing nucleotide sequence isolated from the Sargasso Sea
aatgaaaaataaaactgtttgggcgaatagactaaagggaaagacatcactttcttttcaaaaaataggctcatctataagtgtagataaaagactttatgagcaagatatagctgcgtccattgtgcatgccaaaatgctcgttaaacaaaagattattggcaaaaaagaaggatctaaaattatcaatggtcttaaaaaaattaaattacagattgataagggaaagtttaaatttcaagaaaaatttgaggatatacatttgaatatagaaaaaaaattatttgaattgattggtccttcagcaggctttttgcacacggctagatcaagaaatgatcaagtagttacagatttcaaattatggattaaaaaatcatcaaaagaaactatagctaacatttactctttaatgaaaattttaatcaaaaaagcagagaaaaatgttgatactgttatgcctggcttaacacatcttaagaatgctcaacctatttcatttgcacattatcttctgtcttactttgaaatgtttaaaagagataaaaaaagattcgaaaataatataaaacttttaaatgagtgcccattaggttcagccgcactagcgggtacttcttataaaatagatagaaattatacttcaagacaacttggttttaagaaaccgactgataattcaatagattctgttgcagatagagactttgcagtagattttttatatgcctctgctttatgtgcaatgcatttatctagattagctgaagattttataatttttaattcaaatgcatttaatttaatttcatttgatgacagtatgttgactggttcatcgataatgccacaaaagaaaaatcctgaccctgctgaattaatcagaggtagagttggtttgaactatggctatttaaattcgatgcttactataatgaagggacttcgcaa

SEQ ID NO: 288229 - DNA, 1387 bp, Unknown
  Bacterial polypeptide expressing nucleotide sequence isolated from the Sargasso Sea
aatgaccaaaaagaataccagttggggaggaagatttactcaatcggtatcagcaatagctagtaaattttctaactctattgatgttgattctgttcttgcagaaaaagatattattggatctatagcatatgcagaatctttacaggaagcaggagttattaataaatcagagctcatcaagattaaacgcggtcttaatcaaataaaaaaagaaatagaaactggaaaatttaaatggaatccttcgcttgaagatgttcatatgaatatcgagtcagccctagaaaagaaaattggagattctgcaaaaaaattgcacaccggcagatcaagaaatgatcaggttgttacagacctaaagctttttctcaaagatgaaaccaaagctataaagaaaaaagttaaagacctacaaaaaagtattttaaataaagctcaaaaacattatgcagatctcatgccaggctttactcatctgcaaatagctcagccggtaaccttaggccatcatttgcttgcttactttgaaatgttgcaaagagactatattagatttgaaaataacgaaaaaactcttaatcaaatgcctttaggagttggtgcattagcaggcaacagatttggcataaatagaccaaagcttgcaaagaaacttggtttcacagatattacaaagaattcgatagatacagtaagcgacagagattttgttaccgacgtttcctatagttgttcaatgcttgctgttcatttgtcgagaatgtcagaagaaataattttatggtcatcctcgcaatttgattatgttcagctacctgaagagttatgcaccggctcatcaatcatgcctcaaaagaaaaatcctgatatggcagagctcattcgaggaggcagctctcaaactttaggcaaccttgttacaactctatctttaatgaaaaaccaaagcctttcatacaatagagataatcaggaagacaaagaacctctttttaaatcaattaatttcatcaaggatgccttagagattatgtctgaaatgattaaaggtatgagttttaacattaaaaaaatgatacaggacctagatctatctgaggttggagcaactgattttgctgagtatttggttttaaagggcgtccccttcagagaagcccatgaaataaccggcaaaacagtaaaagaagctgaaagaaaaaatttatttattagagaatttaatttgagtgaattaaaaaaaatacatccaaagatagagaaagatatttataaatttattgatcccaaaaaagccatacacgctaagaacagtctcggcggaacatcgcccaaaaaagtcaaagcagctatcatcgcagccaaaaagactgtttcttcatga

SEQ ID NO: 288230 - DNA, 807 bp, Unknown
  Bacterial polypeptide expressing nucleotide sequence isolated from the Sargasso Sea
tatgacaaataaaaataagacagtttggtcaggcagattcaaaagctcaacttctaagtcatttcaaagaattggagcttctattaacgtagataaaagactctacgaacaagatatttttgcatcaaaaattcatactcaaatgttagttaaaaaaaaaattatacccgcaaaagaaggtaaaaaaatacttaaaggattagaaaaaatcaaaggccaaattagaaaaggtaaatttattttcaaagaaaaatttgaggatatacatttaaatatcgaaaaaaaattatatgaaataattggcaactcagccggttatatgcacaccgctagatcaagaaatgatcaggtggttactgattttaagctttgggtaaaagactcatctcttattttaattaaagaattaaattcacttatgaaaagtattgttaataaagcagataaaaatgtgggcattgtaatgccaggtttcactcatctaaaaaatgctcagccaatttcttttgctcattatcttttagcttattatgaaatgttgaaaagagatcaaaaaagatttcaaaataatcttgagttaattgatgagtcacctctaggagctgcagcattatctggaacttcttacaatatagatagaaattttacatctaaaaaattaggatttaagaaaccgacaaataactcaattgatacagtctctgatagagatttcgctatagactttctttatgcttgtgctgtctgtgcaatgcatttatcgagactggctgaagattttataatactaaattcagacgcttacca

SEQ ID NO: 288231 - DNA, 1160 bp, Unknown
  Bacterial polypeptide expressing nucleotide sequence isolated from the Sargasso Sea
tttgacaaagaatataaataataaaacatcttccgttcaaggaggtaaaatatatggtgattttactagttcttttcattctgacataaggatgtattctgaagatattgatgtatcaatagcttattctaaaatgctaaaaaaaattggaatattatcttctcaagaaagtgaattaattaagaactctttagaagaaattaggaaagaaataaaagacaacatatttgattgggatgacactctagaagacattcacttaaatattgagaattcaatgtataaaaaaataggtgaagttgctggtaagcttcattatggaaggtctaggaacgatcaagtagcaacagattctcgattatatttcctaaggaatgtggatttaattatatcttctataattaaatttttagaagttcttattaagctttcagaaaaaaatattgaacttttattgcctggctatacacatctacaaaaaggccaaccaatcctaatttctcataatttgatgtcatacttttctatgatttctagagatcttagtcgtttccagaatactagattcaatttagataacatgccactcggttctggtgcgtttgctggtgtcacaattcccttagatagagatttattagctgatgaattaggattttctagagtttcatcaaattctattgactccgtatcatcaagagatcatattactgatttgctttattcctgttcgtctatcatgataaatttatctagaatttctgaagaattaataatttggaatacagaagagtttaattttattaatattccagatgagtttactactggttcaagtattatgccccaaaaaagaaatcctgattattttgaattaataagaggtaaatcagggattcctataggccacttagtatcacttttaacttcactaaaaggacttactttcacatataatagagatttgcaagaagatagaaaaggagcaatggactcaattgaaattgtttctcaatcccttgaagttttctcaaatttattttctaatctgacatttaatcaaaaaataatgctagattctgctcataattctaatattttagctactgactttgctgattatttagcaaataaaaaaatgccttatagagaagcttatg

SEQ ID NO: 288232 - DNA, 1276 bp, Unknown
  Bacterial polypeptide expressing nucleotide sequence isolated from the Sargasso Sea
atgacaaaaattaaaaacaatgatgcaatttggggtaccagaattaaaagtaaaacttcctcagttttaaagaaatttggaagctcaataaatattgataaaagattatataacgaagatataaacgcgtctattgcccatgttgaaatgctttatagccagaaaataattaatttaaaaattaaaaataagattatttggggactaaataaagttctcttagaaattaaaaaaaataaatttctatttaaagaagagcttgaggatatacacatgaatatagaaaaaagattatttgaactaattggtgaagatgcaggatttgttcatactgcaagatcaagaaatgatcaggtcattacagatcttaaattatggatgactaaatcgtccaaagaaattttaaaattatatgatcaaattattaaaaattttttaaatattgcagaaaaaaacatcaaaactgttatgccaggttttactcatttaaaaaacgcacagcccatttcatttgctcattatcttttggcttacgtggaaatgtttggaagagataaaaaaagacttactaataacttagaagatttatctgaaaatcctcttggagttgcggcattaactgggacttcatttaacataaacagaaactatactactagaaagttgaaatttaaatttccgactaaaaattctattgatacagtctctaatagagattttgtacttgattttttatattcaaactctgtttgtgctattcatatttcaagatttgcagaggagtttataatttggaattctgatgcttttaatttaattactctaaaggataatatagtaactggatcatccatcatgcctcaaaagaaaaatcccgaccttttagaattattaaggggaaaaagtgcattaagttttggctatttattttcaatgctaacaatacttaaaggactgcctctttcttattttaaagacttacaagacgataaggagcttgtctttaaatcctttgatcaaaccaaattatctttgttatcacttaatgaaatattaaaaaattttatagttaataaaaaaaatatgctttctcttgctcaaaaaggtcatattgttgcaacagattttgccgattatttagtgaaacataataactactcatttagaaaagcttacaaaattacatcctctgtagttaattactgtgaaaaaaaaagaaaaaatttatctgatttaaattttgtagaaataaaaaaattagagcccaggagtaaaa

SEQ ID NO: 288233 - DNA, 1036 bp, Unknown
  Bacterial polypeptide expressing nucleotide sequence isolated from the Sargasso Sea
tatggctaaaaaagaaaaacaaataaatcctctatggggaggtagatttgaatctgggactgatgctctcgctcagtcattttctgcatccattgacatagataaaagactctttgaggtcgatatcaaaggttcgattgcatatgccgagatactaaatgtggcgaatttaataaattcctctgaactaaagaaaataaaaaaaggtctcaataagattttagatgagataaatcaagataaatttaattgggatccagacctagaggatgttcatatgaatattgaggcaaggcttgtaaaaattgctggtacagccgcaaaaaaaattcataccggcagatctagaaatgatcaagtagcaacagatttaaggctatttctaaaaaaccaaatagacgagattctaaacttattaatcttgcttcaaaaatctttattaaacaaagctgacgaaaataccgatactttgatgcccggtctaactcatcttcaaattgcacaacctgtaacttttgggcatcacctaatggcctggttcgaaatgctatccagagattattcgaggttagaagatgcaaaaaaaagaatggatgtcatgccattaggttctgctgcattatctggaacaagatttaatatagataggaaatttcttgctaagaagctgggttttgaaaagataagtagaaattctatggatgcagtgagtgacagagactttgttctggagttagcttcttctttatcaatagtaggaattcatctttcaagaatttgtgaggagataataatttggtcttcaagccaatatagttatatctatttatctgatgaagtgtgcacgggctcttcgataatgcctcaaaaaaagaatcctgatatggcagaactaattagaggaggtgcctccaaaactatcgctaatcttatggggcttctgtcattgatgaaaaatcttccattaacttataacagagatttacaggatgataaggaatacattttcagtagtatagatttcactaaagatagc

SEQ ID NO: 288234 - DNA, 1390 bp, Unknown
  Bacterial polypeptide expressing nucleotide sequence isolated from the Sargasso Sea
atgagtaaaaataaaaacaatcaaccaatttggagcacaagaataactaaagggaaaaagactttgtttagtaaggttggggggtcgttattagttgataaaagattatttaatgaagatattgaggcatcaattgttcatgttgagatgctttttaaacaaaaaataattaattttaaaataaaaaacaaaataatatggggtcttaaaagaataaaaaatgaaattataaaaaaaaaatttatattcgacgaaaatctagaagatattcatatgaatattgaaaaaagactatttgaattaattggtgaagaagcagggtatgttcacactgcaagatcaagaaatgatcaagttataaccgactttaaattatggctaagaaaagcaaataaggagataattaaaatccttaatatgataattacaaacataactaaaaaagctaaaaataatattgaaactattatgccaggatttactcatttaaaaaatgcacagccagtttcatttgctcattatttaatggcctatgttgaaatgtttgagagagataaaaaaagatttaataataactttgttagtatcagcgagaatccacttggagttgctgcgctaacaggaacctcttttaatattgatagattttatacatcaagaaaactaaaatttaataagccaacaaaaaattctatagatactgtatcagatagagattttgtaatcgattttctttattcttgcgcagcgtgtagtgtccacatttcaagaattgcagaagaatttataatatggaactcagatgcctttagattaataaatctaaacgataaaattgtcactggatcgtcaataatgccacaaaaaaaaaatcctgaccctctggaatatttaagaggcaaaactggcatatcatttggcaatttattttctatgttaactgttttaaagggtttacctttatcatattttaaagacttacaagatgataaagaaataacttttgcgtcatttgatcagttaaaaaattctctaattatattaaatgatattataaaaaatttttctgcagacaaaaagagaatgttgcaacttgctgaaacaggttatttgactgcgactgacttagcggattatatggttaaagaattaaattattcatttagaagagcttatttacaaactgcaaagatagtaaattatgctgagaaaaccaaaaaaaaactatcagagcttaaattggaagagataaataaatttgagaaaaggctagacaaaaatgttttaaaagtctttgatttaaaaaactctgtaagatcaaaaatttcttatgggggaacttcttttgagaatataaagaaaatgataaataattataaaaagatttaaa

SEQ ID NO: 288235 - DNA, 1390 bp, Unknown
  Bacterial polypeptide expressing nucleotide sequence isolated from the Sargasso Sea
aatgaaaaataaaaataagactgtttggtcaaatagatttggaaaaacaaattctaaaaattttcaaagaattggtgcttcaataaatgtcgataaaagactttacaatgaagatatccaggcatcgattgttcatgtgcaaatgctaataaagaaaagcataattccaaaaaaggatggaattaaaataatcaaagggttaaaaaaaattaaaactgaaattgataaaaataaatttaaattcaaggagaagtttgaggatattcatcaaaatattgagaagagactttttcaaattattggggactctgcgggtcatttgcatacagcgagatctagaaatgatcaagttgtaacagattttaaaatatgggttaaaaaagcttcgatagacataaatgatacgattaattcattgataaaatctattttaaaaaaagcatcaagaaatattgatactgttatgcccgggttcacacacttaaagaatgcacaacctatttcttttgctcattatctgctcgcatatgttgaaatgctttacagagataaaaaaagatttaaaaataatataagtttaattgatgagtgtcccttaggatctgcagctttagctggaacctcatacaatattgacagaaattatactgctaaaaaacttggttttaaaaaacctactggtaattcaattgattcagtttctgatagagattttgctatagattttttatcagcttctgctacttgcgcaatgcatttgtctagattggctgaagattttataatttttaattccgaagcttttagttttattgaattcacagataaagttctaacaggatcatcaataatgcctcaaaagaaaaatccagaccctgctgaattgataagaggtagaacagcaataaattatggaaacttaaattctatgctcacaatcatgaaaggtttgccaatttcttattataaagatttgcaagatgataaagagttggtttttgatagttttgatactttaaaagatagtttgtctatgtctattgaactaatcgataacttaaacacaaaaaaaaataatatgaaaaatatggcccagaaaggttacacgactgccacagattttgctgactatttgtcccaaaagaaaaatctaccttttagaaaaggttatgctatttcttcgaagttagttaattatgctgagagagaaaaaattagattagatcaactttctttgaaagagattaataaatttattaaaaatactaatataaatattccaaagatatttgatgttgtaaattcaatgaattcaaaaacttcatatggaggtacatcaacaaaaaatattagaaaaatgataaaacaatataaatcttatttaaattaa

SEQ ID NO: 288236 - DNA, 1405 bp, Unknown
  Bacterial polypeptide expressing nucleotide sequence isolated from the Sargasso Sea
atgaataataatgataaaaccaacccgttatggggaggaagatttaaaggtaaagcagatgaaactgctttaaagttctctgcttcagtagatttagataaaagactttataaagaggacatagaaggctctattgtctatgctatggcactcaaagaagcaaaagtaataacccaaaaagactattctcagatcaaaaaaggcttactagccatatcaaagtctatagaaaatggaaaattccattgggacgtaaaccttgaagatgttcatatgaatatagagtctgctttacaaaggaagataggcaaggcagccaagaaattacacacaggcagatcaagaaatgatcaagttgcaacagacctcagattattcctaatgagaaaaattgatcttattcttcatgaaataagctcgactcaaaaaaggataactaaattagccaaaaaatatcatgaagccataatgcctggacttacgcatactcagattgcccagccaattacctttggtcatcaccttctggcatggaacgagatgctagaaagagattattcaagatttaaagaagtgaggaagagagcaagtattcttcctctaggttcttcagctttatcgggcaatagctatggattagatagagaaaaaatggccgaaagacttggatttgattcagcttcgaataattctatggattcagtaagtgatagagactacgtagtagaatttctgtctgctgctagtctcttaggaatacatctatctaggataaacgaagagcttatattgtggtcatcatcccaatttaactatattgaactcagtgaagagttctgtaccggatcttccataatgccgcaaaaaaagaatccagatattgctgaactcttaagaggaggatcctcaaagcctatttcttatttgatggggattctgtcattaatgaagaatttaccgctttcctataatagagacctacaggaagacaaacatttcttatttaatggtatagattactgtctaagcagcttagagatattttctctaatgattcaaagcttaaaaccaaatttagatcaaatgaaaaatgattgtgaaaaaggacatataactgcgaccgaacttgcggactatcttgtatctaaaggaatgacatttagagctgctcataagaaaacaggagaattagttgctgatgcagacaatgaaaaccttcagcttcatgaactatctctggataaactaaaaaagagatgtaaattgattgaggaagatgtttttgagtgcttaataccagaaaatgcattgaaattaagagattcaaaaggaggaacttcaccaaaagaagtcttgaaacagataaaaagaatagaaagagacttaaaaaagagagctatatgaa

SEQ ID NO: 288237 - DNA, 1462 bp, Unknown
  Bacterial polypeptide expressing nucleotide sequence isolated from the Sargasso Sea
gatgtatcgttcccgattaggaaaagatcttgatgatatcacgttaagctatgtttcatccataaaagatgattctgacattgcattttatgatatcataggaagtgaagcacatgtaatcatgttatatgaaaataaactcttgtcaaaaattgaaacaaaaaagatcttgaccgcgttagaagaattaaagggaggaaacatctctcagcctgattttgaacctgaagatatacatgaattaatagaatctctagtaatcaaaaaaactggaatcgaaaatggcggaaaaatgcatactgctcgttcacgaaatgatcaagtagcacttgatattagactaaaaattcgcgatgacattaacatacttttacaatgtctaatcgaaacaatttctactcttctgaaaactgcacaagaaaatacaaaaacaataatgccactttacactcatcttcaacaagctcaagttggagtattttcacactatttactttcatatgcagattcgttgttacgtgatctagatagattcatgtcattgtatggacgagtaaatcaaagtccattaggagcaggtcctgtaggtggtacaagtcttcctattgatagagacagtactgcaaaactacttggattctcatctcttgtagaaaattctatcgatgcaacaagtacgcgtgactttgtggcagaatatgttgcaaattctgcaattatgatgacaaatctaagtcgtttgtctgaagattttattatttggtcttcagctgaattttcattcatagaactttctgatgattttacatctccatcaagtgtaatgccacaaaagaaaaatcccgatatcttagaacttacacgaggaaaaacatctcaagttattggttatctaacatccatcttaactaccactaagggacttccatctggatacggaagggatttgcaacaaataaaatcttcaatttggtcaacatcaaaaacatcaatcactgcattaattataataaaatcaatgttatctgatcttacagtaaaccaagaaaaaatgcaaaaagcaacagaagaaggatttcttgttgcattagatcttgctgaaaatctagttcttgaaaaaataccatttcgtgcagcacataacattgttggaaatcttgttcaattggcacataattcaaaaaaattactttctgaccttgaattaagtgagattgaatctcttagaattaaagacattaaatccactaaactttttgaattaattcaaaaaacaacagtttcttcatctctaaaacaaagaaaatcaaaaggatctgctggaacctctgaacagacaagaatgattgggcagagaaccagaaaacttgtcactcttaaaaaatctgtaaagactcaaaatgataatgtgaaaaaatcactgacctttttagaaaaacgtgttaaaacacttacaaaatag

SEQ ID NO: 288238 - DNA, 1393 bp, Unknown
  Bacterial polypeptide expressing nucleotide sequence isolated from the Sargasso Sea
catgagtaaaaataaaaacaataaaccaatttggaatactagaattaataaaaattcaaataatctatttaaaaaaattggtggatcattacaagtagacaaaagattatttaatgaagatatagaaggatctattgttcatgttgaaatgttatttaagcaaaaaataattaattttaaaataaagaataaaattgtctggggattaaatagaattagaaatgaaattataaaaaaaaaatttaaatttaatgaaaatcttgaagatatacacatgaatatagaaaatcgactctttgagttaattggagaagacgcaggtttcattcatactgcaagatctagaaatgaccaaatagttacagattttaaaatttggttaaaaaagggaactaatgaagtaattaaaaatttaaatattacaattaacaatattttaaaaattgcaaataaaaatgttgaaacaattatgccaggatttacacatttaaaaaatgctcagccagtttcatttgcacattatctattggcatatgttgaaatgtttactagagataaaaaaaggtttaataacaatctcgaaaatcttaatgaaaatcctcttggtactgcagctttaacaggaacatcatttaatatcgatagattttatacaacaaaaaaacttaaatttaataagccaacaagaaattctatagatactgtttctgatagggattttgttattgattttttatatgcttgttctgcatgctcaatacatatttcaagaattgcagaagaatttataatatggaactcagatgcttttaatttaatttctttaaacgataaaattgttactggatcatctataatgcctcaaaaaaaaaacccagatccgttagaatttttaagaggcaaaacaggaggttcattcggaaatttattttcaatgttaacaattttgaaaggtcttcctttatcttactttaaagatcttcaagatgataaagaactggtatttaattcatttgatcaattgaaaagctctttaataatcttaaatgatattttaaaaaatttttctgtaaataaaaaaagaatgttagaacttgctggctcaggttacctaactgcaactgacctcgcagattatatggtaagagaactaaattatccgttcagaaaagcttacttacaaaccgcaaaaataattaattttgctgaaaaaaataagaaaaagctcaatcaacttaaaatagaggaaattaaaaaaattgaaccaaaattaaatagtgatgtttttaaagtttttgacctaaaatattcaataaattcaaaaacttcatttggaggaacttcttttgtgaatattaagaaaatgataagaagttataaaaaagatttataa

SEQ ID NO: 288239 - DNA, 1078 bp, Unknown
  Bacterial polypeptide expressing nucleotide sequence isolated from the Sargasso Sea
atgagcagcgaaaaaaccaaccaatcctggggcggccgcttcagcgaacctgtcgacgccttcgtcgcccgcttcaccgcctcggtcgaattcgacaagcgcctgtatcgccacgacatcatgggctccatcgcccacgcgaccatgctggccaaggtcggcgtcctcaccgatgccgagcgtgacgccatcattgatgggctcaagcagatccagggcgagatcgaagccggccagttcgactggcgcgtcgatctggaagacgtgcacatgaacatcgaagcgcgtctgaccgaccgcatcggcgttactggcaagaagctgcacaccggtcgttcgcgcaacgatcaagtggccaccgatatccgcctgtggctgcgcgacgaaatcgacgtcatcctcgccgagatcactcgcctgcagcagggcctgctgggattggccgaagccgaagcggacaccatcatgccggggttcacgcacctgcagaccgcccagccggtgaccttcggtcatcatctgctggcctggttcgagatgctgtcgcgcgactacgaacgcctggtcgactgccgcaagcgcaccaaccgcatgccgctgggctcggcggcactggccggcaccacctacccgatccagcgcgaaatcaccgcacaattgctgggtttcgacgccgttggcggcaactcgttggacggtgtatcggatcgcgacttcgccatcgaattctgcgccgccgcctccctggcaatgatgcacctgtcgcgcttctccgaagaactggtgctgtggaccagcgcccagttccagttcatcgacctgccggatcgcttctgcactggctcctcgatcatgccgcagaagaagaacccggacgtgcccgagctggtgcgtggcaagaccggccgcgtgttcggcgccctgactggcctgctgaccctgatgaaaggccagccactggcctacaacaaggacaaccaggaagacaaggaaccgctgttcgacgctgccgacaccctgcgcgacagcctgcgtgccttcgccgacatggtcccggcgatcaagcccaagcgcgaga

SEQ ID NO: 288240 - DNA, 1369 bp, Unknown
  Bacterial polypeptide expressing nucleotide sequence isolated from the Sargasso Sea
catggctttatggggtggaagatttcagggcgaaaccagcgcgctatttaaattattcaacgattcactgccggtggattatcgtttgtttgagcaggatgtagtcggctctatcgcttgggccgatgcaattgctagcgtcggcattatcactgccactgaatgcagcgacttgaagaaagcgttgaacgagctgctggtggaagtgaagggcgatcctgcgattattctcgcctcgggcgcggaagatattcacagtttcgtggaatctgcgttgatcgccaaagtcggcgatctgggaaaaaaactccatacgggccgtagccgtaacgaccaagtcgcgaccgacttaaaactctggtgccaatccgaaggtgcggcattagtggctcgcctacaaaccttacgcagcgaacttatcgcgcttgctgagcgtgaatttgatgctgtaatgccaggctatactcacttgcaacgtgctcaacctgtgaccttcggccattggtgtttagcctatgtggaaatgattgagcgtgatcttagccgcttaaccgatgccttaaagcgcgccaatacctgtccgctcggttcgggtgcattggcgggcacagcctatcaaatggatagatatgcgcttgcagcagcactgaactttgcttcgccaaccttaaacagtttggatagcgtgtcggatcgcgaccatgtggttgagctgtgcggagccgcctcaatcagcatgatgcacctaagccgcatggccgaagatttgattttcttcaatacgggtgaagcgggctttatctccttgagtgatgaagtgacctcaggctcgtccttgatgccacaaaagaaaaaccccgatgcgctggagctgatccgcggtaaaacgggtcgtgtgtacggcagtttagtgggtattctcaccaccatgaaagccctgcctctggcctacaacaaagacatgcaggaagacaaagaaggcttgttcgacgtggtcgacagctgggcaatctgcttagatatggcggcgctggtattatctggcttagtggtgaatcgcccgaatgcgctgttagccgcgcagcaaggttatgccaacgcgaccgaattggcggattatctggtgtctaagggcatgccgttccgtgaagcgcaccatgtcgtcggtgtggccgtggttgcggcgatcgctaagaagatcccgttagaaggttttacgctggccgagtttaaaacctttgccgatatcatcgaagatgatgtgtatcccaaccttaccatcgaagcctgtttggcaaaacgtgatgtcctcggcggcacagcgttgactcaggttaagcaagcgattgcgactaaaaaagcgggttaa

SEQ ID NO: 288241 - DNA, 1393 bp, Unknown
  Bacterial polypeptide expressing nucleotide sequence isolated from the Sargasso Sea
catggtaaaaaataaaaacaaccaagcaatctggaacacacggataaaaaaaaatgcatcaagtttgtttcaaaaagtcggtaattcaatagatattgataaaagactttataaagaggacatccaaggatcaattgctcatgttgaaatgctttttaaacaaaaaattatttcatttaaaataaaaaataaaattgtttatggacttacaaaaattgataaggaaataacaaacaataaatttgagttcaaaaaaaaatatgaagatattcatatgaatgttgaaaaaagacttttccaaattatcggtgaggaggcgggttatgttcacactgcaagatcaagaaatgatcaagtaattactgattttaaaatttggatgaaaaattcaaccaatgaaataattaataatattaataaagttattaagagcacaattaagttagctgaaaaaaatgttgaaactattatgcctggatttacacatcttaaaaatgctcaagctatatcttttgctcattatttaatgtcttacgtggaaatgtttaatagagacaaaaaaagatttttaaataatttagacagtttaaacgaaaatcccttaggtgtcgcggctttagcgggaacatctttcaatatagatagaaattatacaaccaaaaaacttggtttcaaaacacctacaaataattccattgatacagtttcggatagagattttgtgctagattttttatacacttcatctgtgtgtgcaatgcatatttctagaagtgcagaagagctaataatttggaattctgatggttttaacttaatcaatttatctgataaagttgttacaggatcatctataatgccacaaaaaaaaaatcctgatcttctagaatacttacgtggaaaatctggaagcgtttatggaaatttattttcgatgcttacaattttaaaaggtttgccattatcttattttaaagatttgcaagaagataaagagattgttttcaaatctaacgataatctaaataattgtttgaaaatttttgatgaaatactaaaaaactgtaaaccaaataagagtagaatgttagaacttgctaattctggatacattacagctactgacttggctgactatcttgtaaaaaatcactcaatgtcttttagaaaagcgtatcaaaaaactgctgttgtagttaattttgctgaaaaaagaaaaaaaaatttaaatgaattaactttagaggagttaagaaaaattgaacctaaacttaaagaagatgtattaaaagtatttaatctaaaaaactcaattaattcgaaaaaatcttatggtggaacttcttttgataatattaaaaaaatgataatgaaatataaaaaagaaaaatga

SEQ ID NO: 288242 - DNA, 1261 bp, Unknown
  Bacterial polypeptide expressing nucleotide sequence isolated from the Sargasso Sea
aatgaaaaataaaaataagactgtttggtcaaatagatttggggaaactaattctaaaaattttcaaagaattggtgcttcaataaatattgataaaagactttataacgaggatattcaggcgtcgattgttcatacgcaaatgctaacaaagaaaaaaataattccaagaaacgatgggattaaaataatcaaaggattaaaaaaaattaaaactgaaatcgataaaaataagtttaaattcaaggagaagtttgaggatattcatcaaaatattgagaagagactttttcaaattgttggtgactctgcaggttatttgcatacagcaagatctagaaatgatcaggttgtaacagattttaaaatatgggttaaaaaggcttcattagatataaatgaaaccattaatttattgattaaatctcttttaaaaaaagcatctagaaatattgatactgttatgcctgggttcacccatttaaagaatgcacaaccaatttcttttgctcattatctgctcgcttatattgaaatgctttatagagacaaaaaaagatttaaaaataatataagtttaattgatgaatgtcctttgggatctgcagctttagctggaacctcattcaatattgacagaaattatactgctaaaaaacttggtttcagaaaacctactggtaattctattgactcagtttctgatagagattttgcaatagactttttgtctgcatctgctacttgcgcaatgcatttatctagattagctgaagattttataatctttaattcagaagcatttagtttcatagaattcacagacaaagttctaacgggttcatcaataatgccacaaaagaagaatccagaccctgcagaattaataagaggaagaacggcaataaattatggaaatttaaattctatgcttacaatcatgaagggtctaccaatttcttattataaagacttacaagacgataaagagttagtttttgatagttttgatacgttaaaagatagtttgtcgatgtcaatcgagctcattgataacttaaatactaaaaaaaataatatgagaaatatggcgcagaaaggatatacaactgcaacagattttgctgactacttagctcagaaaaaaaatctgccttttagaaaaggttatgctatttcatcaaagttagtaaattacgctgagagaaaaaaaataagattggatcaactttctataaaagagataaataaatttattaaa

SEQ ID NO: 288243 - DNA, 1384 bp, Unknown
  Bacterial polypeptide expressing nucleotide sequence isolated from the Sargasso Sea
aatgaaaaaaaatccttcaagaaatgtccatttttcaaaaggacctagtgagattttagatgcaattaatacgtctatagatatcgatcaacgtctgtataaagaagatataactgggtcaatagcgcatgctagaatgctcggtaaacaaaaaataataaataaaaaagaacaaagtgcaatagtctctggacttaaagcaattgaaagagatattgaaaaaaacaaggtcgtattttcaaaaaaacttgaagatattcatatgaacattgaaagtttattatttaagaaaattggaaaagttgcaggaaagcttcatactgcaagatctagaaatgatcaggtagtaactgatttaaaattatgggttaaaaaagaatctaaaattttagatagtgaactaaaaaaatttcagagaactttaattaatattgcaacaaaaaatactgaaacaattatgccaggttacactcatttacagattgctcaaccaataacattggctcatcatgttctagcttacgttgaaatgattagtagagatagaacaagacttgaagattgcttatatcgtcttaatgaaaacccattaggagcagctgcgcttgcaggcacctcttttcctattgatagaaaatatacgtctaaagagttaggttttagagggccaacaaaaaatgctatggacacggtctcagatagagactttgtaatagaatttttatttgttctatcattaattgctgttcatttatcaaaaatagcagaggaaatagtactttggtcaaatcaacaatttgattttataaatttaccagatgatctttcaactggcagttcaattatgcctcagaaaaaaaatcctgatggcgcagaacttgttagaggaaaaacaaatattatcattagtaatttaagtacaatgcttaatattattaaagggttaccactttcttatagtaaagacttacaagacgataaacaaataacatttaattcatatgacaatgtttctttgtgtataaaagttatgaatgaaattttatcaaaatctacatttaacaaaactagaatgaaagagttgattgataattcaaatgcaaccgctacagatttggctaattggttggttcaaaaacttagatattcatttagagatgcgtatgttgttacaggcaagattgtttcttattgttcaaaacaagatagaaacatagattcattatctcttggagaattaaaaaaatttgacaaaaatataacagctgacgcaaaaaaagtgctatcaactactaacagtgttaaatcaaaatcaagttttgggggtacggctcctgaaattactaaaaaaatgataaaacttgttataaaaaaatacttataa

SEQ ID NO: 288244 - DNA, 619 bp, Unknown
  Bacterial polypeptide expressing nucleotide sequence isolated from the Sargasso Sea
tgaagacttcataatattaaattcagacgcatatcaattaatcagttttaatgataaaatgttaacaggttcttcgattatgccacaaaaaaagaatcctgaccctgcagaacttattagaggaagaactggaattaattacggaaaattaaattctattttaacaattatgaaaggacttccaatttcatattttaaggatttacaggatgataaagcacttgtatttgatggctttgatactttgaaagatactttaactatgagcaatgaattaattaaaaatgtaaatccaaataaaactagaatgtctaatatggcaaaaactggatatacgacagcaacggatcttgcggactacttagtgaaagataagaaactatcttttagggaagcttacaaaatatcatctaaacttgttaattatgcagaaaaaaataagaaaaaattagatgagttaaccttagctgaaatcaaaaaattttataaaaacttaaataataatgttttaaaaatctttgatataaaaaactctatgaattcaaaaaattcttatgggggaacatctgaaagaaatataaaaaatatgataagaaagtataaaaaggaattaaaatga

SEQ ID NO: 288245 - DNA, 781 bp, Unknown
  Bacterial polypeptide expressing nucleotide sequence isolated from the Sargasso Sea
acaaaaataaaaatagataggaactttacagctgcagaattaggtttgaaaaagatttataaaaatagtattgatgcagtaagtgatagagatttttgtgtagagtttgtttctgcatctgctttagctatgtcccatttgagtaaaatttctgaggaaataattttatgggtaacagatgaattttcatttgcaaaattaacagacagttgtgcgacaggtagtagcttgatgccgcagaaaaaaaatcccgatgttccagaattgataagaggtaaaacgggtagagtatatggacatttacaagccctgttaactatggttaaaggggttccacttgcctataataaagattttcaagaggataaagaaccaatatttgatactgtagacactttatcttcatgtattaaagcaatgactatattgataaatgagggaattgtatttaatacaaaaaatttatctgattcggtaaaaaatgacttttctaatgctactgatttggcagattacttagttgctaaaaaagttccatttaggactgcgtatcaagttgttggtgaaattgttaagtattgtttggaaaaaaatattttatttaaagatcttgaaattgatgaatttacaaaattccatcctgaattcgatgaggatttatttgtagatcttgaaccttttaatgtcgtcaagtcaagaattagtgaaggtggcacaggttttactcaagtagaaaaggaaataaataattggcagaaacaattgtttcccttaatctaaa

SEQ ID NO: 288246 - DNA, 781 bp, Unknown
  Bacterial polypeptide expressing nucleotide sequence isolated from the Sargasso Sea
atggttaataaagatataactaaagaaaatagacaatcaagcacgatttggggaggccgttttaatagcaaaccatctgctattatggaagaaattaattcttctatatcttttgataaacgtttgtttcatgaggacataattgcatctattgcacacgctcaaatgttggcaagacagaatataatttcaaaaggtgagggtttaaagattattaatggattaaaaagaatttataaagagattgaaaaaggtaagtttaatttcaaaaccgaattggaagacattcatatgaacgttgaaagtcggttaaaagaaattattggagatacagcaggtaaattacataccgcaaggtcaagaaatgatcaggtttcaaccgatttgagattatgggttcgtaatgcaatttcaatcttagataaagaattaaaagaattacaaaagagacttattgttcttgctgaaagtaatatttcaacaattatgcctggttttacacatctacaaaatgctcagccaattacatttgggcaccatttattagcttatgttgaaatgtttggtagggataggtcaaggctgcttgattgttcaaaaaggttgaacattaaccctcttgggtcagctgcattagcgggaacagctttcccaattgacagacaatctacaacaaaagagctaaattttacatctcccacaactaactcaattgatgctgtttcagacagagactttgtaatggaatttctatctatttctgcaattacttctatacata

SEQ ID NO: 288247 - DNA, 1393 bp, Unknown
  Bacterial polypeptide expressing nucleotide sequence isolated from the Sargasso Sea
catggcaaaaaataaaaacaaccaggcaatatggaatactcgaattaaaaaaaatgcttcaactttatttcaaaaggttggtaattctataaatatagataaaagactttataaagaagatattcaaggatcaattgctcatgtcgaaatgttgtttaaacaaaaaataatttcatttaaaattaaaaataaaattatctatggtctaaataaaatagaaaaagaaatttcaaataaaaaatttgagttcaacaagaaatatgaagatattcatataaatattgaaaaaagacttttccaaatcattggggaagaagcaggctatatccacacagcaagatcaagaaatgatcaagtaattacagattttaaaatttggataagatctgcaacgaaagaaattaatattaatttagataaagtaattaaaagtacaataaaattagctgaaaaaaatatagatactattatgcctggttttactcatcttaaaaatgctcaagctatttcttttgctcattacttgatggcttatgttgaaatgtttagtagagacaaaaaaagatttttaaataatttagataacttagaagaaagtcctttgggagttgctgctttagcaggaacttctttcaacattgatagaaattatactgccaaaaaacttggttttaaaaaacctactaataattcaatcgatacagtttcagatagagatttcgttttagattttttatactcagtctcagtttgctctatgcatatttctagaatttctgaagagttgatcatttggaattcagaaggttttagcttaataaatttatcggataaaattgtaacaggatcatcaataatgccacaaaagaaaaatccagatatgcttgaatatttaagaggaaaaactggcaaaacttatggaaatttattttctatgcttacaattctaaaaggtttaccactatcatattttaaagatcttcaagatgataaggagattgtttttcaatctaatgataatctaattaattgtcttaaagtatttgatgaaattataaaaaactctagctctaataaaaagcgtatgcttgaacttgctaattctggatacattacagcaacagacttagctgattatttagtaaaaaatcactcaatgtcatttagaaaagcttatcaaaaaactgcttcaatagttaattttgcagaaaaaaagaaaaaaaatcttagtgatctaacaacagaagaattaaaaaaaattgaaccaaaactaacaaatgatgtcttaaaagtgtttgatttaaagaattctattaattctaaaaaatcatatggtggaacatcttttgataatattaaaaaaatgataatgaaatataaaaaacaaaaatga

SEQ ID NO: 288248 - DNA, 1390 bp, Unknown
  Bacterial polypeptide expressing nucleotide sequence isolated from the Sargasso Sea
atgaaaaataaaaataagacggtttggtctaatagatttagtaaagacaattctagaaattttcaaagaattggatcgtcaataaatattgataaaagactttataaagaggacatatttgcatcaattattcatgctcaaatgcttgttaagcaaagaattattccaagaaaagatggggccagaataataaaaggtcttaaaaaaatagaaaaagaaattgaaaaaaatagatttaaatttaaagaaaaatttgaagatattcatcttaatattgaaaaaagactgtttgaaattattggtcaatctgcaggatatctccatactgcaagatcaaggaacgaccaagttgtaacagattttaaaatttgggtaaaaaaagcatcacaagatattaatgatactttaaatttattaattaaatctattttgaaaaaagcagaaaaaaatattgatactgttatgcctggttttacccatttaaaaaatgcacaacctatttcttttgcacattacttattagcttatgtagaaatgctcaatagagataaaaaaagatttttaaataatattgagttaattgacgaatgtcctttaggatctgcggcattagctggaacatcttacaagatagatagacaatttactgcgaagaaacttggttttaaaaaacctactggtaattctattgatgcagtctgtgatagagattttgcaatagattttttatcagcagcagctacatgtgcaatgcatatgtcaagattagctgaggactttattatatttaattctgaagcttttaattttttaaaattcagtgataatgtactaactggttcatcaataatgcctcaaaagaagaatcctgatcctgcagaattaattagaggtaaaactgctattaattatggaaaattaaactcgatgcttacaattatgaaagggttgccaatttcttattataaagatttacaagacgataaatctcttgtgtttgacagttacgacactttaaaagatacgttgcttatggcaaacgaacttattttgaaccttaatgcaaataaaataaatatgaaacaaatggctcaaaaaggttacacaacagcaactgattttgctgattacttagtaaagaaaaaaaactttgcatttagagaagcatatgtaacttcatctaaacttgtgaactatgctgagaaaaaaaaagtaagattagacgaactttctcttgaggaaataaataaatttttaaaaagagttaaacttgataatatcaaaatatttgatgtattaggttcaatgaactccaaaacatcttatggtggaacagcgactaaaaatattaaaaatatgattaaaaaatacagaaaagaagtaaaatgag

SEQ ID NO: 288249 - DNA, 1147 bp, Unknown
  Bacterial polypeptide expressing nucleotide sequence isolated from the Sargasso Sea
gatgaaaaaaaatccgtcaagaaatacgcatttaaagaaaaatccctcgaagttattagaatctattaataactcgatagatattgatcagagaatgtacaaagaagacattgaaggctcaattgcacatgccacaatgctcggaaaacaaaaaattatatcaaaaaaagatcaaacaaaaattgttaatggcctgaaaatcattttacaaaatattaattctggtaaaattcatttcaaaagtgaacttgaagatattcatatgaatattgaatccttgctctttaaacaaattggaaaaactgctggaaaattgcatactgcacgatcacgtaatgatcaggtagttaccgactttaaactttggataagaaataatagtatcaaccttaataagcatgttcaaaacttacaaaaaagtcttattaatgttgctaaaaaaaatactgctactgtaatgcctggctatacacatcttcaggtggcacaaccaatatctttagcacatcactgtcttgcgtatgttgaaatgatgggtcgagacagatcaagattaaaagattgcatagaaaggttaaatgaaagtcctcttggttcaggagccttagcaggaacttcgttccctattgacagaaatttaacagcaaaattattaaaattttctaaaccaacagctaatgcacttgatagtgtatctgatagagattttgctgttgaatttttatttgtgatatcacttataagcacacatttatcaagaatggctgatgaaattattctttggtctaatcaacaatttaattttatcaacttgccagatgaattagcaactggtagttccatcatgcctcagaaaagaaatcctgatggggctgaattagtgagaggaaaagcaagtggtattattagtaatttaaatgggttactagttatactaaaaggcctcccattagcttacagtaaagatcttcaggatgataaaaaaatagttttttcagcatttgatgatgtttgcctaacattagaggtaatgacagaaatgtggtctaagattagttttaataaaggtattatggctgctgcagttaataattctaatgctacagcaacagattttgccaattggttagttcaacatctaaattta

SEQ ID NO: 288250 - DNA, 611 bp, Unknown
  Bacterial polypeptide expressing nucleotide sequence isolated from the Sargasso Sea
tatggcaaccgacaaactctggggcgggcgctttagcggcaggaccgacacgaccgtggaggcctttaccgcctcagaacattttgaccgccggctcgcggaatacgacatcgctggttcgcgggcgcatgccctgatgctgaagtcctgtggaatcatcagcgaggcggattgcaatgcaatcatcgacggccttgagactatcgcacaggagatcgcggacgatcgctttgtgtggagcgcagcactcgaagatgtgcatatgaatatcgaggcgcggctcactgaaatcgccggcgagcccggcaagaaactgcacactgctcgttcgcgcaacgatcaggtcgccacggatatgcggctctttacccgcgatgcaattgatcagctgcaggcggacctcaccgtgttgcagcaggcgctcgttgaccttgccgaggcggaagccgaatcggtcatgcccgggatgacccatatgcagagtgcccagcccgtgacctgcggtcatcacctgctggcctggaacgccatgctggaaagagactggcagcgttttggcgattgccgcaaacgggtcaatctgtccccgctgggcgttgccgccctagccg

SEQ ID NO: 288251 - DNA, 795 bp, Unknown
  Bacterial polypeptide expressing nucleotide sequence isolated from the Sargasso Sea
catgacaaaaaataaaaacaataaggcaatatggaattcaagaattaaaaataaaacctctactttatttcaaaatgtagggagttcgatactcgtagataaaagattatataaagaagacataaaagcatctaccgtacatgtggaaatgttatttaaacaaaaaataatatcatttaaaataaaaaataaaattatctatggacttgaaaaaattgaaaaggaaattaacaaaaataagtttgaatttaaaaaaaagtatgaagatatacacatgaatattgaaaaaagattatttcaaattattggtgatgaagcgggttatattcacactgctagatcgagaaatgatcaagttataactgatctcaaactatggattaggtcatctactaaagagataaacttgcatttaaataaaataattagatcaaccataaagatttctgaaaaaaatattgagactatcatgccaggatttacacatcttaaaaatgctcaagctatatcctttgctcattatctaatggcttatgttgaaatgttttccagagataaaaaaagatttgaaaataatttagacagtttaaaccaaaatcctttaggtgttgctgctcttacaggcacatcttttactattgatagaaattacacaactaaaaaactaggatttaaaattccaacaaataattctattgatactgtttctgatagagattttgtattagattttctttacagtatatctgtttgttcattacatctatctagaatagcggaagaacttattatttg

SEQ ID NO: 288252 - DNA, 1045 bp, Unknown
  Bacterial polypeptide expressing nucleotide sequence isolated from the Sargasso Sea
tgatcaagttatcactgatcttaaaatttggttaaaaaaatcaactaaagaaataattaaaaatataaatctaacaatcaacaatatattaaaaagtgcaaataaaaatgttgaaactataatgcctggttttacgcacttaaaaaatgcacaaccagtttcctttgcacattatctattagcatatgtggaaatgtttataagagataaaaaaagattcaataacaatcttgaaaatctaaatgaaaaccctcttggtgttgctgctttaactggaacttcttttaatattgatagattttatacaaccaaaaaacttaaatttgataaaccaacaaaaaattctatagatactgtttccgatagagattttgttattgattttctatattcttgttctgcgtgctcgattcatatttcaagaattgctgaagaatttataatatggaattctgatgcatttaatttaatttctttaaatgataaaattgttactggatcatcaataatgccacaaaaaaaaaatcctgatcccttagaatttttaagaggtaaaaccgcaacatcatttgggaatttgttttcaatgttaacaattttaaaaggtcttccattatcctattttaaagatctccaggatgataaagaattagtttttaaatcttttgatcaattaaaaaactctttattaatcctaaatgatattttaaaaaatttttctgtagataaaaaaagaatgttagaactagctaatttaggttttataacagcaactgatcttgctgattacatggtaaaagaacttaattatccatttagaaaagcatatttgcaaactgctaggataattaattttgcagaaaagaataaaaaaacactcaaagaacttaaaatagatgaaataaaaaaaattgaaccaaaattaaatagtgatgtttttaaagtttttgaccttaaatattcaataaattcaaaaaattcatttggaggaacttcttttgtgaatattaagaagatgataagaagttataaaaaaggcttataa

SEQ ID NO: 288253 - DNA, 838 bp, Unknown
  Bacterial polypeptide expressing nucleotide sequence isolated from the Sargasso Sea
catggtacaaaataaaaacaataaggctatttggaatacaagaataaagaaagatacttcctcaattttcaaaaaaattggtagttcaattaatgtagataaaagactatttaaagaagatattcaaggatcaattgctcacgttgaaatgttatttaaacaaaaaattataacatttaaagttaaaaataaaataatttggggattaaatagaataaaaaatgaaatcataaaaaaaaaatttaattttaattctaatcttgaggatatccatatgaatattgaaaatagattatttgaaattattggagaagattctggatatattcatacaggaagatctagaaacgaccaagtagttactgattttaaactctggttaagaagttcaactatagaaattattaatcatttaaataatttagaaaaaattattattaaaaatgctgaaaaaaatattaaaactataatgccaggttttacacatttaaaaaatgcacaacctatttcatttgctcactatttgctagcttatgtagaaatgtttaaaagggacaaaaaaagatttcaaaataatctagaaagtttattagaaaatccattgggtgccgctgctttggcaggaacgggttttaacattgacagaaactatacctcaaaaaaattaaaatttaaaaatccgacaaataattcgattgatactgtttcggatagagattttgtattagattttttatattcagtaacagtttgttctatacatatttcaagattggcagaagaatttattatatggaattctgatgctttccaactaattaaacttaatgataaagtt

SEQ ID NO: 288254 - DNA, 1008 bp, Unknown
  Bacterial polypeptide expressing nucleotide sequence isolated from the Sargasso Sea
aatgaaaaataaaaacaaaactgtttggtcaaatagatttaagagtaaaacgtcccaatcttttcaaaagatagggtcttcaattcatattgataaaagactttatgaacaagacatagctgcgtctattgtgcatactcaaatgttatcaaaacaaaagatcattaaaagtgaagatgccaacaaaattatcaatggtcttaaaaaaattaaggcacaaatagataaaagtaattttgaatttaaagaaaaatttgaggatatccatttaaacattgaaaaagcactttttgatatcataggtccttcagctggatatatgcacactgctagatcaagaaatgatcaagtggtaactgattttaaattatggatcaaagatgcgtctaaagaaattttaaaagatatttctttagtaatgaaaaatttgcttaaaaaagcagaaaaaaatacagacacagtgatgcctggattaactcatttaaaaaatgcacaaccaatttcatttgcgcattatcttttatcttattttgaaatgttaaagagagataaaaaaagatttgaaaataatttagatcttttggatgaatgtcctcttggatcagctgcactttctggaacttcgtataagatagatagaacttatactgcaaaaaaacttggatttaaaaaaccaactgaaaattctgtcgactctgtatctgatagagattttgcaatagattttttatacgcgtcagctgtttgcgcaatgcatctttcgagattagcagaagattttattatttataattctgatgcttttaaacttatctcttttaaagacagcatgcttacaggttcttcaataatgccacaaaagaagaatcctgatcctgcagaacttataagagggaaagttggaattaattatgggaaactgaatgcgattttaacaatcatgaaaggtcttcctatgtcttacttcaaggatatgcaggatgataaagaattagttttcagtggttt

SEQ ID NO: 288255 - DNA, 718 bp, Unknown
  Bacterial polypeptide expressing nucleotide sequence isolated from the Sargasso Sea
aatgaaaaataaaacaatttggtctaacagatttaaaaataaaacgtctctatcgtttcaaaagatagggtcttctattggtattgataaaagactttatgagcaagatattgctgcgtctattgtgcatactcaaatgctatcaaaacagaaaattataagcagcaaagacggagtcaaaataatcaatgggcttaaaaaaatcaaatctcttattgataaaggaaatttcgattttaaagagaaattcgaagatattcatttaaatattgaaaaaaaattatttgagatgataggtccatctgctggttttttacacactgcaagatctagaaatgaccaggtagtaacagattttaaattatggattaaaaaagcatccaaagagatcttaaaagatatttctttaataatgaaaaatataattaaaaaggctgaaaaaaatactgatactgttatgccaggcttaacccatttaaaaaatgctcagccaatctcatttgctcactatcttttatcttattatgagatgcttaaaagagataaaaatagatttgaaaataatattaaacttttagatgagtgtccgttgggttctgctgcattgtcaggaacatcgtataaaatagacagaaattatacttctaaaaaacttggatttaaaaaacctacggctaattcaatggatgctgtttcagatagagattttgctatcgac

SEQ ID NO: 288256 - DNA, 1009 bp, Unknown
  Bacterial polypeptide expressing nucleotide sequence isolated from the Sargasso Sea
catgactaaaaataaaaacaatcaaccaatttggagttctagaataaaaaaaaactctaataacctattcaaaaaagttggcggatcactagatatagataaaagattatttaatgaagatatatctgcatctattgttcataccgaaatgttatttaagcaaaaaataataaactttaaaattaaaaataagattgtatggggtttgaatagaataaaaaatgaaattataaaaaaaaaatttccctttgataaaaatcttgaggatattcatatgaatattgaaaaaagattgtttgatttgattggtgaggatgcaggatttatacataccgcaagatctagaaatgatcaggtaatcactgattttaaaatatggttaaaaaaatcaacttatgaaataactaaaacacttgatgatcttataaatacaattctgaaagttgcagataaaaatataaaaacaattatgcctggttttactcatttaaaaaatgctcaaccaatttcattcgcacattatatgatggcttacattgaaatgttcaaaagagataaaaaaagatttaagaataatttagatgctctaaatgaaaatccacttggtgtggctgctttatcaggaacttcatttaacattgatagaaacttcacaacaaaaaagctcaacttttcaaaaccaacagataattctatagatactgtctctgatagagattttgttttagattttctctattcatgttcaacctgttcaatacatatatcaaggattgctgaagaatttataatttggaactcagatgcctataatttaattcatttaaatgacaaaattgtaactggatcttcaattatgcctcaaaaaaaaaacccagacccacttgaatatttgagaggtaagacaggatcatcttttggaaatcttttttcaatgctcacgattttaaagggacttcctttgtcttactttaaagatttacaagatgataaagaattagttttttaa

SEQ ID NO: 288257 - DNA, 1390 bp, Unknown
  Bacterial polypeptide expressing nucleotide sequence isolated from the Sargasso Sea
tatgacaaataaaaataagacagtttggtcaagcagatttaaaagctcaacctctaaatcttttcaaagaattggagcttcaataaacgtagataaaagactttacgaacaggatatttttgcctcaaaaattcatactcaaatgttaatcaggaaaaaaattatacctactaaagaaggtaaaaaaatacttaaaggattagaaaaaattaaaggacaaattaaaaaaggtaattttgtttttaaagaaaaatttgaggatatccatttaaatattgaaaaaaaattatacgaaataatcggtacctcagcaggttatatgcatactgctagatcaagaaatgatcaagtagttactgattttaaactttgggtgaaagattcaacactaattttgatcaaagaattaaactctttaatgaaaaatattgtaagtaaagcaaataaaaatgtgagcactgtaatgccaggttttactcatcttaaaaatgcgcagccagtttcttttgctcattatctcttggcttattatgaaatgttaaaaagagacaaaaaaagatttcaaaataacttagagttaattgatgagtcacctcttggggctgcagctttatcaggaacttcttataatatagatagaaattttacatctaagaaattaggttttaaaaagccaacagacaattcaatagatacagtttctgacagagattttgcaatagattttctttacgcttgtgctgtaagtgcaatgcatttatcaagattggctgaagacttcataatattaaattcagatgcttatcaactaattagctttaacgataaaatgctaaccggttcttctatcatgccgcaaaaaaagaaccctgatcctgcagaacttattagaggaagaactggaattaattacggaaaattaagttctattttgacaattatgaaaggacttccaatttcgtattttaaggatttacaggatgacaaagcgttagtattcgatggatttgatactttgaaagatactttaattatgagcaatgaattaatcaaaaatgttaatccaaataaaactagaatgtttaatatggcaaaaactggttatacaacagcaacagattttgcggattacctggtgaaagataaaaaactctcttttagagacgcttataaaatatcatcaaaaattgttaattatgcagaaaaaaataaaaaaaatttagacgagttaactttaaatgaaattaaaaagttttataaaaacttaaataataatgttttaaaaatttttaatgtgaaaaactctatgaattcaaaaaattcttatggaggaacatctgaaagaaatataaaaaatatgataagaaaatacacaaaggaacttaaatga

SEQ ID NO: 288258 - DNA, 1390 bp, Unknown
  Bacterial polypeptide expressing nucleotide sequence isolated from the Sargasso Sea
atgagtaaaaataaaaacaatcaaccaatttggaacactagaatcaaaaaagaaatagaaaacctttttaaaaaggttggtggatcaatagaaatcgataaaagattattcagagaagatattgaagcttcaattgtacatgttgagatgctgtttagacaaaaaattataaattttaaaattaaaaataaaatagtttggggtttgaatagaattaagaacgaaattataaaaaaaaaatttatttttgatgacaagcttgaggatattcatatgaatatagaacacagactctttgaactaattggagaagaagcggggtatattcacactgcaagatcaagaaatgatcaggttgtcacagattttaaaatttggttaagaaaagctaataaagaaattgttaaaaatattgatgcaacaattaaaaatattttaaaaaaagcagaaaaaaatgttgagacaattatgcctggtttcacacacctaaaaaatgcacaaccagtttcttttgctcattacttaatggcttacttagaaatgtttaatagggataaaaatagatttcaaaataatttagagagtcttaatgaaaatccacttggtgtagctgctttaacaggtacttcttttaaaattgatagattttatacttcaaaaaaattaggtttcgacagaccgactaaaaactcaattgatactgtttctgatagagattttgtaattgattttctatattcttgctctgcatgtgctgttcatatctctaggattgcagaggagtttataatctggaattcagatgcttttaaacttattaatttgaatgataaaattgtaactggatcatccattatgcctcaaaaaaaaaatcctgatccactagagtacttgagaggtaaaacaggtttcatatttggaaatcttttttctatgcttacaatattaaaaggattgcccctttcttattttaaagatttacaagatgataaagaaattgtttttaaatcgtttgatcaattaaaaaattccttgattatattaaatgatgttcttaaaaatttttcaccagataagaaaagaatgatcgaacttgcagaaagtggctacattacagcaactgatttagcagattatatggttagagaattaaattatccatttagaaaagcctatttacaaacagctaaaatcataaattttgcagaaaaaaataaaaaaaaattgtcagagctcactataaaagagattaataaaattgaaaaaggtttaaccaccgatgttctgaaagtatttgaactaaaaaaatctgttaattctaaagtttcttatggtggaacttctttcaacaacattaagaaaatgatattaaattacaaaaagaaataac

SEQ ID NO: 288259 - DNA, 1086 bp, Unknown
  Bacterial polypeptide expressing nucleotide sequence isolated from the Sargasso Sea
taggtgaagatgctggctacatccatacagcacgttcaaggaatgaccaggttttagttgactttaaaatttggatgataaattcaaataataaattgatcaaattgatagatcaaacaataaaaaatattttaaaaattgctgaaaaaaatatttacacaataatgccaggctttacacatttaaagaatgcacaacctatttcatttgcacattatattttagcttatgttgaaatgtttggtagggataaaaagagattggaaaataactttgataatctcaaagaaaatccgttgggttctggagcattatctggaacttcatttaacatagacagaaattttacaactaaaaaacttggttttaaaattccaacaggcaattctattgatacagtttcagatagagatttcgtattagattttctatattcatcatcagtatgctcaatgcatatttctagacttgctgaagaatttataatttggaattctgatgcatttaaactaattacattgaacgataatgtagtcacaggatcatctataatgcctcaaaaaaaaaatccagaccctttagaatatctcagaggaaatgttggtaaccagtacggaaatttattttcaatgatgactattttgaagggattgccattatcgtattttaaagatctacaagaagataaaaaaattgtatttagttctttcgatagcctttgtgattcaattaaagtattaaatgaagttttaaataatttttcagtaaataaaaatgaaatgttaaatcttgctaatacaggttacatcacagctacagatcttgctgactattttgtaaaaaatttaaaatatccttttagaaaatcttaccagataactgctaaaatagttaactattgcgaaaaaaataaaaagtctctctccgaattgtcgattgatgagctaaaaaaaatagaacctaatatcagtaaagatgtaagtaaaatttttgatcttaaatattcagtaaattcaaagaaatcatatggcggaacatcttttgaaaacgtcaagaaaatgataaaaaaatacaaaaatgcttaaa

SEQ ID NO: 288260 - DNA, 1206 bp, Unknown
  Bacterial polypeptide expressing nucleotide sequence isolated from the Sargasso Sea
aaaaaattataaatgttttgaataaaatcaaatcacaaatagaaaagggaaaatttatatttaaagaaaaatatgaagacatccacttaaatatagaaaaaaaattatttgacctaattggtccctctgcaggatatatgcatactgcaagatcaagaaatgaccaggttgttacagattttaagctttggattaaaaattcctcaaaagaaattgtaaatgatttaacagaagtaatgaaaactttaattaaaaagtcagagaataatattggcacttgtatgccggggtttacacatttaaaaaatgctcaacctatttcatttgctcactatcttttggcatattatgagatgctaaaaagagataaaaaaagatttttaaataatttagagctattagatgaatctcctttaggtgcagcagctttgtcaggaacatcttataaaatagacagacaatacactgcaaaaaaactcggttttaaaaaaccaactgataattctattgactccgtttcagatagagacttcgcgattgattttttatatgcgagtgctgtttgtgctatgcacttgtctagattggctgaagattttattatcttaaattcagacgcttacaaactcattagttttaaagataacatgttaacaggttcttctattatgcctcaaaagaagaatccagaccccgcagaattaattagaggcagaacaggaattaattatggaaaactaaattcactgttaaccataatgaaaggattgccgatttcttactttaaggacttgcaggatgataaatctttagtttttgatggctacgatacattaaaagacactttgataatgagcaatgaattaattaaaagtttgaagccatcaaaagaaagaatgttaaaaatggcaaatgaaggatacaccactgccactgactttgctgattatttagtgaaagaaaagaaaataagcttcagacagtcatatatgatttcatctaaactagttaattatgcagaaaaaaataagaaaactttagacaaactatccttagttgaattaaaaaaattttacaaagatttagataaaaatgtaatgaaaatatttaaagtaaaaaattcaatgaattctaaatcctcatatgggggaacagcagagaaaaatattaaaaaaatgataaaaaagtataaaagagaaatttaat

SEQ ID NO: 288261 - DNA, 1390 bp, Unknown
  Bacterial polypeptide expressing nucleotide sequence isolated from the Sargasso Sea
atgggtaaaaataaaaacaatcaaccaatttggaatactagaattaaaaagaaaaaaacaaacctttttaaaaaggttggtggatcaatagaaattgataaaagattattcagagaagatattgaagcttcaattgtacatgttgagatgctgtttagacaaaaaattataaattttaaaattaaaaataaaatagtatggggtttaaatagaattaagaacgaaattataaaaaaaaaatttatatttgatagaaagcttgaggatattcatatgaatatagaacacagactatttgaactaattggagaagatgcggggtatattcacacagctagatcaagaaatgatcaagttgtcacagattttaaaatgtggctgagaaaagctaataaagaaattgctaaaaatatcgatggaacaattaaaaatattttaaaaaaagcagaaaaaaatgtagagacaattatgcctggtttcactcacctaaaaaatgcacaaccagtttcttttgctcattacttaatggcgtatttagaaatgtttaacagggataaaaaaagatttaaaaacaatttagagagtcttaatgaaagtccacttggtgttgctgctttaacaggtacttcttttaaaatagacagattttatacttcaaaaaaactaggtttcacaagaccaactaaaaactcaattgatactgtttctgatagagattttgtaattgattttctttattcttgctctgcatgcgctgttcatatctctaggattgcagaggagtttataatctggaattcagatgcttttaaacttattaatttgaatgataaaattgtaactggatcatccattatgcctcaaaaaaaaaatcctgatcctctagaatacttgagaggcaaaacaggtttcatgtttggaaatctattttctatgcttacaacattaaaagggttacccctttcttattttaaggatttgcaagacgataaagaaattgtttttaaatcatttgatcaattaaaaaattccttaattatattaaatgatgttcttaaaaatttttcaccagataaaaaaagaatgattgaacttgcggaaagtggctacattacagcaactgatttagcagattatatggttagagaattaaattatccatttagaaaagcctatttacaaacagcaaaaatcgtaaattttgctgaaaaaaataaaaaaaaactgtcagaactcacaattaaagagatcaataaaattgaaaaaggtttaaccactgacgttctaaaagtatttgaactaaaaaaatctgttaattccaaagtttcttacggtggaacttctttcgacaacattaagaaaatgatattaagttacaaaaagaaataac

SEQ ID NO: 288262 - DNA, 1393 bp, Unknown
  Bacterial polypeptide expressing nucleotide sequence isolated from the Sargasso Sea
catggcaaaaaataaaaacaaccaggcaatatggaacacacgcattaaaaaaaattcatcaagtttatttcaaaaagttggtaattccttagatgtcgacaaaaaactttataaagaagatatcaaaggatccattgctcatgttgagatgctttttaagcaaaaaataatctcattcaaaattaaaaataagattatttatggtctgaataaaatagagagagaaatttctagtaaaaaatttgaatttaataaaaaatatgaagatattcatatgaatattgaaaaaagactttttcaaattattggtgaagaggcagggtatgtccatacagcaagatcaagaaatgaccaggtaatcactgattttaaattatggttaaaatctgcaactaatgaaataaacaacaatttagataaggtcattaaaacttcaataaaattagctgaaaaaaatattcaaactatcatgcctggttttactcatttaaagaatgcacaagcaatttctttcgcacattatttaatgtcttatgttgaaatttttaatcgagataaaaaaagattttctaataatctagaaagtttagatgaaaatccacttggtgtcgctgctttatctggtacctcatttaatatagacagaaattatacaaccaaaaaacttggttttaaaaaacctacaaacaattctattgatacagtttcagatagagattttgtaattgattttctttatagcgtatcagtatgctctatgcatatttcaagaatagcagaagaattgattatatggaattcagatggatttaatttaattaacttgtctgataaagttgtaactggatcttcgataatgcctcaaaaaaaaaatcctgatcttctagaatatttaagaggtaaatctggaagtacctatggaaatctattttctatgctgactatcttaaaaggtttaccactttcttattttaaagatcttcaagatgacaaagagattgtttttaattcaaatgatacacttgtaaattgtctaaaaatttttgatgaggtgttaaaaaattgtagtcctaataaaaaaaaaatgcttgagcttgcaaataaaggatacattactgcaacagacttagctgactatcttgtaaaaaatcattcaatgtcatttagaaacgcttatcaaaaaacttccgctatagttaatttagcagaaaaaacgaaaaaaaatttaaacgaactttctttagaccaacttaaaaaaattgagcctaaacttaccgcagatgttttaaaagtgtttgatttaaacaattctgtcaattcaaaaaaatcttttgggggaacatcttttgataatattaaaaagatgatagtgaaatacaaaaaagaaatatga

SEQ ID NO: 288263 - DNA, 1384 bp, Unknown
  Bacterial polypeptide expressing nucleotide sequence isolated from the Sargasso Sea
aatgaaaaataaaactgtttgggcaaatagattaaagggaaagatatcactttcttttcaaaaaataggctcatctataagtgtagataaaagactttatgagcaagatataaatgcgtctattgttcatgccaaaatgcttgttaaacaaaagattattagcaaaaaagaaggatctaaaattatcaatggtcttaaaaaaattaaatcgcagattgataaaggaaagtttaaatttcaggaaaaatttgaagatatacatttgaatatagaaaaaaaattatttgaattaattggtccttcagctggttttttgcatacagctagatcaagaaatgatcaagttgtaacagatttcaaattatggactaaaaaatcgtcaaaagaaactattggtaacattaattctttaatgaagattttgatcaaaaaagcagagaaaaatgttaatactgtaatgcctggattaacacatcttaaaaatgctcaaccaatttcatttgctcattatcttctatcttattttgaaatgtttaaaagagacgtaaaaagatttgaaaataatataaaacttttggatgagtgcccattgggttctgctgcacttgcgggaacttcttataaaatagatagaaattatacctcaaaacaactcggttttaagaaaccaacagataattcaattgactcggtagctgacagagattttgcagtagattttttatatgcttctgctttatgtgcaatgcatttatctagattagctgaagatttaattatttttaattcaaatgcatttaatttgatttcatttgataacagtatgttaactggctcatcgattatgccacaaaagaaaaatcctgaccctgctgaattaatcagaggtagagttggtttgatctatggcaatttaaattcgatgcttactataatgaagggacttccaatgtcttatttcaaggatcttcaagatgataaaaaacttgtcttcgatggatttgatactttaaataactcattggttttaagtcttgagttagtgaattcagtaaaaccaaataaaaaaaatatgcttaaaatggctaatgaaggttttacaacggctactgattttgctgattatttagttaaggaaaaagagctcacttttagagagtcttatgtggttgcagcaaaattagtgaattacgccgagaagaaaaataaattgttatctgaattatctttacaagaaataatgaaagtttacaaaaatttagataaaaatgtactaaaaatatttgatgttaataattcaatgaactcaaaaaaatcctatggaggaacttctactacaaatgttaaagcaatgattagaaaatataaaaaggaagtaaaatga

SEQ ID NO: 288264 - DNA, 1393 bp, Unknown
  Bacterial polypeptide expressing nucleotide sequence isolated from the Sargasso Sea
atgagtaaaaataaaaaccaagcaatatggaagtctagaattaaaaaaaaaacttcttctttattccaaaaagtaggcagttccatcgatatagataaagagctctacaaagaagatattaaagtttctatagtgcatgtagaaatgctttttagacaaaaaattatatcttttaaaataaaaaataaaattatctacggtttaaataaaatagaaagagaaatttctggtaaaaaatttcaatttaataaaaagtttgaagatattcacatgaacattgaaaagagattatttgaaattataggagaagatgctggatttctacatactgcaagatctagaaatgatcaggtaataacagacttcaaaatctggatgagatcatctgtgataaatattaataaaaaattagacgaaattttaaaatctttgttagttatagcccaaaaaaatataaaaactgtaatgccaggattaacacatttaaaaaatgcccagcctgtttcatttgcacattatttgctagcttatctagaaatgtttaaaagagacaaaaaaagatttttgaataacttggacagtctttcagaaaatcctatgggagttgctgctcttacgggtacatcatttaatatagatagaaatttcaccactaaaaaattaggatttaaaaaaccaactaataattctattgatacagtttctgatagagatttcgtgttagattatttatttaatgtgtcagtatgttcaatgcatatttcaagggttgctgaagaattaattatatggaactcagatggttttaaaatgattggtttgagtgataaaattgtaactggttcttcaataatgcctcaaaagaaaaatccagacctacttgaatatttaagaggaaagtctggaactagttttgggaatttattttcaatgctaacaattttaaaaggtttgcctctatcatattttaaggatttacaagatgataaagagatagtattcaaatctgacgaaactataaataattgtttgggtatttttaatgaaattttaaaaaatttttatccaaataaaaaaattatgctcaaacttgcagaagagggcttcacaactgctactgacttggcagattatttagtcaaaaaacatgattttacttttcgaaatgcatactatttgactggcacaatagtaaattatgcggaaaagaagaataaaaaacttagtcagttgtcactgaaagaattacaaaatttagaaccaaagttagactcggaggtattaaaaatttttgatttaaatcattcagtaaattcaaaaaaatcttttgggggaacatcttttgataatattaaaaaaatgttaacaagatataaaagagaaataaaatgaa

SEQ ID NO: 288265 - DNA, 1387 bp, Unknown
  Bacterial polypeptide expressing nucleotide sequence isolated from the Sargasso Sea
tatggcactttggggtggacgctttagtcagggagccgatagccggttcaagcagttcaacgattcgttgcggttcgattaccgcttggcggagcaggatattcagggctccatggcctgggccaaagcgctggtcaaggtgggcgtgttgaccgccgatgagcagggcaaactgcagcaggcgatggaggtgctgctcgcctcggtgcagcaggatccccggcagatcctgagctcggacgccgaagatatccactcctgggtcgagagccagcttatcgccgccgtcggcgatctcggcaagaaactgcacaccggtcgctcgcgcaacgatcaggtcgctaccgacctgaaactctggtgcaaggcgcagggtgagctgctactcggctccatcaccgccctgcaacaggggctggtcgcctctgcccgtgccaatcaggccgcggtgctgccgggttacacccacctgcagcgggcccagccagtcacctacgcccactgggcgctggcctatgtggagatgctggagcgggattactcccggctgcaggatgccctcaagcgcctcgacaccagcccgctcggctgtggcgcgctggcgggcaccgcctatgccatcgaccgcgaagcgctggcgctcgacatgggctttagcggcgccacccgcaacagtctggattcggtctccgatcgggatcacgtggtggaactgatgcatgtggcgtccctctccatgacccacctgtcgcgctttgccgaagaccttatcttctacaacaccggcgaggcgggctttgtcgagctctccgatgcggtcacttccggctcctccctgatgccacagaagaagaaccccgatgcgctggagcttattcgcggcaagaccggccgagtagtcggcgcccagatgggcatgttgatgagcctcaaggcgctgccgctggcctacaacaaggacatgcaggaagacaaagagggactgttcgatgccctcgatacctggcacgactgcctcgatatggcggcgctggtgctgatcgatctgaaggtgaatggtgagcgcaccatggcggcggcgcagggcggctacgccaacgccaccgagctggcggactatctggtggccaagggcatcccgttccgtgaggcgcaccatatcgtcggcgagaccgtggtctacgcgatccaggtgaagaagccgctggaagagctgaccatcggcgagttccagcgtttcagcccggtgatcgagttcgacgtctatcccaatctggagctggaagcgaccctggccaagcgggttgccaaaggcggcgtcgcccgcgagcagatcgaaggcgcactggtcgccgccgaagccttgctggccaaacgggcgggttaa

SEQ ID NO: 288266 - DNA, 1093 bp, Unknown
  Bacterial polypeptide expressing nucleotide sequence isolated from the Sargasso Sea
ctggggaaaaaactacataccggtagaagtaggaatgatcaagttggtacagatataagattgtggctcagaaaagagattgacaagcttgaaattttaattactgatttgcaaaaatctttcttaaatgttgctaaatctaatatctataccttaattcctggctatacgcatatgcaaagagcacaaccattatctttagcccatcatttattagcttatttagaaatgtttcagagggatcttgaaaggtttaaagaagtaagatcaagagtcaatacttccccattaggagctgcagcattagctggtacaaaaataaaaatagataggaacttcacagctgcagagttgggttttgaaaagatttataaaaatagtattgatgcagtgagcgatagagatttttgtatagagtttgtttctgcatctgctttggcaatgtcacatttgagtaaaatttcagaagaaataattctatgggtaactgatgaattttcttttgcaaaattaacagactcatgtgctacaggtagtagcttaatgccgcagaaaaaaaatccagatgttccagaattgataagaggtaaaacgggaagagtttatggacatcttcaagcattgttaactatggttaagggtgtcccgcttgcatataataaagattttcaagaggataaagagccaatatttgatactgcagaaacaatatcttcatgcattaaagcaatgactattttaatcaatgagggtattgaatttaatattaaaaatttatccgattccgtagaaaatgacttttctaatgctacagatttggcagattacttagttggtaaaaaggtcccttttaggactgcttatcaagttgttggtgaaattgttaagtattgcttagagagaaaaatgttgtttaaaaatcttaaaattgatgaatttaaaaaattccatcctgaatttgatgatgatgtctttatagatcttgaacctcttaatgtcgttaagtcaagaactagtgaaggtggaacaggttttatccaggtagagaaggaggtcaataattggcaaaaaaaattgtcatctcgaatttgac

SEQ ID NO: 288267 - DNA, 1381 bp, Unknown
  Bacterial polypeptide expressing nucleotide sequence isolated from the Sargasso Sea
aatgtgggggggtagattcaataccgatcaagataaaataatgcttgaaatgaactcttctattgaattcgactctaggctttatcttgaagatattattgcctcgattgcgcatgcaaaaatgctgggaaaaaagaagataatttcttcggtagaatcacaaaaaattatatctggtttaaagaagatcaaaattgagtttgagaagggtatttttaatttagatccacttctagaagatatacatatgaacattgaagcaaatcttcaaaaaaaaattggcaatgtagctaagaaacttcataccggtagatcaagaaatgatcaggtagcaactgatatgagattatatatgaggaaacaatgccaagaaattataaaaaaaattacaatgattcaaaaagaattaagtaaaaaagctaataaatattatgattttattatgccaggatttactcatatgcaaattgctcaacctgttacatttggtcaccatctccttgcttatgtagaaatgctcgagagagataaaaatagatttcatgatgctttaaaaaggattaatcagagccctcttggcgctgcagcattagcgggtactacctttccaattgacagagaaatgacatccaaagctctaggtttcacaaatcctatggctaattcgattgatgcagtttcatcaagagattttattattgaacctttagccgccgcatcaatacttgcttctcatctttcaaggttttctgaagaaattatactttgggtctctgaaggttttgatttcattgaattacccgatagccttgcgacaggatcatcaataatgcctcaaaagaagaaccctgatattgcagaattagttagaggaaagaatggaagagttatcggcgcattaatgtcaattcttgttgttatgaagggattgccattagcatattcaaaagatcttcaagaagataaagaattaacatttgatgctatagataatattttgaattctcttgaagcaataaatgccatcattaaaaaattaaaacctaaaaaagaaaatttatcctctgctgcacagaagagttactctacagctactgatttagcagattggcttgtttctaacttaaatattccttttagagaagctcataaaataactggaaatatagtcagatattgtgaaaaaaagaaaattaaactatctgaactaacaataaaagagcttaaaagttttaataaaaagattaatgatgatatttttaatgtgctggatgctgaacaatctgttaatcaaaaaaagtcttttggtagcacatctccattaatggtaaaaaaatcagcagcaaaatggataaaaaaactacagaatgaaaaaaaatag

SEQ ID NO: 288268 - DNA, 1048 bp, Unknown
  Bacterial polypeptide expressing nucleotide sequence isolated from the Sargasso Sea
ttagtggctacagatctgcgcttgtggaccaaactgaacgccacccaggtgcgcagtactttaatcaatgccattggtgccctgatcacttttgcggatgcgcattttggtgctgtgatgccgggtttcactcacctgcagcgggctcagcctgtgctggtcagtcactgggctttggcttacatcgaaatgtttaaacgggatttaagccgtattgatgatgctttagcgcggctggacgtttgtcctttaggttgtggtgctttagcgggcacgggcattcaaattgaccgcactgcgttagcccagcgtttaggctttaaatcagccgcgctgaatagtttagatgcagtgtctgatcgggattatgtagttgagctgtcagctaccgcctctttgtgtatgacgcatttatcgcgtttatctgaagatgtgatcttcttctgctcaggtgaagccgctttctttaaattaggtgatgcgattagtagtggctcgtccttgatgccacagaagaaaaaccctgatgtatttgagttgttgcgtggtaaaactggccgggtgctgggccatttagtggctattttgcatgtgcttaaaggtttgcctctggcctacaacaaagatatgcaagaagacaagcagggcttttttgatttgatggcgagctggcaacaatgcttgctggtgctggcgactgtactgccgcatttatcggtcaatgtagaacgttgccgtttagctgcagagcttggttacagcaacgctactgatctggccgattatctggtcggtaagggtattgctttccgtgacgctcatgagttatccggtgagctggtgctggtcgcttcgaaacagcaaaaaccactggaagctttagctttagccgaaatgcagcaggtctcgcctttgatcagcgaggatgtttttgcagccctgaccattgaagctggtctggcgaaacgtgcatctttagcaggcaccagtcctgatagagtaaaagaagcgctggacgcaaccaaagtttggtttgaagcactctaaa

SEQ ID NO: 288269 - DNA, 1384 bp, Unknown
  Bacterial polypeptide expressing nucleotide sequence isolated from the Sargasso Sea
atgaaaaagaaccctgcaagaaatgtccatttagtaaaaggacctactaacttattagagaaaattaatctttccatagatgtagattctcgactttatagagaagatattgaagcgtctatagctcatgtaaaaatgctttctaaaacaaaaataatttcatcttctgaaagtaaaatactactaaaagggctaaataatattttaaaagatattgaaaaagggagaataaaattttcaaataagcatgaggatattcatatgaatattgaagctctcttattcaaaaaagttggtaatgtagcaggtaaattacatactgctagatctcgaaatgatcaagtagttactgattttaagctatggattagaaacaattcaaataatatagataaattgtgtaaaaattttcaaaaaattttgatcaatgttgccaaaaaaaatatttcttcagtaatgcctggttatacgcatctccaaattgcacaaccaatcacattagctcatcatcttttagcttatgtagaaatgattgggcgtgacagagaaagaataaaagattgcgttaaaagactcaatgaaaatccacttggcagtggcgctttggctggcacctcttttcctattgatcgtttaatgacttctaaaattttgggctttaatagaccaactagtaattcagtagatagtgtttcagatagagattttgtaatagagtttttgttttgccttacactaataagtgttcatttatcaagattagctgaagaaataattatttggtcaagccaacaatatgattttgttaaactcccagatgaaatagcaacaggaagctccattatgccacaaaagaaaaatcctgatggtgcagaattagtaagggctcaagcagcaactactattggaaatttgaattcattgttagttttattaaaaggcttgcctatgacatatagtaaagatcttcaaaaagataaacaaataacttttgatagctttgatactgtacatcttggactcaatgtaatgtcagaaataatagataaagctaaatttaatataaaaagtatgaaagaggctactgacttttcttatgcaactgcaactgatttagctgattggcttgttagatatcttaagtatacttttcgagatgcatataaaataacaggtaaaattgttgcttatgctgaaaaaaataacaaaatgcttaatgaactatcattaaaagattttcaaaaatttgataaaaaaattaataaaaatatttttacagttctttcatcaattaatagtgttaaaagtaaaaaaagttatggtggaacatctccagaaaatgttaaaaaatcaatctctaaagcaataaaaagatatttatgat

SEQ ID NO: 288270 - DNA, 1399 bp, Unknown
  Bacterial polypeptide expressing nucleotide sequence isolated from the Sargasso Sea
atgtccattaaaaaaaataagttaagagatagatttaataaaaaatcgagtgagtcttttataaatattaattcgtctttggaaaatgacaaatttttatttgaagaggatattgaagcatcgattgcacacgctacaatgctctcgtctcaaaaaataatttctaataaagactcaaaaaaaattatttccggattaaaaaaaattaggactgaaattaaaaataataaatttatatttgatgataatcttgaagatatccacatgaatattgaaagtagactagaagagcttattggtgatgccgctgaaaggttacatactggtagatctagaaatgatcaagttgtaacagatttaaaattgtggatgaaaaaagataatatactgatttcaaaaaaattaaaaaaactgaaatctgcgttactacaggttgcaagtaaaaatattttgattacgtttccaggccttactcacctgcaaactgcgcagccaatatcagttggacatttttttatggcgtactttgaaatgtttaacagggatacgaatcgattcagcgactcttttagaagaatgaacgaaaatccgcttggtgcaggagccttagcgggaactaattttccaattaatagaaacaaaacaacaaaaatgcttgactttaaaaaacctacaaaaaattcattggatacagtttctgatcgagattttgtggtagattttttatctagttcatccttaatggctgttcacttatcaaggttagccgaggaaattactctttataattccgatttagtgggtttctttaaaatcggagaccaattaatgtcgagttcttcaattatgcctcagaaaaaaaatcctgatggcgctgaattaattagagcaaaatcttcgacaatttcaggaaatctatcatctatgcttaacttgcttaaatctcttccactaacttacagcaaagaccttcaggaagataaggcgcttgtaacctcaacaagtaaaaacattcatctttgtctcgattgtatgatcgaaataatctctacaattaaaattgaaaaatcaaacatcgagaaaaagcttaaatcttcttttgccaatgcaactgatttagcagattggctagttataaatcttggttattcttttagaagtgcgcacaatttaaccgctaaaattgtcaactttgcagaaaaaaagaaaataagtttaaataagatatcgatgaaggattataaaaaatttgataaaaatatagacaaatctgtgtatggatttttagatttgaaaaatagtattaacaataaaaaaagctatggcggaacagcaatatctgagataagaaaaatgattagtcaagctaggaaagaattaagtaatgaaaaatattagt

SEQ ID NO: 288271 - DNA, 807 bp, Unknown
  Bacterial polypeptide expressing nucleotide sequence isolated from the Sargasso Sea
atgaaaatcccttaggtgttgcagcactcactggtacttcatttaatattgatagattttatactacaaaaaaattaaattttaaaaatccaactaaaaactctattgatactgtttcggacagagattttgttattgattttttatattcgtgttctgcatgtgcaattcatatttctagaattgctgaagagtttattatatggaattcagatgcttttaaactaattatattaaatgataaaatcgtaacaggatcttctataatgcctcagaaaaaaaatcctgatccactagaatatttaagaggaaaaacaggtgggatattcggtaatttattttcaatgttaacaatcttaaaaggactaccattatcatatttcaaagatttacaagatgataaagaattagcttttaaatcatttgatcaattaaaaaattctttaataatattaaatgatattttaaaaaatttttcagcagataaaaaaagaatgcttgaacttgcagaaagtggattcttaactgcaactgatctagctgactatatggttagagaattaaattatccattcagaaaagcttatttacaaactgcaaaaatagttaactttgcagagaaaaataaaaaaaaactatctgaactcagtattgaagaattacaaataattgaaaaaaaattaacttatgatgtaatgaaagtttttgacctaaaaaattcaataaattcaaaaacctcttatggaggaacttcttttgagaatattaagaaaatgatattaagttataaaaaagataaaaaatgat

SEQ ID NO: 288272 - DNA, 1180 bp, Unknown
  Bacterial polypeptide expressing nucleotide sequence isolated from the Sargasso Sea
aaaattaaaaaaggcctagttaagattctttcagaaataaaaagcgataagtttgaatgggaagaaggcctagaagatgtccacatgaatattgaatcagctttagcaaaaaaagctggaaatgctgctaaaaagctacatacaggcagatctaggaatgatcaagtttcaactgatctaagaatgtatctaaacataaagattgatgaatctttaaaaaatataacttatttacaaaaaaacattattaagcaggcagagaagcatatttcttcaattatgccaggcttcactcatttacaaatagctcaacccgtcacatttgggcatcacttgatggcttggtacgaaatgttagaaagagactacatgagactcatcgatgcaaaaaataggatgagtgtacttcccttgggctcagctgctttagcagggtctagatacaaaattaatagaagtttcttagcgaagaaacttggttttcagagtttatctaggaactccattgatgctgtaagcgatagagactttgtcatagagattgcgtcatcactttctattcttggtatacatttatcaagaatttgtgaagaaattgttttatggtcttcctcacaatttgaatacgttcatttatctgatgaggtttgcactgggtcttcaatcatgcctcaaaaaaggaatccagatgttgcagagttaataagaggaggctcttcaaagacagtagcaaacttaatgggattactatctttaatgaagaatttaccgctctcatacaacagagatttacaacaagacaaagagttcatttttgggagtgtagattatacgaatgatagtttagctctgcttgctctgcttattaaagatatgaaagtaaatataaaaaagcttgaagcagattgtaagctcggacaaataacagcaacagatttagcagactaccttgtggacaaatctatgcctttcaggaaagcccatgaaacagttgggaaaatagtagctttcgctgagtctaaaggcgtccaaatttttgaattagaaatctcagaattaagaaagttttctaaattaatctctgaagacgtaaattattatttagaccccgtaaaatcaattaattctagaacactggtaggcggtacagctccttcgcgggtaaaaaaggaaataaata

SEQ ID NO: 288273 - DNA, 853 bp, Unknown
  Bacterial polypeptide expressing nucleotide sequence isolated from the Sargasso Sea
agagacttaaattattttgatttttgtataaataacagcgatgaaaatgtattaggcagtgctgctttagcaggtagtaattacaacttagatataggtttactaaataaaagtttacatttttcaaaatctaaaaataattctatggatggtgtaagtgatcgtgatttttgcatgtattttctacatgctagttctttaactgcaactcatttaagtaaattatcatctgagctaattttatggtcaagtaactttatgaagttatttaatataagtagtgaatattctacaggtagttctatcatgcctcaaaaaagaaaccccgattcattagaacttgtgagatcaaaaacgaatagcattagaattaagtcaatagagctctcaaatattgtttcaaaccttcctttaacttattttaaagattttcaggaggataaaaggataatatttgattgttatgatgagttaataagctgtattaaaattatggaaaaagttataaaaaaatctaattttgaaaaatctattggaagagatttatgcaataattattttgctacagctacagatttagcagactatctagttatagaaaagaaaatacctttcagagaatcttataaaattattgctgatatagtaaattatgctcagaaaaaaaataaaaatctctcacaaataaaaattgatgaataccaaaaatttcaaaaatcaattgataaaaatatttataaatacgttgatataaataacagtctttcaagaaaaaaaacacccatgagctctaatccaaaagatgtttctagagtgattaaaaaatatattaaatttcttagagtaagatgat

SEQ ID NO: 288274 - DNA, 904 bp, Unknown
  Bacterial polypeptide expressing nucleotide sequence isolated from the Sargasso Sea
aacgctcaccccatttcgtttgctcattatttgcttgcctatgttgagatgtttaaaagggataaaaaaagatttactagcaatattagctatattgatgaatgccctttaggcgttggtgctttggctggaacttcttataaaattgatagaaatttcacatcaaaaaaattaggttttaaaaagccaacaaataattctattgactctgtagctgatagagattttgttttagattttttatcagctgcatcaatttgtgctatgcatatatctagatttgctgaagaattaattatttggaattcagatatatttaaacttgttaaaatcaatgacaaaatgttgaccggttcatcaataatgcctcaaaagaaaaatccagatccagctgaattaattagaggaagggctggaaaaaattttggttcattgcaagcaatgttaactacaatgaaagggcttcccctttcctattataaagatatgcaagaagataaggctctcgtatttgacagttacgacactctattggagtcaattattattacaaatgagctggttaaaaatttaacacctaacaaaaatagaatgcttgatttatcaaatgaaggttatactacttcaacagattttgctgattatcttgtacaaaacgaagatttatcttttagagaagcatataaaatttcagctaaactagtaaattatgcagagaagaaaagaaaaaaattaaatgaactaagtttaagtgaagtaaataaaattaaaaataatttaaaaaaagatgtaatgaaaatatttgatgtaaaaaactctgtaaattataagacttcttatggcggcacttctacaaaaaatatcaaaaaaatgatatcaaaacttaaaaaggaattaaaataat

SEQ ID NO: 288275 - DNA, 976 bp, Unknown
  Bacterial polypeptide expressing nucleotide sequence isolated from the Sargasso Sea
ggtctcggtgcagctgctacgccaggagctggacaagctggcagaagccatccgggtacaggcacgggcccacaaacacaccgtgatgatcgggcgttcccacgccatccacggtgagcccatcaccttcggcttcaagctcgccggttggctggcggaaaccgagcgcaacatcaaacgcctcaagcgactgcagaaagccgtcagcgtcggccaaatcagtggcgcgatgggcaactacgccaacacggagccccagatcgaagaacgagtctgtgaactgctcgggctgcgacccgatccagccagcacccaggtgatcagccgcgaccggcacgctgattacgtgcagactctggccttggtgggcacagccctggagcgtttctccacggaaatccgcaacctgcagcgcagtgatgtgctggaggtggaggaagccttcgccaaggggcagaagggcagttcggccatgccccacaagcgcaaccccatccgcagcgagcgcatcagtgggctggcccgcgtgctgcgcagctacacggtggcggccctggagaacgtggcgctctggcacgagcgggacatcagccacagctcagtggagcgcatgatgctgcctgatgtgagcgcgaccctgcacttcatgctgcgggagatgaccaaggtggtcagtggcctgcaggtgtatcccgacacgatgctacgcaacatgaatcgctacggcggtgtggtgttcagccaaacggtgctgttggcgctggtggagagcggcatgcgcagagaagacgcctaccgactggtgcagggccatgcccacgccgcctggaacgtagaaggcggcaacttccgcaaggcgcttgagaacgatccggcgatcaccgaacgcatcagcgctgagcagctggcgtactgcttcagcaccgagcggcatcaatcccagctcaatgtcatcttcgcccgcttggcgatctga

SEQ ID NO: 288276 - DNA, 919 bp, Unknown
  Bacterial polypeptide expressing nucleotide sequence isolated from the Sargasso Sea
gaagcaaaagttaagcatgatgttattgcttttttgacatcaattacagaacaaactggtcttaaggcaagatatcttcatcaaggaatgacctcatccgatgttttggatacaactttaaatgttcaattagttcaatcaggaaacattttattaagagacattgataaaattttatctgttctaaagaaacaggcaaaaaaatataaaatgactccttgtattggaagaagtcatggaattcatgcagaaccgattacatttggattaaaattagcatcattttatgaagaatttaaaagaaacaaattaagattaaaagatgcaatagaaaatgtatcaacatgtgcaatttcgggagcagtaggaacatttgctaatataaatcctaaaattgaaatttatattgcaaaaaaattaaaattgaaagctgagccaatttcaactcaaattattccaagagatagacatgcgcattatttttcagtgcttgggattattgctggttctgttgaaagagttgcaacagaaataaggcacttacaaagatcagaggtttatgaattacaagaatacttttcaaaagatcaaaaaggttcttctgctatgcctcataaaaaaaatccaatattaagtgaaaatcttacaggacttgcaagaatggtaagaagttacgtaatacctgctttagaaaatatttctttgtggcatgaaagagatatttctcattctagcgttgaaagaaatattggtccagacgcaaacataactttagattttgctttagttaggttgtcaggaattttagagaaaatgattgtttatccaaaaacaatgataaagaatttaaacttaacaagaggtcttgttttttctcaaagaggtaatgttagaacttaccaaatcaggctttgctaga

SEQ ID NO: 288277 - DNA, 665 bp, Unknown
  Bacterial polypeptide expressing nucleotide sequence isolated from the Sargasso Sea
tacacaagtaattccaagagacagacatgcattttatttttctgttttaggaattattgcaggttcaatagagagagtagcagttgaaataagacatttacagagaactgaggtttatgaactacaagaatatttctctaaaaatcaaaaaggttcatctgcgatgcctcataaaaaaaatcctattttgagtgagaatctcaccgggttagctagaatggttagaagtgcagttataccagcacttgaaaatatagcgctttggcatgaaagagacatttctcactccagtgttgaaagaaatattggaccagatgctaatataacaactgattttgcattggttagactaacaaatattttagataacatgattatttatccaaaaaaaatgcttgaaaatttaaatttaacaaaaggtctaattttttcacaagaagttatgctggaactaactaaaacaggtttaagcagagaaaaatcatacagaatggttcaatcttatgcaaaaaaatgttttgcagaaaatataaatttaattgacataattttatctgataaatttataatgagtaaaatttcaccaaaaaaaataaagtctatatttaattattctaaacactttaaaaatgtgaattttatctttagaagagtttttaaataat

SEQ ID NO: 288278 - DNA, 754 bp, Unknown
  Bacterial polypeptide expressing nucleotide sequence isolated from the Sargasso Sea
tctggtgcggaggtaatttgccatattgatcccttcattgaagaatatgtctgtgaaaagttgaaactcaatcctgaaccgatatcaacgcaagttataccacgggataggcacgctgcattctttgcgactttgggagttattgctagctctatcgaaaacattgcaacagaaattaggcatatgcaacgaaccgaggttttggaggccgaggaatatttttcaaagggtcaaaaaggctcttcggcaatgccacacaaaagaaatccagttttaactgaaaatctcacgggtctttcacgtcttgtcagaatggtagttataccagcaatggaaaatgttactctatggcatgaacgcgatatcagtcacagttctgtagaaagaaatataggccccgatgctacaataactttagattttgccttagcccgcttaacatctgtgattaagaaattagtagtgtaccctgacaatatgataaaaaatatgaataagtttaatgggttgattatgtcacagcgtgttctgcttgccttaacgcaagccggtcttagccgcgaggatgcatataaattggtacaaagaaacgcgatgaaagtttgggaagaaggaaaagacttcaaaacagagctcataaatgactcagaagtctcaaaggtactaacgaaagatgaaattgatgaaaaatttgatctggcatatcacacaaaacatgtagatacgattttccaaagggtcttttctgactaaa

SEQ ID NO: 288279 - DNA, 809 bp, Unknown
  Bacterial polypeptide expressing nucleotide sequence isolated from the Sargasso Sea
aatgataacaagatactctagaaaagaactcacagatatttggtctgagtataataaataccagatctggttagatgtagagatagctgcagctgaagccatggaaaaaataggtataattccaaaaggtgtcgctagtgctgttaagaaaaaagcaaaaattaatgtaaaaagaattcatagcatagaagctaaagtaaaacatgatgtaattgcctttctaacatcagttactgaaaaagtaggaattaaagcaagatatttacaccaaggaatgacttcttcggacgttgtggatacaagctttaatattcaattggttcaatcgggtaagataatattaaaagatattgatcagatattaaaagttttaaaatctaaagctaaaaaatataaattcactccttgtattggtagaagtcatggtattcatgctgagccaattacatttggtctaaagttagcatcatattacgaggaatttaaaagaaatagaaaaagactaattcaagcaattgatgaggtgtctacatgtgcaatttcaggtgcagttggaacttttgctaatataaaccctaatgtagaaaaacatgttgcaaggaaacttggattaaaagttgagcctatatcaacacaagttattccaagagatagacatgcacattatttttcaattcttggaattatagcaggatctattgaaagagtatcaacagagataagacatttacaaagaactgaggtttacgaattacaagaatttttttctaaaaaacaaaaaggctcaagcgcaatgcctcataaaaaaa

SEQ ID NO: 288280 - DNA, 799 bp, Unknown
  Bacterial polypeptide expressing nucleotide sequence isolated from the Sargasso Sea
ataagattagaaagagcaataaatgaagtttctacatgtgcaatatctggcgcagttggaacatttgctaatatagatccaagagttgaaatttatgtttcaaaaaaattaaaattaagaccagaaccgatatcaactcaaataatcccaagagatagacatgcttattatttttcagttttaggtatagttgcaggatcaattgaaagagtagctactgaaataagacatttacaaagatctgaagtttatgagttacaagaatttttttcaaaagatcaaaaaggttcgtcagcaatgcctcataaaaaaaatccaattttaagtgaaaatttaacaggcttagcaagaattgttagaagccatgtaactcctgcattagaaaatattgcactttggcatgaaagagatatctctcattcaagtgtcgaaagaaatattggaccagattcaaacatcactttagattttgcattagttagattagctaaccttttagataatatgcttgtttatccaaaaaacatgttaaaaaatttaaatctgacaaaaggagtaattttctctcaagaattgatgttagagttaactaaatcaggacttgcacgggaaaaagcctataaaattattcaaaaacacgcaaaaaatagttattctaaaaatattaacttaatggaattaataaaaaaggataaattaattgtttcaaaaatctcagaaaagaaaataaacaatatattcaaattttctaaacaccttaagtatataaattatatttttaaaagagtctttaaataat

SEQ ID NO: 288281 - DNA, 709 bp, Unknown
  Bacterial polypeptide expressing nucleotide sequence isolated from the Sargasso Sea
tatggttgcaaaaaaattaaaattaaaagtagagcctatatcaactcaaataattccaagggatcggcatgctcaatttttttcaactctaggaattattgcaagttctatagagagattcgctacagaaattagacatctacaaaggactgaagttttagaagttgaggaattttttggtaaaaaacaaaaaggttcatcagctatgcctcataagaaaaatcccatacttagtgaaaacttaactggtttagcaagactaattagatcttatgtaataccttctttagaaaatgtagccctctggcatgaaagagatatctctcactctgcagttgagagaaatattggccctgatgcaactatagccctagattttgcgcttcacagattgagtaatgtaattaaaaatttaaatatttatccaaaaaaaatgaaaaaaaatttagatataactaatggtatttttttttcacaaagagttcttctagagctaacaaatgtaggcttcacaagggaacagtcttataagatagttcagagaaatgctatgcaagcctggaaggaaaactcttcgttttataataaaattgtctctgataaaaaaattataaataaaatatctgttaataaactaaaaaagctatttgattttggttatcatacaaaaaaaattaatataattttcaaaagaagtctaaaaaattaa

SEQ ID NO: 288282 - DNA, 712 bp, Unknown
  Bacterial polypeptide expressing nucleotide sequence isolated from the Sargasso Sea
caagattttgttgcaaaaaaattaaaacttatttcagaagatatttctactcaaattataccaagagatagacatgcttattttttttctgtcttaggtatacttgcatcatcaatagaaagattcgctgttgaaattagaaatttacaaaaaactgaagtattagaagtagaagagagtttttcaacaaatcagaaaggttcttcagctatgcctcacaaaagaaacccagttcttagtgaaaatctaacaggaatagctagatatatcagaagtgcagttattccttcattagaaaatatagtgctttggcatgaaagagatattagccactctagtgttgagaggattatggctcctgacattataattgccactgattttgccttagtgagactaaatgggataattaagaatttgaaagtttattcaacgaatatgaaaaaaaatctaaatatgctcggtggattgcacaatactcacaacatcatgcttaagttaattaataaaggattaagcagacaattagcttacaaaatcgttcaagaaagtgctatggaaacatggaataataaaaaggatttttttgaagttttattaaataataaaaaactaaataaattactcaaaaataaagatattaagttaattattaaagacaataatgatcttaaaaatattgattggatttacaaaaataagattaaataga

SEQ ID NO: 288283 - DNA, 612 bp, Unknown
  Bacterial polypeptide expressing nucleotide sequence isolated from the Sargasso Sea
ttattgctggatccattgagagagttgctacagaaataaggcatcttcaacgaacagaggtgtacgaattacaagaatatttttcaaaaaatcaaaagggatcttcggcgatgccacataaaaaaaatcctatcctcagtgaaaatctcacaggcttatcaaggatggtaagaagtgcagttgtacctgccttagaaaatattgctttatggcatgaaagagatatttcacattcaagtgtagagagaaatatagggccagatgcaaacattacgcttgatttcgctttagtaaggctggctaatatattggataatatgattgtttatccaaaaaaaatgttacaaaatttaaatctaacaaaaggattaattttttctcaagaattaatgttagaattaactaaaactggattaagtagagaaaagtcttataggatgattcaaaattatgcaaaaaaatgttttgcagaagatttggacttatatagcgtcattcagaccgacagatatataatgagtaagatttcaccaaaaaaattacaatcagtttttagttacgctaaacattttaagaatgtgaacttaatatttaaaagagtattcagataat

SEQ ID NO: 288284 - DNA, 514 bp, Unknown
  Bacterial polypeptide expressing nucleotide sequence isolated from the Sargasso Sea
aggttcttcagcaatgcctcacaaacgtaatcctttattgagtgagaacttaacaggtatttcaagatatattagaagtggtgtaatgccttcactagaaaatgttgtgctttggcatgagagagatattagtcattctagtgttgaaagaattatgactccagatattacaattgcaactgattttgcactgaatcgtttaaatggaattataaagaatttaaaagtctatccaaaaaatatgttgaaaaatttgaatatgcttggaggcttacatagaactcacaatattatgttaaaattaattgaaaaaggactgaaaagacaacaagcttataaaattgttcaagaaagtgccatggagacatggaataataataagaatttttcccaagtttttcaaaaaaataaagaattaaataaaatattaaattcaaaagaaatcatgaaaatcattaaagatgataatgatctaaagaaaatagattggatttttaaaaataaaattaaataa

SEQ ID NO: 288285 - DNA, 971 bp, Unknown
  Bacterial polypeptide expressing nucleotide sequence isolated from the Sargasso Sea
gcgtgaaatacaccacgacgtgatcgcgtttcttacagagttgggtgaacaagtgggagatgaagcgcgttttgttcatcaaggaatgacatcttcggatgtccttgatacatgcctggcaattcaaatgacacaagcggctgaaattttgctagtcggactggacaaggttttgaaagctctagaaaaacgagctcgggaatttaagtttaccccctgtatgggacgtagtcacggcatccacgccgagccaacaacctttggtataaagcttgccggtcatttcgctgaatttgctcgctgccggaaacgacttgagataggacgcacagaaattgcgacatgtgcaatttcgggtgccgtcggcactttcgctaatattgacccaagtgtcgaagctcatgtagccgcatctatgaaccttgaaccagaacctatatcaagccaagttatgccgcgcgatcgacacgcagcttttttcgccgcaatggcaattacagctgctgcaatagagcgcctagctactgaaatccgtcatttacaacggaccgaggttcgcgaagtccaggaatattttgcgccaggccagaaaggctcatcagcaatgcctcacaagagaaacccaattttaaccgaaaacttaaccgggttggcgcgcatagtacgtatgacactagccccagctctagagaatattactctttggcatgaacgggatatctctcattcttcagtagagcgtatgattggacctgatgccaccgtaactttggattttgcacttaaccgcatcgcgacggttattgatacgctaattgtctacccaggtaatatgatggaacacattaataaatttggagggatccatgactcacagcgaatactattggcattgacgcaacgaggtttgagtcgagaagcgagctataagattgtacaacgaaatgcaatgaaagtttggcgcagttttg

SEQ ID NO: 288286 - DNA, 884 bp, Unknown
  Bacterial polypeptide expressing nucleotide sequence isolated from the Sargasso Sea
caactttctaatatttggaaaaatacctaaaaatgctgctgtagatattcgaaaaaaagctaaattcaatgttgaagaaattattgagttagaaaaagaaacaaaacatgatgtagtagcgtatataaaaaatgttagtaaatatattggtgaaaatgcaaaattttttcaccatggtgttacctctagcgatattatagatacttcgttttctattcaacttaaacagtcagcagaaattattgagaaacaattagaaatattaatctcaattttaaaacaaaaagcaattgaacataaaaaaacaattatgattggtagaagtcatggaatacatgctgaaacaattacttttggattaaaaatgggatccttttattttgaatttaaaagaaatcttaaaagattgcagatagcaaaagaagatatatcggtttgtgctatttcaggtccagtaggaacttatgaatctatcgacccaagtgttgaagaatatgtagcaaagaaactagacttaactgcagaaaatgtatctacacaagtcattccaagagatagacatgcttatttttttgcaacgttaggaataattgcttcatcaattgaaaggctttcaatagaaataaggaacttacaaaaaactgaggtttgcgaagttgaggaattttttgagaaaggacaaaagggttcttcagcaatgcctcacaaacgtaatcctattttaagtgaaaatttaactggaatcgctagatacattcgtagcggaattaatccaactatggagaatgtagctctatggcatgaaagagacattagtcattctagtgttgaaagaattttagctcctgatttaactattgctagtgattttgcattagctagat

SEQ ID NO: 288287 - DNA, 763 bp, Unknown
  Bacterial polypeptide expressing nucleotide sequence isolated from the Sargasso Sea
gcgctatatctggagcggttgggcacatttgctaatataaaccctaatgttgaaaaacatgttgcaaaaaaacttagattaaaaattgaacctatatcaactcaagttattccaagagatagacatgcacattatttttctgttttgggtattattgcaggttctattgagagagtttcaacagaaataagacatttacaaagaactgaggtttatgaattacaagaatttttttcaaaaaaacaaaaaggttcaagtgcaatgcctcataaaaaaaatccaattttaactgaaaatttaactggattggccaggatggttagaagttacactataccagctttagaaaatattgctctttggcatgagagagatatatctcactctagtgttgaacgtaacataggtccggatgcaaatataactttagattttgctttagtcagattagcaaatgttttggacaaaatgatagtttacccaaaaaaaatgcttcataatcttaatataacgaagggaactattttttcgcaagaattgatgttagaactaacaaaatcaggattaagtagagagaaatcttatcgattagttcaagcacatgccaaaaaatgcatagctgataatctcaaccttttagatgttgtcatgaatgataaaaacattacatctaggatacctaataaaaaaatgaaaaaaatatttaattattccaatcactttaagaatattaacttaatatttaaaagagtttttaaataat

SEQ ID NO: 288288 - DNA, 831 bp, Unknown
  Bacterial polypeptide expressing nucleotide sequence isolated from the Sargasso Sea
actccttgtattggtagaagtcatggtattcatgcagagccaattacatttggtcttaaactagcatcctattatgaggaatttaaaagaaatagaaaaagattaattagtgcaattgatgaagtgtctacttgttcaatttcaggtgcggttggaacattcgctaacataaaacctaatgtagaaaaacacgttgcaaggaaactagggttaaaagttgagcctatatcaacacaagttattcctagagataggcatgctcattacttttctgtgttaggaattattgcaggatctattgaaagagtttcaatagaaataagacatttacaaagaactgaagtttatgaattacaagaatttttttcaaaaaaacaaaaaggctcaagtgcaatgcctcataaaaaaaatccaatattaactgaaaatttaacaggactagcgagaatgattagaagttatactattccagcgttagaaaatattgctctttggcatgagagagatatctctcattctagtgttgaacgaaacataggtccagatgcaaatatcactctagattttgccttagttagactagcaaatgttttagataaaatgatagtttatccaaaaaaaatgcttcataacttaaatataactaagggaactattttttcacaagaactaatgttggaattaacaaagactggtttaagtagagaaaaatcatatagattagttcaaaagcatgccaaaaaatgcatagcagataatctgaacctttttgatgttgtgatgggtgataaaaacattacatctagaataccaaacaaaaaaatgaaaaaa

SEQ ID NO: 288289 - DNA, 633 bp, Unknown
  Bacterial polypeptide expressing nucleotide sequence isolated from the Sargasso Sea
tttatttctcggttctgggaattattgcaggttctgtagaaagagtagctacagaaattagacatttacaaagaactgaagtgtacgaactacaagaatttttttcaaaaaaacaaaaaggttcatctgcaatgccacataaaaaaaaccctattttgagtgaaaatttgacaggtctttcaagaatggttcgaagtacagtaattcctgcacttgaaaatatagccttatggcacgaaagagatatttcgcattcaagtgttgagagaaatattggacctaatgctaatataactattgattttgctttagtaagattaactaatattttagataatatgattgtttatccaaaaaaaatgttagagaatttaaatataacgaaaggtttaattttttcacaagaattgatgcttgaacttacaaaaaccggattaactagagaaaaatcatatcggatggttcaaaatttctcaaaaaagtgttttgctgaaaatttaaatttatttgatgtagtacaatctgatagatatataatgagtaaaatctcaataaagaaattaaaatcaatctttagctattcaaaacatatgaaaaatgtcaattttatttttagaagagtaattaaataat

SEQ ID NO: 288290 - DNA, 694 bp, Unknown
  Bacterial polypeptide expressing nucleotide sequence isolated from the Sargasso Sea
aaacttggtttaaaaatagaaccaatatctactcaagttataccaagagatagacatgcattttatttttcagttttaggaattattgcaggatcagtcgaaagagtggcaacagaaattagacaccttcaaagatctgaggtttacgaacttcaagaatatttttcaaaagaccaaaaaggatcttcagctatgcctcacaaaaaaaatcctattttgagtgaaaacttaactggattatcaagaatggtaagaagttatgtaactcctgctttagaaaatattgcactttggcacgagagagacatttctcattctagtgttgagagaaatataggccctgatgcaaatatcacattagattttgctttaaatagattgtcaaatattttagataaaatgataatttatccaaaaaaaatgattcaaaatattaatttaacaaagggcttaatattttcacaagaaataatgttggaacttacaaaaagtggattaagtagagaaaaatcctataaaattgttcaaatatatgcaaaaaaatgtttttctgaaaatacaaatttgtttgatttaatatcaagagataaatttataatgagcaaaattagtaaatctaaattgaattcaatatttaaatattcttctcattttaaaaatgtaaatttaatttttaaaagagtatttaaataat

SEQ ID NO: 288291 - DNA, 915 bp, Unknown
  Bacterial polypeptide expressing nucleotide sequence isolated from the Sargasso Sea
tcttccgatgtattggatacaagttttaatatacaattaattcaatcgggaaaaatacttttaaaagatattgatcaagtattaaaagttttgaaaaggcaatcaaaaaaatataaattgactccttgtataggaagaagtcatggcattcatgccgaacctttaacttttggattaaagctagcttctttttatgcagagtttaaaagaaacaaaaaaagacttttaagtgcaattgatgagatttcgacttgtgcaatttcaggtgctgttggtacttttgcaaatattaacccaaatgtcgaaaagcatgttgcaaaaaaacttggacttaaaattgagccaatatctacacaaataataccaagagacagacatgcattttatttttctgttctaggtattatagccggatcggtagaaagagttgctacagaaataagacatttacaaagaactgaagtttatgaattacaagaattcttctcaaaaaaacagaagggttcatctgcaatgccacataaaaaaaatcctatattgagcgaaaatcttacaggattggcaagaatggttagaagctatgtaattcctgcattagaaaatatagctctatggcatgagagagatatttctcattcaagtgttgaaagaaacattggacctgatgcaaatataacattagattttgcacttataagattatccaatgttttaaaaaacatgattgtttatcctaaaaaaatggcaaataatcttaacataacgaaaggtattattttttctcaagaattaatgctagaacttacaaaaactaatttaagcagagaaaaatcatacagaatagtccaatcacatgctaaaaaatgtattacacataacttaaatctatttgaagttgtaaaaaaagataaaaat

SEQ ID NO: 288292 - DNA, 524 bp, Unknown
  Bacterial polypeptide expressing nucleotide sequence isolated from the Sargasso Sea
taaccaaaaaggttcgtctgcaatgcctcacaaacgtaatccagtattgagtgagaacttaacaggtatttcacgatatattagaagtggtgtaataccttcattagaaaacgtcgtactttggcacgaaagagatattagtcattctagtgttgaaagaattatgactccagatattacaattgccactgattttgcactgaatcgtttaaatggaattataaagaatttaaaagtctatccaaaaaatatgttgaaaaatttgaatatgcttgggggcttacatagaactcacaatattatgttaaaattaattgaaaaaggactgaaaagacaagaagcttataaaattgttcaagaaagtgccatggaaacatggaataataataagaatttttcccaagtttttcaaaaaaataaagaattaaataaaatattaaattcaaaagaaatcgtgaaaatcattaaagatgataatgatctaaagaaaatacattggatttttaaaaataaaattaaatagt

SEQ ID NO: 288293 - DNA, 813 bp, Unknown
  Bacterial polypeptide expressing nucleotide sequence isolated from the Sargasso Sea
atttggtcagaggagaataaatataaaatctggctagatgttgaaattgcggcagctcaagcgatggaaaagctaggtcaaataccaaaaggtgtatcatcagttgtcaggaaaaaagcaagaattaatgtcaaaagaattcatcaaattgaaaatcaagtaaaacatgatgtaattgcttttttaacttcggttactgaaaaagcaggaataaaagcaagatatcttcatcaaggcatgacctcttctgatgttttagatacaagttacaatattcaactagtgcaatcaggaaaaataatccttaaagacctagaccaaattttaaaagttttaaaaaaacaagcaaaaaaatacaagttcacaccttgtatgggaagaagtcatggaattcatgctgagccaattacatttggtttaaaacttgcatctttttatgaggaatttaaaagaaataaaaaaagattaataagtgcaatagatgaagtatcaacatgtgcaatatcaggggctgtaggaacttttgcaaacattcatccaaatgttgaaaaacatgttgccaaaaaacttaatctaaaaattgagccaatttcaactcaagtgatccccagagatagacatgctttttatttttcagttttaggaatcatagctggttcgatagagcgagctgctactgaaataagacatcttcaaagaactgaagtttatgagttgcaagaatttttttcaaaaaatcaaaaaggttcttcagcaatgcctcataaaaaaaatccaattttgagtgaaaatttaactggtcttgcaagaatg

SEQ ID NO: 288294 - DNA, 760 bp, Unknown
  Bacterial polypeptide expressing nucleotide sequence isolated from the Sargasso Sea
gtgcatttctggagctgttggtacatttgctaatattgatcctaatgttgaaaaacatgttgcaaaaaaattaggtttaagagttgagccaatttcaacacagattattcctagagacagacatgcgttctatttttcagttttaggaattatagcaggttcagttgagagagtggctattgaaattagacacctccagagaacagaagtttatgagttacaagaatttttttcaaaaaaacaaaaaggctcttcagcaatgcctcataaaaaaaatcctattttaagtgaaaacttaaccggacttgcaagaatggtgagaagtgcagttgtacctgcgttagaaaatattgcactatggcatgaaagagacatatctcactcgagtgtggaaagaaatattggtccagatgctaatatcacaaccgactttgctctagtaagacttactaatattttagataatatgattgtgtatccaaaaaaaatgcttgaaaatctaaatataactaaaggtttgattttttcacaagaagtaatgttagagttaacaaaatctgggttaagtagagaaaaatcctataaaatggttcagagctatgcaaaaaagtgttttgcagaaaatctaaatttatatgatgttcttttaaaggataaattaattatgagtaaaatttctcaaaaaagacttaaatccatctttggttactccaaacattttaaaaatgtaaatttaatctttggaagagtttttaaataa

SEQ ID NO: 288295 - DNA, 844 bp, Unknown
  Bacterial polypeptide expressing nucleotide sequence isolated from the Sargasso Sea
ggacttaagttggcatctttttatgaggagtttaaaagaaataaaataagatttgaaagagcaataaaagaaatttctacatgtgctatatctggtgcagttggaacgtttgcaaatattgatccaagagtagaaatttatgtttcaaaaaaattaaaattaaggccagagccaatttcaacacaaataattcctagagacagacacgcttattacttttcagttttaggtataattgcaggatccattgaaagaatagctactgaaataagacatttacaaagatctgaagtttatgaactacaagaatttttttcaaaagatcaaaaaggttcctcagctatgccacataaaaaaaatccaatattaagtgaaaacttaacaggcttagcaagaattgtcagaagtcatgtaacccctgcattagaaaatattgctctttggcatgaaagagacatatctcactcaagtgttgaaagaaatatcggaccagactcaaatattactttagatttcgcattgtttagattggctaaccttttagataatatgattgtttatcctaaaaacatgttaaaaaatttaaatctaacaaaaggattgattttctctcaagagttgatgttagagctaactaagtcaggtcttgcgcgggaaaaagcctacaaaattattcaaaaacacgcaaaaaatagttattctaaaaacttaaacttaatggaattaataaaaacagataaattaattgcttcaaaaatttcagaaaagaaaataaataatatatttaaattttctaaacacattaaaaatataaattttatttttagaagagtttttaaataat

SEQ ID NO: 288296 - DNA, 708 bp, Unknown
  Bacterial polypeptide expressing nucleotide sequence isolated from the Sargasso Sea
ttgcaaaaaaacttaaactaaatatagaacctatttcaacacaagttatacctagagacagacacgctcaatttttttctacattaggaattattgcaagttctattgagagattcgctgttgaaataagacacctgcaaagaacagaggtgcaagaagtagaagagttttttggaaaaaaacaaaaaggttcatcagcaatgccacataaaaaaaatccaatcttaagtgaaaatttgacaggccttgcaagactaattcgttcaagtgtgatcccagcacttgaaaatgtagctctatggcatgaaagagatatttcgcattccgctgtggagagaaatataggtccagacgcaactatcgcattagattttgctttagctagattaaataatacagtaaaaaatttaaatgtttatccaaaaaaaatgttaaaaaatttaaatttaagtaatggtatttttttttctcaaagaattttactcgaattaacatcgataggttttactagggaagatgcttatgcaatcgtgcaaaaaaatgctatgaatgcttggagagaaaatacttctttttataataaaattattgaagatagaaaaatcactaccaaaatatctgttaataagctaaaaaaattatttgattttagttaccatactaaaaaaattaatataatttttaatcgttgtctaaagataaaataat

SEQ ID NO: 288297 - DNA, 941 bp, Unknown
  Bacterial polypeptide expressing nucleotide sequence isolated from the Sargasso Sea
taatagctattatgatttattaaacaatctaatagagaaccttaaaaataaggcgaatgaatataaagatattgcaatgttggctagaacacatggtcaacctgcatctccaactagacttggtaaagaatttgaagtgtttatagttcgcttagaagaacaaataaaacttctagaaaagattccgttttgtgcaaaatttggaggtgcaactggtaattttaatgcacaccatgtagcatatccaaaaattgattggaaaaaattcgcaaaatcatttgttagtaatttaggtctggaattgtcctacccaactacacaaatagagcactacgataatttagctgcaatatttgataacctaaaaagaatcaattcgattataattgatttaaatagagatatgtggctatatatatcaatggattatttcaaacaaaaaattaaaaaagatgaaatcgggtcttctgcgatgccacataaagtcaatccaattgactttgaaaactcggaaggtaatttaggattcgccaattcaatatttaatcatttatcatcaaaattacctatatctagattacaaagagatctaactgatagtacagttttaagaaatattggtgtacctatagctcactctgtaattggaataaattctacaataaaaggaatcaataaactattagtaaatactgaaaaaataaattcagatttggaaatgaactggattgttatagcagaaggaatacaaacagttctaagaagagaggggtttccaaagccatatgaggcattaaaagaactaacaaggaatagtcaagaaattaataaaaaaacatttatcgactttattgaaaaattggaaattagtgatgaaacaaaaaaagaactgaagaaaataagtccatttaattatacaggggatttgaaattaaagaaat

SEQ ID NO: 288298 - DNA, 847 bp, Unknown
  Bacterial polypeptide expressing nucleotide sequence isolated from the Sargasso Sea
tggtttaaactagcatcattttatgaagagtttaaaagaaacagaagaagattacaaagtgcaatttatgaagtttcaacatgtgctatatcaggagcagtcggaacttttgcaaatataaatccaaaagtagaaagttttgtgtctaaaaaactaaaattaagacccgaacctatatctacacaaattatacctcgagatagacatgcttattacttttctattttaggaataatcgcaggttcaattgaacgagttgcaactgaaatacgacaccttcaaagaacagaagtttatgagttgcaagaatttttttcaaaaagtcagaaaggttcttcggcaatgcctcataaaaaaaatccaatattaagtgaaaatctaacaggactatcaagaatgattagaagttatgttacgccagctttagaaaatatagctttatggcacgaaagagacatatcgcattctagcgttgaaagaaatataggtcctgatgcaaatataactcttgattttgcattaaaccgccttgcagacatattaaaaaatattgttatttatccaaaaaaaatgcattcaaatctaaatttaactagaggtttagttttttctcaagaggtgatgcttgaattaacaaagtcaggaatttcgagagaaaaagcatataggctagtacaaaaacattccaaaacaagttttttaaaaaaaatcgatttaattgatttgatcaaaaaagacaaaatcattagtaaacatatgtctgaaaataaaattaatagtatttttaaacatgataaacattttaaaaatataaattttatatttaatagagtttttaaaaaatgaa

SEQ ID NO: 288299 - DNA, 745 bp, Unknown
  Bacterial polypeptide expressing nucleotide sequence isolated from the Sargasso Sea
tatgaagaattcaaaagaaatagaaaacgattagttgatgctataaatgaagtttcaacatgtgctatttcgggtgcggttggaacttttgcaaatattaatccgaatgtagaaaaacatgtagcaaaaaaacttagtttaaaaattgagcctatttcaacacaagtaattccaagagatcgtcatgctttctatttttcggttttaggtattattgctggttcaattgaaagagtcgctactgaaataagacatttacaaaggacagaggtttatgaattacaagaatacttttcaaaaaatcagaaaggctcctctgcaatgcctcataaaaagaacccaatattgagtgaaaatttgacaggtcttgcaagaatggttaggagttccgtgacccctgctcttgaaaatatagccttatggcatgaaagagatatttctcattcaagtgttgaaagaagtataggccctgatgcaaacatcaccgttgattttgcattagtaaggttaacaaatattttagataacatgatagtttatccaaaaaaaatgttagaaaatcttaatattacaaaaggcttaattttttctcaggagctaatgctagaacttacaaaaactggtttaagtagagaaaaatcatataaaatggtccagagctatgcaaaaaaatgttttgctgaaaatctagatttatttaatgtaattcaatctgacaaatatataatgaataatattcaccaaa

SEQ ID NO: 288300 - DNA, 844 bp, Unknown
  Bacterial polypeptide expressing nucleotide sequence isolated from the Sargasso Sea
ggttttaacttttaactttttacaagagtttttaagaaataaaaaaagacttgaaaattcaattaaagaaatttctacttgttcgatatcaggggctatgggtacttttgcaaacgtagatcctaaagtagaaaattatgtctcaaaaaaattaaaattaaaacccgagcctatctcaacacagataattccacgagatagacatgcccaatttttttctacacttgggattatagctgcgtcaatagagagatttgctgttgaaattagacatttgcaaaggaccgaagttttagaagtagaggaattttttgaaaagaaacaaaaagggtcatcggctatgcctcataagaaaaatccaatattaagtgagaatttaactggattgtccagattaatcagatcatcagtagctcctgctcttgaaaatgtagttttatggcacgaaagagatatatcccactccgctgtagagaggaatattgggcctgatgtgacaacagcattagattttgctcttgtacgtttggaaaaagttataagaaatttaaatatttttccaaaaaaaatgttaaaaaatttagaactatctaaaggtttattttactcacaaagaataatgttggaattaactaaaaaaggtatgtcgagagaaaaagcgtactctctagttcaaaataaaacaatgaaaacatggaaaggtaatgatagtttttataaagttctctgcgatgataagttaattacgaataaaatacctgttaataaattaaaaaaactatttgattatgattaccatatcaaaaaaattaatataatttttaaaagaggtttgaaaatataa

SEQ ID NO: 288301 - DNA, 758 bp, Unknown
  Bacterial polypeptide expressing nucleotide sequence isolated from the Sargasso Sea
aatttcagggcctatgggaacgtttgcaaacatcagtccaaatgttgaaaaacatgttgcaaaaaaacttggactaaaagttgaacctatttctacacaaataataccaagagacagacatgcattttatttttctgttttaggaattatagctggatctgtagaaagaattgcaacggaaataagacatctgcaaagaacagaagtttacgaattgcaggaatatttctcaaaaaaacaaaaaggctcttctgccatgccacacaaaaaaaatccaatattaagtgaaaatttaactgggctttcaagaatggttagaagttatgtggttccagcattagaaaatattgctctttggcatgaaagagatatttcgcattcaagtgtagaaagaaatattggtcctgatgcaaatataacattagattttgctcttgttagactatctaatgtcctaaaaaatatgatcatttatccaaaaaaaatgaccaaaaatcttaacataacaaaaggtatcattttttctcaagaattgatgttagaacttacaaaatcaggtataagcagagaaaaatcatacagaataattcagtcacacaccaaaaaatgcatatcacaaaatttaaatctatttgaagttgtaaaaaaaaataagttaataactgacagaatttctttgaataaactaaaaaaaatatttaattattcatcacactttaagaatgttaatttgatttttaatagagtgtttaaataat

SEQ ID NO: 288302 - DNA, 576 bp, Unknown
  Bacterial polypeptide expressing nucleotide sequence isolated from the Sargasso Sea
gacatcttcaaagaactgaattattagaaatagaggaaagttttggaaaaaaccaaaaaggatcatctgctatgccacataaaagaaatcctattttaagtgaaaatttaactggtttagcaagatatattagaagctcagttacgccatcactagaaaatatagctctatggcatgagagagatattagccattctagtgtagaaagaattttagcaccagatgtatcaatcgctactgattttgcattggacagattaagtaacctaattaaaaatataattatttatccgaaaaacatgaaaagaaatatggatagattaagtggattgcataaaagccaagatattttactatttttaattaaacaaggtttatctcgaaaaaaagcttattcaatagtacaaaaatcagcaatggaaacatggaaaaaaaataaaccttttggtgaagttctatcaaaagatccatatattaaaaagaatattaacaaaaaagaactagaaagattattaaaagcaaaagatagaattcaaaatatagattacatttataaaaacatatttaaaaaataac

SEQ ID NO: 288303 - DNA, 845 bp, Unknown
  Bacterial polypeptide expressing nucleotide sequence isolated from the Sargasso Sea
tgtcaaaaagaaagctaaaattaatgtctcaagaattcataaaatagagtctgaggttaaacacgatgtgatagcctttttaacttcaattactgaaaaagctggaataaaagctagatatcttcaccaaggtatgacttcctctgatgttttggatactagtttcaatattcaattagtccaatcaggaagaattattttaagcgatatcgatcaaattttaaaagttttaaaaagacaggctaaaaaatataaactaactccgtgtataggacgaagtcatgggattcatgcagaaccaattacttttggtttgaaattagcttcattttatgaggaatttaaaagaaatagaaatagattagcatacgcaattgatgaagtatctacttgtgcaatttcaggagccgttggaacatttgctaatattaatcctaatgttgaaaaatatgttgcaaaaaaattaagtttaaaagttgagccaatttcaacacaagttataccaagagacagacatgcattctatttttcagttttaggaattatagcaggttcaattgaaagggttgcaattgaaattagacacctgcagagaacagaagtttatgaattacaagaatttttttcaaaaaaacaaaaaggctcttcagcaatgcctcacaaaaaaaatcctattttaagtgaaaatttaacaggacttgcgaggatggtaagaagtgcagttgtgcctgcattagaaaatatttcgctatggcatgagagagatatatctcattcaagtgttgagagaaacattggtccagatgctaatataacaacaggattttgctttagccagacttaag

SEQ ID NO: 288304 - DNA, 765 bp, Unknown
  Bacterial polypeptide expressing nucleotide sequence isolated from the Sargasso Sea
agctgcatgtgaagcaaatttttccctcggaaaaatccctgtgaatgccatgaaaaagatacgttcaaatgcaaagtttgatgaatctagaattacagaaattgaaaaagaagttaaacatgatgttatagcatttcttacaagcgttaatgaatttgtaggggattcaggaagatacatacatgttggtatgaccagtagtgatgtacttgatactggcttatctcttcagttagtagattcttgcgaattattattagtagaaattgagaaccttgaaaatgaggtcagattattagcaaggaagcataaaaatactttaatgattggcagatctcatgcaattcatggggagccaatttccttcggttttaaacttgctggatggttagcagaaataataaggaacaaaaaaagattgttaactctgaaagattctgtagcaattggacaaataagtggtgcaatgggaacttacgctaatacgaatcctaaagtagaacaaataacttgtgatttactcggcttaaaacctgatacagcaagtacgcaggttatatcgagagacagacatgcagaatatgtgcaaactattgcactagttggcgcttctttagatagattcgcaactgaaataagaaatctacaaagaactgatgttttagaagttgaggagggctttacaaaagggcaaaaaggaagttctgccatgcctcataaaagaaatcctattcgaagtgaaagagtaagtggtttagcaagaat

SEQ ID NO: 288305 - DNA, 835 bp, Unknown
  Bacterial polypeptide expressing nucleotide sequence isolated from the Sargasso Sea
tactttttacgaagaattctcaagaaatcacaaaagacttaaaagtgcaattatagaagtatctacttgtgcaatatctggtgctgttggtacattcgcaaatgtagatcctagagtagaaaaatacgttgcaaaaaaattaaatttagatgtagaaccaatatcaactcaaattatacctagagatagacatgcttatttcttttctgttcttggcgtgatagcaagttcaatagaaagatttgcaacagaaataagacatttacaaagaactgaagtctcagaagttgaagaattttttaataataaacaaatgggatcttcagcaatgcctcacaaaaaaaatccagttcttactgaaaatcttacgggtttagctaggcttattagggcatcagtaatacctgctttagaaaatgtagcgctttggcatgaaagggatatttctcattctagtgttgaaagaaatatagggcctgacgccactattactttggattttgctcttgatcgcttaaacaatgttgtaaagtccatgaaggttaataaagataatatgaaaaaaaatctaaatttaacaaaaggaattttcttttcacaacgggtattgcttgaactcacatctcaaggattaagaagagacaaggcatatagaatagtgcaaaattgtgctatgaaatctgttgaaaataatatccctttctacgatagcttgttaaaagataagataattgcggacaaaatacctgttaatactcttaaaaaattatttgattttagttatcacacaagaaaaattaatgtaattttctcaagagtattgagaaagaaatga

SEQ ID NO: 288306 - DNA, 484 bp, Unknown
  Bacterial polypeptide expressing nucleotide sequence isolated from the Sargasso Sea
catgccgcataaagtcaatcccatcgatttcgagaacgccgagggatattttggtctggcaaatgccctgctcaagcacctttcccagaagctaccggtgagccggtggcagcgcgacctcactgacagtaccgtgctacgcaacattggggtggccttgggccactcacaactggcactggcgtcactgagcaaaggtatcgacaagctggaggtagcgcctgagccgatagcagatgatctggaggctgcctgggaagtgctgggagaagcggttcagacggtgatgcgacgatacggcgtgccggaaccctatgaaaagctgaaggcgctcacgcgaggccagcgcctggaggccgacagattgaaatccttcatactcgcgctcgagattcctgacgatgccaaggagcggctcatgtcactcacccctgatacctatctcggatacgcggccgatctggctaaaaaaaccgctctctga

SEQ ID NO: 288307 - DNA, 605 bp, Unknown
  Bacterial polypeptide expressing nucleotide sequence isolated from the Sargasso Sea
actagagaaatttgctacagagataaggggcctgcagcgaactgaggtgcacgaagtggaagagccatttggcgaaggacaaactggatcgtcagctatgccacataagcgtaatccagatttatctgaaagagtttgcggacttgccaggctaatacgaggcaattcaattacagggcttgaaaatgtcgctttatggcatgaacgcgatatttcacactcctcagctgagcgaattatattgcctgattcttgcatggccttagattatattttgaacatcttcactggaattgttcaggggattacggttttccccgatcgtatgattgccaatatagaatcgactcgcggcttacttttttcacagagagtaatgctttcactggtaaacgctggtatgtcgcgcgatgaagcttataaactagcgcaatcgtatgcagcaaaaacttgggacgaaggtgctgactttcgggaattaattaaaaatgatactaaggtgaaagagctcattgagccttcctcacttgaggagctttttgactatactttttatacgcaatgcgtcgatgctttgtacgaacgagtcggtttagataaataat

SEQ ID NO: 288308 - DNA, 703 bp, Unknown
  Bacterial polypeptide expressing nucleotide sequence isolated from the Sargasso Sea
tgtttcaaaaaaactaaagttaaggcctgagccaatttcaacgcaggttatcccaagagacagacatgcttattatttttcaattttaggcattattgctggctctattgaaagagttgcaacagagataagacatttacaaagatcagaagttaatgaattacaggaatttttttctaaaaatcaaaaaggttcctcagccatgcctcataaaaaaaatccaatattaagcgaaaacttaactggacttgcaagaatagttcgtagctacgtaataccagcgttggaaaatattgctttatggcacgaaagagatatttcacattccagtgttgaaagaaatattggtcccgactcaaacataacattagattttgcacttgtcagactggctaatcttttagaaaatatgattgtctatccaaaaaaaatgctatcaaatttgaatttgacaaaaggtgtaatattttcacaagaaatgatgcttgaactaacaaaagttggattaacaagagaaaaagcttacggaataatacaaaaacatgcaaagcacagttactataaaaatattgatttaataaatttaattaaaaatgataaatccataacttctaaaatatcaaatgcaaaaattaatagtatatttaatttttctaagcatttaaaaaatattaatttcatatttaggagagtgtttaaataa

SEQ ID NO: 288309 - DNA, 747 bp, Unknown
  Bacterial polypeptide expressing nucleotide sequence isolated from the Sargasso Sea
aatagatgaagtttctacttgtgctatttctggtgcagtaggaacattcgcaaacataaatcctaatgttgaaaaacacgttgcaaaaaaacttaatttaaaagttgagcccatttcaacacaagttattccaagagatcgtcatgctttctatttctcaatattgggaattattgctggatcaatcgaaagagtagcaacagagattagacatttgcagagaacagaagtttatgagttgcaagaatacttttcaaaaaatcaaaaaggttcttcagcaatgccacataaaaaaaatcctattctaagtgaaaatcttactggccttgccaggattattagaagcacagtcactcctgccttagaaaatatcgccttgtggcacgaaagagacatctctcattcaagtgtagagagaaatataggaccagacgctaatattgctgtagattttgcactagtcagattgtctaacattctagataatatgattgtttatccaaggaaaatgttagaaaatttaaacttaactaaaggactaattttttcacaagaactaatgcttgaattaaccaaaactggtctaagtagagaaaaatcctacaaaatggtgcaaacttatgcaaaaaagtgtttttctgaaaacttagacttatttaatgttatccaatctgacaaatatattatgtctaatatttcacaaaaaaaattaagttctatttttagttacagaaaacattttaaaaa

SEQ ID NO: 288310 - DNA, 522 bp, Unknown
  Bacterial polypeptide expressing nucleotide sequence isolated from the Sargasso Sea
gcaatatctggtgcagttggaacatttgcaaatatagatccaagagttgaaatttatgtttcaaagaaattaaaattaagaccagaaccaatatcaactcaaataatcccaagagatagacatgcttattatttttcagttttaggtataattgcaggatccattgaaagagtagatactgaaataagacatttgcaaagatctgaggtttatgaattgcaagaatttttctcaaaagatcaaaaaggctcatcagcaatgccacacaaaaaaaatccaattttaagtgaaaatttaacaggcttagcaagaattgttagaagtcatgtaacccctgcattggaaaatattgcactttggcatgaaagagatatctctcattcaagtgttgaaagaaatattggaccggattcaaacattactttagattttgcattagttagattatcaaaccttttagataacatgattgtttatccaaaaaatatgttaaaaaatttaaatctgacaaaaggagtaatt

SEQ ID NO: 288311 - DNA, 570 bp, Unknown
  Bacterial polypeptide expressing nucleotide sequence isolated from the Sargasso Sea
tacaaagatcagaagtgagtgaagttgaagagttcttttctgctggacaaaaaggttcttcagcaatgcctcataaaagaaatcctgttctcagtgaaaatcttacaggattatctcggttaataaggatgacggttgtgccctcgctggaaaatatatccctatggcatgaaagagatatatctcattcatcggttgaacgtaacattgggcctgatgctaatattttattagatttttctttaaaccggctagcgagtttaattgaaaatttaatggtttatcccgataatatgaaggataacttaacaaaattttatggtttagttaattcacaacgggtaatgcttactcttacccagaaaggagtttctcgggagaatgcctatgaaatcgtccaacgatgtgctatgacgagttggaataagaaagttgatttttttacaactctttccaatgacgatgaggtagttaaaatcttgtcaaaattagatcttgaaaattgttttgatgacgagttccatctaaaaaacatcgataagatttttaaaagagtcttttcccagtagg

SEQ ID NO: 288312 - DNA, 760 bp, Unknown
  Bacterial polypeptide expressing nucleotide sequence isolated from the Sargasso Sea
gtgcatttctggtgctgtaggaacatttgcaaatataaatccaaaagtcgaaaagcatgtggctaaaaaattaggtttgaaagttgagccaatttcaactcaagtaattccaagagatcgacatgcattttatttttcagtattaggaattattgcaggatcgatagaaagggtagctattgaaattagacacctacaaagaactgaggtttatgaattgcaagaatatttctcaaaaaaacaaaaaggttcctcagctatgccgcataaaaaaaatccaattttaagcgaaaacttaactggacttgcaagaatggtaagaagctctgttcttccggctttggaaaatattgctttatggcatgaaagagatatttcacattcaagtgtggagagaaatattgggccagacgctaatataacaactgattttgctttggttagattaacaaatattttagataatatgattatttatccaaaaaagatgttagaaaatttaaatattactaagggtttaattttttctcaagaattaatgcttgagttaacaaaatctggattgagtagagaaaagtcatataaaatggttcagagttatgcaaaaaaatgttttgctgaaaacttagatttgtttaatgttattcaatctgacaaatatattatgactaaaatttcatcggaaaaattaaaatctatttttagttattctaaacattttaataatgtaaattttatttttagaagagtatttaaataa

SEQ ID NO: 288313 - DNA, 880 bp, Unknown
  Bacterial polypeptide expressing nucleotide sequence isolated from the Sargasso Sea
gaaaaaatttggacattagagaataaatttaaaatttggacagatatagaaattttaattgctgaaaaattaagtgatatcggtgtaattccaaagattgcatctaaagaaattagaaaaaaagctaaatttagtgtcagtgaaatacttaaattagaaaaacaaacaaagcatgatgttaatgcctatatagataatgtatgcaaacatattggcaagcattcaaaatattttcatcatggtgttacttcaagtgatattattgacactggtttttcaattcaattaaaacaaacaggagaaattattcataaagaactgagtattttattaagaaatttaaaatccaagtcaattaaatacaaaaacacaataatgattggcagaagtcatgggatccatgccgagccaattacttttggattaaaattaggatctttttataacgagtttaaaagaaatttaaaaagacttgaattagcaattgaagaaattagcatatgttctatctcaggacctgttggaacatatggaagcatagatccaggagtggaaaaatatgttgcaaaaaaacttaaacttaaatgtgaagatgtttcaactcaaatcattccaagggataggcatgctttctttttttcaataatgggaattattggaagttcaatagaacgttttgcagttgaaatcaggcatctacaaagaactgaattactagaggtcgaagaaaaatttaattcaaaacaaaaaggatcatctgcgatgccccataaaagaaatcctattttaagcgaaaatttaactggactagcaagatatataagaagtgcagttattccttctatggaaaatatagttttatggcatgaaagagatataa

SEQ ID NO: 288314 - DNA, 589 bp, Unknown
  Bacterial polypeptide expressing nucleotide sequence isolated from the Sargasso Sea
agtagctgttgaaataagacacctacaaagaactgaagtttatgagttacaagaatatttctctaaaaatcaaaaaggttcatctgcaatgcctcataaaaaaaatccaatcttaagcgaaaatttgactggcttagcaaggatggttagaagtgcagtcgtaccagctcttgaaaacattgctctttggcatgaaagagacatttctcattccagcgttgaaagaaatattggaccagatgctaatataacaactgattttgcattggttaggcttacaaatattttagataacatgattatttatcctaaaaaaatgcttgaaaacttaaatttaacaaaaggtttaattttttctcaagaagttatgctagagttaactaaatcaggtttaagcagagaaaaatcatacaagatggtacaatcttatgcaaaaaaatgttttgcagaaaatttagatttaattgacgtcatttcatctgataaatttataatgagtaaaatttcgccaaaaaaactaaagtctatatttaattattctaaacactttaaaaatgtaaattttatctttagaagagtttttaaataa

SEQ ID NO: 288315 - DNA, 547 bp, Unknown
  Bacterial polypeptide expressing nucleotide sequence isolated from the Sargasso Sea
tttttggtattacatatctcggggaatattagagcaaaagcgaattaaagatgaggtgggttcttctgctatgcctcacaaaattaaccccattcagtttgaaaatgccgagggaaatctgggaatatcaattgcacttttaaatcacctatcaactaagctccctgtatctagaatgcaaagagatttaagcgattctactgtattgagaaatcagggggttgcaatgggacatagtgttttgtctgttaaaaatattatcaatggtcttaagagaattaaggctaacaaaactaacctctacaatgaactagacaaccactgggaggtgcttgctgaaggagtacaaactatattaagaaaatctggaaacgattcggcatatgaaaagctcaaagagttgactcgtgggcacacggttgatagagagttgctttcagcgtttataaatgatttggaaatatctactaatgataaaaaatttttactttcattaacacctcataattacatcggcctcgctgccgagattgcaaagcttaaataa

SEQ ID NO: 288316 - DNA, 892 bp, Unknown
  Bacterial polypeptide expressing nucleotide sequence isolated from the Sargasso Sea
aagtaaaaaaattagatcaaaagcaaagattaatgagaagagaattgatcaaattgaaaaaaaagtgaaacacgatgtaattgcttttttaacaacaatttctgaatacgcgggtccgcctgcaagatttcttcaccaaggtctaacttcttcagatgttttagatacggcttttaatgttcaactaaaacagtcctcagtcattattgagaaggaactattaaatttactaaaatcattaaaaaagattgcaataaaacataagaacacaccttgcattggaagaagtcatgggattcatgcggaacccacaacttttggagttaaaatggcatctttttatgcagaatttcaaaggaaccataagcgttttttaaaagcaattgaagaaataaatatatgcgcgatttcaggcgcagttggcaattatgcaaatattgatccacgtgttgaacagtacgtcgcaaaaaaattaggaatgaaagcagaaactatttcaactcaagtaataccgagagatcgtcacgcagtatattttaatactcttgcggtaattgcaagttcaattgaacgtttagctaccgagataagacatttacaaagaactgaagttctagaagttgaggaatttttttcaaaaggacaaaaagggtcatcagcaatgcctcataaaagaaacccggttctgactgaaaatttaactggactggcaagactcgtaagaggttatacggttcctgctttagaaaatattactctttggcatgaaagagatatatctcattcaagtgtagagagaataatggcgccagatgcaaatattataatcgactttgcactttcacgaatgaacaatgtgatatcaaatcttgttgtgtatcaaaaaatatga

SEQ ID NO: 288317 - DNA, 603 bp, Unknown
  Bacterial polypeptide expressing nucleotide sequence isolated from the Sargasso Sea
gttctatagagagagtagctacagagataagacatctacaaagatctgaagtttatgaattacaagaatatttttcaaaagatcagaaaggatcttctgcaatgccacataaaaaaaatcctatcttgagcgagaatttgacaggtcttgcaagaatagttcgtagtcatgttgtccctgcgctagaggatatcgccctttggcatgaaagggatatatcccattcaagtgttgaaagaaatattggtccagactctaatataactttagattttgcattggtaagattgtctaatcttttagataatatgatcgtgtatccaaaaaaaatgattaaaaatttaaatcttacaaatggtgttgttttttcacaagaagtaatgctggaactcactaagactggttatacaagagagaaagcttacaggctggttcaaaaacatgcaaaagaaagtatatctaaaaatattaatttaataagtttacttaaaaaagataaaatgatttgttcaaaaatttcagaaaaaaaaatagatagtatttttaaatattcaaaacatctaaaaaatgtaaattatatttttaagagggttttcaaataat

SEQ ID NO: 288318 - DNA, 739 bp, Unknown
  Bacterial polypeptide expressing nucleotide sequence isolated from the Sargasso Sea
aaagtattttcacttcggtgtaacatctagcgatattatagataccgcatattccatacagttaaaacagactgctgagattataagaaaaaatttattagaatgtataaagaattttaaaataagttctaaaaaatataaaaatacaaagatgattggtaggagtcatggaatacacgcagaaccaattacttttggattaaaattagcatcattttatttcgagtttaaaagaaatcttaaaagacttgatcaagcaatagatgaaatttcagtttgtgctatatcaggaccagtaggtacgtttaattcaattgaccctaaaattgaaaattatgtagcaaaaaaatttaaacttaaaacagaaaatatctcaactcaaataattccaagagatagacatgcttattttttttctattttaggaattatcgcatcatcagttgagagatttgcagtagaaattagaaatcttcaaaaaactgaagttcttgaagttgaggaaagcttcagtgttaatcaaaaaggatcatcagcaatgccacataaaagaaatcctgtaattagtgaaaatttaactggtttatcaagatatgttagaagtgctgttatcccctctcttgaaaatatagtactttggcatgagagagatataagtcattcaagtgttgaaagaatacttactccaaatataacaattgcaaccgattttatgttaatgaggttaaataatttactt

SEQ ID NO: 288319 - DNA, 844 bp, Unknown
  Bacterial polypeptide expressing nucleotide sequence isolated from the Sargasso Sea
caatcaggaaaaatattattaaaagatatagatctaattttaaaagttttaaaaagacaggcaaaaaaacataagtttacaccttgcgttggaagaagccatggaattcatgctgaaccaataacttttggtttaaaattggcatcgttttatgaagaatttaaaagaaatagaaaaagattagttgatgcaatcaatgaagtttctagttgtgctatttcaggagctgttggaacttttgctaatataaatcctaatgttgaaagacatgttgcaagaaaacttggtttaaaagtagaacctatatcaactcaagtaataccgcgtgatagacatgcattttatttttctgttttaggaattattgcaggatcagttgaaagagtagcaactgaaattagacaccttcaaagatctgaagtttatgaacttcaagaatatttttcaaaagatcaaaaaggatcttcggcaatgccacataagaaaaatcctattttaagtgaaaacttaactggattatcaagaatggtaagaagttatgtaacacctgcattagaaaatatagcactttggcacgagagagacatttcgcattctagtgttgagagaaatataggtcctgatgcaaatattactttagattttgctttaaatagattgtcaaatattttagataaaatgataatttatccaaaaaaaatgatacaaaatattaatttaacaaaaggtttaattttttctcaagaaataatgttagaacttacaaaaagtggattgagtagagaaaaatcttataaaattgttcaatcacattcaaaaaaatgtttctctgaaaataaaaatt

SEQ ID NO: 288320 - DNA, 516 bp, Unknown
  Bacterial polypeptide expressing nucleotide sequence isolated from the Sargasso Sea
aagggtcaagtgcaatgcctcacaagaaaaatcctatactaagtgaaaacctaactggactagctagaatgattagaagctataccattccagctttggaaaatattgcactgtggcacgaaagagatatttcacattcaagtgtagaaagaaacatagggccagatgcaaatataacattagattttgctttagtgaggttagcaagtgttttaaataatatgatagtttatccaaaaaaaatgcttgataaccttaatatcacaaagggtaccattttctcacaagaattgatgcttgaattaactaaatcaggtttatctagagaaaactcctatagattagtccaagcacatgctaaaaaatgcatagcagataatcttaaccttttagatgttgtgatgagtgacaaaaacattacatctaggatatcaagtaaaaaaatgaaaaaaatatttgattattcttcgcactttaagaatgttaatttaatttttaatagagtatttaaataat

SEQ ID NO: 288321 - DNA, 761 bp, Unknown
  Bacterial polypeptide expressing nucleotide sequence isolated from the Sargasso Sea
cttaaagaaaataccaaattctgcgaaattttcgggagcagttgggaattttaatgcacataaagttgcctatccaaaaattaattggaaaaattttggagtaaattttgttgaaaataaacttggtttaaattattcctatcctactacacaaattgaacactacgattcgtttgcttcactatcagataattgtagaagaattaataatattttgttagatatgtgtattgatatatggacatacatttcacatgattattttaatcaaaaaattgttaagaatgaggtagggtcatctgcaatgcctcataaagttaatcctattgattttgaaaacgctgaaggcaatttaggaatagctaattcaacatttaatttcttctctaataaattaactaaatctaggcttcaaagggatttatctgatagtactgttcttagaaatattggtgtaccatttagtcatactataatttcttttgaatcaattcttaaaggattaagtaaaatttatgtgaatgaggacaagatcaacaaagatattgaagataattggatagtagtttcagaggcaattcaaacaattttaagaagagagggatacccagaaccttatgaagtaatgaaggagcttacaaggaataatgaaaagatagataaatcaaaacttcataattttattgatagtctaaatatagatcaggctattaaaaaagagttaaaaaaaattactccgtataactatacaggtatataat

SEQ ID NO: 288322 - DNA, 581 bp, Unknown
  Bacterial polypeptide expressing nucleotide sequence isolated from the Sargasso Sea
tgaaataagacacttacaaagaactgagttacttgaagtagaagaaaaattcaatcctaaacaaaaaggatcatctgcaatgccacataaaagaaatcctgttttgagtgaaaatttaactggattagctagatatatacgcagtgtagtcatgccttcaatggagaatattgttttatggcatgagagagatattagccattctagtgttgaaaggattatggcacctgatattactattgctttagattttgcactaagcagattaaatgaaatcgtaacaactatgaaagtttatccagataatatgaaaaaaaatttaaaattattaggtgggcttcataatagtcaaaaaattctcttacatttaactcaaaaaggcatttctagacaagaagcctattcaattgttcaaaaaaatgcaatgatagcatggaataatagtaaaagttttcaggatgttttaaaaaatgacaaaactttattgaaaaaaataactaaagatgaactgaaagagattttagagattaataaaaagaatagcaaattagattggatttttaaaaataaaattaaataac

SEQ ID NO: 288323 - DNA, 586 bp, Unknown
  Bacterial polypeptide expressing nucleotide sequence isolated from the Sargasso Sea
atgagagatgcattacaaattattgagcctaaagttgccaaaatggcatcaattcttgcaaaaaaatctgtaaaatatgcagaaattccagcagtaggaagaactcacggacaacatgccagcattatttcatttggattaaaatttgctaattgggcagcagaaatggcaaaacacgtagaacgtattgaagaaatcaaaaaaagaattttaatttgtaaaacactaggagttgttggaacaggttctttgatgggtgcaaagtcacttgaagtacaaaaaagagctgcaaagagattaaaactattcccagcagaagtaacaacacaagttgtaccaagagaaagatatgcggaatacgtatttgaattagcattaatcggagcaacattagaaaaaattgcaatagaaattagaaatttgcaaagaactgaaattggagaagtagctgaacaatttaagaaaggtcaaatgggaagcagtgcagttcctgttaagagaaatccaataaagagtgaacgagtatcatcattatcaaaattagtaagaagtcaagttgcattatcttttgaaaacattccattat

SEQ ID NO: 288324 - DNA, 763 bp, Unknown
  Bacterial polypeptide expressing nucleotide sequence isolated from the Sargasso Sea
aacatctagaaaagattcctattttgtgcaaaattttggaggtgctactggtaattttaatgcacaccatgtaggatatccaaaaattgattggaaaaaattcgcaaaatcatttgttagtaatttaggtttggaattgtcctacccaactacacaaatagagcactacgataatttagctgcaatatttgataacttaaaaagaattaattcgattataattgatttaaatagagatatgtggctatatatatcaatagattatttcaaacaaaaaattaaaaaaggtgaaatcgggtcttctgcgatgccacataaagtcaatccaattgactttgaaaactcggaaggtaatttaggagtcgccaattcaatatttaatcatttatcatcaaaattacctatatctagattacaaagagatctaactgatagtacagttttaagaaatattggtgtacctatagctcactctgtaattggaataaattctacaataaaaggaatcaataaactattagtgaatactgaaaaaataaattcagatttggaaatgaactggattgttatagcagaaggaattcaaacaattctaagaagagaggggtttccaaaaccatatgaggcattaaaagaactaacaaggaataatcaagaaattaataaaaaaacatttatcaactttattgaaaaattggaaattagtgatgaagcaaaaaaagaacttaagaaaataagtccatttaattatacagggatttga

SEQ ID NO: 288325 - DNA, 961 bp, Unknown
  Bacterial polypeptide expressing nucleotide sequence isolated from the Sargasso Sea
agtctaaagtttaaacatgatgtcattgcatttttactttcaataacagaaaaagctgggataaaagcaagatatcttcatcaaggaatgacttcttctgatgtattagatacaagttttaatatacaattaattcaatcaggaaaaatactcttaaaagatattaaccaaatattaaaaattttaaaaagtcagtctaaaaaatataaattaactccttgtataggaagaagtcacggtattcacgctgaacctataacttttggactaaaattagcttcattttatgaagagtttaaaagaaacaaaaaaagacttttaagtgcaattgatgaggtttcaacttgtgcaatttcaggtgctgttggtacttttgcaaatattaacccgaatgttgaaaaacacgtttcaaaaaaacttggacttaaaattgagcctatctcaactcaaataataccaagagacagacatgccttttatttttctgtgctaggtattatagcaggatcagtagaaagagttgcaactgaaataagacatttacaaagaacagaagtttatgaattacaagaattcttctcaaaaaaacaaaaagggtcatctgcaatgccacataaaaaaaatcctatattaagtgaaaatctgacaggattagcaagaatggttagaagttatgttattcctgcattagaaaatatagctctatggcatgaaagagatatttctcattcgagcgttgaaagaaatataggtcctgatgcaaatataacattagattttgcacttgtaagattatccaacattttaaaaaatatgattgtctatccgaaaaaaatggcgactaatcttaacataacaaagggtattattttttctcaagaattaatgctagagcttacaaaaactaatttaagtagggaaaaatcatatagaatagtccaatcacatgcaaaaaaatgta

SEQ ID NO: 288326 - DNA, 748 bp, Unknown
  Bacterial polypeptide expressing nucleotide sequence isolated from the Sargasso Sea
gggtacttttgctaatattgatccaaagttgagcagtatggttgcgaaaaaaatgaaattaaagcctgaaaccatttctacacaaatatcaccaagagatagacatgctatgtatttttcagttttaggaattatagcaagttgcctagaaagagtttcaatagaaataagacatttacaaagaacagaagttagagaagctgaagaaaaattcagtgacggacaaaaaggcagttctgcaatgccacataaaagaaatccgatattaactgaaaatataacaggattagctaggttagtaagatcagcagtaatgcctgctcaagagaatgtagctctatggcacgaaagagatatttcgcattcatcagttgagagagttattgcaccagacgcaactgtaaccttagactttgccattaatcgtctagctggtgttatagaaaacttagttttataccccaaaaatatgaaaaaaaatctgaatcaacttggagggttacattttagccaaggcgtattacttgctttaacgcaagcaggaatgagtcgagaagatgcatacagagtagttcaaaaatctgcaatggatgtatggaataataagactgattttaaaacacttttaataaatgataaaaatgtaagtaaatatttaaataaaaatgaaatagatactctttttgatttgaaaaaacatacaaaaaatattccttatatttttgataaagtttttaaaaataaataa

SEQ ID NO: 288327 - DNA, 577 bp, Unknown
  Bacterial polypeptide expressing nucleotide sequence isolated from the Sargasso Sea
atcagacatttacaaagaagtgaagtttacgaactacaagaatttttttcaaaaaaacaaaaaggttcatctgctatgccacataaaaaaaatcctattttaagtgaaaatttgacaggcctttcaagaatggtacgaagtacagtaattcctgcacttgaaaatatagccttatggcacgaaagagatatttcacattcaagcgtagagagaaacattggtcctgatgctaatataactattgattttgctttagtaagattagcaaatattttagataatatgattgtttatccaaaaaaaatgttagagaatttaaatataacgaaaggcttaattttttcacaagagttgatgcttgaacttacaaaaactggattaagtagagaaaaatcatatagaatggttcaaaatttttcaaaaaagtgttttgctgaaaatttgaatttatttgatgtagtacaatctgacagttatataatgagtaaaatttcaataaagaaattaaaatcaatatttagctattcaaaacatatgaaaaatgtcaattttatttttagaagagtaattaagtaat

SEQ ID NO: 288328 - DNA, 769 bp, Unknown
  Bacterial polypeptide expressing nucleotide sequence isolated from the Sargasso Sea
ttgaaagtattaaaaagacaggcaaaaaaacataaatttaccccatgtattggaagaagccatggaattcatgcagaaccaataacttttggtttaaaactagcttcattttatgaagagtttaaaagaaataagaaaagattagttgatgcaatggatgaagtatctagctgcgctatttcgggtgctgtaggaacttttgcaaacataaatccaaatattgaaagacatgttgcaaaaagacttggtttaaaagtagaaccaatatcaacgcaagtaatcccaagagacaggcatgcattttatttttctgttttaggaattattgcaggatcagttgaaagagtagcaactgaaattagacatctacaaagatctgaggtttacgaattacaagagtttttttcaaaagatcaaaaaggatcttcagcaatgccacataaaaaaaatcctattttaagcgaaaacttaactggactatccagaatggttagaagttatgtaacacctgcgttagaaaatatagcactttggcatgagagagacatttcgcattctagtgttgagagaaatataggtcctgatgcaaatattactttagattttgctttaaataggttggcaaatattttagataaaatgataatttatccaaaaaaaatgattcaaaatatcaatttaacaaaaggtttaattttttctcaagaaataatgcttgaacatacaaaaagtgggttgagtagagaaaaatcttataaaattgttcaat

SEQ ID NO: 288329 - DNA, 527 bp, Unknown
  Bacterial polypeptide expressing nucleotide sequence isolated from the Sargasso Sea
gctatttgcttctcagattgttagccgtgatagatacgctgaagtaatcagctgtattggaatgcttgcaagttcctatgatcgtatagctataaatcttagaggttatcaacgttcagaggttggtgaaattcatgagtcattttcaagcgaacaaaaaggttcttctgcaatgccacataaaaaaaatccaattacttctgagagaatatcaggaatttcaagaatcctcagaggttatgttgtaagtgcgcttgaaaatatatctctttggcatgaaagagatatatcaaattcatcagtagaaagaatcatttttccagatagttttaatctcatttgtttttcaacaattgagatgaaagagctattcaaaaatatcaacattaatcatgaaaaaataaattcaaatattaattcagcaaaagtgagtttgctaactcaatcttttctatctcatttagtaactaaagggattgaaagggatgaagcatatagatttttgcaatctcaatcatttgaaatcg

SEQ ID NO: 288330 - DNA, 799 bp, Unknown
  Bacterial polypeptide expressing nucleotide sequence isolated from the Sargasso Sea
aaggcagttgaatattatattaagcagaaatttgataatcttaacttaactgaatacaaagaatttgttcactttggattaacatctcaggacattaataatacagctattccattatcagttaaggattttatagaagaagtatatattccaaaattgaataatgttcttgatgcaatcaatgagaaatgtgaagaattaaaagatataactattatttctagaactcacggtcagccagcctcaccaaccaaacttggaaaagagtttaaggtattttggactagaataaacaatcagctttcttctctaaaggaaataccaaattcagctaagtttgctggagcagttggaaattttaatgctcatcatgtagcatacccaaatattgactggaaagaatttggtcaaaattttatagagaatgaattaaatttaaattattcatttccaacaactcaaattgaacattatgattcgtttgctgctttatgtgataattgtaggagaataaataatatcttcttagacatgtgcattgatatatggacatatatatctcatgattattttaaacagaaaataattaaaggtgaggttggatcatctgcaatgcctcacaaagtcaatccaattgactttgaaaactcagaaggtaatattggtttggctaactcactatttgattttatgtcaaataagttaccaaaatcaagattacaaagagatctcagtgatagtactgttttgaggaatattggagtcccttttggacattccttaatctcttttgaatcaa

SEQ ID NO: 288331 - DNA, 688 bp, Unknown
  Bacterial polypeptide expressing nucleotide sequence isolated from the Sargasso Sea
taatttaaagattgaaccagtatcaactcaaattatccctagggatagacatgcacattttttttccaccctaggcattattgctagttcaatagaaagattctctgttgaaattaggcatcttcaaagaacagaagtttctgaagtttatgaattttttaaaaaaaaacaaatgggttcttctgcgatgccacacaaaaaaaaccctgtattaagtgaaaaccttactggtttagcaagacttgttagatcaactgtaattccgtcaatggaaaatattgtgctttggcacgaaagagatatttctcattcaagtgttgagagaaatataggtcctgatgcaactgtcactcttgactttgctctgaatagattaaatgaaattgttaaatcaatgaaggttgactcaaaaaatatgaaaaaaaatttatatttgactaatggattatttttctcacaaagagttcttcttgagcttgtgtctagaggcataaaaagagacctagcctatagaatggttcaaaagattgcaatgaaatcccttgaaaataagtactcttttcaagatagcttgataaaagataaaaatattacgaaaataatacctgttaataatttgaaaaagttatttgattttagttatcacacaagaaaaattaatgtaattttcaatagagtattaaaataa

SEQ ID NO: 288332 - DNA, 907 bp, Unknown
  Bacterial polypeptide expressing nucleotide sequence isolated from the Sargasso Sea
gtttgaaattgaagctcatgccctgacaaaaatggaagagctgaacgttgttcctcaaggcacttctgatgttgtctggtccaaaggtcagaaggaatatacgccggagcgtatcgcgcgcatcgacgagatcgagctggaagtcaaacatgacgtgatcgctttcttgacagaactggcggaaaatgtgggcgacgaagcgcgctttgttcaccagggcatgacctcttctgacgtgttggacacgtgcttgtccgttcagatgacccaagcggcagacattctgttggcggatctggatcgtcttttggcggcgttgaagacacgcgcgaaagaaaccaaagacatggtgtgtatcggtcgttcccacgggatccacgctgaacctgtgaccatgggtctaaagtttgcgcgtttttatgccgagatggatcgtaaccgcacgcgtctgttgcaagcgcgtgaagaaatcgcgacctgtgcgatttccggtgcggtggggacgtttgccaacgttgacccgcgtgttgaagaatatgtcgcagaaaaaatgggcctgacgccggagccaatctccacacaagttatcccgcgtgatcgtcacgcaaactacttctgtgtgttgggcaccatcgcgtcatccatcgaaaacatcgcgattgaaattcgccacatgcagcgtactgaagtacgtgaagcgcaggaatattttgcaccgggtcaaaaaggctcaagtgctatgccgcacaaacgtaacccgattctgacagagaacctgacaggtctggcccgtactgtgcgtatggcggttgttccggcactggaaaacgtcgccttgtggcatgagcgcgatatctctcactcctccgttgagcgtatgattgcaccggatgcgaccgtcacactt

SEQ ID NO: 288333 - DNA, 820 bp, Unknown
  Bacterial polypeptide expressing nucleotide sequence isolated from the Sargasso Sea
agaagtcatggaatacacgcagaaccgataacttttggttttaaaatgctttctttttatcaagagtttgtaagaaataaaaagagacttttaagttcaataaatgaaatttctacatgcgctatttctggtgctgtaggtacttttgctaatatagatcctaaagtagaaagtttagtggcaaaaaaattaaaattaagagttgagccaatttctacacaggtaattcccagagatagacacgcacaatttttttctacattagcgattattgcaagttcaatagaaaggtttgcaacagaaatcagacatcttcaaagaaccgaggttctagaggttgaagagttttttagtagtaaacaaaaaggctcatctgcaatgccgcataaaaaaaatccaattttaagtgaaaatttaactggtattgcaagattgataagggcaaatgttttacctgcattagagaatattgctttgtggcatgaaagagatatttcccactctgcggtggaaagaaatattggtcctgactctaccatagctttggattttgccttagtaaggttaaatgggattattaaaaacctaaatatttatccaaaaaacatgaaaaaaaatctcaacttaactaatggattatttttttctcaaagagttttgttagagcttacctcttgcggttttacaagagaacaagcatactcaatagttcaaaaaaatgcgatgacttcttggaaaaataatacttcattattagaaaatttatcaaaagataggagaataattaaaaaaatacctgttaataaattaaaaaaattgt

SEQ ID NO: 288334 - DNA, 853 bp, Unknown
  Bacterial polypeptide expressing nucleotide sequence isolated from the Sargasso Sea
atttttaactaatctttcagagaatattggtgatgattcacgttttattcatcaaggagttacttcatctgatattttggatacgacattatcaatacaattaaaagaatcttgtgtaattataaaaagagagctagagaaattattagaagttttaaaagaaaaagctctttcttataaaaatactccctgtattggaagaagtcatggaatatatgctgaaccaactacatttggactcaaaatgctaggtaagtattttgaatttaaacgctcatatgaaagatttttagaggctgaaaaagatgtttcagtatgtgcaatatctggagcagttggtacatttgcaaatattgatccttatgtacaagattatgttgcaaaaaaattaaaaattcgctcagaagaattttctacacaagttattcctagagacagatatgcatatcttttttccgtgatagcaataatagcatcatcgcttgaaaatttagcaatagaaattagacacttacaaagaagtgaggttcgagaagtacaagagtttttttctgacaagcaaaagggatcttcagcgatgcctcataaaaaaaatcctgttttatcagaaaatataacaggtattgcaagaattatcagagctaatattttaccaattttagaaaatatttctttgtggcatgaaagagatatttctcattcatctgtagaaagagtgatttttccagacactttaattttattagatttttctttaaatagaatgtcagagataattaaaaatttaattattaatgaaaaaaatatgcttattaacctaaataatagcaaaggactttataactctcaaaga

SEQ ID NO: 288335 - DNA, 738 bp, Unknown
  Bacterial polypeptide expressing nucleotide sequence isolated from the Sargasso Sea
ccctgtatgggtaggagccatggtatccacgctgaaccaattacatttggtttaaaattagcctcattttatgaggaattcaaaagaaacaagaagagattaaaaaacgctatagatgaagtgtcaacttgtgcaatttctggtgcagttggtacgtttgcaaatattaatccaaatgttgaaaaacatgttgcaaaaaaattaggtttaaaagttgaaccaatttctactcaagtaataccaagagacagacatgcattttatttttctgttttgggaattattgcaggatcaattgagagagtagcagttgaaattagacatttgcaaagaactgaagtttatgagttacaagaatacttctctaaaaaccaaaaaggctcatcagcaatgcctcataaaaaaaatcccatcttaagtgaaaatttaacgggtttagctagaatggttagaagctctgtaatcccagctcttgaaaatattgctctttggcatgaacgtgatatttctcactcaagcgttgaaagaaatattggaccagatgctaatattacaactgattttgcgttagtaagactcacaaatatactagacaacatgattatttatccaaaaaaaatgttagaaaatttaaacttaacaaaaggtttaattttttcacaagaggttatgttggagttaactaaaactggattaagcagagaaaaatcttataaaatggtgcaatcttatgcaaaa

SEQ ID NO: 288336 - DNA, 719 bp, Unknown
  Bacterial polypeptide expressing nucleotide sequence isolated from the Sargasso Sea
aaacgtagaaaaacatgtagcaaaaaaacttggtttaaaaatagaaccaatatctactcaagttataccaagagatagacatgcattttatttttcagttttaggaattattgcaggatcagtagaaagagtagcaactgaaattagacatcttcagagatctgaggtttatgaactacaagaatatttttcaaaagatcaaaaaggatcttcagctatgcctcacaaaaaaaatcctattttgagtgaaaatttaactggattatcaagaatggtaagaagctatgtaactcctgccttagaaaatatagcactttggcatgagagagacatttcgcattctagtgttgagagaaatataggtcctgatgcaaatattacattagattttgctttaaataggttggcaaatattttagataaaataataatttatccaaaaaaaatgattcaaaatattaatttaacaaaaggtttgattttttctcaagaaataatgctagaacttacaaaaagtggattgagcagagaaaaatcttataagattgttcaatcacattctaaaaaatgtttctctgaaaataaaaatttatttgatttaatatccaaagataaattaataatgagcaaaattagtaaatctaaattaaattcaatatttaattactcatctcattttaaaaatgtaaatttaatttttaaaagagtgtttaaataat

SEQ ID NO: 288337 - DNA, 580 bp, Unknown
  Bacterial polypeptide expressing nucleotide sequence isolated from the Sargasso Sea
tgaaattagacatttacaaagatcagaagtttatgagttacaagagtttttttcaaaaaaacaaaagggatcttctgcaatgcctcataaaaaaaatcctatattaagtgaaaacttaactggtcttgctagaatagttagaagtcacactgtgccggcgtttgagaatatagcattgtggcatgaaagagatatatctcactctagcgtagaaagaagtattgggcctgatgcaaatattacattggattttgctttgtcacgattagctaatgttttggacaaaatgatagtttatccaaacaaaatgatacaaaatttaaatttaacaaaaggtttgattttttcccaagaaattatgcttgaactaactaaaggtggtataagtagagaaaaatcatataaaattgttcaaacttatgcaaaaagatgtttctctgaaaacaaaaatttatttgatttaatatctaaagataaaaaaattatgagtataattagtgaaaagaaactaaaatcaattttcaattattctggtcattttaaaaaagtgaactttatattcaaaagagtatttaaataa

SEQ ID NO: 288338 - DNA, 825 bp, Unknown
  Bacterial polypeptide expressing nucleotide sequence isolated from the Sargasso Sea
aaaaaaagttcatcatgatgtgattgctttcttaacatcaattacaaataaagttggatctgaagggaaatatttacataagggaatgacatcatctgatattttggatacttgttttaatattcaattaattcaatcaggcaatattcttaaaaatgatatcgatgaaattttaaaagttttaaaaaagaaatcttttaaatataaaaaaactgtatgtataggaagaagccatggcattcacgctgaaccaacgacttttggattaaaattagcaagcttttacgaagaatttaaacgtaataggaaaagacttgaaattgctattaaggaaatttctacctgcgctatatcgggtgcagtaggtacttttgcaaatgttgaccctagagttgagtcctatgttgcaaaaaaatttaatttaaatattgagccaatatccacgcaaattataccaagagatagatacgcatactatttttcagttttagcaataatcgcaggttcagttgaaagagtagcaactgaaattagaaatcttcaaaagactgaattacaagaggttggggaattttttgacaaaaaacaaaaaggttcatcagccatgccacataaaagaaatccaattttaagtgaaaatttaactggattggcaagaatggtaagaagctatgtaataccagctcttgaaaatattgcgctttggcatgaaagagatatttctcattctagtgttgagcgaaatattggccctgattctactattacgttagattttgcattgtttcgactaaaaaatattttaaataatatgaatgtttatcc

SEQ ID NO: 288339 - DNA, 769 bp, Unknown
  Bacterial polypeptide expressing nucleotide sequence isolated from the Sargasso Sea
gctgcagctcaagcaatggaaaaaattaaaattatacctaaaggtgtagctaccaaagtaaaaaaaaaagcaaaaataaacatagatagaattcacaaaatagaaagcaaagttcaccatgatgtaattgcgtttttaacttctataacagaaaaagtaggcaaagaaggaaaatttttacataaaggtatgacctcatcagatgttttggatacatgttttaatattcaactggttcaatcaggcaaaattatccttaaagacattgatgaattactacaagtattaaaaaagaaagcattgaagtacaaaaaaactgtttgtattggaagaagccatggtattcatgctgaaccgacaacatttggtttaaaattagcaagcttttatcaagaatttaaacgtaacagaaaaagaatggaaaatgccattaatgacgtatctacttgcgctatttctggagcagttgggacttttgccaatattgatcctagaattgaatcttttgttgcaaaaaaatttaatttgcgtcccgaacctatatctacacaaataataccaagagatagacatgctatttacttttccacattaggaattattgctggatcagttgaacgaatagctacagaaataagaaatttacaaaaaactgaattacaagaagttgaagaattttttgataaaaaacaaaaaggatcttcagctatgcctcataaaaaaaatcctatactaagtgaaaatttaactggtctagcaagaatggtga

SEQ ID NO: 288340 - DNA, 784 bp, Unknown
  Bacterial polypeptide expressing nucleotide sequence isolated from the Sargasso Sea
atgccaaatcttgaaaataatccattactatcactttctcctcttgacggtcgctatagagctaaatgtgaagaattaaatccttatttcagtgaatttggtttgatcaagtatcgattgatcatagaaatttcctggttaaaggcactatgcaaatgtccaaaaatagaggaattaagaggcatagatacacaaaacttagatatcttagtcgataattttaatgtggaagatgcgcaaagaatcaaagacattgagaaaactacaaaccatgatgtaaaagccgtcgaatacttcataaaggaaaacgttgaacaaaaagaacacttaaaaccgttattagaatttattcatttcgcttgtacatcagaagatataaataacctagcttattctttgatgcttaaagatggtcgagaatcagtcttattgccggttatgcaagaaattgccaatcgtattgctttgatggcgagatcttattccgatcagcccatgctatctcgaacacatggccagcctgctactccgaccacagttggcaaagagtttgcaaattttgtatacaggctgcgaagacagattaagcatgttacggaatgtgaaattctaggtaaaataaatggtgctgtaggcaactataatgctcatatcgtcgcctaccccgacattgattgggaatcattctcgaaggaatttgtcgaaagccttggcattacatttaatccatacacgacacaaatcgagccccatgattatatctcagaattgaggattcgtttct

SEQ ID NO: 288341 - DNA, 676 bp, Unknown
  Bacterial polypeptide expressing nucleotide sequence isolated from the Sargasso Sea
gaagatatttctactcaaattattcctcgtgatagacatgcatattttttttctattatgggtattattgcttcctctattgaaagattagcaatagaaataagacacttacaaaggacagaaattttagaagttgaggaattttttaaaaaaaatcaaaaaggctcttcagcaatgcctcataaacgaaaccctgttttaagtgaaaatttgagtggtttggctagatatataaggagtggagttattccttcacttgaaaatatagctttatggcatgaaagagatataagccattcaagtgtagaaaggattctttcgccagatataactattgctctagattttgcattagataggattaacaatattcttaaaaatttaattgtttatccaaaaaatatgttaaaaaatattagcttaattggtggtctccataaaagtcaaattattttattacaattaactcaaaaaggagtctcaagacaaaaagcttattcaattattcaaaaatgcgcaatggaatcatggaataaaaataaggattttgaaaaaattctaattaataacattaaacttaaaaaatatatgaatgaaaaagaaataaaaaaaatattaaaagaaagtgataaaattgataatttaaattggattttttcaaaaaaaattaaatgat

SEQ ID NO: 288342 - DNA, 913 bp, Unknown
  Bacterial polypeptide expressing nucleotide sequence isolated from the Sargasso Sea
aaatcgaaatttgataaatcgaaccatttaaaaaaatataaagaatatatccatatctgctgcacttctgaagatattaacaatctctcatatgcattaatggttgatgatggaagaaaaataattttggcgaaaattaatgatctaaataaaatacttaaaagtaatattaagaaattttcaaagaatattatgctgtcacatacacatggacaacctgctacgccaacaacaatgggcaaagaattcttaaattttcatagcagaattgagagattatcaaataaacttgcaaaagttagtataaaaggtaaattcaatggagcaactggaaactattgtgctcatagggttacttttccaaatatcaattggccaattactagtaaaagatttataaatagcctgaatatatcagaaaataaatacacaactcaaatagaacctcatgactatatttgtgagattaataatattttaatacatataaactctatacttattggattctcacaagatatgtggagctatatatctaaaaattattttattcaaaaaaatattgctggtgaaataggatcatcaactatgcctcataaaattaatcctattaattttgaaaatgccgaaggtaatcttgggttagccaatagtatgctcagattcttatcagaaaagttaactatctccagattacagagagatctatcagactctactgttttaagaaacttaggcacaggctatggttattcctttcttgcatatgagaatttgattataggtctaaataaattaacgattaataaggttaaacttacggaagatattgaaaaatcctgggaactattagccgagccaatacaaatggtagccagaaaatataatatctcaaactcatatgaattatgaa

SEQ ID NO: 288343 - DNA, 782 bp, Unknown
  Bacterial polypeptide expressing nucleotide sequence isolated from the Sargasso Sea
aaatgcgcaagtagaaatgcttggtaaagtaaatggcgctgttggtaactataatgctcaccttagtgcttatccagattacgactggcatactcatgcagataagtttgtatcgagcctaggcttaacattgaacccgtttaccacacaaattgaaccacatgattacattgcagaattatttgatgcaattgcacgttttaatactattttgcttgattttgaccgtgatgtttggggttacattgcccttaaccactttaagcaaaaaaccattgctggcgaaattggctcatcaactatgccacacaaagttaaccctattgattttgaaaactcagaaggtaacttaggtttagcaaatgcaatttttgcacaccttgcacaaaaactgcctgtatctcgctggcagcgtgatcttaccgattcgacagtgctacgtaaccttggtgtgggtatgggttatgcgcttattgcatatcaatcaacgcttaaaggtgttagcaagcttgaagttaacgaaccacgtttacttgaagagctagaccagaactgggaattgctcgcagagcctattcaaacagttatgcgtaaatacggcattgaaaagccatacgaaaaacttaaagatttaacccgtggaaagcgcgtaaatcaagaaataatggctgacttcatcgatggtttagatcttcctgaagttgctaaagtagaaatgaaaaaactaacaccggctaattacattggccgtgcggttgaatttattgatgatttagtttaat

SEQ ID NO: 288344 - DNA, 690 bp, Unknown
  Bacterial polypeptide expressing nucleotide sequence isolated from the Sargasso Sea
aaaataattttaaaagatatagatcaaattttaaaaattctcaaaaaacaagctaaaaaatataaactaactccatgtatggggcgtagtcatggtattcatgcagagccagttacatttggtctaaaattagcttcattttatgaagaatttaaaagaaacaaaaagagattagctgatgcaattgatgaagtttccacttgtgctatttccggcgctgttggtacatttgctaatattaatcctaatgttgaaaaacacgttgcaaaaaaattaaatttaaaagttgagacgatttcaacccaagttattccaagagacaggcatgcattttatttttcagttttgggaataatagcaggttcaatcgaaagaattgcaattgaaattaggcatcttcagagaacagaagtttatgaattacaggaattcttttcaaaaaaacaaaaaggttcttcagcaatgcctcataaaaaaaatcctattttaagtgaaaatctaacaggacttgcaagaatggtgaggagtgcggttttgcctgcattagaaaatattgccctctggcatgaaagagatatttctcactcaagtgtggagagaaatattggtccagatgctaatattacaaccgactttgctttagtaagactggctaatattttagataacatgattatttatccaaaaaaa

SEQ ID NO: 288345 - DNA, 844 bp, Unknown
  Bacterial polypeptide expressing nucleotide sequence isolated from the Sargasso Sea
tacacaaatttttctgaaaaagatgcaaaaaaaataaaagaaattgaaaataaaacaaatcatgatgtcaaggccgttgaatactttattaaaaacaaatttgataagcttaatttaggaaaatacaaagaattcattcactttggcttaacttcccaagatataaataataccgctattcctattagtttaaaggatgctttaaatgaagtatactatcctgaattaaataaaattatctctattctaaataattcatctaaaaaatggtctaaaattcctatgcttgcaagaacacatggtcaaccggcttctcctactagacttggaaaagaaattgatgtttttatagttagaattaaagaacaattaaagcaattaagaagcattcctatcgcagcaaaatttgggggagctactggaaatttcaatgcacataagttagcatacccagatattaattggaaaagcttttcaaaaaaattgatatctgataaattggggttaaaacattcttttccaactacacaaatagaacattatgaccatttagctggaatatttgacaatattaaaagaattaataatattctaattgatctaaatagagatatgtggatgtatatttctatggattattttaagcaaagaataaaaaaaggggaaataggaagttctgcaatgcctcataaggtaaacccaattgatttcgaaaatagtgaagggaatctaggcattgctaatgcaaattttcagcacctatcatctaaactaccaatatctaggcttcaaagagatcttacagatagtactgttttaagaaaccataggagtccctttagct

SEQ ID NO: 288346 - DNA, 546 bp, Unknown
  Bacterial polypeptide expressing nucleotide sequence isolated from the Sargasso Sea
aagttgaagaattttttgacagaaaacaaaaaggatcatcagctatgcctcacaaaagaaacccaatacttagtgaaaatttaactggtttagctagattggttagaagttacgtaatgccggctttagaaaatatttcactttggcatgaaagagatatatctcattctagtgttgagcgaaacattggtcccgattctactgtaacgatagattttgctttaaatagattaacgaatattttaaaaaatttaaatatttatccaaaaaaaatgttaaaaaatcttgatattacaaaaggattaatattctcgcagagagtaatgattgagttaactaaatatggattttctagggaaaaagcctatttattggttcagcaaaatgcacagaaagcttggatgaaaaatatatctttttatgaaagtttgtcgaaagactcattgattaataaaaaaatttctaataaagatttaaagaaaatgtttgatattgaatatcacactaaaagaataaatttaatatacaaaagggtatttaaataaa

SEQ ID NO: 288347 - DNA, 670 bp, Unknown
  Bacterial polypeptide expressing nucleotide sequence isolated from the Sargasso Sea
tttaaaagaaataaaaaaagactaaaaaatgcaatagatgagatttctacatgcgcaatatcgggtgctgttggaacttttgctaatatcgatcctcgagttgaatcttatgtagctaaaaaatttgatttaaaagcagaacctatatctacccaaattataccgcgagatagacatgcttattatttttcagtattagccataattgctggatctatagaaagagtagctactgaaattagaaatcttcaaaaaacagaagtgcaagaagtagaagaattttttggtaataaacaaaaaggttcgtctgcaatgcctcataaaagaaatcctatattaagtgaaaatttaactggcttagcaagaatggtaagaagttatgtggtgcctgcgcttgaaaatatttcgctttggcatgaaagagatatttctcattctagtgttgagcgaaacataggtcccgattccactattacgttagattttgctcttatcaggttaaaaaatattttaaatactatgaatgtatatccaaaaaaaatgttaaaaaatcttgatattacaagcggattaatattttctcaaaaagttatgctggaactcactaattatggtttttctagagaaaaagcttatagaattgtacaaaaaaatgcacaaaaattcttat

SEQ ID NO: 288348 - DNA, 806 bp, Unknown
  Bacterial polypeptide expressing nucleotide sequence isolated from the Sargasso Sea
ttaaaacataaatttacaaaatgtataggcagaagtcatggtattcatgcagaaccaacaacgtttggtttgaaaatggctcaggcttacactgagatgaatagaaatcttacacgactaaaaactgcaagcgaagaaataagagttggtgccatttctggagctgtaggaaattactcaagtattaatcctaaagtggaagaatatgtatgtaagaaattgggtcttaaggttgaagaaatttctactcaaataataccaagagatcgtcatgctgcatttttttctacactatctgtagttgcatcttctatagaacgtttagctgtagaaatcagacaccttcaacgcactgaaattatggaagtatctgaatttttttcaaaaggacaaaaaggttctagtgcaatgcctcataaaaaaaatcctattcattccgaaaatttaactggattatctagattaattagaatgagtgtgatcccatcattagaaaatattgcactttggcatgaaagagatatttctcatagttctgttgagagagtaattggacctgatactacagtaattttagattttgcattaacaaggttatcattacttatggaaaatcttattgtctatcctgaaaatatggaaaaaaatctttataaattgaatggtgttatattttctcaaaatgtccttctaaagcttactcaaaaaggaatgagtagagaagaatcatataaaattgttcaaaaaaatgccttaaaagctatagatgatgatatatctttcaaagatttgctgttaaatgataa

SEQ ID NO: 288349 - DNA, 892 bp, Unknown
  Bacterial polypeptide expressing nucleotide sequence isolated from the Sargasso Sea
aagaattcatcaaattgagtctcaagttaaacacgatgtcatagcttttttaacttctgtaacagaaaaagctggaattaaagcaaggtaccttcaccaaggaatgacatcatcggatgttttagatactagtttcaatattcaattagttcaatcaggaagaataattctcaaggacattgaccaaattttaaaagtattaaaaaaacaagccaataaatataaatctacaccatgcatgggtagaagtcatggcatacatgctgaacccattacctttggtttaaaacttgcttctttttacgcagaatttaaacggaatagaaaaagattagtcgatgcaatagatgaggtttcgacatgtgctatttcaggtgcagttggaacatttgccaatataaatccaaatgtagaaaaacacgttgctaaaaaacttgatttaaaagttgagccaatttcaactcaagttattccaagagatagacatgctttttatttctcggttcttggaattatcgcgggctctgtagaaagagtagctacagaaatcagacatttacaaagaactgaagtttacgaactacaagaatttttttcaaaaaaacaaaaaggttcgtctgctatgccacataaaaaaaatcccatcttgagtgaaaatttaacaggtctttcaagaatggttagaagtactgtaattcctgctcttgaaaatatagccttatggcacgaaagagatatttcacattcaagtgtagagagaaacattggtccagatgctaatataacgattgattttgctttagtaagattaaccaatattttaaataatatgattgtttatccaaaaaaaatgatacagaatttgaacataacgaaaggtttaattttttca

SEQ ID NO: 288350 - DNA, 803 bp, Unknown
  Bacterial polypeptide expressing nucleotide sequence isolated from the Sargasso Sea
cttctatgcagaaatggatcggaacctgaaaagaatgcacgttgcaaaagatgagatttccacaggcgctctatctggtgcagttggaacgttcgctaacttggacccagctgttgaaaagtacgtctgtgaaaaactaggattaactcccgagcctattagcacacagattattcctagagatcgtcatgctgcattttttgccacccttggcataattgcaagttcaatagaaaatattgcaactgagatccgacatatgcagagaacagaagttcttgaggctgaagagtttttttcagaaggtcaaaaaggttcttcagcaatgcctcataaacgcaatccagttctgacagaaaatttaactggcctagcgcgcttaatcagaatggccgtagttccagctctagaaaatgttacactttggcatgaacgtgacatatcacatagctctgtcgagagaaatattgctcccgatactacagtaaatctagattttgccttgaaccggctggccaatgtgattgacaacctagttatctaccctgacaacatgcttaaaaacatgaacaagtttaaagggttagtgatgtctcagagggtgttgctagcattaacacaagcgggagcaagccgcgaggaagcatataaattagttcaacgtaatgcaatgaaagtatgggaagataacaaagattttcaagatgaattactatccgacaaggatgtgaggcatttcttaagtgaagaagatatacgagagaaatttgatctagcttatcatactaaaagcgtagatacga

SEQ ID NO: 288351 - DNA, 838 bp, Unknown
  Bacterial polypeptide expressing nucleotide sequence isolated from the Sargasso Sea
aaattggcctcattttacgaggaatttaaaagaaatagaaagagattagcagctgcaattgatgaagtttcaacttgtgcaatttctggagctgttggtacatttgctaacattaatcctaatgttgaaaaacatgttgcaaaaaaattaggtttaagagttgagccaatttcaacacagattattcctagagacagacatgcgttctatttttcagttttaggaattatagcaggttcaattgagagagtggctattgaaattagacacctccagagaacagaagtttatgagttacaagaatttttttcaaaaaaacaaaaaggctcttcagcaatgcctcataaaaaaaatcctattttaagtgaaaacttaaccggacttgcaagaatggtaagaagtgcagttgtacctgcgttagaaaatattgctctatggcatgaaagagacatatctcactcgagtgtggaaagaaatattggtccagatgctaatatcacaaccgactttgctctagtaagacttactaatattttagataatatgattgtgtatccaaaaaaaatgcttgaaaatctaaatataactaaaggtttgattttttcacaagaagtaatgttggaattaactaaatctgggttaagtagagaaaaatcctacaaaatggttcagagctatgcaaaaaagtgttttgcagaaaatctaaatttatatgatgttcttttaaaggataaattaattatgactaaaatttctcaaaaaagacttaaatccatctttagttactccaaacattttaaaaatgtaaatttaatctttagaagagtttttaaataat

SEQ ID NO: 288352 - DNA, 847 bp, Unknown
  Bacterial polypeptide expressing nucleotide sequence isolated from the Sargasso Sea
ttttggattaaagctagcatctttttatgaggaatttaaaagaaataaaaaaagactatcaagtgcaatctttgatatttctacctgttccatttcaggagctgttgggacatttgctaatattgatccaaaagttgaagtatatgttgcaaaaaaactaaaactttatcctgagccaatttctactcaaataattccaagagatagacatgctcattatttttctgttttaggaattatagctggaagcattgaaagagtggctactgaaattagacacttgcaaagatcagaggtttacgaattacaagaatttttttcaaaaaatcaaaaaggatcatcggcaatgcctcacaaaaaaaatccaattttaagtgaaaatttaactggccttgctagaattgtcagaagtcatactatcccagctcttgagaatattgcattgtggcatgaaagagatatatctcactcaagtgttgagagaaatattggacctgatgcaaatattacgttagattttgctttgacaagattggccaacgttttgaataaaatgatcatttatccaaatagaatgatacaaaacttaaattttactaaaggtttaattttttctcaagaagttatgcttgaacttactaaaggtgggctaagtagagaaaaatcatataaaattgttcaaacttatgcaaaaaaatgtttttctgaaaaaaagaatttgtttgatttaatatctaaagataaaaaaattatgggtataataagtgaaaaaaagctaaggtcaattttcaattattcagctcattttaaaaatgttaactatatattcaaaagagtatttaaatag

SEQ ID NO: 288353 - DNA, 562 bp, Unknown
  Bacterial polypeptide expressing nucleotide sequence isolated from the Sargasso Sea
aacagaagttttagaagtagaggagttttttggcaataaacaaaagggttcatcagcaatgccacataaaaaaaatcctatcttaagtgagaatttaacaggattagcaagattaataagatctaatgtaatgccagctttagaaaatgttgtgttatggcatgagagagatatttctcactcagctgttgaaagaaatattggtccagattcaacaatagctctagactttgcgctttgcagattaaataatgttattaaaaatttaaatatttatccaaaaaatatgatgaataatttaaacattacaaatgggatttttttttcacaaagggttctcttagaactaacagatgttggtttcacaagagaagcggcctacaaaattgtgcaaaataatgcaatgaagtcctggcaagataagtcctcattttttaaaaatattgtaagtgataagaaaattacaaacaaaatacctgttaataagcttaaaaaattatttaattttagttatcatactaaaaaaattaatataattttcaaaagaagtttaaagaaataa

SEQ ID NO: 288354 - DNA, 886 bp, Unknown
  Bacterial polypeptide expressing nucleotide sequence isolated from the Sargasso Sea
tctaaatcaagattaaaaatttggctcgatattgactgttatgcttgtgaagctatggaaaaattgggcactgttccaaagggtacaagtaaaaaagttaagtcaaaagcaaaaataaatgagaagagaattgatactattgaaaagaaagtcaaacacgacgtgatagcatttcttacatcaatatcagaatatgctggtcctcccgcacgttttcttcatcaaggcttaacttcatcagatattttagatacagcattcaatattcagctcatgcagtcatctaaaattattgagaaagaaatagctcagcttcttaaatcactcaaaaaaatagctctcaaatataaaaatacgccttgtataggaagaagccatggtattcatgcagaaccaacaacctttggtgtaaaaatggcaaacttttatgcagagtttgagagaaatcacgcgcgttttaaaaaggcgaaagaagaaatatctgtgtgcgcaatttcaggtgctgtaggcaattatgccaacatagatcctcgcgttgagcagtttgttgcaaaaaaattaggcatgaaagctgaaactatatctactcaagttatcccacgtgacagacatgctgtttattttagtactcttggaattattgccagctcaattgagcgccttgctacagaaatcagacatttacaaagaacagaggttcttgaagttgaagaatttttttcaaaaggacaaaaaggttcttcggccatgccacataaaagaaatcctgtactaactgaaaacttaactggcctttcaaggttaattcgtgggtacacaatacctgctttagagaatgtttctttatggcatgaaagagatatctcgcactcaagtgtagaaagaa

SEQ ID NO: 288355 - DNA, 868 bp, Unknown
  Bacterial polypeptide expressing nucleotide sequence isolated from the Sargasso Sea
acaaaaaaagtaaaatctaaatctaagataaatgtaaaaagaattttagaaattgaagataaagttaaacatgatataatcgcttttctcacatccattactgaaaaagcaggtaaagaagcaagatttcttcataaaggtatgacttcatctgatgtgcttgatacctgttttaacctacagcttaaacaagcaggagaaattttatcaagagatataaatgatttattaaaaataataaaaaaacaagctttaaaacataaatttactctttgtataggaagaagtcacggtattcatgcagagccaataacatttggattaaaattattatcgttctatcaggaatttttaagaaataaaaaaagattagatagctcaataaaagaaatatcaacttgtgcaatttctggcgctgttggtacatttgcaaatgtcgatcctcgtgttgaaagatatgttgctaaaaaattaaaattaaatgttgaacctgtctcaacacaaataattccaagagatagacatgctcagttttttgctacattaggtattattgcaagttctatagaaaggttcgcgaccgaaattagacacttacaaagaactgaagtccttgaagtagaagaattttttggaaaaaaacaaaaaggttcatctgcaatgccccataaaaaaaatccaattcttagtgaaaaccttactggtcttgcaagacttataaggtcaagtgttgttccagctttagaaaatgtagctctttggcacgaaagagatatttcccattcagctgttgagagaaatattggtcccgattctacaatagctctggattttgcattaaaccaggttaaaaaatttaataaaaatt

SEQ ID NO: 288356 - DNA, 935 bp, Unknown
  Bacterial polypeptide expressing nucleotide sequence isolated from the Sargasso Sea
ttatgaaaaagatttaaaaaatctcaatacaaacttaaaaaaactttcatcaaaatggtcaaatatcccgcttctatctcgaacacatggtcaagccgcgtcccctactacaataggtaaagaaataaaagtatttcaaacaagaattcaaagagagattaaaaaattaaattcggtagtcccgctagcaaaatttagcggagccgttggtaactatcatgcttttgatattgctgagagtcgtattaattggataacatttacgaataaatttattaaaacattcgatgttgctcaaaatcctgttacaactcagatagaatctcatgattggattgctgatttattacagaccattacaagaataaataatatatgcattgatatgtcacaggacatgtggatatatatttcaaatgaaattttcaaacttaaacttaacatgaatgaagtaggttcatctgctatgccacataaagtaaatcctatagattttgaaaacgctgaaggtaattttggaatatccaactcattaaatgattattttattaacaagcttactaaatctcgacttcaaagagatctatctgacagcactgttctaagaaatataggaatgtcatttggttatacaaaaattggaataacttctctacaaaatggattgcaaaaaatttcaccaaataaagaatttattttgaacgagcttgacaataattgggaagttttaactgaggctgtacaaacaataatgcgttatgaaggtattgatgatgcatacgaacaattaaaaaaattatcaagaggtaaaaagctagataaaagttcatataaaaaatttgtaaatactttggatatatcagtaaaatcaaaagaaaagcttctttctttgactcctgcaaaatatattgggtttagcaaaaaaaatgtaaatt

SEQ ID NO: 288357 - DNA, 900 bp, Unknown
  Bacterial polypeptide expressing nucleotide sequence isolated from the Sargasso Sea
atatagaaaaaaaagttaaacacgacgtaattgcatttttaacatccataacagaacaagctggaattaaagcaagatatcttcatcaaggtatgacctcatccgatgtgttagatacgagtttaaatattcaattaattcaatcaggagaaattcttctcaaagatataaataaaatacttttggttctcaaaaaaaaagcaaaaaaatataaatacactccatgtattgggagaagtcacggtatacacgctgaacccataacctttggtttgaagcttgcatctttttacgcagaatttaaaagaaatgaaaaacgattaaaggatgcaatacatgaagtttcaacatgtgcgatctctggtgctgtgggcacatatgcaaacattgatccaagaatagaaatatttactgcaaaaaaacttaagttaagacctgaaacaatttctacgcaaattataccaagagatcgacatgctcaatattttgcagttttaggaataattgctggttcaatagaaagagtttccacggaaattagacatcttcaacgaagtgaagtctatgaattacaagaatatttttcaaaagatcaaaaaggatcttcagctatgccacataaaaaaaatcctattcttagtgaaaatttaaccggtttagccagaatggttagaagctatacgattccagcattagaaaatatcgccttatggcatgagagagatatctcacattcaagtgtcgaaagaaatattggaccagatgcaaatataacattagattttgccttagtgcgactagcaaatattttagatcagatgatcgtatatccaaaaaaaatgctaaaaaatttaaatttaacaaatggagtagttttttcacaaggaagtcatgcttaag

SEQ ID NO: 288358 - DNA, 665 bp, Unknown
  Bacterial polypeptide expressing nucleotide sequence isolated from the Sargasso Sea
aacacaaattataccaagagatcgacatgctcactatttttctgtactaggaataattgctggttcagttgaaagagtagcaacagaaattagacaccttcaaagatctgaggtttatgaattacaggaatatttttcagaagatcaaaaaggatcttcagcaatgccgcataaaaaaaatccaattttaagtgaaaatctaacaggacttgccagaatagttagaagttatgttgtcccttctttagaaaatatagctctttggcatgaaagagatatttctcactcaagcgtagaaagaaatatcggaccagatgcaaatattactctggattttgctctagtaagactggcgaatgtattggataaaatgattgtttatccaaaaaaaatgttaaaaaatttaaatttaacaaaaggattagttttttctcaagaagtaatgattgaacttacgaaatctggtctacaaagagaaaaagcttatagaatcgtgcagaagcatgctagagaaagttatgcaaaaaatatcaatttaattgatttgatcaaaaaagatcaaataataacaagcaaaattactctaaaaaaaattgataatatatttaaatattctaagcactttaaaaatgtaaattatatatttagaagagtatttaaataat

SEQ ID NO: 288359 - DNA, 691 bp, Unknown
  Bacterial polypeptide expressing nucleotide sequence isolated from the Sargasso Sea
attaaaactaagacctgagccaatttcaacacaagttattccaagagatagacatgcatattatttttctgttcttggaattattgcaggatctatcgagagagttgctactgagataaggcatttacaaagatctgaagtttatgaattgcaagaatttttctctaaagatcaaaagggctcatctgcaatgccacataaaaaaaatccaatattaagtgaaaatttaactggtttagcaagaatagttcgaagtcatgttacccctgccctagaaaatattgctttatggcatgaaagagatatttcacattcaagtgtggagagaaatattggaccagactctaatataacattagattttgctttaatacgtttggctaatcttttagataatatgatagtttatccaaaaaaaatgatatccaatttaaatttaacaaaaggccttatcttttcacaagaaattatgttggaattaacaaaagctggtcttccaagagaaaaagcctacagaataattcaaaaacatgcaaaagatagttattcaaagaataatgatttaattaatttaataaaaaaagataaatcaataactgacaaaatttcaaatgcaaaaattaataatatatttaaattttctaaacatttaaaaaatattaattatatttatagaagagtatttaaatag

SEQ ID NO: 288360 - DNA, 395 bp, Unknown
  Bacterial polypeptide expressing nucleotide sequence isolated from the Sargasso Sea
caagctcccggtatcacgctggcagcgtgacttaacagattcgactgtgctgcgtaacttaggtgtaggttttgcgtatacagtgatcgcgtatcatgccagcttaaaaggcatcagcaaactagaagtgaacgaagccaacctgctcagtgagctggatcagaactgggaattactggcagagccggtacagaccgtgatgcgtaaatatggtattgaacagccgtatgaaaagctgaaagaactgacccggggcaaacgtatcacgcctgcagacttagctgtctttatcgataaattagagctgcctgcagaagtgaaagcagaattaaaagcgctgcgcccggataactatataggtgcagcaatcgagttagttaacttattagactaag

SEQ ID NO: 288361 - DNA, 931 bp, Unknown
  Bacterial polypeptide expressing nucleotide sequence isolated from the Sargasso Sea
atgattaaaagatattctcgaaaagaacttgctgacatatggtctgaggaaaataaatataaaatttggctagatgtcgaagtggctgctgcacaagcaatggaaaagcttggacaaatacccaagggagtttccgcagttgtaagaaaaaaagctagaataaatgttaaaagaattcatcaaatagaaaatcaagtcaaacacgatgtaatagcatttttaacttcagtaacagaaaaagcgggaattaaagctagatacttgcaccaaggaatgacctcatcagatgtattggatactagttttaatattcaaatggtccaatcaggtaaaataatccttaaagatattgatgggattttaaaagttttaaaaaaacaagctaaaaaatataaatttacaccttgtatgggtcgaagtcacggtatacatgctgagcctattacttttggactaaaattggcatctttttacgaagagtttaaaagaaatagaaaaagattaattgatgctataaatgaggtttctacttgtgctatttcaggagcagttggaacttttgcaaatattaatccaaaagttgagcaacacgtagctaaaaaactaggtttaaagattgaaccaatttctacacaagtaattccaagagaccgacatgcattttatttttcagttttgggaattattgctggatctattgaaagaatttcagttgaaataagacatttgcaaagaaccgaagtttatgaattgcaagaatatttttcaaaaaatcaaaaaggttcatcagctatgcctcataaaaaaaatccaatcttgagtgagaacttaacaggactttcgagaatggttagaagtgcagttttgccggcattagaaaatattgctttatggcatgaaagagatatctctcattctagtgggaaagaaa

SEQ ID NO: 288362 - DNA, 697 bp, Unknown
  Bacterial polypeptide expressing nucleotide sequence isolated from the Sargasso Sea
aaaaaattaggtttaagagttgagccaatttcaacacagattattcctagagacagacatgcgttctatttttcagttttaggaattattgcaggttcaatagagagggtggctactgaaattagacatctgcagagaacagaagtttatgagttacaagaatttttttcaaaaaaacaaaaaggctcttcagcaatgcctcataaaaaaaatcctattttaagtgaaaacttaaccggacttgcaagaatggtgaggagtgcagttgtacctgcgttagaaaatattgctctatggcatgaaagagacatatctcactcgagtgtggaaagaaatattggtccagatgctaatatcacaaccgactttgctctagtaagacttactaatattttagataatatgattgtgtatccaaaaaaaatgcttgaaaatctaaatataactaaaggtttgattttttcacaagaagtaatgttagaattaactaaatctgggttaagtagagaaaaatcctacaaaatggttcagagctatgcaaaaaagtgttttgcagaaaatctaaatttatatgatgttcttttaaaggataaattaattatgagtaaaatttctcaaaaaagacttaaatccatctttagttactccaaacattttaaaaatgtaaatttaatctttggaagagtttttaaataat

SEQ ID NO: 288363 - DNA, 655 bp, Unknown
  Bacterial polypeptide expressing nucleotide sequence isolated from the Sargasso Sea
gcgcgaccgtcatgctgcgttctttgccgcgctgggcgttgtggggtcctcaatcgagcggatcgcgacggaaatccggcacttgcagcgaaccgaagtgcttgaggtggaggaatatttctcccccggtcaaaagggctcctccgcgatgccgcacaagcgcaatccggtactgacggaaaacctgaccggtctggcgcgcctggttcgcatggctgtggtccccgcgatggagaatgtcgccctgtggcatgagcgggatatttctcactcctccgttgagcgcaacatcggaccggacaccacggtgacgctggacttcgcccttgcccgtttgacgcaagttattgataagcttgtcgtatatcctgaaaatatgctgcgcaacatgaaccagttccgtggtcttgtgatgagccagcgtgtgctgctggccctgacgcaggccggggtcagccgtgaggattcctataagctggttcagcgcaacgcgatgaaagtctgggagcaaggcgctgatttcaaaaccgaattgctgagcgacccggacgttctggccgcgttgagcgctgaggaaatcgaagagaaattcgatatcggctatcatacgaaacatgtcgatacgatcttcgcgcgcgtcttcggcgacgaataa

SEQ ID NO: 288364 - DNA, 388 bp, Unknown
  Bacterial polypeptide expressing nucleotide sequence isolated from the Sargasso Sea
aaaaatattacgacattatccatcatcggtgggacacttgaaaaaatggcggtggaaattcgcggattgcagaaaacagagttcaatgaaatcttagagcctttttctaaaaaacaaaaaggatcatcggccatgccccataaaaagaaccccattatttgtgagcgagttacggggttagcccgtgtgcttcgaggctatgcagtgacggccatggagaatcaagcgttgtggcatgaacgtgacatttcgcactcatcaaccgaacgcattatttttccagatgcaacggtatccttggattatatgttcggactgatgaccaaagtgattgatggcatgacggtgaatgaagagcaaatgaaacaaaatattgccaaatcctaca

SEQ ID NO: 288365 - DNA, 541 bp, Unknown
  Bacterial polypeptide expressing nucleotide sequence isolated from the Sargasso Sea
ttgcagagtttttttcaaagatcaaaaaggatcttcagcaatgcctcacaaaaaaaatccaatattaagcgaaaatttatcaggactttcaagaatggtacgaagctacgtgttacctgctctagaaaatatagctctttggcatgaaagagatatttcacattcaagtgtagaaagaaacatagggcctgatgctaatataacgttagattttgctttagtaagacttgcaaatattttagataaaatgattatttatccaaaaaaaatgctggaaaatttaaatatgactaaaggtttagttttttcacaagaaataatgttagaacttacaaaaaatggcattcctagagaaaaagcatacaagatagtacaaaatcatgccaaaacaagttttgtaaaaaatgttgatttaatagagttgataaaaaaagataaatttattacgtcaaaaatttctgaaaaaaaagttaataatatttttaattctaaaaaacatttcaaaaatgtaaattatatttttagaagagtctttaaataa

SEQ ID NO: 288366 - DNA, 534 bp, Unknown
  Bacterial polypeptide expressing nucleotide sequence isolated from the Sargasso Sea
ttacaaaagggcaaaaaggaagttctgccatgcctcataaaagaaatcctattcgaagtgaaagagtaagcggtttagcaagaattttgaggagttacgttttgacagcactcgaaaatgttccactttggcacgaaagagatataagtcatagttcaaatgaacgtataatgttacctgacgtatcaatatgtttgcattttatgctcagggaaatgaaagatatagtaagcaatttggaagtttatccaaaaaatatgctcaaaaatttaaatatatatggtggtgtaatctttagtcagaaagttttacttttgcttgtagagaagggcttgtctagagaaaaggcttatagcctagtacaaaaaaatgcgcatcaggcctggaatactcagaatgggaatttcaaacaaaatataaagagagataatgaaataatgaattttatcgatcaaagtgacttagaagaatgttttaatccttcaattcatctcaataatttaagtgtaatatgggagaagttaggtatctagg

SEQ ID NO: 288367 - DNA, 547 bp, Unknown
  Bacterial polypeptide expressing nucleotide sequence isolated from the Sargasso Sea
agaagttgaagaattttttgataagaaacaaaaaggctcatcagcaatgccacataaaaaaaatccaatactaagtgaaaaccttactggtttatctagattaattagatctcacgtagcacctgcttttgaaaatgttgctctatggcatgaaagagatatttcacattctgcagtagagagaaatatcggacctgatagcactgttactcttgattttgcattagtaagattaaataacttaattaaaaatctaaatatatatccaaaaaaaatgagaaaaaacttagaaatcactcaaggcttatttttctcacaaagagttttgttagagttaactaattccggtttaacaagagaacaagcatattcaatggtgcaaaaaattgccatgaaatcatggaaatcaaacacgtctttttaccagaacatattgaacgaaaaaaaaatttcaaaaaaaatacctgttaataaattgaaaaaattatttgatttaaattatcatactaagagaataaatgttatttttaaaagatgtttaaaataa

SEQ ID NO: 288368 - DNA, 951 bp, Unknown
  Bacterial polypeptide expressing nucleotide sequence isolated from the Sargasso Sea
tagatatagtctttggttaaaattgaaattgctgctgcagaagcaatgggaaaaatacaaaattatccctagagggatagttaaaaaagtcaaaactaaatccaaaatagatgttgaaaaaattttaaagcttgaaggcaagttaagacatgatgttatagcttttttgacatctataattgaaaaagttggtaaggaggcaagttttttacataaaggaatgacctcttctgatgtattggatacttgttttaatattcaattaaaacaatcaggattgattatatctaaagatatagaaatcttattaaaatctataaaaatgcaagctattaaacataaatatactttatgtattggaagaagtcatggcatacatgcagaaccaactacttttggtttaaagctattatcattttacggagagttcacaagaaatcacaagagacttcaaaatgcaattaaagaaatatcaacctgtgccatatcaggtgctgtcggaacatttgctaatgtagacccacgtgtagaaaaatatgtagcaaaaaaattaaatttaagtgttgaaccaatatcaactcaaattataccaagagacagacatgcttattttttttctgttcttggtgttattgcaagttcaattgaaagatttgcaacagagataagacatcttcaaagaacagaagtttcagaagttgaggaattttttaataaaaaacaaatgggatcatctgcaatgcctcataagaaaaatccagttcttactgaaaatcttactggtttagccagacttattagagcgactgttatcccagctttagaaaacgttgcgctttggcatgaaagagatatttctcattctagtgtagaaagaaatataggtcctgatgcaactgttactttagattttgcactcgatcgcttaaacaatgttgtaaaatcaatgaa

SEQ ID NO: 288369 - DNA, 676 bp, Unknown
  Bacterial polypeptide expressing nucleotide sequence isolated from the Sargasso Sea
tatctactcagatattccaagagacaggcatgcatatttttttctgttttaggtgtaatagcgagttcattagaaaggtttgctgttgaaattagacatttgcagagaacagaagtatctgaggtagaggaattttttaataaaaaacaaatgggttcttcagcaatgcctcacaaaaagaatccagtactaactgaaaacctcactggtcttgcgagactggtaagagcatctgttatacccgcccttgaaaatgttgctctttggcatgaaagagatatttctcactcaagtgttgaaagaaatattggaccagatgcaactataacattagattttgcgcttaatagattaactaatgttgttaagtcaatgaaagtaaataaagacaatatgaaaaagaatcttgatttaacaaaaggtatatttttctctcaacgagtattgcttgaattaacaactagaggaatacgcagagataaagcatacaggttggttcaaaagtgtgcaattcaatctcttgaaaaaaatatcccgttctacgatagtttattaaaagatagaacaattacagacaaaatacctgttaatattctaaaaaaattatttgattttagttatcacacaagaaaaattaatgtaattttctctagggtgttaactaaaaatgaataaa

SEQ ID NO: 288370 - DNA, 853 bp, Unknown
  Bacterial polypeptide expressing nucleotide sequence isolated from the Sargasso Sea
gctagcaaattaattgagaaaggtctaaatgatctcttaatggctcttagagccagagcattagagcacaaatacactgtttgtatagggcgaagtcatggtatttacgctgaacccacaacctttggattaaaacttgctcaagcttatgctgaaatgaaccgaaatcatgatcgattaaagattgcaatgagtgaaatatctaccggtgccttgtccggtgccgttgggacttatgcaaatattgatccaagagttgaagaatatgtgtgcgagcagtttggactgactccagaacccatttcaactcaagttattcccagagatcgtcatgcattctttttttctatattaggtgtaatagcttcttcaatagaaagagttgcaactgagattcgacatctaagtagatcggaggttttagaggctgaagaatttttttctcaagggcaaaaaggatctagcgctatgccacacaaaagaaatcctgtcttgtcagaaaatttaacgggtttgtctcggttaattagaatgtcggtcatcccatcccttgaaaatgtagccctttggcatgaaagagacatatcacacagttctgtcgaaagaaatattgctccagatacaacaattactgcggattttgctataaatcgcttaacatcaatcataaagaatttaattatttatcctgaaaatatgttaaaaaacttgaaaaaaactaaggggctttataattcacagcaacttctcttgactttaactcaaaaaggtctcagcagagaaaaatcctattctcttgttcaaaggatcgcaatggaagtatgggaaaatgataaattagattttatggaga

SEQ ID NO: 288371 - DNA, 951 bp, Unknown
  Bacterial polypeptide expressing nucleotide sequence isolated from the Sargasso Sea
tactaaaaatattcctgaaatccctaaattatcaattaagaatattagctatcttaatgatttaattgataatttttcaattaaagatgcaaatagagtaaaagctatcgagaaaagaactaatcatgacgttaaagctgttgaatattttttaaaagaaaaattttctaagataagatcgctacataaatattctgaatttattcattttgcatgcacctcagaagatataaataacctatcatattctttaatgattagagatgcctctaagattattactacaaatattcaggttgtttcaaagaacctaaaactaaaggcaaggaaattttctaacactcctatgctatcaagaacgcatggtcaaactgcctctcctactactatgggaaaggaattttctaattttgttcaccgtattaactctattagtaagtcaatccaaatcattaaattaaaaggcaagataaatggagctgtgggcaatttcaatgcccatacagttgcctatccaaaagtaaactgggaattagtatctaagaagtttataaaatcaataggattagagataaatacccacacaacacaagtagaaccaaaagattcaattgccgaactttttctgcattttgtaagattgaacaatgtgctaattgatttgagtagagatatctgggggtacatatctttaggttacttcaagcaaaaacttaaaaaaggtgaagttggttcttctacaatgccccataaagttaatccaattgactttgaaaatgctgaaggtaatttaggtatggctaattctgttttccagcacttatcaaattcagttgtaatctctagatggcaaagggacttaactgactctacagtgatgagaaatataggattgtgttatggtcatactaatcttgcacttcactcacttctaaaaggacttaataaatt

SEQ ID NO: 288372 - DNA, 532 bp, Unknown
  Bacterial polypeptide expressing nucleotide sequence isolated from the Sargasso Sea
tttttcgaaaaaacaaaaaggttcgagtgcgatgccacataaaaaaaatccaatattaagtgaaaacttaacaggattagctagaatggttagaagttatactattccagctttagaaaatattgcgctttggcatgaaagagatatttcacattcaagtgtagaaagaaacattggaccagatgcaaatataacattagattttgctttagtcagattagctaacgttttagataaaatgataatttatccaaataaaatgcttgataacctaaatattacaaagggtaccattttctctcaagaattgatgcttgaattaactaaatcaggtttaactagggagaattcctacagattagtccaagcacacgctaaaaaatgcatagcagataatcttaaccttttagatgttgtgatgagtgacaaaaacattacatctagaataccaattaaaaaaatgaaaaaaattttcgattattcctcacactttaagaatgtaagtttaatttttaatagggtgtttaaataa

SEQ ID NO: 288373 - DNA, 590 bp, Unknown
  Bacterial polypeptide expressing nucleotide sequence isolated from the Sargasso Sea
aatttctacagaaataagacatttacaaagatcagaggtatacgaacttcaagaatttttttctaaaggacaaaaaggttcttcagctatgccacataaaaaaaatccaattttatctgaaaatttaactggattatctagaatggtcagaagtcatgtaatgccagctcttgaaaatatagctctttggcatgaaagagatatctctcattcaagtgttgaaagaaatattggaccagacgcaaatattacaatggattttgccttaaatagattggctagtattttagataaaatgataatttatccaaaaaaaatgattgaaaatattaatttaacaaaaggactaatagtttctcaggaaattatgcttgaacttactaaaagtggatttactagagaaaagtcttacaaaatagttcaggatcatgcaaaaaaatgctttagggataacaagaatttaaaagaattaatttttaaagaccaattaatcatgaatagaataagtaagtcaaaaataaattcaatatttagttattcatcccactttaaaaatgttaatttaatatttaatagagtttttaaataat

SEQ ID NO: 288374 - DNA, 525 bp, Unknown
  Bacterial polypeptide expressing nucleotide sequence isolated from the Sargasso Sea
aaaaaggttcctctgctatgccgcataaaaaaaatcctatattaagtgagaacttaaccggactagctagattaattaggtcaaatgtgactccggccctagaaaatattgttttgtggcacgagagagatatctcgcattctgcagtagagagaaatattggaccggatacaacaatagctttagattttgctcttttcagactaaataatgtaattaagaatttaaatatttatccaaaaaatatgaaaaaaaacttggatataactaatggagtttttttttcacaaagaattttaattgaactaactaatgctggttttacaagagaaatagcttacaaaattgttcaaaaaaacgctttaaatgcatggaaacaaaattcatcgtttttgagcaatattctttcagataaaaaaattactaacaaaatacctgttaataaacttaaaaaattatttgattttagttatcatactaaaaaaattaatataatttttaatcgtagcctaaaaaaaaagtaat

SEQ ID NO: 288375 - DNA, 862 bp, Unknown
  Bacterial polypeptide expressing nucleotide sequence isolated from the Sargasso Sea
aaggtaaaacatgatgttattgcatttttaacatcaataaccgagcaagctggaattaaagctagatatttacatcaagggatgacctcttcagatgttctagatacagcatttaatattcaattattgcagtcggctcaaattttaattaaagacattgataaaattctaaaaattttaaaatcaaaatcaattaaatataaatatgtaccttgtataggaagaagtcatggaattcatgcagaacctattacgtttggattaaaattggcatctttttatgcagagtttaaaaggaataaaaaaagattactagtagcgatggaagagatttcaacttgtgccatttctggagcagtcggtacatttgcaaacgttaatccaaaagttgagctttacatctctaaaaaatttaaattaaaaccagagactgtatcaacccagataatcccaagagatagacatgcacattatttcactgttttaggaattattgctggttctatagagagaatagcaacagaaatcaggcatctacagagaactgaagtatatgaagtgcaagaatacttttcaaaaaatcagaaaggttcatcagcaatgccgcataaaaaaaatcctattttgagtgaaaatttaactggtctatctagaatggtaagaagttacgtaattccagcgcttgaaaatatttctttatggcatgaaagagacatctcacattcaagtgtagaaagaaatattgggcctgatgccaatattacattagattttgcattagttagactatcaggtctattggaaaatttggttatatatccaaatagaatgaaaaaaaacttagaattaacagaggtttaat

SEQ ID NO: 288376 - DNA, 633 bp, Unknown
  Bacterial polypeptide expressing nucleotide sequence isolated from the Sargasso Sea
tatattttaatactctgccagtaattgcaagttcgattgaacgtttagctactgagataaggcatttacaaagaactgaggttttagaagttgaagaatttttttcaaaaggacaaaaagggtcatcagcaatgcctcacaaaagaaatccagttctgactgagaatttaactggactcgcaagactgattagaggttatacggttcctgctttagaaaatattactctttggcatgaaagagacatatcacattcaagtgtagagagaataatggcgccagatgcaaatattataatcgactttgcactttcacgaatgaaaaatgtgatatcaaatcttgttatatatccaaaaaatatgaaaactaatttagatagattaaaaaaattgccaatgtcagaaggtttaatgctggcaatgacacaaaaaggtttatccagagaaaatgcgtacaaaatagttcaacgtaatgcaatggaagtatggaaaaagaatacagattttgaggtaatacttaacaaagatgaagaattaaaaaaatacttaagcaaaaaagaaatatcaaaaattttgaatctaaaacatgctgctcgcagaactgactatattttcaaaaaagtttttaagtaat

SEQ ID NO: 288377 - DNA, 725 bp, Unknown
  Bacterial polypeptide expressing nucleotide sequence isolated from the Sargasso Sea
attagcttccttttatgaagagtttaaaagaaatagagagagattagtttacgctatagatcaaatatcaacttgtgcaatttctggagcagttggaacgtttgcaaatgtaaaccctaatgttgagaaacatgtcgcaaaaaaacttggattaaaagttgaaccaatctctactcaaataatcccaagagatcgacatgcattttatttttcagttctaggtattattgcaggaagtatagaaagagttgctatagaaataagacatttacaaagatcagaagtttatgaattgcaagaatacttttctaaaagtcaaaaaggttcatctgcgatgccccataaaaaaaatccaattttaagtgaaaatttaacaggacttgcaagaatggtaagaagttctgttgttccagcgcttgaaaatattgcgctttggcatgaaagagatatttcgcattcaagtgtagagagaaatattggtcctgatgcaaatattactctagactttgcactagtgagattagcgggtgttttagataatatgattgtttatccaaaaaaaatgctagaaaatcttaatcttactaaagggctaattttttcacaagaagtgatgcttgaactgacaaaaactggtatcacaagagaaaaatcctataagttagtacagggatatgcaaaaaaatgttttgccgaaaatttagatttgtttaatgttatacagt

SEQ ID NO: 288378 - DNA, 626 bp, Unknown
  Bacterial polypeptide expressing nucleotide sequence isolated from the Sargasso Sea
ttctgttttaggaatatttgcagggtctattgaaagagtagccgtgaaaataagacatctgcaaagaaccgaagtttatgaactacaagaatatttctctcaaaatcaaaaaggctcttctgcaatgcctcataagaaaaacccaatcttaagcgaaaacttaacaggcttagcaagaatggttagaagttcagttgcgccagcacttgaaaatatcgctctttggcatgaaagagatatctctcactcaagtgttgaaagaaatattggaccagatgctaatataacaactgattttgcattggttagacttacaaatattttagataacatgattgtttatcctaaaaaaatgcttgaaaacttaaacataacaaaaggtttaattttttctcaagaagttatgttggagttaactaaaactggattaagtagagaaaaatcatacaaaatagtacaatctcatgcaaaaaaatgttttggagaaaatttaaacttaattgacgtcatttcattagataaatttataatgagtaaaatttcaccaaaaaaactaaagtctatatttaattattctaaacactttaaaaatgtaaattttatctttagaagagtttttaaataat

SEQ ID NO: 288379 - DNA, 703 bp, Unknown
  Bacterial polypeptide expressing nucleotide sequence isolated from the Sargasso Sea
gctagaaaattaagattaacagtagaacctatttcaacacaagtaatacctagagatagacatgctcagtttttttcaacattaggtattattgctagctcaatcgaaagatttgcagttgaaataagacacttgcaaagaacagaggttttagaagttgaagaattttttggaaaaaaacaaaaaggttcatctgcaatgccgcataaaaaaaatcctattctaagcgaaaacttaactggtttagcaagattaattagatcgagtgttgctccagctttagaaaatgttgcattatggcatgagagagatatctctcattctgctgtcgaaaggaatattggacctgatgcaaccattgccttagactttgcactaaatagacttagtaatgttgttaaaaatttaaatgtatatcctaagaatatgaaaaaaaatttggatattactaatggaatatttttctcacaaagagttcttttagaattaacttcagttggttttactagagaagagtcctataaaatagtgcaaacaaatgcaatgcgggcatggaaagaaaattcttctttttatgataaaattgtttcagataaaaaaattacaaataaaatacctgttaataaacttaaaaaattatttgattttagttaccatactaaaaaaattaatataatttttaatagaagtttaaaaaaataat

SEQ ID NO: 288380 - DNA, 852 bp, Unknown
  Bacterial polypeptide expressing nucleotide sequence isolated from the Sargasso Sea
aaaaacaagcaaaaaaatataaactaactccatgtattggaagaagtcatgggattcatgcggaaccgattacatttggattaaaattagcatcattttatgaggaatttaaaagaaacaaattaagattaaaagatgcaatagaaaatgtatcaacatgtgcaatttcgggagcagtaggaacatttgctaatataaatcctaaaattgaaacttatgttgcaaaaaaattaaaattaaatgctgagccaatttcaactcaaattattccgagagatagacatgcatattattttgcagttcttgggattattgctggatctgtagaaagagtagcaacagaaataaggcatttacaaagatcagaagtttatgaattacaagaatacttttcaaaagatcaaaagggctcatctgctatgcctcataaaaaaaatccaatattaagtgaaaatctcaccggacttgcaagaatggtaagaagctatgtaattccagctttagaaaatatttctttatggcatgaaagagatatttctcattctagtgttgagagaaatattggtccagacgcaaatataactttagattttgctttagttagactgtcaggaattttagagaaaatgattgtttatccaaaaacgatgataaaaaatttaaacttaacaagaggtcttgttttttctcaagaggtaatgttagaacttactaaatcaggtattgctagagagaaagcgtatagattggttcagtctcatgcaaaaaaaagttttgcaaagaatacaaacctattaacacttttaaaaagtgataaatcgatcactagtaaaataaggaaaaaagattaga

SEQ ID NO: 288381 - DNA, 659 bp, Unknown
  Bacterial polypeptide expressing nucleotide sequence isolated from the Sargasso Sea
tcaaatcattccaagagatagacatgctttctttttttcaatacttgggattattggaagttcaattgaacgttttgcagttgaaataagacacctacaaaggactgaattattagaagttgaagaaagatttgatccaaaacaaaaaggatcatctgctatgcctcataaaagaaaccctattttaagtgaaaatttaactggactggcaagatatataagaagtgcagttattccatcaatggaaaatattgttttatggcatgaaagagatataagtcactcaagtgtggagagaatttttgctccagatataactattgctttagacttttcacttaacagactcaatgaaattgtcaaaacaatgaaagtctatcctcaaaacatgaaaaaaaatattaatttgcttcatggacttcataatagtcaaaaattacttttaaaattaacacaaaagggcctttcaagacaattggcctactcaatagtccaaaaaaatgcaatgagtgcttggggtaataaaaaaagtttttttgatatattaaaaaaagataaaaaattacttaagtatttatccattcaggaattaagagaagttttagaaactaataacaacaataaagtagattggatatttaaaaataagataaaataat

SEQ ID NO: 288382 - DNA, 590 bp, Unknown
  Bacterial polypeptide expressing nucleotide sequence isolated from the Sargasso Sea
agtagcagttgaaataagacaccttcaaagaactgaggtttatgagctacaagaatatttctctaaaaatcaaaaaggatcctctgcaatgcctcataaaaaaaatcctattttaagtgagaatcttaccggtttagctagaatggttagaagtgcagttgtaccagcacttgaaaatatagcactttggcatgagagagatatttctcattctagtgttgaaagaaatattgggccagatgctaatataacaactgattttgcattagttagacttacaaatattttggataacatgattgtttatccaaaaaaaatgctagaaaacttaaatttaacaaaaggtttaattttttctcaagaagttatgttggaattaactaaaacaggattaagtagagaaaaatcttatagattagttcaatcttatgcaaaaagatgttttacagaaaatttaaacttaattgacgtcatttcatctgataaatttataatgagtaaaatttcaccaaaaaaactaaaatctatatttaattattctaaacactttaaaaatgtaaatttaatctttagaagagtttttaaataat

SEQ ID NO: 288383 - DNA, 884 bp, Unknown
  Bacterial polypeptide expressing nucleotide sequence isolated from the Sargasso Sea
gcatgaacacaagcgtaccgccattattggccgcagccacggcattcatgccgagccaactacacttgggctgaaatttgcaagtttttacgcggagttcaaacgctgtcgtgaccgtttggttgtggctcgccgcgaaatcgccacttgtgcgatttccggagctgtgggtacgtttgcccatatcgacccatttgtcgaaatacatgttgccaaaaaaatggggcttgagattgaaccgatatcaactcagatcattccgcgtgaccgccatgcgatgttctttgcaacattaggcgtgattgccagttcaattgaacggctatcagtcgaaatacgccatatgcaacgtaccgaagtgcgcgaagccgaagaatttttctctgctgggcaaaaagggtcgtcggcgatgccgcataaacgcaatccggtcttgaccgaaaatctgactggaatcgcacgtattgtgcgtgcggcggtggtacctgccttggagaatgtcgttctgtggcacgagcgcgatatttcgcattcatcagttgagcgtgtatttgcccctgatgccaccatcgcgcttgattttgccttgcaacgtcttgctagtgttgtagaggatctgcttgtatacccagaggtcatgcgggcgaatctcaacaagcttggtgggcttgtccattcacaacaagtcttgttggcattgacacaaaaaggagttagccgggaaaatgcatatgaatatgtccagcgcaatgctatgaaaatctgggccgaaggtggcagttatcttgataaattaaaaactgacgaagatgtcaaagcgtacctaagcgatcaggaactcgatgctttgtttgatcttgaccaacattttcagcatgtcgaca

SEQ ID NO: 288384 - DNA, 703 bp, Unknown
  Bacterial polypeptide expressing nucleotide sequence isolated from the Sargasso Sea
acgttgcaaaaaacttaaattaagtccagaaccaatatctacacaaattatacctagagatagacatgcttattatttttcagtacttggtataattgcaggttctatagaaagacttgcaacagaaataagacatttacaaagatctgaagtctatgaattacaagaatttttttcaaaagaccaaaaaggatcttcggcgatgccacacaaaaaaaacccaatactaagcgaaaatttaacaggtctttcaagaatggttagaagttatgttgtgcctgctttagaaaatatagctctttggcatgaaagagatatttcacattcaagtgtagaaagaaatattggtcctgatgctaatataactttagattttgctttagtaagacttgcaaatattttagataaaatgattatttacccaaaaaaaatgttggaaaatttaaatatgactaaaggtttagttttttcacaagaaataatgctagagcttacaaaaaatggcattcctagagaaaaagcatacaagatagtacaagatcatgcaaaaaaaagttttgtaaaaaatattgatttaatagagttaattaaaaaagataaatttattacatcaaaaatttctgaaaaaaaagttaatagtatttttaattacaaaaaacatttcaaaaatgtaaattatatttttagaagagtttttaaataa

SEQ ID NO: 288385 - DNA, 563 bp, Unknown
  Bacterial polypeptide expressing nucleotide sequence isolated from the Sargasso Sea
aagatcagaagtttatgaattacaggaatatttttcaaaaaatcaaaaaggttcatctgcgatgcctcacaaaaaaaatccaattcttagtgaaaatcttacagggttagcaagaatagttagaggttatgtggtccctgctcttgaaaatattgctctatggcatgaaagagacatttctcattcaagtgtagaaagaaatatcggtcctgacgcaaatattactttagattttgctttacatagactcgcaaatattttggataacatgattgtttatccaaaaaaaatgttatcaaatttaaatcaaactaaagggttaattttctcacaagaattaatgcttgaactaactaaatctggattatcaagagaaaggtcttacaaagtcattcagtcttatgcaaaacaaagcttttctagaaacattgatttgattgaattaataaagagagacaaaaaaatattaagtataattcctgaaaaaaaattgaaaaatatttttaactactctaaacactttaaaaacgtaaattatatatacagaaaagtttttagataat

SEQ ID NO: 288386 - DNA, 936 bp, Unknown
  Bacterial polypeptide expressing nucleotide sequence isolated from the Sargasso Sea
attgagtcagcaggttgtgcatccgcgtcgtccggtgatcgagcgttacaccctgcctgaaatgggagccgtctggagtgagcaggcgaagttccaaagctggctggatgtggaaatcgccgccacggaagccaactgccgcctcggccgtgttccccaagacgccctggacacaatcaaagccaaggcccacttctccgtagagcgcatcctcgagatcgaagcggaagtgcgtcacgacgtgatcgccttcctcaccaacgtgaacgaacacgtcggtgatgcaggccgtcacatccacgtgggcatgaccagcagcgatgtgttggacaccggcctggcactgcagctgaaacagtccgtggccctgctccgccaggagctggatgccttggccgatgccctacgggcgttggcccgcgagcacaaagccaccgaaatgatcggccgttcccatgccattcatggagagccgatcacctttggcttcaagatcgccggctggttggcggaatccgaacgcaaccgcagccgcctggcgcggctggaagaagaggtggccgtcgggcagatcagtggggccatgggcacctacgccaacaccgatccccaggtggaagccatcacctgtgaaatccttggcctgacgccggataccgccagcacccaggtgatttcccgcgatcgccatgccgactatgtgcagaccctggccctggtgggcgcctccctcgaccgcttcgcgacggagatccgcaacttgcagcgcaccgatgtgctcgaggtggaggagaacttcgccaagggccagaagggcagctccgccatgccccacaagcgcaacccgatccgcagcgaacggatcagcggcctggcccgggtgctgcgcagctatgtggtggcagccctggaaaacgttgccctctggcacgagcg

SEQ ID NO: 288387 - DNA, 910 bp, Unknown
  Bacterial polypeptide expressing nucleotide sequence isolated from the Sargasso Sea
gttagtaattatataggcaatagttcaaaatattttcattttggagttacttccagcgatataatagatacaggcttttctttacaattaaaacagtcttcaaaaataataactcagcagttagaaaaattaattttatctttaaagctaaaatcagaaaaatataaaaatacgattatgattggaagaagtcatggtgtgcatgcagagcctataacttttggtctaaaattgagatctttttattttgagtttttaagaaatctaaaaagattaaaacaagcagaagatgagatatctatttgcgcgatttctggaccagttggtacatatgatacaatagatccaagtgttgaagaatatgtagcaaaaaaactaaatttaaaaacagaaaatatttctacgcaaattattcctagagataggcatgcttactttttttcaatactcggtattatagcttcatcaatcgaaagacttgctattgaaataagacacttacaaagaacagaaattttagaagtagaggaattttttgataaaaatcaaacaggatcctctgctatgcctcataaaagaaatcctattctaagtgaaaatttaacaggtatcgcgagatatattagaagcggggtattgccttcttttgaaaatatttctttatggcatgaaagagatattagtcattcaagtgtggaaagaattttggccccagatattacaattgctacagattttgcattatcaagattaacaggcataattgaaaatttaatagtttatccaaaaaatatgaaaaaaaatcttaaaaaattgggaggtctgcataaaagtcaaaaaattttattagctctaatacaaaaaggactttctcgtcaaaaaagttattcaataatcaaaaagctgctag

SEQ ID NO: 288388 - DNA, 703 bp, Unknown
  Bacterial polypeptide expressing nucleotide sequence isolated from the Sargasso Sea
tgtttgtaagaaattgggtcttaaggttgaagaaatttctactcaaataataccaagagaccgtcatgctgcatttttttctgcactgtctataattgcatcttctatagagcgtttagctgtagaaatcagacaccttcaacgcactgaaattatggaagtatctgaatttttttctaaaggacaaaaaggttctagtgcaatgcctcataaaaaaaaccctatccattctgaaaacttaactggactatcaagattaattagaatgagtgtgattccatcattagaaaatattggactttggcatgaaagagatatttctcatagttctgttgagagagtaataggaccagatactacagtaattttagatttcgcattaacaagattgtctttacttatggaaaatcttattgtctatcctgaaaatatggaaaaaaacctatataaattgaatggtgtaatattttctcaaaatattcttctaaagcttactcaaaaagggatgagtagagaacaatcttataaaattgttcaaaaaaatgccttaaaagctatagatgatgatgtatcttttaaagatttactgttaaatgataaagaaattatgtatgtattatccccaaaagaattagatcaaatttttgatatttcaaggtattttaaacatgtagataccgtttataaaagaatttttagttaa

SEQ ID NO: 288389 - DNA, 685 bp, Unknown
  Bacterial polypeptide expressing nucleotide sequence isolated from the Sargasso Sea
tttaaaagttgaaccaatttcaacacaaattattcctcgagatagacacgcattctatttttcagttttaggaattatagcaggctcaattgagagagttgctattgaaattagacacctgcagagaacagaggtttacgaattgcaggaatatttttcaaaaaaacaaaaaggttcatcagcaatgcctcacaaaaaaaatcctattttaagtgaaaacttaactgggctagcaagaatggtaagaagtgcagttgtgcctgcgttagaaaatattgcactatggcatgagagagatatatctcattcaagtgttgagagaaacattggtccagacgctaatatcacaacagactttgctttagatagacttaagaatattttagataatatgattgtgtatccaaaaaaaatgcttgaaaatttaaatataaccaatggtttaattttttcacaagaagttatgttagagctaacaaaatctggattaagcagagaaaaatcatataaaatggttcagagctatgcaaaaaagtgttttgcagaaaatctaaatttatacgatgctctttcagatgataaatttataataactaaaatctctcaaaaaaaacttaaatctattttcaattactctaaacattttaaaaatgtaaatttaatatttagaagagtttttaaataa

SEQ ID NO: 288390 - DNA, 517 bp, Unknown
  Bacterial polypeptide expressing nucleotide sequence isolated from the Sargasso Sea
aagggttcatctgcaatgccccataaaaaaaatccaattttaagtgaaaatttaaccggacttgcaagaatggtaagaagttctgttgttccagcgcttgaaaatattgcactttggcatgaaagagatatttcacattcaagtgtagagagaaatattggtcctgatgcaaatattactctagactttgcactggtaagattagcaagtgttttagataatatgattgtttatccaaaaaaaatgctagaaaatcttaatcttactaaagggctaattttttcacaagaagtgatgctagaactgacaaaaactggtatcacaagagaaaaatcttataagttagtacaaggatatgcaaaaaaatgttttgctgaaaatttagatttgtttaatgttattcagtctgacaagttaataatgagtaaaatttcaattaaaaagttaaagtctatctttagttattctaaacactttaaaaatgtaaatctaattttcaggcgggtgttcaaataat

SEQ ID NO: 288391 - DNA, 697 bp, Unknown
  Bacterial polypeptide expressing nucleotide sequence isolated from the Sargasso Sea
aaaaaattaaaacttcaaacagaaccaatatcaactcaaattattccaagagatagacacgcttattatttttctgttttaggaattattgctggatctattgaaagagtagctactgaaattagacatttacaaagatcagaagtttatgaattgcaagaatatttctcagaaaatcaaaaaggttcgtcagcaatgcctcacaaaaaaaatcctatactaagtgaaaatcttactggattagcaagaatagttagaggttatgtggttcctgccttagaaaatattgcactatggcacgaaagagacatatctcattcaagtgtagaaagaaatattggaccagatgcaaatattactttagattttgcattatacaggcttgccaatgttttagataatatgatcgtttacccaaaaaaaatgttatcaaatttaaataaaactaaaggattaattttctctcaagaattaatgcttgagttaactaaaactggtttatcaagggaaaaatcgtataaaattattcaatctctagcaaatcaaagtttttcaaaaaatatcgatttaattgaattaatcaagaaggataaaataatatcgggcagaatccctgaaaaaaatttgaaaaatattttcaattattcaaaacactttaaaaatgtaaattatatttataaaagagttttcaaataat

SEQ ID NO: 288392 - DNA, 629 bp, Unknown
  Bacterial polypeptide expressing nucleotide sequence isolated from the Sargasso Sea
ggtttaaagcttgcatctttttatgctgaatttaaaagaaacaaaaaaagacttgaaaatgcaattaatgaaatatcaacttgtgcaatatctggagctgttggcacatatgctaatattgatcctagaattgaattacatgtcgcaaaaaaactaaagctaaaacctgaaacaatttctacacaaataataccaagagatagacatgcttattatttttcagtactgggaataattgcgggatcaattgaaagagtatctactgagatcagacatttgcaaagaagtgaggtttatgaattacaggaatacttttctaaagatcaaaagggatcgtcggcaatgcctcataaaaaaaatcctattcttagtgaaaatttaaccggattagcaagaatggttagaagttacgtatttcctgcattagagaatattgctctatggcatgaaagagatatttctcattcgagcgttgaaagaaatatagggcctgatgctaatattactttagattttgctttagtaagattaggaaacatcttggatcaaatgattgtttatcctaaaaaaatgttgaaaaatcttaatttgacaaatggagtagtgttttcacaagaagtaatgcttaa

SEQ ID NO: 288393 - DNA, 750 bp, Unknown
  Bacterial polypeptide expressing nucleotide sequence isolated from the Sargasso Sea
caggagccgtcggtaactatgccaacgtcacgccagaactcgaaaccatggtctgtgaggagttaaatcttaaaccagccaaaatttccacccaaaccttgcaacgtgatcgtcacgcaaactttatttctgtcattacgatcattgctggcaccttagacaaaatggccaccgaaatacgagctctacaaaaaacagaattcaatgaagtcgcagaaccctttgcaaaatcacaaaaagggtcctctgccatgcctcataaacgaaaccccattacctgtgaacgtgtctcaggtctggctagaacaatcagaggaaatgccatcacagcctttgaaaaccaagtactctggcatgaaagagacatctctcattcctctgcagagcgtgttatattcccagatgccactatcaccctagactatatgtttgggctaatgacaaaagtactcaaggacctcgtcgtcaataaagacgccatgatgagaaacatcaaatgctcttataatagcttctactctcaacccctactcttattattagtcaacaaaggtatcactagagaaatcgcctatcgcatcgttcaacgaaatgcccatgctgcattcgataacaaagtcttatttgatgaacagattcgaaacgataaagagcttacagacttagtttcagaaaaagagctagatgaaatcttctcattagaccgctacaaaaaacacgtagatttaatttttaaccgactgttttaaa

SEQ ID NO: 288394 - DNA, 841 bp, Unknown
  Bacterial polypeptide expressing nucleotide sequence isolated from the Sargasso Sea
agtaatattggtgtgatacctaaaattgctgcaaaagagattagaaaaaaagctaaatttaaagttagtgaaataaatgaaatagaaaaacaaacaaaacatgatgttaatgcctatattgataatgtaagtaaatatattggcaaaaattcaaaatattttcatcatggcattacttcaagtgatattattgatactgggttctcagttcaattaaagcagacaggagaaataattcataaagagctaaatcttttattaaaaaatttaaaatccaagtctttaaaatataaaaacacattaatgattggtagaagtcatggaattcatgcagaaccaattacttttggacttaaattaggatctttttataatgagtttaaaagaaatttaaaaagattagagttagcaattgaagaaataagtatatgttctatctcaggacctgttggaacatatggaagcattgatccaagagtagaaaaatatgttgcaaaaaaacttaaacttaaatgtgaagatgtttccactcaaataattccaagagatagacatgctttctttttttcaatacttggaataattggaagctcaattgagcgttttgcagttgagataaggcacctacaaagaactgaattattagaagttgaagaaaggtttaatccaaaacaaaaaggatcatctgcaatgcctcataaaagaaaccctatattaagtgaaaatttaactgggctggcaagatatataaggagcgcagttattccatcaatggaaaatattgttttatggcatgaaagagatataagccactcaagtgtagagagaatttttgctccag

SEQ ID NO: 288395 - DNA, 599 bp, Unknown
  Bacterial polypeptide expressing nucleotide sequence isolated from the Sargasso Sea
tattgaaagatttgctttagaaatcagacacttgcaaagaaccgaagtttatgaacttcaagaatatttttcaaaaaaccaaaaaggttcatcagcaatgcctcataaaaaaaaccctatcttaagtgaaaaccttactggtctttcaagaatggttagaagtgcagtaatgccagcgcttgaaaatattgctttgtggcacgagcgagatatctcccattctagtgttgagagaaatataggccctgatgcaaatattactttagattttgctttaaatagattggtaaatattttagataaaatgataatttatccaaaaaaaatgattcaaaatattaatttaacgaagggtttgatattttcacaagaaataatgctagaactgacaaaaagtggatttagtagagaaaaatcttataaaattgttcaatcacattctaaaaaatgtttctcagaaaataaaaatttgtttgatttaataacaaatgataaattgataatgagtaaaattagtaaatctaaattaaattcaatatttaattattcttctcattttaaaaatgtaaatttaatttttaaaagagtgtttaagtaat

SEQ ID NO: 288396 - DNA, 805 bp, Unknown
  Bacterial polypeptide expressing nucleotide sequence isolated from the Sargasso Sea
aaacaaaaaaagattacaaggtgcaataaaagatgtttctacttgtgcaatttctggtgcagttggaacttttgcaaatgttaacccaaaagtagaatcatatgttgcaaaaaaacttaaattaattccagagccaatctctacacaggttatacccagagatagacatgcttattatttttcagtgcttggtataattgcaggctcaatagaaagagttgcaacagaaataagacatttacaaagatctgaagtttatgaattacaagaatttttttcaaaaagccaaaaaggatcttcagcgatgcctcacaaaaaaaacccaatactaagtgaaaatttaacaggtctttcgagaatggttagaagttatgtcgtgccagctctggaaaatatagctctttggcatgaaagagatatttcacattcaagtgttgagagaaatattggacctgatgctaatataactttagattttgctttagtaagacttgcaaacattttagataaaatgatcatttacccaaaaaagatgttagaaaatttaaacatgactaaaggtttagttttttcccaagaaataatgctagaacttacaaaaagtggtattcctagagaaaaagcatacaagttagtacaaaatcatgccaaagtaagttttgtaaaaaatataaatttaatagaactaataaaaaaagatagatttattacatcaaaaatttctgaaaaaaaaattaatagtatttttaattactcaaagcatttcaaaaatgtaaattatatttttagaagagtttttaaataa

SEQ ID NO: 288397 - DNA, 1192 bp, Unknown
  Bacterial polypeptide expressing nucleotide sequence isolated from the Sargasso Sea
ttgacaccttctgattcacaccctttgtcagccctgaccgcactgtctcccgtagatggcagatacggtaccaaggtttccggcctgagatcctacttcagcgaatttgctctgatccggtatcgcgtctttgtcgaggcacaatggctgttatcactcgcctcatgcgaggccttagccgaggtcccgccgttttcggaatctgcaaagacctttctcaacgatatttcggatggcttctcgatctcagatgctgaagcggtcaaaactattgagcgcaccaccaatcatgatgtcaaagcggtggaatattttctgaaagagaaagtcgcaaaccatgaagaattgagcgctgtatcggaattcatccattttggatgcacttcagaagacatcaacaatctgtcttatgccctgatgctgcgcgacggccgaaacacgattctgctgtcggcagttgatcaggtcacctcagcactcgcagggatggccgacgaactcgcggatcagccgatgctggcccggacacatggccaacctgcgagccccaccaccatgggaaaggaactggccaatgtggtggcccgactggaccaggcccgcgaccaggtcgcaacgacggcaatacgcggaaaattcaacggcgccgtgggtaacttcaatgcccaccttgcggcctacccagaactggactggtcccggctttcccaagattttgttgaaggcatcggactggactggcagcagatgacgacacaaatcgaaccgcatgacgatcttgccgcactgtgtcatggactggtccgtctgaacaccatactgatcgatcttgaccgtgacctgtggggatacatctcactgggttacttccggcagaaggctgtggccggagaagtgggctcaagtacgatgccgcacaaggtcaatccgatcgactttgagaacagcgagggaaacgctggcattgccaacgcattacttgaacatctggcggcgaaactgccgatcagccggtggcaacgggatctttcagactcaaccgtaatcagaaatcttgggcctgcatttgcccattgcctgatcgcactggacgccgcgcatcgtggccttggaaaacttgagattgacggggataaactgcatgccgaactggatcaggcgtgggaagtgctggccgaggcgatccagaccg

SEQ ID NO: 288398 - DNA, 663 bp, Unknown
  Bacterial polypeptide expressing nucleotide sequence isolated from the Sargasso Sea
ttattccgagagataggcatgcatattttttttctgttcttgcaattatagctagttcgatagaaaggcttgcaaccgaaattagacacttgcaaagaaccgaagtttcagaagttgaagagtttttcaataataaacaaatggggtcttcagctatgccgcataaaaaaaatcccgttctaaccgaaaatttaactggtttatcaaggcttgtgcgtgcaaacgttattccagcattagaaaatgtagccctttggcatgaaagagatatttcacattcaagtgtagaaagaaacattggaccagattctacaataactttagattttgcccttaacagattaaataatgttattaaatccatgaaggttaataaggacaaaatgaaaaaaaacttagagttaactaaaggtattttcttttctcaaagagtattattggaacttacttcaaaaggttttcgaagagataaagcttatagaatagtgcaaaggtgtgctattaagtctgtagaaaataatacttctttttacgatagtttagttaaagatcagacaataattgagaaaatacctgttaatactttaaagaaattatttgattttggttatcacacgagaaaaattaatgtaatttttagcagggttttaaataaaaaatgaa

SEQ ID NO: 288399 - DNA, 780 bp, Unknown
  Bacterial polypeptide expressing nucleotide sequence isolated from the Sargasso Sea
tcgatgaaatttcaacatgtgctatttcgggtgctgttggcacttttgcaaatgtcgatccgagaattgaacagtatgtagcaaaaaaatttaagttaaaggtagagcctgtatccactcaaataataccaagagatagacatgcctattatttttcaattttagcaataatagctggttccgttgaaagagttgctactgaaatacggaatcttcaaaaaactgaattacaggaagttgaagaattttttgacacacagcaaaaaggttcatctgcaatgccccataaaaaaaatccaatattaagtgaaaatttaactggtctggcaagaatggttagaagctatgttattccagctctggagaatatttcactttggcatgaaagagatatttctcattctagtgttgagcgaaacataggtccagattctactatcacgttagatttcgcattaaatagattaaaaaatattttaaataatatgaatgtttatcctaaaaagatgcttaagaatcttaatttaactaatggtttaatattttctcaaagagttatgctggagttaaccaaatgtggtttttctaaagaaaaagcgtataaaatagttcaaaaaaatgcacaaaattcacataaaaaaaatataaatttttatcaaagtttgatgaacgactcattgattaataaaaaaatttctaataaagatttaagaaagatgtttgatttaaattatcatacaaaaaaaataaatgtaatttttaacagagtttttaaataag

SEQ ID NO: 288400 - DNA, 1285 bp, Unknown
  Bacterial polypeptide expressing nucleotide sequence isolated from the Sargasso Sea
atgataaaaagatacgaagtaaaagaaatagttgatatatggagtcaagaaaacaagttaagcacttggaagaaagttgaatcctctgttacaaaaagtcttgaagaggaaggtattgtacctaaaggtttgtcagaaaaaatacttgatacaaatgtaaccgtaaaagaagttgaagctcgagaaaaagtaacaaaccatgacttagcttcatttgttgacatattacaagataaagtaaatgaagattccgaatggatacattacggcctaactagttcagacgtagttgatacatcaaatagtttattaattttagaatcattagatttcctaataggagaagttgataaattaatcagtactttgaagaatcttgcgataaaagaaaaagataccaaaataatcgggagaactcatggcgtatttgcagaagtaactttccttggaaatataatttcaaactggttgttggagatacatcgaaataaagaacgtcttgaaagagcaaaagaaaatattagcatcggaaagctaagtggagttgttgggaactacaccataattaacagtgatgttgaaaaaaaatctttagagactttaaatcttaagccagagctatttgcttctcagattgttagccgtgatagatatgctgaagtaatcagctctattggaatgcttgcaagttcctatgatcgtatagctataaatcttagaggttatcaacgttcagaggtgggtgaaattcatgagtcattttcaagcgaacaaaaaggttcttcagcaatgccacataaaaaaaatccaattacttctgagagaatatcaggaatttctagaattctcagaggttatgttgtaagtgcacttgaaaatatgtctctttggcatgaaagagatatatcaaattcatcagtagaaagaatcatttttccagatagttttaatctcatttgtttttcaacaattgagataaaagagctattcaaaaatatcaacattaatcatgaaaaaataaattcaaatattaattcagcaaaagtgagtttgctaactcaatcttttctatctcatttagtaactaaaggggttgaaagggatgaagcatatagatttttgcaatctcaatcatttgaaatcgataacttagattcttatataaaaaatatttcaacaaattttgaggaagttgaagaaaaagaattacaggaaattgggaaaagttttctttctgagaaaaccaacaaaaattttgaagaaaaaataaattctgttgtttaaa

SEQ ID NO: 288401 - DNA, 670 bp, Unknown
  Bacterial polypeptide expressing nucleotide sequence isolated from the Sargasso Sea
atatcaacacaaatcattccaagagatcgacatgcacattattttgcaattttaggtatcattgcaggttcagttgaaagagttgcaacagaaatacgccaccttcaaagatcagaggtttatgaattacaggagtttttttctaaagatcagaaaggatcttctgcaatgcctcataaaaaaaatccaatattaagtgaaaatttaactggtcttgcaagaattgttagaagttacgttgttcctgctttagaaaatatagctctatggcatgaaagagatatttcgcactcaagcgtggaaagaaatattggacctgatgcaaacataactctggattttgcacttactagactagcaaatattttggacaaaatgattgtttatccaaaaaaaatgctagagaatttaaactttacaaaaggattagtattttctcaagaattaatgcttgaattaactaaatctggaatgcaaagggaaaaggcttacagattagttcaaggacatgcaaaatctagttttgcaaaaaatataaatttaattgatcttgttaaaaatgataaaacaattactcagagaatttctgaaacaaaaattaaaaaaatatttacatattccaaacactttaaacatattaattatatattcaagagagtattaaaataat

SEQ ID NO: 288402 - DNA, 1294 bp, Unknown
  Bacterial polypeptide expressing nucleotide sequence isolated from the Sargasso Sea
atgatacctcgatattctagaaaagaacttgtaaaaatttggtctgaggaaaacaaatataaaatttggctagatgtcgaaattgctgcagcgcaagcaatggaaaaatataaattaataccaaagggtgtttcagctatagtaaaaagaaaaggtaaaataaaagtaaaaagaattcacgatattgaagcaaaagtaaaacatgatgtaattgcatttttaacatcaattactgagcaagctggtgttaaagcaagatatttacatcaaggaatgacctcatctgatgttctagatacaagttttaatattcaattaattcaatcaggaaaaattttaattaacgatatcaataaaattttatcaatattaaaaaaaagagctaagaaatataaatttactccttgtattggtagaagccacggaatccatgctgagcctattacctttggtttaaaacttgcatccttttatgaagaattcaaaagaaacagaaaaaggttacaagatgcaataaaagatgtttctacttgcgcaatttctggtgcagttggaacttttgcaaatgttaacccaaaaatagagtcatatgtcgcaaaaaaacttaaattaagtccagagccaatatctacacaagttatacctagagatagacatgcttattatttttcagtgcttggtataattgcaggctctatagaaagacttgcaatagaaataagacatttgcaaagatctgaagtctatgaagtacaagaatttttttcaaaagatcaaaaaggatcttcagcgatgcctcacaaaaaaaacccaatactaagcgaaaatttaacagggctttcaagaatggttagaagttatgttgtgcctgctttagaaaacatagcactttggcatgaaagagacatttcacattcaagtgttgaaagaaatattgggcctgatgccaatataactttagattttgctctggtaagacttggaaatattttagacaaaatgatcatttatcctaaaaaaatgttggaaaatttaaacatgactaaaggtttagttttttcacaagaaataatgcttgaacttacaaaaaatagcactcctagagaaaaagcatacaagatagttcaaaatcatgccaaaaccagttttgtaaaaaatattcatttaatagagctaataaaaaaagataaatttattacatcaaaaatatctgaaaaaaaaattaatagtatttttaattacaaaaaacatttcaaaaatgtaaattatatttttagaagagtctttaaataat

SEQ ID NO: 288403 - DNA, 1204 bp, Unknown
  Bacterial polypeptide expressing nucleotide sequence isolated from the Sargasso Sea
tggagtgattataccaaatattctatttggttaaacattgaattagctgctgctgaagcaatggaaagattaaaaattattccaaaaggtgttgtcaaaaaagttaaatctcaggcaaaaattaacgtaaaaagaattttatatattgagagcaaagtaaagcatgatgtaattgcattcttgacctctataactgaaaaatctggaaaagaatcaagatatcttcataaggggatgacttcctctgatgtcctagacacgtgtttcaatctacaactaaaacaatcaggtgaaattcttctaaaagatattgaagagttattaaaatctataaaaaaacagtcaatcaaacataaattcactttatgtattggtagaagtcatggaatacatgctgaaccgattacttttggattaaaattattaactttttatcaagaatttttgagaaataaaaacagattagagaattcaattaaagaaatatcaacttgtaaaatttcaggagcagttggaacatttgcaaatgttgatccaagaattgaaagccatgttgctaaaaaattaaaacttaaggtagagcctgtttcaacacaaatcattcctagagatagacatgctcaatttttttctacattaggaattatagcaagttcaattgagagatttgcagtagaaattcgacatcttcaaagaactgaagttttagaagtagaagaattttttggaaaaaaacaaaaaggttcttctgcaatgccacataaaaaaaatccaattttaagtgaaaacttaactggtttagcaaggttaatcagatcgagtgtggtaccagcattagaaaacgttgccttatggcatgagagagatatttcacactccgctgttgaaagaaatattggtcctgactctacaatagcactcgactttgctctaaatagattaaacaatgtggtaaaaaatttaaatgtttatcctaaaaatatgttgaaaaaccttaatattactaatggtatttttttttctcaaagggtcttgctagaattaacttcagttggactcactagagagaaagcttataaaattgttcaaaaaaacgctatgaaatcatggaaaaataattcttctttttatgaaaatattgctgcagataaaaatattacaaacaaaatacctgttaataagcttaaaaattattcaatttgag

SEQ ID NO: 288404 - DNA, 1291 bp, Unknown
  Bacterial polypeptide expressing nucleotide sequence isolated from the Sargasso Sea
atgatatcaagatataatagacctaaaatagaaaaaatttggacattagagaataaatttaaaatttggacagatatagaaatattaattgctgaaaaattgagcgatattggtgtaataccaaaaattgcatctaaggagattagaaaaaaagctaaatttaacgtaaatgacatacttaaattagaaaaaaaaacaaagcatgatgttaatgcttatatagataatgtatgcaaatatattggcaagcattcaaaatattttcatcatggcgtaacttcaagtgatattattgatactggtttctcaattcaattaaaacaaacaggagaaataattcataaagaactgagtattttattaaaaaatataaaatcaaagtctatgaaatataagaacacattaatgattggtagaagtcatggaattcatgctgaaccaattacttttgggttaaaattaggatctttttataacgagtttaaaagaaatttaaaaaggctagaattagcaattgaagaaataagcatatgttctatctcaggaccagttggaacatatgggagcatagatccaagagtagaaaaatatgttgcaaaaaaacttaaactgaaatgtgaagatgtttccactcaaatcattccaagagatagacatgctttctttttttcaatacttgggattattggtagttcaattgaacgttttgcagttgaaataagacacctacaaagaactgaattattagaagttgaagaaagatttgatccaaaacaaaaaggatcatctgctatgcctcataaaagaaaccccattttaagtgaaaatttaactgggctagcaagatatataaggagtgcagttattccatcaatggaaaatattgttttatggcatgaaagagacataagtcactcaagtgtagagagaatttttgctccagatattactattgctttagatttttcacttaacagactcaacgaagttgttaaaactatgaaagtctatcctcaaaacatgaaaaaaaatattaatttgcttgatggactacataatagtcaaaaactacttttaaaattaacacaaaagggcctttcaagacaattggcctactcaatagtccaaaaaaatgcaatgcatgcttggagtaacaaaaaaagttttattgatatattaaaaaaagataaaaaattacttaagtatatatctattcatgagttaagagaacttttagaaaccaatagcaatagtaaaatagattggatttttaaaaataagcttaaatagt

SEQ ID NO: 288405 - DNA, 1285 bp, Unknown
  Bacterial polypeptide expressing nucleotide sequence isolated from the Sargasso Sea
atgataaaaagatacgaagtaaaagaaatagttgatatatggagtcaagaaaacaagttaagcacttggaagaaagttgaatcctctgttacaaaaagtcttgaagaggaaggtattgtgcctaaaggtttgtcagaaaaaatacttgatgcaaatgtaaccgtaaaagaagttgaagctcgagaaaaagtaacaaaccatgacttagcttcatttgttgacatattacaagataaagtaaatgaagattccgaatggatacattacggcctaactagttcagacgtagttgatacatcaaatagtttattaattttagaatcattagatttcctaataggaaaagttgatgaattaatcagtactttgaagaatcttgcgataaaagaaaaagataccaaaataatcgggagaacccatggcgtatttgcagaagtaactttccttggaaatataatttcaaactggttgctggagatacatcgaaataaagaacgtcttgaaagagcaaaagaaaatattagcatcggaaagctaagtggagttgttggtaactacaccataattaacagtgatattgaaaaaaaatctttagagactttaaatcttaagccagagctatttgcttctcagattgttagccgtgatagatacgctgaagtaatcagctgtattggaatgcttgcaagttcctatgatcgtatagctataaatcttagaggttatcaacgttcagaggtgagtgaaattcatgagtcattttcaagcgaacaaaaaggttcttctgcaatgccacataaaaaaaatccaattacttctgagagaatatcaggaatttcaagaatcctcagaggttatgttgtaagtgcgcttgaaaatatatctctttggcatgaaagagatatatcaaattcatcagtagaaagaatcatttttccagatagttttaatctcatttgtttttcaacaattgagatggaagagctattcaaaaatatcaacattaatcatgaaaaaataaattcaaatattaattcagcaaaagtgagtttgctaactcaatcttttctatctcatttagtaactaaagggattgaaagggatgaagcatatagatttttgcaatctcaatcatttgaaatcgataacttagattcttatataaaaaatatttcaacaaattttgaggaagttgaagaaaaagaattacaggaaattagaaaaagttttctttctgagaaaaccaacaaaaattttgaagaaaaaataaattctgttgtttaaa

SEQ ID NO: 288406 - DNA, 1177 bp, Unknown
  Bacterial polypeptide expressing nucleotide sequence isolated from the Sargasso Sea
atgataccacgttactcgcgccccgaaatggttgatatatggtcaccaagcacgaagtttaaaatatggtacgaaattgaggcatatgcatgcgatgcaatggccaaaataggaataataccggctgaaaatgcagaagcagtatggaaagccaaagatgtcgaatttgatgtttctcgaatagatgaaattgaagcgacgacaaagcacgatgtaattgcattcttaactcacttagctgaacacatcggaagtgaggaagctcgttttgtgcatcaaggaatgacaagttctgatgtgctagatacttgtctaaatattcaattagttcgggcgagcaaccttttattgcaaaatcttgatgatcttcttcgcgcgttaaaaataagagctgaagagcataagatgaccgttagaataggaagaagccacggtatacacgccgaaccgacaactatggggctcacttttgccagattttatgcagaaatgaaaagaaacaaaggtcgtttagaaacagcaaaaaatgaaatagcaactggcgccatttctggtgcagtaggtacatttgccaatattgatcccttcattgaagaatacgtctgtgaaaagttggaactcaatcctgaaccgatatcaacgcaagttataccacgggataggcacgcggcattctttgcgactttgggagttattgctagctctatcgaaaacattgcaacagaaattaggcatatgcaacgaaccgaggttttagaggccgaggaatatttttcaaagggtcaaaaaggctcttcggcaatgccacacaaaagaaatccagttttaactgaaaatctcactggtctttcacgtcttgtcagaatggtagttataccagcaatggaaaatgttactctatggcatgaacgggatatcagtcacagttctgtagaaagaaatataggccccgatgctacagtaactttagattttgccttagcccgcttaacatctgtgattaagaaattagtagtgtaccctgacaatatgataaaaaatatgaataaatttaaggggttgattatgtcacagcgtgttctgcttgccttaacgcaagctggtcttagtcgcgaggatgcatataaattggtacaaagaaacgcgatgaaagttgggaagagggaaaagacttcaa

SEQ ID NO: 288407 - DNA, 1342 bp, Unknown
  Bacterial polypeptide expressing nucleotide sequence isolated from the Sargasso Sea
aatgaacaatagcatttcaccgctagatggtcgctattcttctgacatagtagatcttataccttattttagcgagatggccttgatgcgctatcgattagaaattgaaatcgaatatctgattaagctatcaaatgaaagggcgataaaagagcttcagcctatttcaaataagcaaaagaaggaattacaaaaaatttatttgggttttgatgttaaagatgcaaaaaggattaaaaaaattgaaaagacaacaaatcatgatgtaaaagcaattgaatatttcattcgtgaaaaagttaataaatctctacacccatggattcattttgcgctaacatcagaagatataaataacttatcctatacattgatgtggaaaaatgcactagaaaaagtgtttagccctattttaacatcgctcaatgatgaaataaaaaaattagccatcaaatatgatgcagcttcaatgctatcaatgacccatggccaacctgctacaccaacgacatttggaaaggaattagcagtattctacagcaggcttaatcgccaagccaatcagataaataagcacttatttcttggcaaattcggcggtgccacaggaacctggtccacacatcatacaacatacccaaaagtaaattggttacaatttgcaaaaaaattcattgcctcttttgggcttgagcccaatttaattaccactcaaattgaaccacatgattcattagcagaaagctatcaccaaattattcgtgtcaattcaatattgactgatctttgcagagatttttggtactatatatcaaggggtattcttgaacaaaaaaaggttaaaggcgaagttggctcttctgctatgccccataaaataaatcctattcaatttgaaaatgctgaaggaaatatgggaatatcaaatgcacttttaaatcatctcgccacaaagcttcctgtttctagaatgcaaagagatctcagcgattcaacagtattgagaaatcaaggtgttgctatgggccatagcgttttagctatgaaaaatattttaaaagggcttaagagaattagaattaatcaaccccaattgaatgctgaattaaataatcattgggaagttttagccgaagccattcaaacaattttacgcaaaaatagcaatcaagatgcctatgaaaaattaaaagaactaacaagaggtcataatattaatcaaaaatcactggcttcttttataatggaccttgatatttctcaagctgaaaaaaagcgattgcttaaattgacacctcatgattataccggacttgcatcaaaaattgttaggttgaaatag

SEQ ID NO: 288408 - DNA, 1300 bp, Unknown
  Bacterial polypeptide expressing nucleotide sequence isolated from the Sargasso Sea
aatgattgagagatattcaagagaagaaataaaaaaaatttggaacgataagaataaatattctatttggcttgatattgagatagctgcagctgaagctatggaaaaattaaaaattatcccaaaaggtgtttctaagaaagtcaaatcaagggcaaagattgatgtacaaagaattttaaaaattgaagaaaaggttaagcatgatgtaattgcatttttaacttcaatatctgaaaaggtcggaaaagatgcaagatatcttcataaaggtatgacatcatctgatgttttggatacatgttttaacctacagttaaaacaatcaggagaaattttattaaaggatattaatcaattgttaatttctattaaacgccaagctttaaagcataagcatactttatgtattggcagaagccacggcatccacgccgaaccaattacttttggtcttaaaatgttaaccttttatcaagaatttttgagaaataagaaaagattagaaaactctattaaagaaatttctacatgcgctatttccggtgctgtagggacttttgcaaatgtagatccaaaagtagagagatacgtcgctaaaaaacttaaacttaatgtagagccaatttctacacaaataataccaagagataggcatgcccaatacttttcaactcttggtatcattgcaagttctattgaaagatttgccactgagataagacatttgcaaaggacagaggttttagaagttgaggaattttttggaaaaaaacaaaaaggttcttcggcaatgcctcacaaaaaaaatcctattcttagtgaaaatctaacaggtttagcaaggttaatacgatcatccactattcctgcattagaaaacgtttctttatggcacgaaagagatatttcacattcagctgtagagagaaatattggtccagatgcaacaatcgctttagactttgcattagttaggctatctaacttaattaaagatttaaatatttacccaaaaaaaatgcaaaataatttaaatctcactaacggtatattcttttcacagagggttttacttgagctaactaatgttggtttcacaagagaggaggcatatagaattgttcaaaaaaatgctttaaatgcttggaaagaaaatacttctttttataataaaattctctcagataaaaaaattaacaacaaaatatctgttaataaactgaaaaaattatttaattttagttatcatactaaaagaattaatataatttttggtagatgtctgaaaaaaagataa

SEQ ID NO: 288409 - DNA, 1102 bp, Unknown
  Bacterial polypeptide expressing nucleotide sequence isolated from the Sargasso Sea
ttgaagacaaatcatgatgtaaaagcagtggaatacttcatcaaatataaaatcaagaatacaccaatggctaaatacagcgaatatgttcacttttgttgtacatcagaagatatcaacaatgttgcttatgctcttatgatgtctgaggcaattaaacatattgattttaaaataagagaaattactgataatcttaaaaaaaatgttaaaaaatattctgccaaagccatgttatcttatactcatggtcaaccagctactccaacaacaatgggtaaagaatttttaattttctactcaagaattaatgaattaagagatcaactactaaaaattgatattaaatgcaaaatgaatggtgcgaccggtaattactctgctcatgatctgtgctttccaaggattaactggccgaattttaccaaaaaatttataaggagacttaagttaaaacaaaatagttttactacacaaattgaatctcatgattatatagctgaaatatgtatgaaaattagtcatatcaattctgttatgattggattaacacaagatatatggacttacatctctaaaaattattttattcaaaagaatatcaaaggagagattgggtcatccacaatgccgcacaagattaatcctatcaattttgaaaatgccgaaggcaacctcggcttagctaatgctattttcaatcatttatcaagtaaattagtaatttctagaatgcaaagagacctttcagattcaactgtattgagaaatataggtgtaggctttggttattcagtcgttgcatatataaatattattaaaggtattaaaaaaatatctttgaatgaaattaagatgaaagaagatcttgaaaatagttgggaaatattagctgaaccaattcaaatgattgcaagaaaatataatattccaaattcgtatgagctgcttaaggatgcatcaagaggtaaaaaaatttcgaaaactgagttacacaacataatcagtaagttaaatatacctgagcatgaaaaagataaactattcggcttgacgcctacaaaatatatcggtctttcctctaaactatgcaatgggtaat

SEQ ID NO: 288410 - DNA, 1294 bp, Unknown
  Bacterial polypeptide expressing nucleotide sequence isolated from the Sargasso Sea
aatgatagaaagatattctagaaaagaacttaaagatatttggtccgaagagaataaatacaaaatatggttagaagtagaaattgctgcagcagaggcaatggaaaaattcaaaataataccaaaaggagtttcttcgattgttaaaaaaaaaggcaaaattaaagtcaaaagaatccacgatatagaagcaaaggttaaacatgatgtaattgcatttttaacttcaattactgaacaggcaggtatcaaagctaggtatcttcatcagggcatgacctcatccgatgtattggacacaagttttaatattcagcttatgcaatcaggtaaaattatattaaaagatatagacaaaattttaattgttttaaaaagacaagctaaaaaatataaaatgactccctgcattggaagaagtcatggaattcatgctgaaccaataacgtttggtttaaaattagcttcattttatgaggaatttaaaagaaataaaaaaagacttaaagatgctatagaaaatatatctacttgtgcaatttctggagcggttggcacatttgcaaacatcagtcctaaaattgaagtttatgtagctaaaaaattaaaactaagaccagaaccaatatcaactcaaattatacctagagacagacatgctcattattttactacactagggattatttcaggatctatagagagagttgcaacagaaataagacatttacaaagatctgaagtttacgaactacaggaatacttttctaaagatcaaaagggttcctctgcaatgccccataaaaaaaatcctgttctttcagaaaacctaactggacttgcaagaattgtaagaggtcatgtaatacctgcattagaaaatatttcattgtggcacgaaagagatatttctcattcaagtgttgaaagaagtattggtcctgatgcaaacattactttagattttgcattggtaagattaagtaatctacttgataaaatggtcgtgtatccaaaaaaaatgttagaaaatttaaatataacaagaggtttagttttttcgcaagaggtaatgcttgaattaactaaaacaggcatgtctagagaaaaagcttataagttagttcaaggacacgctaagaaaagcatatctaatcatataaatttaatagagttattaaaaaaagataaaaacgttacaaacagaatttcagaaaataaaattaataaaatttttacttataaaaaacattttaagaacgttaattatatatttaatagggtttttagataa

SEQ ID NO: 288411 - DNA, 991 bp, Unknown
  Bacterial polypeptide expressing nucleotide sequence isolated from the Sargasso Sea
catgttgcgagacggtgttgcgaccttgaagcccgagatggagaagatggtggatgcgatcgcggccatgggcgttgaacacgcggcgacgccgatgatgagtcgcacgcacggtcagccggcgtcgccgacgacgctcggaaaggagatggcgaatgtcgcctatcgcctggctcgtcaagtcaagcaactcgattccattccgttgtacggtaaaatggccggtgccgtcggcaactacaatgcgcacatgtccgcctacccgaacgtcgattggcaagcggtcgcggagaagtttgtcaccggtttgggactcgacttcaacccatacgtgacgcaaattgaaccgcacgactacatggcggaactcttcgcctgcatcgagcgtttcaacaccatcacgctcgacttcgatcgcgacatctggtcgtacatctccatcggttatttcaagcaaaagacgatcgccggcgaagttggctcctccacgatgcctcacaaggtgaacccgattgactttgaaaactccgagggcaacgtcggcttggcgaacgccgtgttcgcgcacctcgccgccaagctcccggtgtctcgctggcagcgggatttgaccgattccaccgtcttgcgtaacatgggcgttggtttcgggtactccatcttggcgtaccaatccacccttcgcggtattggtaagctcgaagtgaacgcgcaagcgatggcggacgatttggacgtcaattgggaagtgctcgcggagccgattcaaaccgtcatgcgccgatacgccgtcgaaaaaccgtacgagaagctcaaggagctcacacgcggtcgacgcgtcgacgctgaaggtatgcgcgaattcgtgtccaagctcgacattccggatgaaggcaaggctggtttgctcgcgatgacgccggcgtcgtacatcggtaacgccacggcacaggcgaaggatatccttaacaagttgaaggagatcaagtaa

SEQ ID NO: 288412 - DNA, 1339 bp, Unknown
  Bacterial polypeptide expressing nucleotide sequence isolated from the Sargasso Sea
catgaaaaataatcctcttaacgctatatccccaattgatggtagatattatagccaaactcattttcttgatgaatttttttcagaaaaagcattgattaggtatagattaagggttgaggttgagtattttatcaaactaacagagacagatataagtcagcttaaggattggaacaaaaataataattccaaattaagagatatttatatcaactttgatgactctgatgctattaaagtaaaggaaattgaaaaaacaacaaatcatgatgtgaaggcagttgagtattttttaaaagaaaagtttgagctattagaacttgaaaaatattctgaatttattcattttggtctaacatcccaagatataaacaatacagctataccactttcattaaaagaatattttaatagctattatgatttattaggcaatctcatagagaaccttaaaaataagtcaaatgaatataaagatattgcaatgttggctagaacacatggtcaacctgcatctccaacaagacttggaaaagaatttgaagtgtttctagttcgtttaaaagaacaaataaaacatctagaaaagattcctttttgtgcaaaatttggaggtgcgaccggtaattttaatgcacaccatttagcatatccaaaaattgattggaaaaaattttctcaatcactagtcggtaatttaggtttggaattgtcctacccaactacacaaatagagcattacgataatttagctgcaatatttgataatctaaaaagaattaattcgattataattgatttaaatagagatatgtggctatatatatcaatggattatttcaaacaaaaaattaaaaaaggtgaaatcggttcttctgccatgccacacaaggtcaatccaattgactttgaaaattcggaaggtaatttaggggtcgctaattcaatatttaatcatttatcatcaaaattacctatatctagattacaaagagatctaactgacagtacagttttaagaaatattggtgtccctatagctcatactgttattggaataaactctacgataaaaggaatcaaaaaactattagtaaatactgaaaaaataaattcagacttggaaatgaactggattgtaatagcagaaggaattcaaacaattctaagaagagagggatttccaaaaccatatgaggcattaaaagaactaacgaggaataatcaagaaattaataaaaaaacatttattgactttattgaaaaattggaaattagtgatgaaacaaaaaaagaactgaagaaaataagtccatttaattatacagggatttga

SEQ ID NO: 288413 - DNA, 817 bp, Unknown
  Bacterial polypeptide expressing nucleotide sequence isolated from the Sargasso Sea
agaattaaaagaaataaattaagattaaaagatgcaatagaaaatgtatcaacatgtgcaatttcaggtgcagtaggaacatttgcaaatatagatcctaaaattgaaacctatgttgcaaaaaaattaaaattgaaagctgagcccatttcaactcaaattataccaagagatagacatgcacattattttgcagttcttgggattattgctggatctgttgaaagagttgcaacagaaataagacatttacaaagatctgaagtttatgaattacaagaatacttttcgaaagatcaaaaagggtcatctgctatgcctcataaaaaaaatccaatattaagtgaaaatcttacaggacttgcaagaatggtgagaagctatgtaattccagctttagaaaatatttctttgtggcatgaaagagatatttctcattctagtgttgaaagaaatattggtccagacgcaaatataactttagattttgctttagttcggttgtcaggaattttagagaaaatgattgtttatccaaaaactatgataaagaatttaaacttaacaagaggtcttgttttttctcaagaagtaatgttagaacttactaaatcaggtattgctagagagaaagcgtatagattggttcagtctcatgcaaaagctagttttgcaaagaatacaaacttattaacacttttaaaaagtgataaatcgataactagtaaaataagtgaaaaaagattagataaaatttttacatatgacaaacacttaaaaaatgtaaattatatatttaaaagagtatttaaataat

SEQ ID NO: 288414 - DNA, 850 bp, Unknown
  Bacterial polypeptide expressing nucleotide sequence isolated from the Sargasso Sea
atggggcttacttttgccagattttacgcagaaatgaaaagaaacaaaagccgattagaaacggcaaaaaatgaaatagcaactggcgctatttccggtgcagttgggacattcgccaatattgatcccttcatcgaagagtacgtatgtgacaagttggggctcaatcctgaaccaatatcaacccaaattataccacgagatagacacgcggcattctttgccactttaggagttgttgctagctctatcgaaaacattgcaacagaaattagacatatgcaaagaactgagattttagaagcagaagaatatttttcaaaggggcaaaaaggctcttcggcaatgccacacaaaagaaatccagtactaaccgaaaacctaacaggtctttcgcgtctcgtgagaatggcagttataccagcaatggaaaatgtaacgctttggcatgaacgggacatcagtcacagctctgtagaaagaaatataggtccagatgcgacagtaactttagattttgccttggcccgtttaacatctgttattaaaaaattggtaatatacccagataatatgataaaaaatatgaataaatttagaggcctgattatgtctcaacgtgttctgcttgccctgacgcaagctggtctcagtcgcgaggatgcatataaattggtacaaagaaacgcgatgaaagtttgggaagagggaaaagacttcaaaacagagcttatcaatgatccagaagtctcgaaggtcctaacaaaagatgaaattgatgaaaaatttgatcttggatatcatacaaaacatgtagatatgattttccaaagggtctttgctaactaaa

SEQ ID NO: 288415 - DNA, 1103 bp, Unknown
  Bacterial polypeptide expressing nucleotide sequence isolated from the Sargasso Sea
agtgaaacacgatataattgcttttttgacgtctgttacagaaaaaagtggcgcagaagcaaggtatttacataaaggtatgacttcctctgacgttttggatacttgttttaatattcaattaaaacagtctggggaaatattattaaatgatattaacatattacttaaatcaattaaaaaacaatctttaaaacataaatacactttgtgtattggaagaagtcatgggatacacgctgaacctataacttttggattaaaaatgttaaccttttatcaagaatttttaaggaataaaaaaagattaaaaaattctatagaggaaatatctacttgtgcaatttctggagctgttggcacatttgctaatatagatccgagagtagagagttatgttgcaaaaagattaaagctaaaagttgaacctatttcaacacaaataatcccaagagatagacatgctcaatttttttcaactttaggtattatagcaagttcaatagaaaggtttgctattgagattagacatcttcagcgaacagaagttttagaagttgaagaattttttggtaaaaaacaaaaaggatcttcagcaatgccgcataaaagaaatccaattttgagcgaaaatttaactggtttagcaagattaatcagatcaagcgttgtaccagcattggaaaatgttgccttatggcatgaaagagatatttctcattcagctgttgaacgaaatattggtccagatgctactacagctttagattttgcattgagtagattaaataatgttgtaaaaaatttaaatatttatcctaataatatgaaaaaaaatttagatattacaaatggtatttttttttcacaaagggtgcttttagaattaactaattcaggttttacaagagaagattcatacaaaattgttcagaaaaatgccatgcaagcatggaaagaaaattcatctttttataacaaaattatctctgataaaaaaataacaaagaaaatacctgttaataaacttaaaaaactatttaattttagttaccatacaaaaaaaattaatataattttcaatagaagccttaaaaattaat

SEQ ID NO: 288416 - DNA, 904 bp, Unknown
  Bacterial polypeptide expressing nucleotide sequence isolated from the Sargasso Sea
aatggaattatcagcattaaccgccatctcccctgtagatggccgctatggctcaaaagccagcgagctgcgtgagttttttagtgaatatggtttaatcaaattccgggtgactgtggaagtgcgttggttgcaaaaattagcagccactgcagctatcactgaagttccggctttatcagacagtgccaacgcgctgttaaacgcaattgtcgacaatttcagccttgctgatgcacagcgtgtcaaagacatcgagcgcaccaccaaccacgacgtcaaagcggttgagtatttactcaaagaaaaagtagcgggccatgctgaattagcagcggtcagtgaatttattcactttgcctgtacctctgaagatatcaataacctgtcacacggtttaatgttaagtgcagcccgtgatgaagtgctgttgccactgtgcgatcagttattaaacgaaatcaaagctttagcccataagtacaaagctatccctatgatggctcgtactcacggtcaaccagcctctcctaccactttaggtaaagagatggcgaacgtgtacatgcgtttaaaacgtcagcgtgagcaaattgccaaggtagaactgctaggtaaaatcaatggcgctgtaggtaactacaatgcgcatttatctgcctacccaaacctgaactggcatcagtttgcagaagagttcgtgacaagcttaggtttaagctggaacccgtacaccactcagattgaaccacatgactatattgccgagctgtttgacgccatcgcgcgttttaacaccatcctgctcgacttcgaccgtgatgtctggggttatatagctttaggtcactttaagcagcgcactattgccggtgaaattggctcgtccacctatgccgcataa

SEQ ID NO: 288417 - DNA, 1273 bp, Unknown
  Bacterial polypeptide expressing nucleotide sequence isolated from the Sargasso Sea
aaagaacttgtcagtatttggtctgaagaaaacaaatataaaatttggctagatgtagaaattgctgcagctgaggcaatggaaaaatataaaattattcctaaaggagttgcttcattagtaaaaaaaaagggtaaaatcaaagttaaaagaattcatgatatagaggcaaaagttaagcatgatgtaattgcttttttaacatcaattacagaacaagccggtcttaaagcaagatatcttcatcaaggcatgacctcatctgatattttagatacaactttaaatgttcaattggttcaatcaggaaacattttattaagagatattgataaaattttatctgttttaaaaaaacaggcaaaaaagtataaattaactccttgcattggaagaagtcatggaattcatgcggaaccaattacttttggactaaaattagcttcattttatgaagaatttaaaagaaataaattaagattaaaagatgcaatagaaaatgtatcaacatgtgcaatttcaggagcagtaggaacgtttgcaaatataaatcctaaagtcgaaacttatgttgcaaaaaaattaaaattaaaagctgaaccaatttcaactcaaattattccaagagatagacatgcgcattatttttcagtacttgggattattgctggaactgttgaaagagttgcaacagaaataaggcatttacaaagatcagaagtttatgaattacaagaatacttttcaaaagatcaaaaaggctcatctgctatgcctcataaaaaaaatccaatattaagtgaaaatcttacaggacttgcaagaatggtgagaagctatgtagttccagctttagaaaatatttctttatggcatgaaagagatatttctcactctagtgttgaaagaaatattggtccagatgcaaatataactttagattttgctttagttagactgtcaggaattttagagaaaatgattgtttatccaaaaacgatgataaaaaatttaaacttaacaagaggtcttgttttttctcaagaggtaatgttagaacttactaaatcaggtatcgctagagagaaagcgtatagattggttcagtctcatgcaaaagctagttttgcaaaaaatacaaacctattaacacttttaaaaagtgataaatcaatcactagcaaaataagtgaaaaaagattagataaaatctttacatatgacaaacatttaaaaaatgtaaattatatatttaaaagagtattcaaataat

SEQ ID NO: 288418 - DNA, 925 bp, Unknown
  Bacterial polypeptide expressing nucleotide sequence isolated from the Sargasso Sea
ctaaaaaaaaaggctaaaaaatataaatttacaccttgtatgggaagaagccatgggatacatgctgagccaacaacatttggtttaaaattagccacatattacgaagaatttaaaaggaatagaaaaagacttttgaatgcaattgatgaaatatcaacatgtgcaatctcaggagctgttggaacttttgcaaatatagatccaaaggttgaaaaaatggtggcaaaaaaattaaaattaaatgcagaacctatctcaacacaaataatacccagggatagacatgcatattatttttcggttttaggtataattgctgggtcaatagaaagattatcaattgaaataagacacctacaaagaactgaaatatttgaacttcaagaatatttttctaaagatcaaaaaggttcgtctgctatgcctcataaaaaaaatccgatcttaagtgaaaatttaacaggactatcgagaatggttagaagttatgtctcgcctgccttagaaaatattgctctttggcatgaaagagatatttctcattcaagcgttgaaagaaatattgctccagacgcaaatattacattggattttgcattagtaagattggccaacatacttaataacattgttgtttatccacaaagaatgctatcaaacattgagatgaccaaaggattggttttttcacaagaattaatgttggagttgataaactcaggaatccctagagaaaaagcatacagaattattcaaaaacattctaaagaaagtttttcaaaaaatattcatttgttagaattgataaagaaagataaatttataaataaaaaaattccagatagtaaattaaaaaaaatatttagttactcaaaacattttaaaaatgtaaattacattttcagaagagtatttaattaat

SEQ ID NO: 288419 - DNA, 1090 bp, Unknown
  Bacterial polypeptide expressing nucleotide sequence isolated from the Sargasso Sea
atgatagatagatactccagaaaagagatgaaagctatttgggatgaggagaataaatttaacatttggcttaaaattgaattagctgccgctgaggccatggaaaagcttaaaattattccgagaggagtggtaaagaaagtaaaatcaaaaagtaaaatcaatgtaaagagaattttagaaattgaaaaaaatgttaagcatgacgtgattgcttttctaacatcaataactgaaagagcaggtaaagaggccagatatctgcataaaggtatgacctcttcagatgtattagatacctgctttaatcttcaactcaaacaatctggaaaaatattacttaaagatatcgatattttactaaaatcaataaaaaaacaatctctaaaacacaaatttactctatgtataggtcgaagtcatggaatacatgcagaaccaattacatttggattaaaactgttaaccttttatcaagaatttattagaaacaaaaaaagattacaaacagcaataaaagaaatatcaacatgcgcgatatccggagcagttggaactttcgcaaatatagatcctagagtagaacagcatgttgcaaaaaaattaaatctttcgatagagcctatatcaactcaaattattcctagagatagacatgcacaatactttactactctagctattattgctagttctattgagagatttgcaattgaaataagacatttacaaagaactgaagttttagaagtagaagagttctttggaaaaaaacaaaaaggatcatctgcgatgccacataaaaggaacccagttttaagtgagaatctaagtggactagctcggttgattagagcaaatgtaataccagcattagaaaatattgccttatggcatgaaagagatatctctcactcaagcgttgaaagaaatataggcccagactcaactatagcactagatttcgctctaaatagattaaatggaattgtccaaaacctaaacatatacccaaaaaatatgattaagaacttgaatttaacaaatgggctatttttttcacaaagagtgatgattgaattaaccaata

SEQ ID NO: 288420 - DNA, 926 bp, Unknown
  Bacterial polypeptide expressing nucleotide sequence isolated from the Sargasso Sea
aatgatacctagatataatagacctaaaattgaaaagatttggtcattagaaaataaatttacaatttggacagaaattgagtgtttgattgcagaaaaacaagcgatgctcggcgttattcctaaaaaagctgcaaaagaaataagaaataaagcaaaattcaatgttaaagaaatagaaaaaattgaaaaagaaacaaaacatgatgttgttgcttatattaataatgtaagcaaatatattggcgactcgtcaaagtattttcattttggtgtaacttccagtgatattattgatacttcattttctgtacaacttaagcaaacctctgaaataataagaaaaagtttagtagagtgtattcaaagtctaaaaatcaaatcaaaaaaatataaagacacattaatgattggaagaagtcatgggatacatgctgaacctattacttttggattaaaattatcttccttttattttgagtttaaaagaaatttagaaagacttgatcaggcgatcaacgaaatatctgtttgtgctatttctggacctgttggaacatttaattctatagacccacgagttcaagattatgtagcaaaaaaacttaaactaaattctgaagatgtatcaactcaagtaattccaagagataggcatgcgtattttttctcagtactaggaattttagcatcttctattgagaggtttgcagtggaaattcgaaatttacaaaaaacagaggtattagaagttgaagaaagtttttcttctaagcaaaagggttcttctgctatgcctcacaaacgtaacccagtattaagtgagaacttaacaggtatcgcacgttatattagaagtggtgtaataccttcactagaaaatgttgtactttggcacgagagagatattagtcattctagtgttg

SEQ ID NO: 288421 - DNA, 676 bp, Unknown
  Bacterial polypeptide expressing nucleotide sequence isolated from the Sargasso Sea
aaacctgaattttttgcttcacagattgtaagtcgtgatcgttatgcagaagtaataattgctataggaatgcttggaagttgttttgatcgtatatcacaaaatcttcgcgggtatcaacgatcagaagttggggagatctttgaatctttttcaaaagaacaaaagggctcttcagcaatgcctcataaaaaaaatccaataacttctgagagagtttcaggaatatcaagaatcttaagaggttacgttatcacttctttagaaaatatctctctatggcacgaaagagatatctcaaattcttcagtagaaagaattatatttcctgatggtttcaacctcatttcctttgcaactattgaaatggaaaagttgtttagcaacattcaaataaaccacgaaaagattaattccaatattgacttagcaaaagtaagtatattaactcaggcttgcctttcacatctcattactaaaggagttgatagagatgaagcatatagatttatacaatcacaatcatttgaaattgatgatctagatgattacttaactactctttcaaaaaattttgagaatgtttcaattgaagaattaaaaagcataacaaatgaaattctctctgaaaaaacaaatgagaactttgaggaaaaaataaattcaattgtataag

SEQ ID NO: 288422 - DNA, 634 bp, Unknown
  Bacterial polypeptide expressing nucleotide sequence isolated from the Sargasso Sea
ttattatttttcagttttaggaattatagcaggatcaattgaaagagtttcaattgaaattagacatttacaaagaactgaagtttatgaattgcaggaatttttttcaaaaaaacaaaaaggctcaagtgcaatgccacataaaaaaaatccaatattgtctgaaaacttaacaggattagcaagaatggttagaagtcatactattccagcactagaaaatattgccctttggcatgaaagggatatttcacattcaagcgttgagagaaatattggtccagatgctaatataactttagattttgcattaataaggttagcaaacttattagacaagatgatcgtctatccaaaaaaaatgcttaataaccttaatattacaaaaggtaccattttctcccaagagctgatgttagaactaacaaaatcaggtttgactagagaaaactcttatagattagttcaagcacatgccaaaaaatgcatagcagataatcttaatctttttgatgttgtgatgagtgacaaaagcattacatctaggatatcaagcaagaaaatgaaaaaaatatttgattactcttcacactttaagaatgttaatttaatttttaatagggtcttcaaataa

SEQ ID NO: 288423 - DNA, 1294 bp, Unknown
  Bacterial polypeptide expressing nucleotide sequence isolated from the Sargasso Sea
aatgattaatagatattccagaaaagaattaactaatatttggtcagaagaaaataaatataaaatatggcttgatgtggaagttgctgcagctgaaggaatggaaaaactaggacaaattccaaaaggagtagcaagtgctgtaaaaagaaaagctaaaattaacgttaaaagaattcatgctattgaagataaagtcaaacacgatgttatagcttttttaacttctataacggaaaaagttggaataaaagcaagatatttacaccaaggaatgacatcatcagatgttttagatacaagttttaacattcagcttttacaatcaggtaagattttagttaaagatattgatcaaatattaaaaattttaaaatcaaaagctaaaaaatataaattcaccccatgtattggcagaagccacggtattcatgcagaaccaataacttttggtttaaaactagcatcttattatgaagaatttaaaagaaatagaaaaagattaataagtgcaattgatgaaatctcaacatgcgcaatatcaggggctgttggtacatttgccaatattaattctaaagttgaacaacatgttgcaaaaaaacttaggttaaaagttgagcctatatcaacacaaattattccaagagatagacatgcgtattatttttctgtattaggaattattgcgggatcaatagaaagagttgcaactgagattagacacttacaaagaacagaagtttatgaattacaggaattcttttcaaaaaaacaaaaaggttcctctgcaatgccgcataagaaaaacccaatcttaactgaaaatcttacagggttagcaagaatggtgagaagctatactatccccgcattagaaaacattgcactatggcacgaaagagatatctcgcattcaagtgttgaaagaaatataggaccggatgcaaatataacaatcgattttgctttagtaagactgggcaatgttttgaataaaatgatagtttatccaaaaaagatgcttaataatttaaatatcactaaaggtactattttctcccaagagttaatgttagagctaaccaaatccggtctaagtcgagaaaaatcttacagattaatacaatcgcatgctaaaaaatgcatagcagataatcttaatcttttagatgttgtaatgaatgataaaaatattacatctagaattccaattaaaaagatgaaaaaaatatttgattattcctcacactttaaaaatgtaaatttaatatttaatagagtttttaaataa

SEQ ID NO: 288424 - DNA, 1229 bp, Unknown
  Bacterial polypeptide expressing nucleotide sequence isolated from the Sargasso Sea
aatgattgaaagatattcaagagaagaaataaaaaatatctggttagataaaaatagatatgctctttggcttaaaattgaaattgctgcggctgaggcaatggaaaaatataaaataattccgaaaggaatagtaagaaaagttaaagctaagtcaaaaattgatgttgaaaaaatattaaaagtagaaggcaaagtaagacatgatgtaattgcttttttaacaacgcttattgagaaagtcggtaatgaagctagttttttacataaagggatgacttcatctgatgttttagacacatgctttaatattcaattaagagactcgggattaattatatcaaaagaaatcgaaattttattacagtctataaaaaaacaagcaataaaacataaatacactttgtgtataggaagaagccacggaatacatgcggagcccacaacattcggtttaaaacttctaactttttataaagaattttcaagaaatcaaaaaagattaaataacgcaataaaagaaatttcaacttgtgcaatatctggtgccgttggaacatttgccaacgtagatcctaaagttgaaaaatatgtagcaagaaaattaaatttatttattgaaccaatatctacacagataataccaagagatagacatgcttattttttttctgtacttggtgttatagcgagctcaatagaaagatttgcggttgaaataagacacttgcaaagaactgagatatctgaggtcgaagaattttttaataaaaaacagatgggatcatcagctatgccgcataaaaaaaatccagttttgactgaaaatcttactggtctagcaagacttgttagagcgtctgtgatacctgctttagagaacgtagcactttggcatgaaagagatatatctcactcaagtgttgaaagaaatattggtcctgatgcaactatcacattagactttgcattgaataggctaaataacgtggtcaaatcaatgaaagtaaataaagacaaaatgaaaaaaaatctagatttaactaaaggaatatttttctcacaaagagttttgcttgaattaacatccaagggggttcgaagagataaagcctacagactagttcaaagttgtgcgattcaatccatgcaaaaaaatatcccgttctacgatagtttactaaaagatagatcaataatggacaaaatacctgttaatattttaaaaa

SEQ ID NO: 288425 - DNA, 982 bp, Unknown
  Bacterial polypeptide expressing nucleotide sequence isolated from the Sargasso Sea
atgatcccgcgctattctcgaccagaaatggtcaaaatatggtcaccagaaacaaaattcaaaatttggttcgaaatagaagctcatgcctgtgatgcaatggcgaacttaggattaattcctcaagaaaatgctactgcggtttggaaagcgaaagacgtaaattttgacattgcccgaataaatgaaatcgaagcgacgactaaacatgatgtaatagcctttttaactcatcttgccgaacatattggttcagaagaagcaaggtttgtacatcaaggaatgaccagttcagatgtattggatacatgcttaagtattcaattggtacgagcgtcagatctgctcataaaagatatagagcaactattggctgcactgaagcgaagagcgcttgagcataaaatgactgtgcgtataggcagaagtcatggaattcacgccgaaccaactacgatggggctaacttttgcacgtttctacgccgaaatggatcgaaaccttaaaagaatgtgcgttgcaaaagacgagatttccacaggtgctctatctggtgctgttggaacgttcgctaacttggacccagctgttgaaaagtacgtctgtgaaaaactaggattaactcctgagcctattagcacacagattattcctagagatcgtcatgctgcattttttgccacccttggcataattgcaagttcaatagaaaatattgcaacagagatccgacatatgcagagaacagaagttcttgaggctgaagagtttttttcagaaggtcaaaaaggttcttcagcaatgcctcataaacgcaatccagttctgacagaaaatttaactggcctagcgcgcttaattagaatggccgtagttccagctttagaaaatgtgacactatggcatgaacgcgacatatcacatagctctgtcgagagaaatattgctcccgatactacagtaaatctagattttgccttga

SEQ ID NO: 288426 - DNA, 1221 bp, Unknown
  Bacterial polypeptide expressing nucleotide sequence isolated from the Sargasso Sea
aaattagagaacttcctaaattatcaattaaaaatactccctatctagatgatttagttgataatttttctttaaatgatgctaagagagttaaatctattgaaaaaaggactaatcacgacgtaaaagcgattgaatatttcttaaaagacaaattttctgtaatcaaatctcttaataagtactctgagtttgtgcactttgcatgtacttccgaagatataaataatttgtcatattcactgatgattaaagatgcatccaatttagtttcttctaatgtagatggtctccttaagaatctaaaaagcaaagctaagatgtatgcaaatattgcaatgctatccagaacgcatggacaaactgcttctcctacaactatgggaaaagaatttgctaattttatttatcgcataaatgttataaataaatcgctcaacaaaaccccattaaatggaaagattaatggtgctgtaggcaatttcaatgctcatactgttgcttatcctgaagtaaactgggaactaatctcaaaaaaattcgttaataagctagggttacaattaaatacgcatacaacccaagtagaacctaaagattcaattgcagaactttttttacactatgtaagattaaataatgttttgattgatttaagtagagatatatggggatatatttctttaagttatttcaaacaaaagcttaagaaaggtgaaatagggtcatctactatgcctcataaagttaatccaattgattttgagaatgcagagggcaatttaggcatagccaattctaactttttacatttatccaattcgatagttatatcaagatggcagagagatttaactgactcaaccgtgatgcgaaatataggtctatgctttggacacactaatcttgcattatcctctttaatgaaaggtctaaataaactagagctaaataaaaatcagatagaatccgatcttaataattcatgggaagtcttaacagaagctatccaaacaatatttagaaaatacttagtaaaagatggttatgaaattatgaaagagctatctagaggcaaaaaaatcgtaaaagaagatcttcatattttaatagataaaattgatatacctcttgaagataaagagatgctaaagaatcttactccttcttcttatacaggaattgcaaaagtccttgccaaacgactaaaagaaagttgat

SEQ ID NO: 288427 - DNA, 788 bp, Unknown
  Bacterial polypeptide expressing nucleotide sequence isolated from the Sargasso Sea
tgtgatgctgaaaacaatttccatttgcagtatttcaggagcagttggaacttatgctaatattgatccctctattgaaagttttgtagcaaaaaaacttagacttaagactgaggatgtttcgacacagattattcctagagatagacatgcattctttttcacagctttggcaatgattgcttcttcaattgaaaatttagcaattgaatttagacatcttcacaggagtgaggtaagggaagttgaggaatttttttctaaagatcaaaagggctcttccgcgatgccccataaaaaaaatccagttttaagtgaaaaccttactggtattgcaagagtcattaggtcaagttgtattcctttcatggaaaacatttcactctggcatgaaagagatatctctcactcgtcagttgagagaacactcggacctgatacaatcatattatgtgattttgcactaagtagaatgaataatattgtagaaaatttagtagttgataaaaaaatgatgatctacaaccttgaaaaaactaatggactttttaactcacaaagagttatgctaaagctaattgaaaaaaatatttcaagagaatcagcttataaaattgttcaaaagatagctttaaaagcatggaaagaaaataaaagttttaaaaaattattagaaaaaaataatgaagttaaatctttattgaatgttagagagattaatgaattgtttgatttgaaatattttttaaaaaatattaatgctatttacaaaaaagttcttggatgaa

SEQ ID NO: 288428 - DNA, 979 bp, Unknown
  Bacterial polypeptide expressing nucleotide sequence isolated from the Sargasso Sea
aatgaaaatttgtatttacggcgcaggagcaattggtggttatctgggggcaaaacttactgagataggtgcagatgtaactttaattgctagagggcctcattatcaggctattaagcaagatggactgagattaagaaaagatggcaaagaactagttgtatatccaaagtgtgtagacactgcggaaaaagctggaaagcaagattatatttttgtaactctaaaagctcattcagttccgggttgtcttgatgcatttgaagttcttatgaaagatgacacttcatttgtttggggtgtgaatggtatcccatggtggtatttctacaatcacactaatcctgatttcaaagataaaaaagttacttcagttgatccagatggaagtcaatgggatcgaattggccctgaaaaaattattggctgtatagttaatcccgcatcagaagttatcaaaccaggtgttattcagcacttagagggagataagtttcaacttggagaaataaatggagaggaaacagatagaattaaaaatctttcagagactttagagaaagctggctttcaagcacctgttagacctaatataaaaggtgatatttggttaaaactttttggtaatctttctctgaacccaataagtgcacttacaacatctacacttgtcaaaatttgtagcaacgacgaagtcagagccgttataaaaaatatgatgaatgaagctcatgcaatttctcaaaatttaggaatagacaagccttttgatgttgagagaagaattgatgcagctaaagcagttggcgaacataaaacatcaatgcttcaagatttagaacgcgatagacctatggagattgatgctttaatcacctctgttcaagagcttggaaaaattacaaatgttccaacacctacaattgatacagttcttgctttaaccaaacttagagctaaagaggctaaactatattag

SEQ ID NO: 288429 - DNA, 796 bp, Unknown
  Bacterial polypeptide expressing nucleotide sequence isolated from the Sargasso Sea
ataaatgaacaattaaaaaatttaaagcagataccaaactctgctaaatttgctggtgcagttggaaattttaatgcacataaagttgcatacccaaatattaactggaaaaaatttgcaaagaattttgtagaaaaaaatcttagcttaaactactcctatccaactactcagattgagcattatgattcatttgcatcactttccgataactgcaggagaataaacaatattttactagatatgtgccaagatatatggtcatatatttcacatgattattttcatcaaaaaattgttgataaagaagtagggtcatcagcaatgccacataaagtaaatccaattgattttgaaaatgcagagggtaatattggagttgctaattcaatttttgattttttctcaaataaattaacaagatcaaggcttcaaagggacctatctgacagcacagttttgagaaatgtgggtgttccatttagccatactctgatttcttttgaatcaataattaaagggctgaataagatttatgtaaatcaagaaaaaataaacatagatattgaaaataattggatagttatatctgaagctatacaaacaattttaagaagggagggatttgaagatccgtatgaaataatgaagcaccttacaagaaaaaattctaaattagataaagaatctattcatagatttattgataatttagacgtaaataataatattaaattagaattaaaaaaaataacaccatataactatacaggaattgattatgaaaaaaattaaa

SEQ ID NO: 288430 - DNA, 1021 bp, Unknown
  Bacterial polypeptide expressing nucleotide sequence isolated from the Sargasso Sea
atgacttcatctgatgtagtagacacaagttttaatattcaattagttcagtcaggtagaattatcttaaaagacatagatcaaattttaagagtattaaaaaaacaagctagaaaatataaatttactccttgcataggtcgtagtcatggaattcatgctgagccaattacatttggattaaaattagcttccttttatgaagagtttaaaagaaatagagaaagattagtttatgctatagatcaaatatcaacttgtgcaatttctggggctgttggcacttttgcaaatgtaaaccctaatgttgaaaaacatgttgccaaaaaacttggattaaaagttgaaccaatctctactcaaataattccaagagatcgacatgcattttatttttcaatcttaggtattattgcaggaagtatagaaagagttgctatagaaataagacatttgcaaagatcagaagtttatgagttgcaagaatacttttctaaaagtcaaaagggttcatctgcgatgccccataaaaaaaatccaattttaagtgaaaatttaacaggacttgcaagaatggtaagaagttctgttgtaccagcgcttgaaaatattgcactttggcatgagagagatatttcacattcgagtgttgagagaaatattggtcctgatgcaaatattactttagattttgcacttgcaagattagcgggtgttttagataatatgattgtttatccaaaaaaaatgttagaaaatctaaatcttactaaagggctaattttttctcaagaagtgatgctagaactgacaaaaactggtatctcaagagaaaaatcctataagttagtacaaggatatgcaaaaaaatgttttgctgaaaatttagatttatttaatgttattcagtctgacaagttaataatgagtaaaatttcaatcaaaaagttaaagtctatctttagttattctaaacactttaaaaatgtaaatttaatttttaggcgggtttttaaataat

SEQ ID NO: 288431 - DNA, 754 bp, Unknown
  Bacterial polypeptide expressing nucleotide sequence isolated from the Sargasso Sea
ttttgctcatattttgatccatttgttgaaaattatgtatctaaaaaaatggatttagtacctgaagatgtttcaacacaaattattccaagagacagacatgcaatgtttttttcaacccttgcaataattgcatctagtgttgaacgcttagcaacagaaataagacatattcaaagaactgaagtaagggaagcagaagaatatttctctcaaggtcaaaaaggttcaagtgcaatgccacacaaaagaaatccagtgcttacagaaaatcttactggacttgcaagattagttagatcttcagttataccagctttagaaaatgttacattgtggcatgagcgggatatttctcattcatccgtagaaaggatgattgctcccgatgcaacaataactttagactttgctttacatagactaaacaatgtaattgaaaatttgcttatttatcctgacacaatgttaacaaatttagaaaaacttggtggtcttgttcactcacaacaagtattacttgcactaacacagaaaggtgctagtagagaagatgcctatgaaatggttcaagaaaatgccatgaaagtttgggaaacgccagaacataagagaaaagatgtatacaaaaacttgttaaaaaatgataaaaaagtgattaaataccttagtgaaaaagaaatagatgaattgttcaatttagatcaacattttgttcatgtgaatcatatatttgacagagtttttgactaag

SEQ ID NO: 288432 - DNA, 1047 bp, Unknown
  Bacterial polypeptide expressing nucleotide sequence isolated from the Sargasso Sea
agttcacgcacttcgcgtgcacgtccgaggacatctttaacctctcccacgcgctcatgctccgctccggcgtccagagcgtcgccccgtacatggacgagatcgtcgacgccgtcgccgcgttggcggagaccgaggcggagacgccgatgatgtcccgcacgcacggccagcccgcgagcccgacgacgctgggcaaggagatggcgaacgtcgcgtaccgcctcgcgcgccagcgcgcgcagatggacaaggtgccgctgtacgggaagatggcgggggcggtgggcaactacaacgcgcacatgtcggcgtaccccgacgtggactggcagcgggtcgccgaggagttcgtcaccgggctcgggctgacgtggcagccgtacgtcacgcagatcgagccgcacgactacatggcggagatcttcgccgcggtcgctcggttcaacacgatcgtcctggacctcgatcgcgacgtctgggcgtacatcagcatcgggtacttcaagcagaagaccgtcgccggcgaggtggggagcagcacgatgccgcacaaggtgaacccgatcgacttcgagaactcggaggggaacatcggcctggcgaacgcggtgttcgaacacctgggcgcgaagctgccggtgtccaggtggcagcgcgacctcaccgactccaccgtgctccggaacctcggcgcggggttcgggtactccctcatcgcgtaccagtccacgctcaagggcctcgggaagctcgagaccaacgcgcaggcgatgctcgacgacctcgacgtgaactgggaggtgctcgcggagcccatccagaccgtcatgcgcaggcacgacgtggagaagccgtacgagaagctcaaggagctcacgcgaggccggagggtcgaccgcgacggcatgcgggcattcgtggagaccctggacatcccggacgagagcaaggagaggctcatggagctcaccccggcgacctacatcggaaacgccgtcgcgcaggccaaggacatccgggcgcagatcgccaagatccagtgag

SEQ ID NO: 288433 - DNA, 733 bp, Unknown
  Bacterial polypeptide expressing nucleotide sequence isolated from the Sargasso Sea
tattgatcctagagtagaaaattatgttgcaaaaaaattaaatttagatgttgagccaatatctacacaaattatacctagagatagacatgcttactttttctctgttttaggagttattgctagttctgtagaaagatttgctattgaaataagacatcttcaaagaacagaggtttctgaagttgaagagttttttaataataaacaaatgggatcttctgctatgccacataaaaagaatcctgttcttacagaaaatttaactggtttggcaaggcttgttagagccactgtagttcctgcattagaaaacgtagctctttggcatgaaagagatatttctcactcaagcgttgaaagaaatatagggccggattctactataactttagactttgctcttaacagactaaataacgttgtaaaatcaatgagagtgaataaaaataatatgaaaaaaaatttagaattaactaaaggtatattcttttcacaaagagtattgctggagcttacctcaaaaggaataagaagagataaagcttataaggtagttcaaaaatgcgctattaaatcccttgaaaataatacttctttctatgatagtttattgaaagacaaaataataatggaaaaaatatctgttaataatttaaaaaagttatttgattttggttatcacacaagaaaaattaatgtaatttttaacagagtgttaaaaagaaaatga

SEQ ID NO: 288434 - DNA, 919 bp, Unknown
  Bacterial polypeptide expressing nucleotide sequence isolated from the Sargasso Sea
acgtgcgtttgaaaataaactaactctatgcataggtagaagtcacggcatacatgctgaaattacaacttttggtctcaagttagcaagcttttatgctgaatttaaccgagctttacaaagactgaaatcagtaaagaaagaaatatctatttgcgctatatctggagctgtaggcacatacgcaaatattgacccctttgtagaagaatatgtcgccaaacaatttaatcttaatgttgaaacaatttctactcaaataattccaagagatagacatgcggtttggtttgcaaacttaggtatcattgcttcgtcaattgaaagagtggcaactgaaatcagaaatcttcaaaaaactgaagtaagggaagtcgaagaattttttgaaattggacaaaaagggtcttcagcaatgcctcataaacgtaatcctgttttatcagaaaaccttactggtatttcaagaattattcgttcatatgtcattccttcaatggaaaatattgctttatggcatgaaagagatatatctcattcttctgttgaacgcgttttagctccagacattagcattgctctagatttttctttggcgaggctgacaggcataatagaaaatctaatagtttatcctgaaaacatgataaagaatttaagacaattaaaaggtttaattcattctcaacaagttttattaaaacttacacaaagtggatttagccgtgaggaagcctatttgattgtccaaaatgaagctatgaaagtatggaataatcaaggcaatttctttgatttactcttaaataatgaaactataaaagaaaaagtcaaagaaaaggaattaaaagaaatatttgatgaaagtttacatttaaaaaatgttgaatttatttttcaaagagtttttagttactaa

SEQ ID NO: 288435 - DNA, 1225 bp, Unknown
  Bacterial polypeptide expressing nucleotide sequence isolated from the Sargasso Sea
gaaattgaatgcttgatagctgaaaaactttctgaacttggtgaaataccaaataaagcagcagaagatataagaaaaaaagcaaaatttaatattgatgaaataaaagaaattgaaaaagaaacaaagcatgatgtcgtggcttatataaataatgttagtacctatattggtgaaaattctaagtattttcactttggagttacttcaagtgatattattgatactggattttcatatcaattaaaacaaacagctgaaattattactgagcagttaaaaaaattaattaataatttaaaacaaaaatctattgagcacaaatatacttttatgattggtagaagtcatggtgtgcatgctgaacagatttcatttggtttaaagatgggttctttttactttgaatttttgagaaatttaaaaagattggaaattgccaaagaagaaatttctatttgttctatttctggaccagttggaacttacaattcaatagaccctagaatagaggaatatgtagcaaaaaaattaaatttaaaaactgaggacatttcaacacaagttataccaagggatagacatgcactttatttttctactttagggataattgcttcatctattgaaagattagttatcgaaataagacatttacaaagaactgagattttagaagttgaggaattttttagctcaggccagaaaggttcttcagcaatgccacataaaagaaatccaattttaagtgaaaatttaactggtttagctagatacataagaagtgccactgttcctgctatggaaaatatagctttgtggcatgaaagagatataagtcattctagtgtagaaagaatacttgcgccggatatcaatattgcaatggattttgcattaaatagactttctaacattattgaaaatttagttgtttatccagaaaatatggaaaaaaatttaaatagtttaggggggttacacaaaagccaagatattttaaaagcacttattaaaaagggactttcacgtcaagaagcatatttaaatgtacaatctttgtgcacaaaagcttggaatacaaaagaaaaatttatagaaatattattaaaagataataagataaatgaatttctgagcgagaaagagataaagaaacttttaacaaatgatgatataaaagaaagtattgattggatttataaaaataaatataaaatttaat

SEQ ID NO: 288436 - DNA, 1174 bp, Unknown
  Bacterial polypeptide expressing nucleotide sequence isolated from the Sargasso Sea
aatgaatgaaaaaaatttggaggctatctctcctgttgatggaagatattttgataagactgaaaaattaaaaaaatattttagcgaaaaggctttaatctattatagactaaaagttgaagttgaatactttatatcattgtgtgaagctaagattcctcaattaagtaatttcaatcataaaaaattcaaagatttaagaaaaatttatcttgatttctcaattgatgatgcattagaaattaagaaaattgagaagtctactaatcatgatgtaaaagcagttgaatatttcatcaaacaaaaatttgataaaattggtatatctggatataaggagtttattcactttggccttacatctcaagatattaataatacatccattcctttatcaataaaagatttcattaatgaggtatatctagttaaaattgaggagttattaaattcaatcgaagataagtgtaatgagtacaaggatataacaataatttcaaggacacatggccaacctgcgtctcccactaaacttggaaaagaatttaaagtcttctggacaagaatcaatgaacaattgaatagcttgaagaaaatcccaaattctgcgaaattttcgggagcagttgggaattttaatgcccataaagttgcctatccaaaaattaattggaaaaattttggagtaaattttgttgaaaataaacttggcttaaattattcctatccaactacacaaatagaacactacgattcgtttgctgcactatcagataactgtagaagaattaataatattttgatagatatgtgtattgatatatggacctacatttcgcatgattattttaatcaaaaaattgttaagaaagaagtagggtcatctgcaatgcctcataaagttaatcctattgattttgaaaacgctgaaggtaatttaggagtagcgaattcaacatttaatttcttctctaataaattaactaaatctaggcttcaaagggatctatctgatagtactgttcttagaaatattggtgtaccatttagtcatactataatctcttttgaatcaattctgaaaggattaagcaaaatttatttaaataatgataagatcaacaatgatattgaagataattggatagtagtttcagaagcaattcaaacaatt

SEQ ID NO: 288437 - DNA, 1039 bp, Unknown
  Bacterial polypeptide expressing nucleotide sequence isolated from the Sargasso Sea
aaacttaagaaatatgctgaatttgtccattttgcttgtacgtccgaagacattaataacctttcctatgccttagtgataaaagatgcttctaaaattactcattcaaatattaaacaagtacaaaataaaatcagaagctttgccaagaaatttgccaagcagtccatgctttctagaacacacggacaaaacgcctcccccactacaatgggaaaagagttctcaaatttttctcatagaataaataagttacaaattgaaatagatagacacaagatggtaggaaagatcaatggagctgtgggtaactacaacgctcatcatgtagcctatcctgatattaattgggaaaaggttgcaaaagattttgttaaaggcctaaaccttgactttaattcacacactacccaagtagagcctaaagataccatagcagtattgctaagcgattatgtaaaactcaataatatcttaatagatttaagtagagatatatggggttacatttctttaggatacttcaaacaaagactcaaagaaggtgaagttggctcttctactatgcctcataaagtcaatcctatcgactttgaaaatgctgaaggtaatcttggaatggcaaatgcaaatcttaatcacattagtaatactgtcactatatcgagatggcagagagatcttacagactcaacaattatgagaaatataggaacttgttttggatatatgaatatcgccttgcgttctttgcaaaaaggtttaaataaactcgaacttaatgatcaaagattaaaagaggacttaagtaaatcttgggaaattctgactgaagctatacaaacgattattagaaaaaataatatacctaatggttatgaattgatgaaaaaactatcgagaggaaaagatatcaatgaaaaaaatctcatagaatttataaacactatggatgtaccttctgaagataaaaaaaggcttcttcaactcacacctcaatcatatgttgggtacgcagaaaaactttctaaagactaaa

SEQ ID NO: 288438 - DNA, 1294 bp, Unknown
  Bacterial polypeptide expressing nucleotide sequence isolated from the Sargasso Sea
tatgataacaagatataacagaccaaaaattgaaaatatatggactttagaaaataagtttaaaatttggacaaatatagaaatacttatagctgaaaagctctcagatattaacgtgataccaaaaattgctgcacaagaaataagaaaaaaagcaaaatttaatgttgaggaaattaataaattagaaaaacaaacaaggcatgattttaatgcttatatagataatgtcagtaaatatattggtaaacaatcaaaatattttcatcatggagttacctcaagtgatataatagatacggctttttcaattcagctaaagcaaactggagaaataataattaaagaattaaaaaatcttttaaaaaatttaaaatctaaatcattaaagtttaaaaacactccaatgatcggtagaagccatggtattcatgcagagccaataacttttggattaaaattaggttcgttttacaatgaatttaaaagaaatttgaaaagattagaaattgctattgaggagataagcatttgttctatctcaggtccagtcggtacttacgagagtatagatcctcgtgttgaaaaatatgttgctaaaaaattgaaattaagatcagaagatatatcaacacaaatcattcctcgagatagacatgcattctttttttctgtacttggaataatagcttcttcaattgagcgttttgcagtagagataagacatttgcaaagaactgaattgcttgaagtagaggaaaaatttaatcataaacaaaaaggatcttcagcaatgccacataaaagaaatccagttttgagtgaaaatttaactggattagcaagatatatacgtagtgcagttattccatcaatggaaaatattattttatggcatgagagagatattagtcattctagtgttgagagaattatggctcctgatattactattgctttagacttttcattaagtagattaaatgaaattgttacaactatgaaagtttatccagaaaatatgataaaaaatttaaaattattaggtggactccataatagtcaaaaacttctattaaaattaactcagaaaggtatttctagacaagaagcttattcaatcgttcaaaaaaatgcaatggaagcatggaataataataaaaaattcaaagatgttttaaaaaatgacaacactataatgaaaaaattaactaaaaaagatattaaagaaattatagagattgaaacaaagaatattaaaatagattggatttttaaaaataaaattaaataa

SEQ ID NO: 288439 - DNA, 979 bp, Unknown
  Bacterial polypeptide expressing nucleotide sequence isolated from the Sargasso Sea
aatgaaaatttgtatttacggtgcaggagctattggtggttatctgggagcaaaacttactgagataggtgcagatgtaactttaattgctagggggcctcattatcaggctatcaagcaagatggattaagactaagaaaagatggcaaagaactagttgtgtatccaaagtgtgtagacacagcggagaaagctggaaagcaagattatatttttgttactctaaaagctcattcagttcctggttgtcttgatgcatttgaagttcttatgaaagatgatacttcatttgtttggggtgtgaatggtatcccatggtggtatttctacaatcacactaaccctgatttcaaagataaaaaagttacttcagttgatccagatggaagtcaatgggatcgaattggccctgaaaaaataatcggctgtatagttaatcccgcatcagaagttatcaaaccaggcgttattcagcacttagagggagataagtttcaactaggagaaattaatggagaggaaacagatagaattaaaaacctttctgagactttagagaaagcaggctttcaagcacctgttagacctaatataaaaggtgatatctggttaaaactttttggtaatctttctcttaatcctatcagtgcacttacaacatctacacttgtcaaaatttgtagcaatgacgaagtcagagccgtcataaaaaatatgatgaatgaagctcatgcaatttctcaaaatttaggaatagacaagcctttcgatgttgagagaagaattgatgcagctaaagcagttggcgaacataaaacatctatgcttcaagatttagaacgtgatagacctatggagattgatgctttaatcacatctgttcaagagcttggaaaaattacaaatgttccaactcctacaattgatacagttcttgctttaactaaacttagagctaaagaagctaaattatattag

SEQ ID NO: 288440 - DNA, 553 bp, Unknown
  Bacterial polypeptide expressing nucleotide sequence isolated from the Sargasso Sea
gtttacgaattacaagaatatttttctaaaaatcaaataggttcctcagcaatgcctcacaagaagaatccgattttatctgaaaatctaacaggtctttcaagaatggttagaagcgcagttgttccggcattggaaaatattgccttatggcacgaaagagatatttcccattcaagtgttgaaagaaatattggacccgatgcaaacataactttagattttgctctagtaagattaacaaatatcttggataatatgattgtttatccaaaaaaaatgttagaaaatttgaatatgacaaaaggattaattttttctcaagaattaatgcttgaacttacgaaatctggattgagtagagaaaaatcctataaaatagtccaaacttatgcgaaaaagtgttttattgataacctagatttatttaatgtaatacagtctgacaaatatataatgagtaatatttcattaaaaaaattaagatctatttttagttattctaaacattttaagaatgtaaatttaatatttagaagagtatttaaataat

SEQ ID NO: 288441 - DNA, 1294 bp, Unknown
  Bacterial polypeptide expressing nucleotide sequence isolated from the Sargasso Sea
aatgattgatagatactctagaaaagaacttaaagccatttggtctgaggaaaacaaatacaaaatttggctaaatatcgagattgctgcagcagaagctatggaaaaatataaaataattccaaaaggtgtttcttcaacagtaaaaaaaagagcaaaaattaatgtaaaaagaattcatcaaattgaatccaaagttaaacatgatgtaattgctttcctaacgtcaattactgaaaaggctggtattaaagctagatacctccatcaaggaatgacatcttctgacattttggatacagcttttaatatccaattaaaacagtctggtgaaattttgttaaaagatatagataaaatcttatcagttttaaaaaaacaagctaagaagtataaatttacaccttgtattggaagaagtcatgggatacatgcggaacctataactttcggattaaaattagcttccttttatgaagaatttaaaagaaataaaaaaaggctagccagtgcaatttttgatatttctacatgtgcaatatctggagcggttggaacttttgcaaatataaacccaaaagtagaagcatatgttgcaaaaaaatttaaactttatcctgaacctatctctactcaaataataccaagagatagacacgcacattacttttcagtattagggattatagcagggagtattgaaagagttgcaacagaaataagacatcttcaaagatcagaggtttacgagttgcaagaatttttttcaaaagagcaaaagggttcatctgcaatgccacataaaaaaaatccaatattaagtgaaaatttaactggacttgctagaatggtgagaagccacactataccagctcttgaaaatatagctttgtggcacgaaagagatatttcccactctagtgtagaaagaaatattggccctgatgcaaatataactttagattttgctttggttagattggcaaatgttttaaataaaatgataatttatccaaaaaaaatgatacaaaatattaatttaactaaaggattaattttttctcaagaaattatgctagagcttaccaagagtggaatgactagagaaaaatcatacaaaatagtccaaacttatgcaaaaagatgtttctctgaaaacaaaaatttatttgatttaatatctaatgataaaaaaattatgagtcttattactgagaaaaaactaaagtcaatttacagctactccaaacactttaaaaacataaactttatatttaaaagagtatttaaataa

SEQ ID NO: 288442 - DNA, 1164 bp, Unknown
  Bacterial polypeptide expressing nucleotide sequence isolated from the Sargasso Sea
aaaaacttgcaaatttcgatgaaaatagaattctagatattgagaaggaaacaaagcatgatgttatagcgttcttaactaatgttgcagaatatgttggtgctgactctaaatatattcataaagggctcacctcatctgatatacttgatacttgtttttctatacaattatcaaaagcctcaagtctcttgatgaaggaactaaaagaattattagaaattttaaaaagtaaggcactaaaatataaatatttaatttgtataggaagaagtcatggaatacatgctgaaccaactactatgggtttgaagtttgcttatgcttacgctgagttttttagacattataatagattaaaaaatgtaaaaaaagaaatttctgtttgcaagatatcaggccctgtaggaagttattcaagcgtttcaccagaagttgaaaaatatattgcagaaaaacttaaactaaggccggaaacaatttctactcaaattattcctagagacagacatgctagcttcttttctttcttgtctattttagcttcatcagtggaaagactctcagtagaaataagacatttgcaaagaacagaagttctagaagcagaagaatactttagtgaaggacaaaaaggaagctctgctatgcctcataaaagaaatccggtattatctgaaaatcttacaggattatcaagatatattagaaatacgtgtaattccgctatagaaaatgtaatactctggcatgaacgtgatatttcacattcgtcagtggaaaggatcattggacctgatgtaacaacagctatgcatttttctttattaagattaaaaggtcttgttaaaaatttagtaatatatccaaaaaatgtagaaaagaatttaaattatttacaaggcttacatttcagtcaaaatgtaatgctaaagttaatagataacggtgtaacaagagaagatgcatataaaattgtacaagaaagtgcaatgaaaacctggaatagtattaggtctaacaaaaagaagtcatttttaagtttcctaatatcaaataaaaaagcaacttcaaaggtaagcaaacaagatattaaaaaaatttttaataataaatatttcattaaaaatattgatcatatttataaaagcgtattcaagtaat

SEQ ID NO: 288443 - DNA, 895 bp, Unknown
  Bacterial polypeptide expressing nucleotide sequence isolated from the Sargasso Sea
aattgctagaggacctcattatcaggctataaagcaagatggactgagattaagaaaagatggcaaagaactagttgtatatccaaagtgtgtagacacagcggaaaaagctggaaagcaagattatatttttgtgactctaaaagctcattcagttccgagttgtcttgatgcgtttgaagttcttatgaaagatgatacttcatttgtttggggtgtgaatggtatcccatggtggtatttctacaatcacactaatcctgatttcaaagataaaaaagttacttcagttgatccagatggaaggcaatgggatcgaattggacctgaaaaaatcatcggctgtatagttaatcccgcatcagaagttatcaaacctggcgttattcagcacttagagggagataagtttcaactaggagaaataaatggagaggaaacagaaagaattaaaaatctttctgaaactttagagaaagcaggctttcaagcacctattagacctaatataaaaggtgatatctggttaaaactttttggtaatctttctcttaatcctattagtgcacttacaacatctacactagtcaaaatttgtagtaacgacgaagtcagagccgtcataaaaaatatgatgaatgaagctcatgcaatttctcaaaatttaggaatagaaaagcctttcgatgttgagagaagaattgatgcagctaaagcagttggcgaacataaaacatctatgctccaagatttagaacgcgatagacctatggagattgatgctttaatcacctctgttcaagagcttggaaaaattacaaatgttccaacacctacaattgatacagttcttgctttaaccaaactaagagccaaagaagctaaattatattag

SEQ ID NO: 288444 - DNA, 1294 bp, Unknown
  Bacterial polypeptide expressing nucleotide sequence isolated from the Sargasso Sea
atgatagacagatatagtacaaaagaaatgcaaaatttgtggtctgatgataacaaatatcagaaatggctagatgttgaacttgctgtctgtgaagcatggtcattctatggtcatatacccaaacaatcttttttacgtataaaaaaaagagcaaaatttaatacaaaagaaattgataagctggagaaagttatcaagcatgatgtgattgcatttactactaatctggcaaaatccataggtaaagattcgcgatttgtacacctaggtttaacgtcatctgatgttttagatacctcactatctttgtttattgtagattctggaaatttaataaaaaaagagttgagtaatacaattaagattttaaccaggcttgcaaaaaaacatataaatacaccaataatgggtaggtcgcatggtatccatgctgaagtaactacattcgggctagtcgttgctaattggttagatgaaatgaagcgcgcaagagataggttagagaaatcaatcaaagtttgcagtgtaggaaagatgtctggagctgttggaacttattcaaatgttcttccgaaaatcgaggctaaggcctgttctatactaaagttaaaaccggcaaaaattagcagtcaaatcattaatagagattatcatgccgagtacttcacttctttatcttttatagcctcttcaattgagaggatttcagtccagattcgacatatgcaacgaaccgaggttttagaagttgaagagcccttttcaaaaggtcagaaaggctcttctgctatgccacataaaagaaatcctattctatctgaaaatttatcgggtttagctagaatagtcagatctaatgctcaagcatcttttgaaaatatacctttatggcatgagagagatattagtcattcttctgtagaaagagttattgggccagattcttcgattttaattcattttatgcttaagagatctaattatatgcttcaaaatttaaatgtctataaagaaaatatgttaaaaaatatctggaaaactaatggagtaatattttctcaaaatattttagttaagctaatcgagaaaggtttatctcgtgaggaatcctataaaatggttcaagacttagcttttcaagcatggaacaatgacaagaattttaaagacttattgctttcagataaaaagataatgaatattctcaacaaggaggagcttgaaaattgctttgctttcaataatctttttaaaaatgcaaagagcatactttcaagagttatgaagtaat

SEQ ID NO: 288445 - DNA, 1294 bp, Unknown
  Bacterial polypeptide expressing nucleotide sequence isolated from the Sargasso Sea
atgattgatagatactctagaaaagaacttaaaaacatttggtctgaggaaaacaaatataaaatttggctagatattgagattgccgctgcggaagcaatggaaaaatataaaattattcccaaaggagttgcttcaatagttaaaaagaaaacaaaaataaaagtcaaaagaattcatgatattgaaaaaaaagttaaacatgatataattgcatttcttacatcagttacagaaaaagcaggaataaaatcaagatatcttcatcaaggaatgacatcatccgatgttttggataccgcatttaatattcaactaaaacaatcaggtgaaattttattaaaagatatagataaaattttatctatcttaaaaaaacaggcaaaaaaatacaagttaacaccatgcattggaagaagtcatggtatacatgctgaaccaataacatttggtttaaaattagcttcattttatgaggaatttaaaagaaataaaaaaagactttcaagcgcaatctttgacatttccacttgcgctatatcgggagccgttggaacttttgcaaatattgatccaaaaattgaaatttatgtatcaaaaaaactaaaactttatccagaaccaatttctacacaagttattccaagagatagacatgcgcattatttttcagttttaggaattatagctggaagtgttgagcgtgtagctactgaaattagaaacttacaaagatcagaagtttatgaattacaagaatttttttcaaaagatcaaaaaggatcatctgcaatgcctcataaaaaaaatcctattttaagtgaaaatttaactggtttagcaagaattgtgagaagctgtacaattccagcattagaaaatattgctttatggcatgagagagatatttctcactctagtgtagagagaaatatcggacctgacgcaaatattacattagattttgctctaataagattggctaatattttagataaaatgatcatttacccaaaaaaaatgaaacaaaacttgaatttaactaaaggcttaattttttctcaaaaagttatgcttgagcttactaaaagtggaataagcagggaaaagtcatataaaattgttcaaacttatgcaaaaaaatgtttttctcaaaataaaaatttatttgatttaatatctaaagataaaaagataatgactataatcagtgaaaaaaaacttaaatcaattttcaattattctgctcatttcaaaaatattaactttatatttggaagagtctttaaataat

SEQ ID NO: 288446 - DNA, 568 bp, Unknown
  Bacterial polypeptide expressing nucleotide sequence isolated from the Sargasso Sea
aggactgaagtttcagaagttgaagaattttttaataataaacaaatgggatcttcagcaatgcctcacaaaaaaaatcctgttcttacagaaaatcttacaggtttagcaagattaattagatcgtcggtgataccagctttagaaaatgtagctctatggcatgaaagagatatttctcattctagtgtagaaagaaatatcggtccagataccactgtgactttagattttgccctcgatcgattaaacaatgttgtaaaatcaatgaaaattaataaagacaatatgaaaaaaaatcttaatttaacaaaaggtatttttttttcgcaaagaatactgcttgaactcacatctcaaggtatcaggagagacaaggcatataggattgttcaaaaatgtgccataaaatctctagaaaacaatatccctttctatgatagcttattaaaagacaaggtaattacagacaaaatacctgttaatattctaaaaaaattatttgattttggttatcacacaagaaaaattaatgtaattttctcaagggtattgagaaaaaaatgaa

SEQ ID NO: 288447 - DNA, 1297 bp, Unknown
  Bacterial polypeptide expressing nucleotide sequence isolated from the Sargasso Sea
aatgattccaagatataatagacctgcaattcaatctatatggtcagatgaaaataaatttaaaatttggactgaaattgaatgcttgatagctgaaaaactttctgaacttggtgaaataccaaataaagcagcagaagatataagaaaaaaagcaaaatttaatattgatgaaataaaagaaattgaaaaagaaacaaagcatgatgttgtggcttatataaataatgttagcacctatattggtgaaaattctaagtattttcactttggagtaacttcaagtgatattattgatactggattttcatatcaattaaaacaaacagctgaaattattactgagcagttaaaaaaattaattaataatttaaaacaaaaatctattgagcacaaatatacttttatgattggaagaagtcatggtgtgcatgctgaacagatttcatttggtttaaagatgggttctttttactttgaatttttgagaaatttaaaaagattggaaattgcaaaagaagaaatttctatttgttctatttctggaccagttggaacttacaattcgatagaccctgcaatagaggaacatgtagcaaaaaaattaaatttaaaaactgaggacatttcaacacaagttataccaagggatagacatgcattttatttttctactttggggataattgcttcatctattgaaagactagttattgaaataagacatttacaaagaactgagattttagaagtggaagaattttttagttcaggccagaagggttcttcagctatgccacataaaagaaacccaattttaagtgaaaatttaactggtttatctagatacataagaagtgctactgttcctgctatggaaaatatagctttatggcatgaaagagatataagtcattctagtgtagaaagaatacttgcgccggatatcaatattgcaatagatttttcattaaatagactttctaacattattgaaaatttagttgtttacccagaaaatatggaaaaaaatttaaatagtttaggaggattgcacaaaagccaagatattttaaaagcgcttattaaaaaagggctttcacgtcaagaagcgtatctaaatgtacaatctctgtgcgcaaaagcttggaatacaaaagaaaaatttatagaaatattattaaaagataataagataaatgaatttctaagcgagaaagagataaagaaacttttaacaaatgatgatataaaagaaagtattgattggatttataaaaataaatttaaaatttaa

SEQ ID NO: 288448 - DNA, 1209 bp, Unknown
  Bacterial polypeptide expressing nucleotide sequence isolated from the Sargasso Sea
aatgatacctagatactcacgtcctataatgagtcaaatttgggatgacgaaaacaggtttaagatttggtttgaaattgaagctcacgctgcagatggaatggcaaatgaaggcactattccgaaagaggctgcaaaaaagatctggaaacttgggcaatttgagatcaatagaattaatgaaattgagaaagaaacacaacacgacgtcatcgcatttcttacaaatttaagtgagcatattggacctgatgcacgcttcttacatcaggggatgacttcttcagacgttttagatactgctctttcagttcaaatgaagcaatctacaaatttactacttgaaggaattaataaattgcttcaatcacttaaaaagagagcttatgagcataaaggctccatatgcattggaagaagccacggcattcatgctgagccaacgacatttggattaaaactggctggcttctacgctgaatttgaacgtgcatacaaaagattgcaaactgcaaaagatgaaatatctgtatgcgctatttcaggggctgtgggaacatttgctaatattagtcccaatgtcgagaaatacgtggcaaagaaaatggggcttagtgcagagactatttcaactcaagttattcctagagacagacacgctgcatggttttcctgtttatcattaattgcttcatcaatagagagatttgcaactgaaattagagggcttcaacgaactgaagtacgtgaagtagaggaatacttttcatctgggcaaaagggatcatctgccatgcctcacaaacgaaaccctgttctcactgaaaatttgactggaatagcgagaattgttagggcgagccttgtcccagcaatggaaaacgttgcactttggcatgaaagagatatttctcattcttctgtagagagagtgttcgctccagatgcaacaattgctttagactttgcaattacgagaatgactaatgtcgttgacaatctattagtctatcctgacagaatgagagagaatatgaataaactaaagggattggttaattcacagcaagtccttttaaaactcactcaatctggtattagcagagaggatgcatactctatagttcaggatattgccatgcaagtatggaatgaaaaaggtttatttttatcacttttaaaaagtaatgatttgataaaaaataaact

SEQ ID NO: 288449 - DNA, 1058 bp, Unknown
  Bacterial polypeptide expressing nucleotide sequence isolated from the Sargasso Sea
aatgataaaaagatacgaagtaaaagaaatagttgatatatggagtcaagaaaacaagttaagcacttggaagaaagttgaatcctctgttacaaaaagtcttgaagaggaaggtatcgtacctaaaggtttgtcagaaaaaatacttgatgcaaatgtaaccgtaaaagaagttgaagctcgagaaaaagtaacaaaccatgacttagcttcatttgttgacatattacaagataaggtaaatgaaaattccgaatggatacattacggccttactagttcagacgtagttgatacatcaaatagtttattaattttagaatcattagatttcctaataggagtagttgatgaattaatcagtactttgaagaatcttgcgataaaagaaaaagataccaaaataatcgggagaactcacggcgtatttgcagaagtaactttccttggaaatataatttcaaactggttgttggagatacatcgaaataaagaacgtcttgaacgagcaaaagaaaatattagcgtcggaaagctaagtggagttgttgggaactacaccataattaacagtgatgttgaaaaaaaatccttagagacgttaaatctaaagccagagctatttgcttctcagattgttagccgcgatagatatgctgaagtaatcagctctattggaatgcttgcaagttcctatgatcgtatagctataaatcttagaggttatcaacgttcagaggtgggtgaaattcatgagtcattttcaagcgaacaaaaaggttcttctgcaatgccacataaaaaaaatccaattacttctgagagaatatcaggaatttcaagaatcctcagaggttatgttgtaagtgcgcttgaaaatatatctctttggcatgaaagagatatatcaaattcatcagtagaaagaatcatttttccagatagttttaatctcatttgtttttccacaattgagatggaaaagctattaaaaaatatcaacattaatcatgaaaaaataaattcaaatattaattcagcaaaagtgagtttgctaa

SEQ ID NO: 288450 - DNA, 919 bp, Unknown
  Bacterial polypeptide expressing nucleotide sequence isolated from the Sargasso Sea
tatgatagatagatatacaactccagaaatggccaaaatatggtcagaatataataagttcgacacatggaagaaggtagagattactgttactgaagttttatctgatatgggcgaagttccaaaggaagcagttaaagttattaatgaaaaagcagatttttctgtagagagaatactagagatagaaaaaactactcgccatgatgttattgcttttttaacaaatatggcagagaatatagggccagaatcgcgttttattcatatggggatgacctcttcagatttgctagatacttctttagcgctattatgtaaagaagcaggagagcttattcttcaaaaattaaaaacatttaaaaatgttcttagagtacgagctgttgagcatagagagtcctttcaaattggtcgttctcatggtgttcatgctgagccaattacatttgggttaaaattagccttatggagtgaagaaataggtaggcatattgatagatgggaacaggctatagattcaattgcaacaggaaagatttctggtgcggttgggacctatcagcatcttgatccagaggtagaggaagaatcatgtaaacgattaggtttaaaggctgctacagtatctagtcaagttgtacaacgtgatcatcatgcagaatatcttagtactcttgcaattatagctgcatccttagaaaaaatagctatagaaattagacatttacaaagaacagaagtattagaggcagaagaatattttcaaaaaggacagaaaggttcttcagcaatgccgcataaaagaaaccctattgtaacagagcgaataacaggtatggcgcgacttttgagagctaatgctatggtggctatggaaaatattgcgctgtggcatgaaagagatatctctcatctt

SEQ ID NO: 288451 - DNA, 766 bp, Unknown
  Bacterial polypeptide expressing nucleotide sequence isolated from the Sargasso Sea
ggccaggtaagcggcgctatgggcacctatgccaacaccgatcttcaggtggaagccatcgcctgcgagatcctcggtcttactcccgacaccgccagcacccaggtgatctcccgcgatcgccatgccgactatgtgcagaccctcgccctggtaggcgcctctctggagcgcttctccaccgagattcgcaacctccaacgcaccgacgtgctggaagtggaggagaacttcgccaagggtcagaagggcagctccgccatgccccacaaacgcaacccgatccgcagtgaacggatcagcggtctggcccgggtgctgcgcagctacaccattgctgcacttgagaacgtagccctctggcacgagcgcgacatcagccacagctccactgagcgaatgatgcttcccgattgctcggtgaccctgcacttcatgctgcgggaaatgaccagcgtggtgaagggtcttgggatctaccccgagaacatgagccgaaacatgaatgtgtatggcggcgtggtgttcagccagcgggtgctgcttgctcttgtgggcaccggcatgagccgagaggaggcttaccgggtcgttcaacgcaacgcccacacggcctggaacatggccggcggcgacttccgcgccaacctcgaagctgatggcgatgtcaacagtcgcttgtcagccgaccagttagctgtgtgcttcagcaccgaaatgcatcaggccaaccttgatgtgatttgggagcgtctggggatttaaa

SEQ ID NO: 288452 - DNA, 593 bp, Unknown
  Bacterial polypeptide expressing nucleotide sequence isolated from the Sargasso Sea
cttcgcgacggagatccgcaacctgcagcgcaccgatgtgctcgaggtggaggagaacttcgctaagggccagaagggcagttccgccatgccccacaagcgcaacccgatccgcagcgaacgcatcagcggcctggcccgcgtgctgcgcagctacgtggtggcggcactggagaacgttgctctttggcacgagcgcgacatcagtcacagctccaccgaacgaatgatgttgccggactgttccgtcacccttcatttcatgctgcgtgagatgaccagcgtggtgaagggtctcggcgtgtatcccgacaacatgcgccgcaacatgaacgtctacggcggtgtggtgttcagccagcgggtgctgctggccctggtgggcaccggcatgagccgcgaagaggcctaccggatcgtgcagcgcaacgcccacaccgcctggaaccatgaaggcggtgatttccgcgccaacctagaggccgacgctgacgtcatcagtcggctgtcaaccaaccaattggcggactgcttcagcaccgaactgcatcaggccaaactcggcgtgatctgggagcgtctggggatctgaa

SEQ ID NO: 288453 - DNA, 850 bp, Unknown
  Bacterial polypeptide expressing nucleotide sequence isolated from the Sargasso Sea
agagctgggattaaagcaagatacctacatcaaggaatgacatcgtctgatgtgctagatacaagtttgaatattcagttagttcaatctggaaaaattcttgtaaaagatttagaacaaatacttaaagttttaaaaaggcaagcaagaaaatataagtttacaccttgcatgggtagaagtcatggtattcatgcagaacctattacttttggtttaaagcttgcttctttttacgaagaatttaaaagaaatagaaaaagattagttgatgcaattgatgaagtttcaacctgtgctatctcgggtgctgtaggaacttttgcaaatatcaatcccaatgtagaaaaacatgttgccaaaaaactaggtttaaaagttgaacctatatcaacacaagtaattccaagagatcgtcatgcattttatttttcagttttaggaattatcgctggatcaatagaaagagttgctactgaaattagacatttgcaaagaacagaagtttatgaacttcaagaatacttttcaaaaaatcaaaaaggttcatcagcaatgcctcataaaaaaaatcctattctaagcgaaaatcttaccggtcttgccagaatggtcagaagtgcggtaatccctgccctagaaaatattgccttatggcatgagagagacatttcgcattcaagtgtagagagaaatataggacctgatgctaatataactcttgattttgcattggtcaggttaactaacattttagataatatgattgtttatccaaaaaaaatgttagaaaatttaaatctaaccaaaggactaattttttcacaagaacttatgctagagttaacta

SEQ ID NO: 288454 - DNA, 837 bp, Unknown
  Bacterial polypeptide expressing nucleotide sequence isolated from the Sargasso Sea
ggagattctggaagatacatacatgttggaatgaccagtagtgatgttcttgatactggcttatctcttcagttaaaagattcttgcgaattgttattagaagaaattgagaacctagaaaatgaagtcagattattagcaaggaagcataaaaatacattaatgattggcagatctcatgctattcatggggagccaatttccttcggttttaaacttgctggatggttagcagaaataataaggaacaaaaaaagattgttaacactgagagaatctgtagcaattggacaaataagtggtgccatgggaacttacgctaatacgaatcccaaagtagaacaaataacttgcgatttactcggcttaaaaccagatacagcaagtactcaggttatatcgagagacagacatgcagaatacgtccaaactattgcactagttggcgcttctctggatagattcgcgactgaaataagaaatttacaaagaactgatgttttagaagtagaggagggatttacaaaagggcaaaaaggaagttctgctatgcctcataaaagaaatcctattcgaagtgaaagagtaagcggtttagcaagaattttgaggagttacgtcttaacagcactagaaaatgttccactttggcacgaaagagatataagccacagttcaaatgaacgtattatgttacctgatgtgtcaatctgtttgcattttatgctcagggaaatgaaagatatagtaagcaatttggaagtttatccagaaaatatgatcaaaaaattaaatatatatggtggtgtaatctttagtcagaaaagttttactttt

SEQ ID NO: 288455 - DNA, 717 bp, Unknown
  Bacterial polypeptide expressing nucleotide sequence isolated from the Sargasso Sea
gtgttgaacagtacgtcgcaaaaaagttgggcatgaaagcagaaacgatttcaactcaaataattccaagagatcgtcacgcagtatattttaatactcttgcagtaattgcaagttcgattgaacgtttagctactgagataagacatttacaaagaactgaggttttagaagttgaagaatttttttcaaaaggacaaaaagggtcatcagcgatgcctcacaaaagaaatccagttctgactgagaatttaactggactggcaagactgattagaggttatacggttcctgctttagaaaatattactctttggcatgaaagagacatatcgcattcaagtgtagagagaataatggcgccagatgcaaatattataatcgactttgcactttcacgaatgaataatgtgatatcaaatcttgttgtatatccaaaaaatatgaaaactaatttagatagattaaaaaaactgccaatgtcagaaggtttaatgctcgcaatgacacaaaaaggtttatcgcgagaagatgcgtacaaaattgttcaacgtaatgccatggaagtttggaaaacgaatacagattttgaggtaatacttaacaaagatgaagaattaaaaaaatacctaagcaaaaaagagatatcaaaaattttagatttaaaacacgccgctcgcagaactgactatattttcaaaaaagtttttaaataat

SEQ ID NO: 288456 - DNA, 612 bp, Unknown
  Bacterial polypeptide expressing nucleotide sequence isolated from the Sargasso Sea
tttgcgcttctttagatagatttgcaactgaaataagaaatttacaaagaactgatgttttagaagttgaagagggatttacaaaaggacaaaaaggaagttctgccatgcctcataaaagaaatcctattcgaagtgaaagagtaagcggtttagcaagaattttgaggagttacgtcttaacagcactggaaaatgtcccactttggcacgaaagagatataagccatagttcaaatgaacgtatcatgttacctgacgtatcaatctgtttgcattttatgctcagggaaatgaaagatatagtaaacaatttggaggtttatccaaaaaatatgctcaaaaatttaaatatatatggtggtgtaatctttagtcagaaagttttacttttacttgtagagaagggcttttctagagaaaaagcttatagattagtacaaagaaatgctcatcaggcctggaatactcagaatgggaatttcaaacgaaatatagagacagataatgaaataatggatcttattgatcaaagtgatttagaagaatgttttaatccttcaattcatctcaataatttaagtgtaatatgggagaagttaggtatctagg

SEQ ID NO: 288457 - DNA, 874 bp, Unknown
  Bacterial polypeptide expressing nucleotide sequence isolated from the Sargasso Sea
aaaatagctgcatgtgaagcaaatttttccctcgggaaaattcctgaaaatgccatgaaagagatacgtttaaatgcaaagtttgatgaatctagaattacagaaattgagaaagaagttaaacatgatgtcatagcatttctcacaagcgttaatgaatttgtaggagattcgggaagatacatacatgttggcatgaccagtagtgatgtccttgatactggcttatctcttcaattaaaagattcttgcgaattgttattagaagaaattgagagtctagaaaatgaagtcagattattagcaaggaagcataaaaatacattaatgattggcagatctcatgcaattcatggggagccaatttccttcggttttaaacttgctggatggttagcagaaataataaggaacaaaaaaagattgttaacactcaaagaatctgtagcaattggacaaataagtggtgcgatgggaacttacgctaatacaaatcccaaggtagaacaaataacttgtgatttacttggcttaaaaccagatacagcaagtacgcaagttatatcaagagacagacatgcagaatatgtgcaaactattgcactagttggcgcttctctagatagattcgcaactgaaataaggaatttacaaagaactgacgttttagaagttgaggaaggctttacaaaagggcaaaaaggaagttctgccatgcctcataaaagaaatcctattagaagtgaaagagtaagcggtctagcaagaatattgaggagttatgtcttaacagcactggaaaatgttccactttggcacgaaagagatataagccatagttcaaatgaacgtatcatgttacctgacgtatcaa

SEQ ID NO: 288458 - DNA, 748 bp, Unknown
  Bacterial polypeptide expressing nucleotide sequence isolated from the Sargasso Sea
attgccttcttaacttttattactgagagagcaggtattaaagctagatatcttcaccaaggaatgacttcatcagatgttctcgatactagttttaatatacaactagttcaatctggaaaaattattctaaaagacatagatcgtattttaaaagtattaaaaaaacagtccaagaaatacaagcttactccttgcatgggaagaagtcatggtattcatgcagaaccaataacttttggattaaagttagcgtctttttatgaagaatttaaaagaaacagaaaaaggttagtttatgctattgaagagatatcaacttgtgcaatttctggagctgtaggtacttttgcaaatataaatcctaatgtagaaaaacatgtagcaaaaaagcttggtctaaaagttgagcctatttcaactcaggtgataccaagagatagacatgcattttatttttctattttaggaataatcgcaggctcaattgagagagttgctactgaaattagacatttacaaagaacggaagtttatgaactgcaagaatatttttcaaaaaatcaaaaaggttcatctgcaatgccacataaaaagaatccaatattgagtgagaatctatcagggctttcgagaatggtaagaagcgcagttattcctgctttagaaaatattgctttatggcatgaaagagatatttctcattcaagtgttgagagaaatataggacctgatgcaaatataactt

SEQ ID NO: 288459 - DNA, 854 bp, Unknown
  Bacterial polypeptide expressing nucleotide sequence isolated from the Sargasso Sea
aatggaaaaccttggtcaaattccaaagggtgttgcttcagttgtaagaaaaaaagctagaattaatgtaagcagaattcacaaaatagagtctgaagtaaaacacgatgtaatagcttttctaacttctgttactgaaaaagctggaattaaagctagataccttcatcagggtatgacctcatctgatgttctagatactagtttcaatattcaattagtccaatcaggtaaaattatattaaaagatatagatcaaattttaaaagttttaaaaaaacaagccaaaaaatataaatttacaccgtgtatgggaaggagccacggtatccatgctgagccaattacttttgggttaaaattggcttcgttctatgaggaatttaagagaaatagaaaaagactaaaagatgcaattgaggaagtatcaacttgtgcaatttctggggctgttggtacatttgctaacataaatccaaacgttgaaaaacatgttgcaaaaaaattaggtctaaaagttgagccaatatctacacaagtaattccaagagacagacatgcattttatttttctgttttaggaattattgcaggttcaatagagagagtagcagttgaaataagacacttacaaagaactgaggtttatgagctacaagaatatttctctaaaaatcaaaaaggatcctccgcaatgcctcataaaaaaaatcctatcttaagtgagaatcttaccggtttagctagaatggttagaagttcagttgtgccggcacttgaaaacattgctctttggcatgaaagagatatttctcattcaagtgttgaaagaaatattggacccagatgctaat

SEQ ID NO: 288460 - DNA, 909 bp, Unknown
  Bacterial polypeptide expressing nucleotide sequence isolated from the Sargasso Sea
aacaagatattctagaaaagaacttacaaatatttggtctgaagaaaataaatacagaatatggctagatgttgagatagctgccgctgaagctatggaaaaatataaaattataccgaaaggtgtggcaagtactgttaaaaaaaaaggcaaaattaatgtaaaaagaattcatcaaattgaaaaaaaagttaaacacgatgtaattgcattcctaacatcaattactgaaaaagcagggatcagtgctcgatatttacatcagggaatgacatcatcggatgtcttagataccagttttaatattcagttagttcaatcaggcaaagttttaatgattgatattgacaaaattttgaaagttttaaagaaaaaagcaattaaatataaactaacaccttgtataggtagaagtcacggtattcatgctgagcctataacttttggtcttaagttggcttcttactatgaggagtttaaaagaaataaaaaaagacttgaaagtgctataaatgaggtttcaacatgtgcaatttccggagcggtaggaacttttgcaaatatagatcctaaaattgaagtttatgtctcaaaaaaattaaaactaaaacctgaaccaatatcaactcaagtaatacctcgagatcgacatgcttattatttttcaatacttggtattattgctggatcaattgaaagaatagcaactgaaataagacacttgcagcgaactgaagtttatgaattacaagaatttttttcaaaagaccaaaagggatcttcagcaatgccgcataaaaaaaatccgattttaagtgaaaacttaactggactgtctaggatggtaagaagttacgtggttccatctttagaaaacgtagctctttggcacgaaagagatatttctca

SEQ ID NO: 288461 - DNA, 973 bp, Unknown
  Bacterial polypeptide expressing nucleotide sequence isolated from the Sargasso Sea
cacaaaatagaggctaaagtaaaacacgatgtaattgcttttttaacctctgtaactgaaaaagtaggtatcaaagcaagatatttacaccagggaatgacatcttcagatgtattggatacaagttttaatattcaattagttcaatcaggtaagattttagttaatgatattgatcaaatattaaaggttttaaaatcaaaagctaaaaaatataaatttactccctgtattggaagaagtcacggcattcatgcagagccaatgacttttggtttaaaattggcatcttattacgaagagtttaaaagaaatagaaaaagattaattagtgcgattgacgagatctcaacatgcgcaatatcaggagcagttggtacattttccaatataaaccctaatgttgaaaaacatgttgcaaaaaaacttggattaaaaattgagcctatatcaacacaagttgtccctagagatagacatgcttattatttttcaattttaggaattatcgctggatctattgagagagtttcaacagaaattagacacttacaaagaacagaagtttatgaattacaggaatttttttcaaaaaaacaaaaaggttcttctgctatgcctcataaaaaaaatccaatattaactgaaaatttaacaggactagctagaatggttagaagctatacattgccagctttggaaaatattgcgctttggcatgaaagagatatttcacattcaagtgtcgaaagaaacatcggcccagatgcaaatattacaattgattttgctttagtaagactagcaaatattttgaataaaatgatagtttatccagaaaaaatgcttaataatctcaattttaccaaaggcaccattttttctcaagaactaatgttagaactaaccaaatcaggcttgagcagagaaaagtcttacagattgatttcagagcattcaaaaaatgcatagc

SEQ ID NO: 288462 - DNA, 846 bp, Unknown
  Bacterial polypeptide expressing nucleotide sequence isolated from the Sargasso Sea
atggttggatgttgaaattgctgcagctcattcaatggaaaagcttggtcaaattccaaaaggtgtctcatcaatagttaggaaaaaagctagaataaatgtaaaaagaattcatcaaattgagagtaaagttaaacatgatgtaattgcttttttaacttccatcacagaaaaggcaggaattaaagctagatacctccatcttggcatgacttcatcggatgtagtagatacaagttttaatattcaattagttcagtcaggaaaaattatcttaaaagacatagatcaaattttaaaagtattaaaaaaacaagctagaaaatataaatttactccttgtataggtcgtagtcatggaattcatgctgagccaataacatttggattaaaattagcttccttttatgaagagtttaaaagaaatagagaaagattagtttccgctatagatcaaatatcaacttgtgcaatttctggagcagttggaacatttgcaaatgtaaaccctaatgttgaaaaatatgttgcaaaaaaacttggattaaaagttgaaccaatctctactcaaataatcccaagagatcgacatgcattttatttttcagtattaggaattatcgcaggaagtatagaaagagttgctatagaaataagacatttacaaaggtcagaagtttatgaattgcaagaatacttctctaaaagtcaaaagggttcatctgcaatgcctcacaaaaaaaatccaattttaagtgaaaacttaacgggacttgcaagaatggtaagaagttctgttgttccagcattggaaaacattgcgttatggcatgaaagagatatttc

SEQ ID NO: 288463 - DNA, 727 bp, Unknown
  Bacterial polypeptide expressing nucleotide sequence isolated from the Sargasso Sea
tatagatccaagaatagaaaaatatgtagcaaagaagttaaatttgaaaatcgaaccaatttcaactcaaattatacctagagatagacatgcgcattttttttcggtcttgggaataatagcaagttcaatcgaaagattttctgtagaaattcgaaatttacaaagaacagaagtcgcagaagtgtatgaattttttaataaaaaacagatgggatcatctgcaatgcctcacaaaaaaaatcctgtacttagtgaaaatttaacaggtttatcaagattaattaggtcaactgtaatacccgcaatggaaaacgtagctttatggcatgagagagatatttcacattcaagtgttgagagaaatattgggcctgatgcaactgtaactctagactttgctctaaacagaatgaatgagattgttaagtcgatgaaaattaacaaaaataatatgaaaaaaaatttagatttaacaaaaggtttatttttttcacagagagtattattatatttaacggaaaaagggcttaaaagagaagtggcctataggattgtccagaaatgtgccttaagagcaattgatttaaatatatctttttacgatagtttacttaaagacaaaaaaatcagaggcataataactgttaataatttaaaaaatttatttgattttagttatcataccaagaaaattaatgtaattttcaatagagtattaaaatga

SEQ ID NO: 288464 - DNA, 664 bp, Unknown
  Bacterial polypeptide expressing nucleotide sequence isolated from the Sargasso Sea
gatccgctgcgtagatgcgttaacagactttgcaagggagcatgcttctctcccaaccctgggctatacacacttccaacctgctcagccgacgacggtcggaaagcgggcgacactctggatccaggatttgctgctggacttagaagagttggatcaccgaatcgaggtactgcgcttcagaggtgtgcgtggaacgaccgggacccaagcctctttcttagagctcttcgaaggagatcaccataaggtcgacaaactagacctagcagtaggtaagcgtatgggtttcgagtcgacgtatccagttagcggtcagacatacacaagaaaagtagactatgcggtgcaggcatctcttgccggcaccgctgcttcggtctccaagatcggacacgacctgaggattctcgccaaccttagagaagttgaagagccattcgaagccgagcagatcggttcatcagctatgccatacaagcgcaatcccatgagagcggagcgcatttgcgccctggcccggcacgtaatcacactatccatcgatcccgctttcacggcagctacgcagtggctggagcgcacgcttgacgactcagccaaccgacgtctttcggtacctaacgccttcctggccctagacgggtgcctggtactccttgaa

SEQ ID NO: 288465 - DNA, 640 bp, Unknown
  Bacterial polypeptide expressing nucleotide sequence isolated from the Sargasso Sea
gggcaagttgaacggcgccgtgggcaactacaatgcccaccgggtggcctacccggatgttgactggccagcagtgtcagagcaattcgttaccggcctgggcatagaatggaatccctacaccacccagatcgagccccacgactatctcgcggagtacttcgacgcgattgcccggctaaaccagattctggtcgacttcagccgggatatttggtcttacatttcgcttggatacttcaagcagcgcatggtcgagggtgaagtcggctcctccacgatgccgcataaagtgaatccgattgattttgagaatgccgaaggtaattttggtttggcaaatgccctgctcaaccacctgtctcagaaactgccagtgagccgatggcagcgagatcttactgacagcaccgtgctacgcaacatgggggttgccctcggctactcacagctggcactggggtcattgagtcggggcatcggcaaactggaagtcgcgcctgagccgatagcgcaagatctggagactgcctgggaagtgctgggagaagcggttcagacggtgatgcggcgctacggcgtcccagaaccttatgagaaagtcaaggcactcacgcggggccagcgactcgaagctgaa

SEQ ID NO: 288466 - DNA, 915 bp, Unknown
  Bacterial polypeptide expressing nucleotide sequence isolated from the Sargasso Sea
aaatcaaacttttagcgcaaaagtacaaagccattcctatgatggccagaactcacggtcagccagcttctccaactaccttaggtaaagagatggcgaacgtgtacatgcgtttaaaccgtcagcgtgagcaaattgccaaagtggaactgctgggtaaaatcaacggcgctgtcggcaactacaatgcgcatttatcagcctacccgaacctgaactggcaccagtttgctgaagaattcgtcacaagcttaggtttaagctggaacccttacaccactcaaattgagccgcatgattacattgccgagctgtttgatgctattgcgcgttttaacactattctgctcgactttgaccgtgacgtttggggttatattgctttaggtcactttaaacagcgcactattgctggcgaaattggctcgtccactatgccacataaagtcaacccaatcgacttcgaaaactccgaaggtaatctgggtctggccaacgccatattccagcatttatcgtccaagctcccggtatcacgctggcagcgtgatttaacagattccactgtgctgcgtaacttaggtgtaggttttgcctacacagttattgcgtaccatgcaagcctcaaaggcatcagcaaactagaagtgaacgaagccaacctgctcagtgagctggatcagaactgggaattactggctgagccggtgcaaactgtgatgcgtaaatatggcattgaacagccctatgaaaagctgaaagaactgacccgcggtaagcgcatcacaccgcaggatttagctgtgtttatcgacaagttagaactgccggaacaagtgaaaactgaacttaaagcactgcgcccggataactatataggtgcagctatcgagttagtcgatttactcaactaag

SEQ ID NO: 288467 - DNA, 745 bp, Unknown
  Bacterial polypeptide expressing nucleotide sequence isolated from the Sargasso Sea
tcctgtaggaacttacaattcaattgacccaagtgtagaaaaatatgttgcttctaaattaaattttaaatgtgaagatatatctacacaaattataccgagggataggcatgcatatttcttttcaatattaagtataattgcctcatcaattgaaagagtagctattgaaataagaaacttgcaaagaacagaaattttagaagttgaagaattttttgataaaaaacaaaaagggtcttctgctatgccgcataaaagaaatcctatactaagtgaaaaccttactggtgtagctagatatatacgaagctcaattataccttttttggaaaatgtagcattatggcatgaaagagacataagtcattctagtgttgaaaggatactggctccagacataacaatagcagttgattttgcattaaatagattaaacgaaattataaaaaatctaaaaatttatccaaaaaatatgaaaaaaaatttaaactatttaaatggaattcataaaagtcaaaatttacttttattgttaactaaaaaaggtttatcaagacaaaaggcttacaaaatggttcagaatattgctatggaatcttggaataataacaaaaaatttgatgaactagtcttaaaaaataaagaaattattaaatacataagtaaagaaaaaattgtatctatctttaaaaaggaagattttgttaaaaatattgataaaatatatagaagaataaaataa

SEQ ID NO: 288468 - DNA, 876 bp, Unknown
  Bacterial polypeptide expressing nucleotide sequence isolated from the Sargasso Sea
agtgctttcaatagtagaaaaaaagcagttatcaatgtaaatagaattcataaaatagaatctgaagttaaacatgatgtaatagcatttcttacatcagttacagaaaaagctggaattaaagcaagatatttacatcaaggaatgacttcatcagatgtgcttgataccagttttaatattcaactagttcaatctggaaaaataattcttaaagatatcgatcaaattttaaaagtacttaagaagcaagcaaataaatacaaaatgactccatgcatgggaagaagtcatggaattcacgcagaaccagttacttttggattaaaattagcttcattttatgaggaatttaaaagaaacagaaatagacttaaagatgctatagatgaggtgtcgacttgtgcaatttcaggagctgttggaacttttgcaaatataagcccaaatgtggaaaaatacgttgcaaaaaaattaggtttaaaggttgaacccatttcaactcaagttattccaagagacagacatgctttttatttttcagtcttaggtattattgcaggttcaattgagagagttgcaattgagataagacatttacaaagaacagaggtttatgaattacaagaatatttctcaaaaaatcaaaaaggatcatctgcaatgcctcacaaaaaaaatccaatcttaagtgaaaacttaactggtttggcaagaatgattagaagtgctgttataccagctttagaaaatatagcactatggcatgaaagagatatttctcactcaagtgttgaaagaagtataggtcctgatgcaaatattacaacagactttgcattggttagattaacaaatattttagacaacatgatt

SEQ ID NO: 288469 - DNA, 895 bp, Unknown
  Bacterial polypeptide expressing nucleotide sequence isolated from the Sargasso Sea
atacataatatagagtctaaagttaaacatgatgttatgctttttttaacatctgttacagaaaaaactggaattaaagcaagatatttacatcaaggaatgacttcttcagatgtattagatacaagttttaatattcaattagttcaatcaggtaaaattattctcaaagatatagatcaactttcaaaagtcttaaaaagacagtcaaaaaaatataaattaactccttgtatcggccgtagccatggaattcatgctgaacctataacttttggattaaaattagcctcattttacgaggaatttaaaagaaatagaaaaaggttagttgatgcaatagatgaggtatcaacttgtgcaatttcaggtgcagttggaacttatgcaaatatcaatccaaaagttgaaaaacatgttggtaaaaaattaggtctaaaagttgaacctatatcaacacaaattattccaagagatcgacatgctttttatttttcagttttagggattattgcaggatctattgaaagagttgcaacagagattagacacttacaaagaacagaggtttatgaattacaagaatatttttcaaaaaatcaaaaagggtcttcagcaatgccacataaaaaaaatcctattttaagtgaaaacttaacaggacttgcaagaatggtaagaagcgcagtggtcccagcactagaaaatattgccttgtggcatgaaagagatatctcacattcaagtgttgaaagaaatataggtcctgatgcaaatataactctagattttgctttagtgagattaacaaacatactagataatatgattatttatccaaaaaaaatgttagaaaatttaaatactaccaaaggtttaattttttctcaggaac

SEQ ID NO: 288470 - DNA, 916 bp, Unknown
  Bacterial polypeptide expressing nucleotide sequence isolated from the Sargasso Sea
atattattaaaagatatagatctaattctaaaagtactaaaaagacaggcaaaaaagcataagttcacaccttgtattggaagaagtcatggaattcatgcagaaccaattacttttggtttaaaactagctacattttatgaagaatttaaaagaaataaaaaaagacttactgatgcaatagacgaggtttcaagctgcgcaatttcaggtgctgtaggaacttttgccaatattaatcccaatgtggaaaaacatgttgcaaaaaaacttggtttaaaaatagaaccgatatctacacaagttataccaagagataggcatgcattttatttttcagttttaggaattattgctggatcggtcgaaagagttgcgatagaaattagaaacctacaaagaacagaggtttatgagatacaagaatatttttcaaaagatcaaaagggatcttcagccatgcctcacaagaaaaatcctattttaagtgaaaacttaaccggtttatcaagaatggtaagaagttatgtagcccctgccttagaaaatatagcactttggcacgaaagagacatttcacattctagtgttgagagaaatataggtcctgatgcaaatattactttagattttgctttaaataggttggcaaatattttagataaaatgatagtttatccaaaaaaaatgattcaaaatattaatttaacaaaaggtttaattttttctcaagaaataatgctagaacttacaaaaaatggtttgagtagagaaaaatcttataaaattgttcaatcatattcaaaaaaatgtttctcagaaaataaaaatttgcttgatctaatatcaaaagataaattaataatgagcaaaattagtaaatctaaattaaattcaatatttaattactcttctc

SEQ ID NO: 288471 - DNA, 661 bp, Unknown
  Bacterial polypeptide expressing nucleotide sequence isolated from the Sargasso Sea
gttatctcaagagacagacattgcggaatatgtccaaacgattgcactcgttggtgcttcgctagatagattcgcaactgaaataagaaatttacagagaactgatgttttagaagttgaagagggatttacaaaagggcaaaaaggaagttcagcaatgcctcataaaagaaatcctattcgaagtgaaagagtaagcggtttagcaagaattttgaggagtcacgtcttaacagccctggagaatgtcccactttggcacgaaagagatataagccatagttcaaatgaacgtatcatgttacctgacgtatcgatctgtttgcattttatgcttagggaaatgaaagatatagtaagcaatttggaagtttacccaaaaaatatgctcaaaaatttaaatatatatggtggtgtaatctttagtcagaaagttttacttttgcttgtagagaagggcatgtctagagaaaaagcttatagcttagtacaaaaaaatgcgcatcaggcatggaatactgagaatgggaatttcaaacaaaatatagagagagataatgaaattatggattttattgatcaaagtgatttagaagaatgttttaatccttcaattcatctcaataatttaagtgtaatatgggagaagctaggtatctag

SEQ ID NO: 288472 - DNA, 833 bp, Unknown
  Bacterial polypeptide expressing nucleotide sequence isolated from the Sargasso Sea
cgaatatgtttatggattcatgatcttctcattgatctagatcaaatactggaaagaagaacagcgttactggcccgtggcgttaagggaacgacaggaacacaggccagttttcttgaactttttgatggtgaccatgcgaaagttcgtcggttggatgaattagtcgccgagaaacttggcttcccagcatcctatgccgtgagcggccaaacctatacacgaaaaatagattctcaagttgtgtttgcattggcaggaatttctgaatcaactcacaaggcaggcaatgatcttcgcttggcatccgcgtggggtgaactggaggagccttttgagtcagaacaggttggatcgtctgccatgccttacaaaaggaatccaatgcgtgctgaaaggatgtgtggtcttgcaagattcgtgttaggccttacttcgacagcagagcagacagccgcaacacaatggttcgagagaacccttgatgattcagcgccccgtagactcatcttaccacaggcatttcttgctactgatgcacagctagtcttatatgacaatattgcaaaaggcttagtcgtggtgccaggtgtcatcaggcggacacttgaacaatacctcccgttcctcgccagtgaacgtattctcatggaagcaaccaaggcgggtggcgatcggcaggaattgcacgaggcaattcgtcggcacagccatgcagcaaccgcacagattcgtgatggctttcagaatgatcttgttaatcgattgagttcggactcactttttgcttctgttgacctagcagctgctatggatgtgaaggggcttgcagg

SEQ ID NO: 288473 - DNA, 970 bp, Unknown
  Bacterial polypeptide expressing nucleotide sequence isolated from the Sargasso Sea
aaaacgatcgaggcgacgaccaatcacgatgtcaaagctgtcgaatacttcctcaaggaagcactaaaagacaatccggagctcaacgccgtcggcgaatttgtgcattttggctgcaccagcgaggatattaataacctcgcacatgccctcatgatctgcgacgggcaccgcgtcatgatcgagcactatgaggccatccgcaatgcattggcaggcctcgcgcaagagaacgctgaacaacccatgctctctaggacgcatggacaagccgctacgcccactactttaggcaaggagctggctaacgtggttatgcgactgaaccggcagctggctaccgctagcgccatccgaccactgggtaagatgaacggcgccgtgggcaactacaatgcccaccgtgtggcctacccgaatgttgactggcccgctttgtcagagcacttcgtgaccggcttgggaatagaatggaatccctacaccacccagatcgagccccatgattacttagcggcatacttcgatgcgattgcccgtctgaatcagattctggtcgacttcagccgagatatttggtcttacatctcgcttgggtacttcaagcagcgcatgatcgagggggaagtcggctcctccacgatgccgcataaagtgaatccaattgattttgagaacgccgagggtaattttggtctggcaaatgccctgcttaaccacctgtctcagaagctacccgtgagccgatggcagcgagatctcaccgacagtaccgtgctccgcaacatgggtgttgccctggggtactcgcagctggcactggtgtcactaagtcggggcatcggcaaactggaagtcgcgccagagccgctagccaaagatctggagaccgcgtgggaagtgctgggagaggccgtgcagacggtgatgcggcgctacgccgtaccggagccctatgagaagctcaaag

SEQ ID NO: 288474 - DNA, 831 bp, Unknown
  Bacterial polypeptide expressing nucleotide sequence isolated from the Sargasso Sea
tcaattagttcaatctggaaaaataattcttaaagatatcgatcaaattttaaaagtacttaagaagcaggcaaaaaaatataaaatgactccatgtatgggaagaagtcatggaattcatgctgaaccacttacttttggattaaaattagcttctttttatgaggaatttaaaagaaacaaaaaaagacttcaagatgcaatagatgaggtatcaacctgtgcaatttcaggagctgttggaacttttgcaaatataagccctaatgtagaaaaacatgttgcaaaaaaattaggtttaaaagttgagccaatttcaacgcaagtaattccaagagatcgtcatgcattttatttttcagttttaggtattattgcaggttcaattgagagagttgcaattgagataagacatttgcaaagaacagaggtttatgaattacaagagtacttttcaaaaaaacaaaaaggatcgtctgcgatgcctcataagaaaaatccaattttaagtgaaaacttaactggtttagctagaatggttagaattgctgtgataccagctttagaaaatatagcgctatggcatgaaagagacatttcacactcaagtgttgaaagaaacattggtcctgatgcaaatattacaacagactttgcattggttagattaacaaatattttagacaaaatgattgtttaccctaaaaaaatgttagaaaacttgaatataacaaaagggctaattttctctcaagaagttatgctagaattaactaaatctggtttaagtagagaaaaatcttacagaatggttcaatcgtatgcgaaaaa

SEQ ID NO: 288475 - DNA, 874 bp, Unknown
  Bacterial polypeptide expressing nucleotide sequence isolated from the Sargasso Sea
gcgcaagagcatgctgaacaacccatgctgtctcggacgcatggacaagccgctacgcccactactttaggtaaggagctggctaacgtggttatgcgactgaaccggcagctggctgccgccagcgccatccgaccactgggtaagatgaacggcgccgtgggcaactacaatgcccaccgggtggcctacccagatgttgactggccagctttatcagaacacttcgtgaccggcctgggaatagaatggaacccctacaccacccagatcgagccccatgattgcttagcggcatacttcgatgcgattgcccgactgaaccagattttggtcgacttcagccgagacatttggtcttacatctcgcttgggtacttcaagcagcgcatggtcgaaggggaagtcggctcctccacgatgccgcataaagtgaatccgattgattttgagaacgccgagggtaattttggtcttgcaaatgccctgctcaaccacctgtctcagaagctacctgtgagccgatggcagcgagatctcaccgacagtaccgtgctccgcaacatgggtgttgccctgggctactcacagctagcactggtgtcactgagtcggggcatcggcaaactgaaagtcgcgcctgagccgatagcggaagatctggaggctgcctgggaagtgctgggagaagccgtgcagacggtgatgcggcggtacggcgtaccggaaagctatgagaagctcaaggcgctcacgcggggccagcggctcgaggctgatacgctgaagtccttcatactggcgctagatattcccgacgatgccaaggagcggctgatgtcattaacccctgacacctatctcggatacgccg

SEQ ID NO: 288476 - DNA, 886 bp, Unknown
  Bacterial polypeptide expressing nucleotide sequence isolated from the Sargasso Sea
gaaattgctgcagctcaagcaatggaaaaatttaagattattcctaagggtgtagcttctgtagtaagacgaagaggaaaaataaacgtcaaaagaattcatcaaattgaaagtaaagtaaaacatgatattattgcttttctaacttcaataactgaaaaagcaggaattaaagcaagataccttcaccaaggaatgacatcatcagatgtacttgatacgagttttaatattcaattagtccaatcaggtaaaattttagtgaaagatatagagaaattattatctgtaattaaaaaaaaagctttaaagcataaaatgactccatgtattggaagaagtcacggtattcatgctgaaccaataacatttggattaaagctagcaacttactatgaagaatttaaaagaaataaaaaaagattagagaatgctatagatgaagtttcaacatgtgctatttctggagcagttggaacttttgcaaatatagatccaagagtagaagttttcgtatcaaaaaaattaaaactaaagcctgaaccaatatcaacgcaagttattccaagagatagacacgcctattatttttctgttttgggaattatagctggatccattgaaagatttgcaactgagattaggcatttacaaagatctgaagtatatgagttacaagaatttttttcaaaaggtcaaaaaggatcttcagcaatgcctcacaaaaaaaatccaatactaagtgaaaatttaactggacttgcaagacttgtaagaagtagtgttgttcctgcgcttgaaaatattgctctatggcatgagcgagatatatctcactctagcgtagagagaaatataggtcctgatgctaacattactttagatt

SEQ ID NO: 288477 - DNA, 821 bp, Unknown
  Bacterial polypeptide expressing nucleotide sequence isolated from the Sargasso Sea
atttttaacttctattactgaaaaagcagggattaaagcaagatatctccatcaaggtatgacttcttcggatgttttggatacaagttttaatattcaactggttcaatctggaaaggtacttttaaaggatattgatcaaatattaaaaattttaaaaaaacaggcaaaaaaatataaactcacactatgtatagggagaagtcatggtattcatgctgaaccattaacctttgggttaaaattagcatctttttacgaagagtttaaaagaaataaaaaaagattaataagtgcaattgatgaaatttcaacttgtgcaatttcaggagcagttggaactttttcaaatattcatcctaatgttgaaaaaattgttgctaaaaaactcgcacttaaagttgaacctatttctacacaaattataccaagagataggcatgcattttatttttcagtattaggaattattgctgcttctatagaaagagttgccacagaaataagacacttgcaaagaacagaagtttatgaattacaagagtatttctcaaaaaaacaaaaaggatcttctgcaatgcctcacaaaaaaaaccctgtgttaagtgaaaatctaactggtctttcgaggctagttagaagctatgtggctccatctttggaaaacattgttttatggcatgaaagagatatctctcattcaagtgtcgaaagaaacattgggccagatgcaaatataactttggactttgctctttctaggttgtcagatattttaaaaaatatgattgtctatccaaaaaaaatggtaacaaatatga

SEQ ID NO: 288478 - DNA, 907 bp, Unknown
  Bacterial polypeptide expressing nucleotide sequence isolated from the Sargasso Sea
aagggtgtctcttcagttgttagaaaaaaagctagaataaatgtaaaaagaattcatcaaattgaaactcgggtaaaacatgatgttattgcttttttaacatctgttacagaaaaagctggattaaaagctagatatcttcatcaaggaatgacttcatctgatgttttagatacaagttttaatattcaattagttcaatcaggtaaaataattcttaaagacttagatctaattttaaaagtacttaaaaaaaaagcaaaaaaatataaatttactccatgcatgggtagaagccacggcatacatgcagagccaattacttttggtttaaaattagcttctttttatgaagaatttaaaagaaatagaaaaagattagttaatgctattaatgaagtatctacttgcgcaatatctggtgctgttggaacttttgcaaatattagtcctaatgttgaaagacatgtggccaaaaaacttggtttacaggtagaacctatctcaactcaaattattccaagagaccgtcatgcattttatttttcagtattaggaattatagctggttctattgaaagagttgcaacggagattagacatttacaaagaactgaggtttatgaaattcaagaatacttttctaaaagtcaaaagggttcatcagctatgccacataaaaaaaatccaatcctaagtgaaaatttaacaggacttgcaagaatagtaagaagcacagtaataccagccttagaaaatattgcattatggcatgaaagagatatttctcactcaagcgtagaaagaaatataggacctgatgctaatataacgttagattttgccttagtaagattaacaaatattttagaaaatatggttgtttatccaaaaaaaaaatgctaga

SEQ ID NO: 288479 - DNA, 778 bp, Unknown
  Bacterial polypeptide expressing nucleotide sequence isolated from the Sargasso Sea
caaggaatgacttcctctgatgttttggatactagtttcaatattcaattagtccaatcaggaaaaatcattttaaacgatatagatcaaattttaaaagttttaaaaaagcaggctaaaaaatacaaactaaccccatgcatgggacgtagtcatgggattcatgcagaaccaattacttttggattaaaattagcctcattttacgaggaatttaaaagaaatagaaagagattagcagctgcaattgatgaagtttcaacttgtgcaatttctggagctgttggtacatttgctaacattaatcctaatgttgaaaaacatgttgcaaaaaaattaggtttaagagttgagccaatttcaacacagattattcctagagacagacatgcgttctatttttcagttttaggaattatagcaggttcaattgagagagtggctattgaaattagacacctccagagaacagaagtttatgagttacaagaatttttttcaaaaaaacaaaaaggttcatcagccatgcctcacaaaaaaaatcctattttaagcgaaaacttaaccggacttgcaagaatggtaagaagtgcagttgtacctgcgttagaaaatattgccctatggcatgaaagagatatatctcattcaagtgtggagaggaatatcggtccagatgctaatatcacaacagattttgctttagtaagacttactaatattttagataatatgattgtgtatccaaaaaaaatgcttgaaaatctaaatataacta

SEQ ID NO: 288480 - DNA, 655 bp, Unknown
  Bacterial polypeptide expressing nucleotide sequence isolated from the Sargasso Sea
atcccaagagataggcatgcttattttttttccgttttaggcatactggcatcatctatagaaagattttcagtagagataagaaatttacaaaaaacagaagtcttagaagtcgaggaaagtttttcaaataatcaaaaaggatcttcagctatgcctcataaacgtaatccaatcttaagtgaaaatttaacaggaatatcaagatatattagaagtgctgtaataccttcattagaaaatattgttctgtggcatgaaagagatatcagtcactcaagtgtagaaagaattatgactccagatatatccatagcaacagattttgccctatttcgtttaaattccataattaaaaatttagtagtatacccaaaaaatatgaagaaaaatctaaatatgcttggaggattgcataatacacataatattatgcttaaattaattaaaaaaggtttaaaaagacaaatagcttataaaattgttcaagagagtgctatggaaacatggaatagtaaaaaacaattttatgatgttttacttagaaataaacaattaaacaaattgcttaaaaagaaagatatcgaaattatcattaagaatggtaatgaacttaaaaatattgactggatttataaaaataagattaaatagt

SEQ ID NO: 288481 - DNA, 736 bp, Unknown
  Bacterial polypeptide expressing nucleotide sequence isolated from the Sargasso Sea
aactacaacgcccacatcgccgtttatccggaagtggactggcaccagttcagcgaagagtttgtgacctctctgggtatccagtggaacccgtacaccacgcagatcgagccgcatgactacattgcggagctgtttgactgcatggcgcgctttaacaccatcctgatcgacttcgatcgcgatgtgtggggttatatcgccctgaaccacttcaaacagaaaaccatcgccggcgaaattggttcttccaccatgccgcacaaggtgaacccgattgacttcgaaaactccgaaggcaacctcggtctgtcgaatgcggtgttgcagcacctggccagcaaactgccggtatcccgctggcagcgcgacctgaccgactccaccgtactgcgtaacctgggcgttggcgtgggctatgcgctgattgcctatcaggcaaccctgaaaggcgtgagcaaactggaagtgaaccgcgaccgtctgctggacgagctggatcataactgggaagtactggcagagccgattcagaccgttatgcgccgctacggtatcgaaaaaccgtatgagaagctcaaagagctgactcgtggtaaacgtgtggatgccgaaggcatgaaacagtttatcgatagccttgcgctgccggaagacgagaaagttcgcctgaaagcgatgaccccggcaaattacattggccgtgccatcaccatggtcgatgaactgaaataac

SEQ ID NO: 288482 - DNA, 805 bp, Unknown
  Bacterial polypeptide expressing nucleotide sequence isolated from the Sargasso Sea
ctcctcaaggagcaggccgccaagctgcctgagctggccaaggtcagcgaattcatccacttcgcctgcaccagcgaggacatcaacaacctgtcccacgccctgatgctgcgcgccggccgtgacgacgtgctgctgccgctgatgcgccagatcgccgacgccatccgtgccctggcccacgcccacgccgacgtgccgatgctgtcgcgtacccacggccagccagcctcgccgaccaccctgggcaaagaactggccaacgtcgtgtaccgcctggagcgccagatcgcccaggttgccgccgtgccgctgctgggcaagatcaacggcgccgtgggcaactacaacgcccatctgtcggcctactcgcagatcgactgggagcagaacgcccgcgccttcatcgaagacgagctgggcctgcagttcaacccgtacaccacccagatcgagccgcacgactacatcgccgagctgttcgacgccattgcccgcttcaacaccatcctgatcgacttcgaccgtgatgtgtggggctacatctcgctgggctacttcaagcagaagactgtcgctggcgaaatcggctcgtccaccatgccgcacaaggtcaacccgatcgacttcgaaaactccgaaggcaacctgggtatcgccaacgcgctgttccagcacctggccagcaagctgccgatctcgcgctggcagcgtgacctgaccgactccaccgtgctgcgcaacctgggcgtgggctttgcccacagcgtcatcgcctacgaagccagcctgaaaggcatcggca

SEQ ID NO: 288483 - DNA, 848 bp, Unknown
  Bacterial polypeptide expressing nucleotide sequence isolated from the Sargasso Sea
aaaagtaggaattaaggctagatatttacaccaaggaatgacatcatctgatgtattagatacaagctttaatatccaattagtccaatcaggtaaaatattagttaaagatattgatcaaatattaaaagtattaaaagccaaagctaaaagatataaattcactccttgtattggtagaagtcatggtattcatgctgaaccaattacatttggacttaaattagcttcttattatgaggaatttaaacgaaatagaataagacttctaagtgcaattgatgaggtgtctacgtgtgcaatttctggagccgttggaacatttgctaacataaaccctaatgtagaaaaacatgttgcaaaaaaacttagattaaaagttgagcctatatcaactcaagttattccaagagatagacatgcacactatttttctgtgttgggaattattgcaggatcgattgaaagagtttcaacagaaataagacatttacaaagaactgaggtttacgaattacaagaatttttttcaaaaaagcaaaaaggttcaagtgcaatgcctcataaaaaaaatccaattttaactgaaaatttaactggattggccagaatggttagaagctatactattccagctttagaaaatattgctctttggcatgaaagagacatctctcattcgagtgttgagcgaaacataggtccggatgcaaatattactttagattttgcgttagtaagattggcaaatgttttggacaaaatgatagtttatccaaaaaaaatgcttcataacctaaatataacaaagggaactattttttcgcaggaattgatgtggaactaac

SEQ ID NO: 288484 - DNA, 895 bp, Unknown
  Bacterial polypeptide expressing nucleotide sequence isolated from the Sargasso Sea
ggtaaaatcaaagttaaaagaattcatgatattgaagcaaaagtaaaacatgatgtaatagcatttttgacttcaattacagaacaagctggtatcaaagctagatatttacaccaaggtatgacttcttcagatgtactggatacaagttttaatctacagttagttcaatctggaaaaatattaatcaaagatatagataaaattttatcagttttaaaaaaacaggctaaaaaacataagttgactccttgcattggtagaagccatggaatacatgctgagcctatcacatttggattaaaactagcatcattttatgaagaatttaaaagaaataaaaatagattaaaagatgcaatagaaaatatttctacttgttcaatttctggtgccgttggaacatttgcaaatattgatcctagaattgaagtatatgtggcaaaaaaactaaaattaaagccagaacctatatcaacacaaataataccaagagatagacatgcgcattatttttcaactttgggcataattgcaggatcacttgaaagaatatcaacagaaattagacatcttcaaagatctgaagtttacgaaatacaagaatttttttcaaaagatcaaaaaggatcttctgcaatgcctcataagaaaaatccaattttaagtgaaaacttaacaggacttgcaagaattgtaaggggttatgttattccgtctttggaaaatatagctctttggcatgaaagagatatttctcactcaagtgttgaaagatctattggtcctgatgcaaatataactttagactttgcattatctagactagcaaatgttttggataaaatgattatatatccaaaaaaaatgttagaaaacttaaatttacaaaagg

SEQ ID NO: 288485 - DNA, 891 bp, Unknown
  Bacterial polypeptide expressing nucleotide sequence isolated from the Sargasso Sea
ttcctgagatgccttgaaagaattcatttaaatgcaaagtttgatgaatcaagaattaaagaaattgagaaagaagttaaacatgatgtcatagcatttcttacaagcgttaatgaatttgtaggagactctggaagatatatacatgttggaatgaccagtagtgatgtacttgatactggcttatctcttcagttaaaagattcttgtgaattgctattagaagaaattgagaaactagaaaatgaagtaagattattagcaaggaagcataaaaatacattaatgattggaagatcacatgctatccatggggagccaatttcctttggttttaaacttgccggatggttagcagaaataataagaaacaaaaaaagattgttaactctgaaagaatccgtcgctattggccaaataagtggtgctatgggaacttacgctaatacaaaccctgaagtagaacaaataacttgtgatttactcggcttaaaaccagatacagcaagtacccaggttatatcaagagacagacatgcggaatatgttcaaacaattgcactcgttggagcttcgctagatagattcgcgactgaaataagaaatctacagagaactgatgttttagaagttgaggagggatttacaaaagggcagaaaggaagttcagcaatgcctcataaaagaaatcctattcgaagtgaaagagtaagcggtttagcgagaattttgaggagttacgtcttaacagccctagaaaatatcccactttggcatgaaagagatataagtcatagttcaaatgagcgtataatgttaccggacgtatcgatctgtttgcattttatgcttagagaaatgaaagatatagtaaaaaatttggaagtttat

SEQ ID NO: 288486 - DNA, 835 bp, Unknown
  Bacterial polypeptide expressing nucleotide sequence isolated from the Sargasso Sea
tgcttttctcagttccataatggaaaaatcaggaaaagagggaagatttttacataagggaatgacgtcttcagatgtgttggatacttgttttaatttacagctcaaacaatctggggaaatactccttaaagatattgataatttattaagcgcaattaaaaaacaatcaataaaacacaaatttactctttgtattggtagaagccatggaatacatgcggaaccaacaacatttgggcttaagcttcttacttattacgcagaattcgtaagaaataaaaaaagacttgaaagagctattgaagatatttcaacttgcgcaatttctggggctgttggaacgtttgcaaatatagatccaagaattgaaaggtttgttgcgaacaaattaaaattaaaaattgaaccaatttcaacacaaattattccaagagacaggcatgcttattttttttcagtgttgggtataattgcgagttctattgaaagattttctgtcgagatacgaaatttacaaagaacagaagttgcagaagtttatgagttttttaaaaaaaaacaaatgggttcatctgcaatgcctcataaaaaaaatccagtcttaagtgagaatttaaccgggttagcaaggttaataaggtcaatggtaataccggcaatggaaaacgttgcgttgtggcacgaaagagatatttcacactcaagtgttgagagaaatattggtccagatgcaactgtaactctagattttgctttaaacagaatgagtgaggtagttaattctatgaaaataaataagaataatatgaaaaaaaatttagatttaacaaaa

SEQ ID NO: 288487 - DNA, 625 bp, Unknown
  Bacterial polypeptide expressing nucleotide sequence isolated from the Sargasso Sea
aactattgccttagttggcgcttctttagatagatttgcaactgaaataagaaatttacaaagaactgatgttttagaagttgaggagggattttcaaaaggacaaaaaggaagttctgccatgcctcataaaagaaatcctattcgaagtgaaagagtaagcggtttagcaagaattttgaggagttacgtcttaacagcactagaaaatgttccactttggcacgaaagagatataagccatagttcaaatgaacgtatcatgttacctgacgtatcaatctgtttgcattttatgctcagggaaatgaaagatatagtgagcaatttggaagtttatccaaaaaatatgctcaaaaatttaaatatatatggtggtgtaatctttagtcagaaagttttacttttgcttgtcgagaaggggttttctagagaaaaagcttataggttagttcaaaaaaatgctcatcaagcctggaatactcagaatggggatttcaagcaaaatatagagagagataatgaaataatggatcttattgatcaaagtgacttagaagaatgttttaatccttcaattcatctcaataatttaagtgtaatatgggagaagttaggtatctag

SEQ ID NO: 288488 - DNA, 973 bp, Unknown
  Bacterial polypeptide expressing nucleotide sequence isolated from the Sargasso Sea
gtaaaacatgatgtaatagcctttcttacttctgttactgaaaaagctggaattaaagcacggtacctccatcaaggaatgacatcatcagatgttttggatacaagttttaatattcagttagtccaatcaggtaaaattatcttaaaagatattgatcagattttaaaagtcttaaaaaggcaagcaaaaaaatataaatttactccgtgtatgggaagaagccacggtatccatgctgagccaattacttttgggttaaaattggcttcgttctatgaggaatttaaaagaaatagaaaaagactaaaaggtgctattgatgaagtttctacatgtgcaatttctggggctgttggtacatttgctaacattaatcctaatgtagaaaaacatgttgcaaaaaaattaggtttaaaagttgaaccaatttccacacaaattattccaagagatagacatgctttttatttttctgttttaggaattattgctggatctatcgagagagtatctgttgaaataagacatctacaaagaactgaagtttatgaactacaagaatacttctctaaaaatcaaaaaggttcatctgcaatgccacataaaaaaaatccaatattaagtgaaaatttgactggtttatctagaatgattagaagtgcagtggtgccagcgcttgaaaatatagctctttggcacgaaagagatatttctcattcaagtgttgaaagaaatattggtccagatgctaatataacaaccgattttgctttggttaggctcgcaaatattttagataacatgattgtttatcctaaaaaaatgcttgaaaacttaaatttaacaaaaggtttaattttttctcaagaagttatgctggagttaactaaaacaggattgagcagagagaaatcatacaagatggtacaatcttatgcaaaaaaaatgttttgcagagaaaatttaaact

SEQ ID NO: 288489 - DNA, 934 bp, Unknown
  Bacterial polypeptide expressing nucleotide sequence isolated from the Sargasso Sea
aatgataacacgatactctagaaaagaacttactgatatctggtccgaatataacaaatatcaaatctggttagatgtagagattgctgcagctgaaggaatggaaaaattaggaacaataccaaaaggtgtggcaagtgctgtcagaaaaaaagctaaaattaatgttaaaagaattcatagtattgaggctaaagtaaagcacgatgttatagcatttcttacatcagttactgaaaaagtaggtattaaagcaagatacttacaccaaggaatgacctcatcagatgtagtagatacaagttttaatattcaattagtccagtctggcaagattttggtaaaggatattgatcaaatattaaaagttttaaaatcaaaagctaaaaaatataaattcacaccatgtatgggtagaagtcatgggatacatgctgaacctataacatttggacttaaattagcttcttattatgaggaatttaaaagaaataaaaaaagactaattagtgctatagatgaaatatcaacttgtgcaatctccggtgctgttggtacatttgcaaatattaatcctaatgtagaaaaacatgttgcaaaaaaattgggattaaaagctgaaccagtatctacacagattattccaagagatagacacgcatattatttttcagttttaggtattatagcaggatcaattgagagagtttcaactgaaattagacacttgcaaagaactgaagtttatgaattgcaggaatttttttcaaaaaaacaaaaagggtcaagtgcaatgcctcataagaaaaaccctatactaagtgaaaacttaacaggattagccagaatggttagaagctataccattccagctttagaaaatattgcgctttggcatgaaagagatatttctcattcaagtgtagaaagaaac

SEQ ID NO: 288490 - DNA, 928 bp, Unknown
  Bacterial polypeptide expressing nucleotide sequence isolated from the Sargasso Sea
atgataaaaagatactcgcgaaaagaactcacaaatatttggtcagaagaaaataaatataaaatttggctggatgttgaagtagctgcagcgcaagcaatggagaaattaggtcaaatacctaaaggtgtttcctctgtagtaagaaaaaaagctagaataaatgtaaaaagaattcatcaaattgaaaaccaagttaaacatgatgttatcgctttcttaacttctattactgaaaaagcaggaattaaagctagatacctacatcaaggtatgacttcttcagatatattggatacaagttttaatattcaattagttcaatcaggaaaaataattcttaaagacttagatcaaattttaaaagttcttagaaaacaatcaaaaaaatataaatttacaccttgtatgggtagaagtcatggtattcatgctgaaccaataacatttggtttaaaactagcttctttttatgaggaatttaaaagaaataaaaaacgattaattgctgctatagatgaagtttcaacgtgtgctatttcgggtgcggttggaacttttgcaaatattaatccaaacgtagaaaaacatgttgccaaaaagcttggtttaaaaattgagcctatttcaacacaagtaattccaagagatcgtcatgctttctacttttcagttttagggattattgctggttcaattgaaagagtcgctgttgaaataagacatttgcaaagaacagaagtttacgagttgcaagaatacttttcaaaaaatcaaaaaggttcttctgcaatgcctcataaaaaaaatccaatattgagtgaaaatttaacaggtcttgcaagaatggtaaggagtgtggtgacacctgctcttgaaaatatagctttgtggcatgagagagatatttctcattcaagtgtgaaag

SEQ ID NO: 288491 - DNA, 916 bp, Unknown
  Bacterial polypeptide expressing nucleotide sequence isolated from the Sargasso Sea
aaatcaaattcctaaaggtgtctcctcaattgtaagaaaaaaagcaaaaattaatgttaaaagaattcatcaaattgagtctcaagttaaacatgatgtcatagcttttttaacttctgttacagaaaaagctggaattaaagcaaggtaccttcatcaaggaatgacttcatcagacgtggtagatacaagtttcaatattcaattagttcaatcaggaaaaataattctcaaagacattgatcaaattttgaaagtattaaaaaaacaagctaacaaatataaatttacaccatgcatgggaagaagtcatggcatacatgctgaacccattacctttggtttaaaacttgcctcattttacgcagaatttaaaagaaatagaaaaagattaatcgatgcaatagatgaagtttcgacatgtgctatttcaggtgcagttggaacatttgccaatataaatccaaatgtagaaaaacatgttgcaaaaaaacttggccttaaagctgaacccatttcaactcaagttattccaagagatagacatgctttttacttctcagttcttggaattattgctggttcaattgagagagtggctatagaaatcagacatttacaaagaagtgaagtgtatgaactacaagaatttttttcaaaaaaacaaaaaggttcatctgctatgccacataaaaaaaaccctattttaagtgaaaatttgactggcctttcaagaatggtacgaagtgcagtaattcctgcacttgaaaatattgccttatggcacgaaagagatatttcacattcaagcgtagagagaaacattggcccagatgctaatataactattgattttgccttagtgagattaaccaatattttagataatatggttgtttatccaaaaaaatgttag

SEQ ID NO: 288492 - DNA, 922 bp, Unknown
  Bacterial polypeptide expressing nucleotide sequence isolated from the Sargasso Sea
ggaaaaatcagagttagaagaattcatgatattgaagcaaaagtaaaacatgatgtaatagcttttttaacctcaattacagaacaagctggtctcaaagcaagatacctgcatcaaggcatgacttcttcggacgtattggatacaagttttaacttacagttagttcaatcaggaaaaattttaattaaagatatagataaaatattaactgttttaaaaaaacaggctaaaaaatataaattaactccttgtattggaagaagccatggaatacatgccgaaccaataacttttggtttaaaattagcatcattttatgaagaatttaaaagaaataaaaaaagattaaacgatgcaatagatgatatttctacatgttcgatttcaggagccgttggtacatttgcaaatattgaccctagagttgaagtttatgttgctaaaaagcttaaactaaaaccagaacctatatcaacacaagttataccaagagacagacatgcacattacttttcaattttaggaataattgcaggatcggttgaaaggatagcaactgaaattagacatcttcaaagatctgaagtttacgaactacaagaatttttttcaaaagatcaaaaaggatcttctgcaatgccacataaaaaaaacccaatattaagtgaaaacttaactggtcttgcaaggatggtcagaagttatgtgattccttctctagaaaatatagctctttggcatgaaagagatatttcacattctagtgttgaaagaaatattgggcccgatgcaaacataaccttagattttgctttattcagacttgcaaatgttttggataaaatgattatttatccaaaaaaaatgttagaaaatttaaatttcactaaaggtttagttttttctcaagaaatgatgt

SEQ ID NO: 288493 - DNA, 817 bp, Unknown
  Bacterial polypeptide expressing nucleotide sequence isolated from the Sargasso Sea
gatgttatagcttttttatcctcaattacagaacaagctggtctgaaagcaagatatttacaccaaggcatgacttcttcggacgtattggatacaagttttaacttacagttagttcaatcaggaaaaattttaattaaagatatagataaaatattatctgttttaaaaaaaaaggctaaaaaatataaattaactccttgtattggaagaagccatggaatacatgccgaacctataacttttggtttaaaattagcatcattttatgaagaatttaaaagaaataaaaaaagattagaagatgcggtagataatatttctacatgttcaatttcaggagccgttggcacatttgcaaatattgaccctagaattgaagtttatgttgctaaaaaactaaaattaaaaccagaacctatctcaacacaaataatacctagagacagacatgcacattattttacaattttaggaataattgcaggatcggttgaaagagtggcaacagaaattaggcatcttcaaagatctgaagtttacgaattacaagaatttttttcaaaagatcaaaaaggatcttctgcaatgccacataagaaaaacccaattttaagtgaaaacttaactggtcttgcaagaatggtcagaagttatgtaattccttctctagaaaatatagcactttggcatgaaagagatatttcacattctagtgttgaaagaaacattggtcccgatgcaaacataactttagattttgctttatttagacttgcaaatgttttggataaaatgaattatttatccaaaaaaa

SEQ ID NO: 288494 - DNA, 1014 bp, Unknown
  Bacterial polypeptide expressing nucleotide sequence isolated from the Sargasso Sea
gaaaagaattaactggatattttggtcagaagaaaataaatacaaaatctggttatatgttgaggttgcagctgctgaggcaatggaaaaacttggtcaaattccaagaggtgttgcttcagttgtaagaaaaaaagctagaattaatgtaagcagaattcacaaaatagaatctgaggtaaaacatgatgtaatagcttttctaacttctgttactgaaaaagctggaagtaaagctagataccttcatcagggaatgacctcatctgatgttctagatactagttttaatattcaattggtccaatcaggtaaaatcatattaaatgatatagatcaaattttaaaagttttaaaaaaacaatccaaaaaatataaatttacaccgtgtatgggaagaagccacggtatccatgctgagccaattacttttgggttaaaattggcttcgttctatgaggaatttaaaagaaatagaaaaagactaaaagatgctattgatgaagtgtcaacttgttcaatttctggggctgttggtacatttgctaacattaatccaaacgttgaaaaacatgttgccaaaaaattaggtctaaaagttgaaccaatttcaacacaggtaattccaagagacagacatgcattttatttttctgttttaggaattattgcaggttcaatagagagagtagcagttgaaataagacacttacaaagaactgaggtctatgaactacaagaatatttctctaaaaatcaaaaaggatcctctgcaatgcctcataaaaaaaatcctatcttaagtgagaatcttactggtttagctagaatggttagaagttcagttgtgccagcacttgagaacattgctctttggcatgaaagagatatttctcattccagtgttgaaagaaatatcggaacagatgctaatataactactgattttgcattggttagacttacaaatattttagataacatgatttgttatcctaaaaaatgcttaaaaac

SEQ ID NO: 288495 - DNA, 922 bp, Unknown
  Bacterial polypeptide expressing nucleotide sequence isolated from the Sargasso Sea
gaagatgccatgcgcattaaagaaatcgagcgcacaacaaaccacgatgtgaaagcggttgaatactttcttaaagagaaggttgccgacaatagtgagctttcagcggtaaatgagtttatccactttgcgtgtacgtctgaagacatcaacaacctttcacacggcttaatgcttcgcgaagcccgcgagaccgttattcttccttactgtgacaaattaattgaagcgctagtagagcttgctaagcgctaccagaacgtacctatgatggcacgtactcacggtcagcctgcttcacctaccaccatgggtaaagaaatggcaaacgtggctattcgcctgaagcgtcagcgtagccaaatcgcaggtgttgagttacttggtaagattaacggtgctgtaggcaactacaacgcacacttgtcagcgtataaagatgtagattggcacgaagtttcagagaagtttgttacctcactaggtctaacctggaacccgttcactacgcaaatagagccgcatgactatattgcagaaatgtttgatgccattgcgcgctttaacaccattcttatcgatttcgatcgtgacgtttggggttacattgcattgggtcacttcaagcaaaaaacggtagctggagaaatcggctcttctaccatgccacacaaagttaaccctatcgatttcgaaaattcagaaggtaacttaggtctggcgaacgctatttttgaccatttagcagctaagcttcctatctctcgctggcaacgtgaccttaccgactcaaccgtactacgtaaccttggcgtaggtgtaggttatgcggttattgcgtatcaggctactttgaaaggtataagcaagttagaagttaatgaacaaagcttacttaacgagctaaacaacaattggaact

SEQ ID NO: 288496 - DNA, 606 bp, Unknown
  Bacterial polypeptide expressing nucleotide sequence isolated from the Sargasso Sea
cctccctcgatcgcttcgcgacggagatccgcaacctgcagcgcaccgatgtgctcgaggtggaggagaacttcgctaagggccagaagggcagttccgccatgccccacaagcgcaacccgatccgcagcgaacgcatcagcggcctggcccgcgtgctgcgcagctacgtggtggcggcactggagaacgttgctctttggcacgagcgcgacatcagccacagctccaccgaacgaatgatgctgccggactgttccgtcaccctccatttcatgctgcgtgagatgaccagcgtggtgaagggtctcggcgtgtatcccgacaacatgcgccgcaacatgaacgtctacggcggtgtggtgttcagccagcgggtgctgctggccctggtgggcaccggcatgagccgcgaagaggcttaccggatcgtgcagcgcaacgcccacaccgcctggaaccatgaaggcggtgatttccgcgccaacctggaagccgatgcggatgtctgcagtcgtctgtcagccgaccaattagcggagtgcttcagcaccgaactgcatcaggccaaccttggggtgatctgggaacgactggcgatctgaa

SEQ ID NO: 288497 - DNA, 916 bp, Unknown
  Bacterial polypeptide expressing nucleotide sequence isolated from the Sargasso Sea
agatgtgaaaattgcagctgcagaagcaatgaaaaacttggcaaatttccaagaggtgtgctttcaatggttaaaaaaaaagctagaattaatgtaagcagaattcacaaaatagaatctgaggtaaaacatgacgtgatagcatttcttacctctataactgaaaaagctggaataaaagcacgctacctacatcaaggaatgacttcatcagacgttttagatactagttttaatattcaattagtccaatcaggtaaaatcatattaaaagatatagatcaaattttaagagttttaaaaaaacaagccaaaaaatataaatttacaccgtgtatgggaagaagtcacggtatccatgctgagccaattacttttggattaaaattggcttcgttttatgaggaatttaaaagaaatagaaatagattgaaaaatgcgatcgatgaagtatcaacatgtgcaatatctggtgctgttggaacatttgctaacattaatccaaatgttgaaaaacatgtggcaaaaaaattaggtctgaaagttgaaccaatttctacccaagtaattccaagagatagacatgcattttatttttctgttttaggtattgttgctgggtctattgaaagagtagcagttgaaataagacatctacaaagaactgaagtttacgaactacaagaatatttttctaaaaatcaaaaaggatcctctgcaatgcctcataaaaaaaatcctatattaagtgagaatcttaccggtttagctagaatggttagaagttcagttgtgccagcacttgaaaacatagctctttggcatgaaagagatatttctcattcgagtgttgaaagaaatatcggaccagatgctaatataacaactgactttgcattagtaagacttacaaata

SEQ ID NO: 288498 - DNA, 1294 bp, Unknown
  Bacterial polypeptide expressing nucleotide sequence isolated from the Sargasso Sea
atgatattaagatattcaagaaaagaactagtaaatatttggtctgagaaaaataagtataagatttggttagatgttgaaattgctgcagcacaggcaatggaaaaatataaaataattcctaaaggtgtctcatctgttgttaaaagaaaaggaaaaattaatgtaaaaagaattcatcaaattgaatcaaaggttaaacatgatgtaatcgcatttttaacatcgattacagaaaaggctggttacaatgctcgatacttacatcaaggcatgacctcgtctgatgtattagatactagtttaaacattcaattagttcaatctggaaaaatattattaagtgatattgatagaattttatctgtccttaaaaaaaaagcgtttaaatacaaatttactccatgcatagggagaagccatggtatacatgctgaaccgattacttttggtttaaagttagcttcttattatgaagagttcaaaagaaacaaaaaacgtctacaaagcgcaattcatgaagtttctacatgtgcaatttcgggcgctgttggaacatttgctaatattgatcctagagtcgaggtacatgtctccaaaaaactaaaactaagacctgaaccaatttcaacacaagttattccaagagatagacatgcatattatttttcaatactaggtataattgctggttctattgagagaattgctaccgaaattcgacatttacaaagatctgaagtttatgaattacaagaatatttttcaaaagatcagaaaggttcttctgccatgcctcataaaaaaaatccgattttaagcgaaaatttaacaggtcttgcaagaattgttcgtagtcatgtaactcctgcactagaaaatatttcactttggcatgaaagagatatttctcactcaagtgttgaaagaagcattggtccagactcaaatataaccttagattttgcattagtcagattgtctaatcttttagacaatatgattgtgtatccaaaaaaaatgataaaaaatttaaatttaactaatggtgttgttttttcacaagaagtaatgcttgaacttacaaaggttggttttacaagagaaaaagcttatagaatggttcaaaagcatgcaaaaataagtatctctaagaatataaacttaattgatttattgaaaaaagatagattaatttactcaaaaatatcaaataaaaaaatagaaagtatttttaaatattcaaaacatctgaaaaatataaactatatttttaaaagagtttttaaataat

SEQ ID NO: 288499 - DNA, 1390 bp, Unknown
  Bacterial polypeptide expressing nucleotide sequence isolated from the Sargasso Sea
catgtccgacacccgccccgacaccctgttcgcgctgaacgcgctctccccgctcgacggccgttacgcctcgaagaccgaagccctgcgcgactggctctcggaagccgcgttcatgcgcaatcgcgtcaccgtcgaaattcactggctgatcgcgctctcgcacgccggtttcgccgaagtgccgcgcttttccgaagcgtccgaacaattcctgctgcaactggccgagcgcttcaccgctcacgacgccgcgcgcatcaaggaaatcgaacgcgtgacgaatcacgacgtgaaggctgtcgaatactggctgaaggaatcggtcaagggtcaggaagaactggaacgcgcgagcgagttcatccatttcgcctgcacgtcggaagacatcaacaacacgtcacacggcctgatgctggcgggcgcgcgcgaacacgtgatcctgccggcgctgcgctcggtgcaccaacgcctcgtggcgctggcgcatgcgcaagccgaacagccgatgctgtcccgcacgcacggccagccggccagccccaccacgctcggcaaggaaatcgcgaacgtcgccgcgcgcctggaacgtgcgatcgagcgcatcgcgaaggtcgaactgctgggcaagatgaacggcgcggtcggcaacttcaatgcgcatctgtcggcgtatccggaattcgactgggaagcgttctcgcgcgaagtagtggaaaagcgtctgaagctcacgttcaatccgtacacgatccagatcgaaccgcacgactacatggctgagctgttcgacgccgtgtcgcgtgccaacacgatcctgctggacctggaccgcgacgtgtggggctacatctcggtcggttacttcaagcaacgcacgaaggccggcgaaattggttcgtccacgatgccgcacaaggtcaatccgatcgatttcgaaaactcggaaggcaacctcggtctcgccaacgccacgctgcgccacctcgccgacaagctgccgatttcgcgctggcagcgcgacctgaccgactcgacggtgctgcgcaatatcggtgtcgcgttcggctactcgctgcttgcgtacgactcgctgatccgcggtctggacaagcttgaggtgaatgcgcagcgtctgaacgaagacctcgacaactgctgggaagtgctggcggaaccggtgcaaacggtgatgcgccgttacggcatcgagaacccgtacgagcaactgaaggaattgacgcgcggcaagggcatcacgcgtgaagcgttgcaaacgttcgtgagcggcctcgcgattccgcaagatgcgaaggaccgtttgctcgccatgacgccgggttcgtatatcggcaaggccgtggaactggccaagcggatcgcttaa

SEQ ID NO: 288500 - DNA, 1237 bp, Unknown
  Bacterial polypeptide expressing nucleotide sequence isolated from the Sargasso Sea
atataaaatctggttaaacgtagaagttttagctgctgaggcaatggaaaagcttggacaaattccaagaggtgtagcttctgttgtaagaaaaaaagctaaaattaatgtaaacagaatacacaaaatagaagccgaaattaaacacgatgtaatagcttttctaacttctgttactgaaaaagctggaattaaagctagataccttcaccagggtatgacctcatctgacgttctagacactagttttaacattcaattagttcaatcaggtaaaatgattttaaaagatatagatcaacttttaaaagttttaaaaaggcaggctaaaaagtataaatttacaccgtgtatgggaagaagtcatggtatccatgctgaaccaattacttttggtttaaaattagcttcgttttatgaggaatttaaaagaaatagaaaaagacttaatgatgccattgatgaagtttctacatgtgcaatttcaggtgcagttggtacatttgccaatattaatcctaatgttgaaaaacatgtggctaagaaattaggtttaaaagttgaaccaatatctacacaagtaataccaagagatagacatgctttttatttttcaattttaggaattattgcaggatcaattgaaagaattgctattgaaataagacacctacagagaactgaagtttatgaattacaggaatatttctctaaaaatcaaaagggctcttctgcaatgcctcataaaaaaaatccaatcttaagcgaaaatttaacaggtttagctaggatggttagaagtacagttgtaccggctcttgaaaacattgctctatggcatgaaagagatatttctcactcaagtgtggagagaaatattggaccagatgctaacataactaccgattttgctttggttaggcttacaaatattttagataacattatagtttatcctaaaaaaatgcttgaaaacctaaatttaacaaaaggtttaattttttctcaagaagttatgttggagttaactaaaacaggtttaagcagagagaaatcatataaaatggtacaatcttatgcaaaaaaatgttttgcagaaaatctaaatttaattgacgtcgtttcatctgataaacttataatgagtaaaatttcaccaaaaaaactaaagtctatatttaattattctaaacactttaaaaatgtaaattttatttttagaagagttttcaaataa

SEQ ID NO: 288501 - DNA, 1138 bp, Unknown
  Bacterial polypeptide expressing nucleotide sequence isolated from the Sargasso Sea
aaaataaatgtaaaaagaattcatgctattgaaactaaagtaaaacatgatgtgatagcatttttaacatcagttacagaaaaagcaggaattaaatctcgttatcttcatcagggaatgacttcgtcagatgtgctagacacaagttttaatattcaattagttcaatcgggaaaaatattattaaaagatatagatctaattttaaaagtattaaaaagacaagcaaaaaaacataagtttacaccttgcattggaagaagtcatggaatccatgcagaaccaattacatttggattaaaactagcatcgttttatgaagaatttaaaagaaatagaaaaagattagttgatgccatagatgaagtctccagctgtgctatttcaggagctgttggaacttttgccaatttaaatccaaatgtggaaaaacatgttgcaaaaaaattaggtttaaaaattgaaccaatatctactcaagttataccaagagatagacatgcattttatttttcagttttaggaattgttgctggatcggtcgaaagagtggcaacagaaattagacaccttcaaagatctgaagtttatgaacttcaagaatatttttcaaaagatcaaaaaggatcttctgctatgcctcataaaaaaaatccaattttaagcgaaaacttaactggattatcaagaatggtgaggagttatgttacgcctgccttagaaaatatagcactttggcacgagagagacatttcgcattctagtgttgagagaaatataggccctgatgcaaatataactttagatttcgctttaaatagattgtcaaatattttagataaaatgataatttatccaaaaaaaatgattcaaaatattaatttaacaaaaggcttaatattttcccaagaaataatgttagaacttacaaaaagtggtttgagtagagaaaagtcatacaagattgttcaatcacattcaaaaaaatgtttttcggaaaataaaaatttgtttgatttaatatcaaaagataaattaataatgagtaaaattagtaagtctaaattaaattcaatatttaattactcttctcattttaaaaatgtaaatttaatttttaaaagagtgtttaaataat

SEQ ID NO: 288502 - DNA, 1073 bp, Unknown
  Bacterial polypeptide expressing nucleotide sequence isolated from the Sargasso Sea
aaaaattcaatctgatactaagctaaaaaatataagtcagtttattcattttgcttgtacttctgaagatattaataatcttagttatgccttaatgctcaaggatgcgcgagagagtatattggttcctaaattacagcaattagttactattctagaaaaaatgtctgctgattattcatctattcctatgttatctagaactcatggccaaactgcatcaccaacaacgctagggaaagaaatggctgtgtatgtccatcgcctaaatagacaaaataaccaattaaaaaatattgagttgttaggtaagttaaacggtgctgtaggtaattttaatgcccacttttctgcctacccagacattgactggatgacattatcaaaagaatttgtcgaagaactcgggctaacctggaatccattaacaacacaaatagaatctcatgattacatggctgaatattttcatgtgttaatacgaagtaatacaattttaatagatctctgtcgtgatctttggggctatatatctttgggttatttcaaattaaaactcattaaaggagaagtagggtcttcaacaatgccacataaaattaatccaatagactttgaaaactctgaaggtaattttggctttgcaaatagtttgctcgagcatctagcgatgaaattaccaacatcgcgatggcaaagagacctaacagattctacagtgctgagaaatactggtgtcggaatagcgcattcagtcattgcgcttgatgcatgtatagctggcctatcaaaaattgatgtagatactgagataataaatcaagatcttgaaaattcatgggaagtcctaacagaagctatacagacggttatgcgttgttacaatattgagggtgcgtatgaaaaactaaaggaaatatctcgtggaaacgaaattaatagagaaacacttcataactttatcgaaaaacttgatattcctaatgatgctaaatccagattaaaaaatttaacaccgagtaattacctaggtaatgctgaaacacaaacaaaattgattaaaaagaaataat

SEQ ID NO: 288503 - DNA, 1239 bp, Unknown
  Bacterial polypeptide expressing nucleotide sequence isolated from the Sargasso Sea
aatataaaatttggcttgaagttgaaatagctgcggctcaagcgatggaaaaattaggacaaattccaaaaggagtttcttcaactgtaagaagaaaagctaaaataaatgtaaaaagaatccatgctattgaagttaaagtaaagcatgatgtaatagcatttttaacttcggttacagaaaaagcaggaattaaagctcgttatcttcaccaaggaatgacttcatcagatgtgttagatacgagttttaatattcagttagttcaatcaggaaaaatattattaaaagatatagatctaattttaaaagttctaaaaagacaggcaaaaaaatataagtttacaccttgtgttggaagaagtcatggaatacatgcggaaccaattacttttggattaaaactggcatcgttttatgaagaatttaaaagaaatagaaaaagattagttgatgcaatagatgaggtttctagttgcgctatttcaggagctgttggaacttttgctaatataaatccaaatgttgaaagacatgttgcaaaaaaacttggtttaaaaatagaaccagtatctactcaagttataccaagagatagacatgcgttttatttttctgttttgggaattattgcaggatcagttgaaagagtagcaacagaaattagacaccttcaaagatctgaggtttatgaacttcaagaatacttttcaagagatcaaaaaggatcttcagctatgccacacaaaaaaaatcctatcttgagcgaaaacttaactggattatcaagaatggtaagaagctatgtaacacctgcattagaaaatatagcactttggcatgagagagacatttcgcattctagtgttgagagaaatataggtcctgatgcaaatattactttagatttttctttaaatagattggcaaatattttagataaaataataatttatccaaaaaaaatgattcaaaatatcaatttaacaaaaggtttaattttttctcaagaaataatgcttgaacttacaaaaagtggattgagtagagaaaaatcatacaagattgttcaatcacattcaaaaaaatgtttttctgaaaataaaaatttctttgatttaatatctaaagataaattaataatgagtaaaattagcaagtctaaattaaattcaatatttaattactcttctcattttaaaaatgtaaatttaatttttaaaagagtatttaaataat

SEQ ID NO: 288504 - DNA, 1372 bp, Unknown
  Bacterial polypeptide expressing nucleotide sequence isolated from the Sargasso Sea
atggatctttccgcactaactgctatctctccggtagacggccgttacggtagtaaaacagcgtcattgcgagggattttcagcgagttcggtcttactaagtaccgtgttcaagttgaaatcaactggttaaagttactcgctgattgcccagaaatcaccgaagtgccaccattaagcgagtcagcgatcgcgcttctcgatgccattaaagacaatttcagtgagcaagatgcgcttcgcgtgaaagccattgaaagcaccaccaaccacgacgtgaaagcagttgaatactttatcaaagaaaaaatcgcagacaacgctgaactcgccgctgtcggtgaatttgttcactttgcttgtacttctgaagatatcaacaacttaagccatggtttaatgttgactgaagcccgcgagcaagtggtactgccttattgcaatgaactgctcagcgccatcaaaaaactggccgttgaataccgctcagtacctttgatgtcacgtacccacggtcagccagcctcgccttcaaccttaggcaaggaaatggctaacgtagccgtgcgtttagagcgccaaatcaagcaaatcgcggcagttgaaatcatggggaaaattaacggcgccgtaggtaactacaacgcgcacatatctgcatacccagaagtgaactggcatgcactgtctgaacgttttgtgacaagccttggcctgcactggaacgcatacaccactcaaatcgaaccgcatgattacattgcagagctctttgatgcgattgcgcgtttcaacactattctgctcgatttcgaccgtgacgtttggggttatattgccttaggtcacttcaagcaacgtaccattgccggtgaaattggctcatcaaccatgccacacaaggtcaaccctatcgactttgaaaactctgagggtaacttaggtattgccaatgcgttgatgcaacatttagccgcaaaactacccgtttcaagatggcaacgtgacttaaccgattccaccgtactgcgtaacttaggtgtgggtatcgcccactcgctgatcgcttaccaagcgaccttaaaaggcatcagcaagttacaagtgaatgaagagcatttacgtgccgagctcgatcaaaactgggaagtattggctgagccagtacaaaccgtgatgcgtcgctatggtattgaaaagccatacgagaagttaaaagaattgacacgcggtaaacgcatcgacgccaagcaacttgccgaatttatcgacggtttagccctgccagaagacgtgaaggctgagctgaagaagatgacgccagccaactatattggccgtgcagaagcattcgttgacgaacttaactaaa

SEQ ID NO: 288505 - DNA, 1018 bp, Unknown
  Bacterial polypeptide expressing nucleotide sequence isolated from the Sargasso Sea
atgattaaaagatactcgcgaaaagaattaactgatatttggtcagaagaaaataaatacaaaatctggcttgatgtagaagttgcggctgctgaagcaatggaaaagctaggtcaaatcccaaaaggtgttgcttcaatagttaaaaaaaaatctaaaattaacgtaagtagaattcataaaatagagtctgaagtaaaacatgatgtaatagcatttcttacctctgttactgaaaaagctggaattaaagcaagatacttgcatcaaggaatgacatcatcagatgttttagatacaagttttaacattcaactggttcaatcaggtaaaattatattaaaagacattgatcaaattttaaaagttttaaaaaagcaggcaaaaaaatataaatttactccgtgtatggggagaagccacggtatccatgctgaaccaattacatttggtttaaaattagcctcgttttatgaggaatttaaaaggaataggaaaagattaaaagaagctattgatgaagtttctacatgtgcaatttctggggctgttggaacatttgctaacattaatccaaatgttgaaaaacatgttgccaagaaattaggtttaaaagttgaaccaatatccacacaaattataccaagagatagacatgctttttatttttctgttttgggaattattgcaggatctatagagagagtagccattgaaataagacatcttcaaagaacggaagtttatgagctacaagaatatttctctaaaaatcaaaaaggatcctcagcaatgccccataaaaaaaatccaatcttaagtgagaatttaacaggcttagccaggatggttagaagtactgtagtaccagcacttgaaaatatagcgctttggcatgaaagagatatctctcactcaagtgtggaaagaaatattggaccagatgctaatataacaactgattttgcattggttaggcttacaaatattttagataacatgattgtttaccctaaaa

SEQ ID NO: 288506 - DNA, 1294 bp, Unknown
  Bacterial polypeptide expressing nucleotide sequence isolated from the Sargasso Sea
atgatccctcgatattcaagagctcccatgactgatatctggagttctaaatcaagatttaaaatttggctcgatattgaactgtatgcttgcgaagctatggaaaaattgggaactgttccaaagggtacaagtaaaaaagttaagtcaaaagctaaaataaacgagaagagaattgatgctattgagaagaaagtaaaacacgatgtgatagcatttcttacatctatatcagaatacgtgggaccgcctgcgcgttttcttcatcaaggcttaacctcatcagatattttagatacagcattcaacatacagctcatgcaatcatctaaaattattgaaaaagaaatggctcaacttcttaaatcactcaaaaaaatagctcttaaatataaaaatacgccttgtatcggaagaagccatggtattcatgcagaaccaacaacctttggtgtaaaaatggcaaacttctatgcagaatttgagcgaaaccaagcacgttttaaaaaggcgacagaagaaatatcggtgtgtgcaatttcaggtgctgtaggcaattatgccaacatagatcctcgtgtagaacagtttgttgcaaaaaaattaggcatgaaagctgaaactatatctactcaagttatcccacgtgaccgacacgctgtttatttcagtgctcttggaattattgccagctcaattgagcgccttgctacagaaatcagacatttgcaaagaacagaggtccttgaagttgaagaatttttttcaaaaggtcaaaaaggctcttcggccatgccacataaaagaaatcctgtactaactgaaaacttaactggcctttcaaggttaattcgtggctacacaataccagctttagaaaatgtttctttatggcatgaaagagatatctcgcactcaagtgtagaaagaataatggctcctgatgccaacatcatcattgattttgctttagcgcgtttaaataatgtaatcgcaaaccttgttgtttatcctaaaaatatgaaagctaatttagataagctaagaaaactacctatgtcagaaggcttaatgctcgccatgacgcaaaaagggttatctcgagaaaaggcctataaaattgttcagcgaaatgccatgaaagtatggaaatctgatctagacttcgaaaccgtactggatacagataatgaattaaaaaaatatttaaataaaaaagaaatatctaaaatattagaccttaagcacgcaacaagaagaacggattatatttttaaaaaagtatttaaataat

SEQ ID NO: 288507 - DNA, 1204 bp, Unknown
  Bacterial polypeptide expressing nucleotide sequence isolated from the Sargasso Sea
gctgaaggaatggaaaaaattagggactattccaaaaggtgtagcaagtactgttagaaaaaaggctaaaattaacgtcaaaagaattcataatattgaagctaaagtaaaacacgatgttatagcatttctcacatctgttacagaaaaggtgggaattaaggcaagatatttacaccaaggaatgacctcatcagatgtagtagatacaagttttaatattcaattagttcaatctggtaaaattttagtaaaagatattgaccaaatattaaaagttttaaaatctaaagctaaaaagtataagtttactccatgtatgggtagaagtcatggtattcatgctgaaccgattacatttggacttaaattagcttcatattatgaggaatttaaaagaaatagaaagagattaattaatgcaatagatgaaatatcaacgtgcgcaatatctggtgctgttggcacttttgcaaatattaaccctaatgtcgaaaaacatgttgcaaaaaaactaggattgaaggctgaaccaatttctactcaagttatcccaagggacagacatgcatattatttttcagttttaggaattatagcaggatcaattgaaagagtttcaactgaaattagacatttacaaagaacagaagtttatgaattgcaagaatttttttcaaaaaaacaaaaaggatcaagtgcaatgcctcataaaaaaaatccaatattaagtgaaaacttaacaggattatcaagaatggttagaagttatactattccagcactagaaaatattgcactttggcatgaaagagatatttcacattcaagcgttgaaagaaatattggcccagatgctaatataactctagattttgccttagtaaggttagcaaacttattagataatatgatcgtctatccaaaaaaaatgcttaataacctaaatattacaaaaggtaccattttctcccaagagttgatgttagaactgacaaaatcaggtttgactagagaaaagtcttatagattagttcaagcacatgccaaaaaatgcatagcagataatcttaatctttttgatgttgtgatgagtgataaaaacattacatctagaatatcaagcaagaaaatgaaaaaaatatttgattattcttcacactttaagaatgttaatttaatttttaatagggtctttaaataa

SEQ ID NO: 288508 - DNA, 1294 bp, Unknown
  Bacterial polypeptide expressing nucleotide sequence isolated from the Sargasso Sea
aatgataacaagatactctagaaaagaacttacggatatttggtccgaatataacaaatataaaatttggctagatgtagaaattgctgcagctgaaggtatggaaagattaggaactattccaaaaggtgtagcaagtgctgttagaaaaaaggctagaattaatgttaaaagaattcacaacattgaagccaaagttaaacatgacgtcatcgcatttttaacctctgtcactgaaaaagtgggaatcaaggcaagatatttacaccaaggaatgacctcatcagatgttgtagacacaagttttaatattcaattagttcaatctggcaagattttgctaaaagatattgatcaaattttgaaagttttaaaatctaaagctaaaaaatataaatttacaccatgtatgggtagaagccatggtattcatgcagaaccaattacatttggtcttaaattagcttcatattatgaggaatttaaaagaaataaaaaaagactaattagtgcaatagatgaaatatcaacttgcgcaatatctggtgctgttggtacttttgcaaatattaatcctaatgtagaaaaacacgttgctaaaaaactagggttaaaagttgaacctatatctactcaagttattccaagagatagacatgcacattatttttcagttttaggtattatagctggatcaattgagagagtttcaacagaaattagacacttacaaagaactgaagtttatgaattgcaggaatttttttcaaaaaaacaaaaaggttctagtgcaatgccacataaaaagaacccaatattaagtgaaaacttaactggacttgctagaatggttagaagttatactattccagcactggaaaatattgctctttggcatgaaagagatatttcacattcaagtgtagaaagaaatattggtccagatgcaaacataactctagattttgctttagtaagattagcgagcgtattagataaaatgattgtctatccaaagaaaatgcttaacaatcttaatatcaccaagggtacaattttctctcaagaattgatgttagaactaacaaaatcaggtttaagtagagaaatctcttatagattagtacaggcacatgctaaaaaatgcatagcagataatctcaatcttttagatgttgtgatgagtgataaaaacattacatctagaatatctagcaaaaaaatgaaaaaaatatttgattattcctcacattttaagaatattaatataatttttaacagggttttcaagtaa

SEQ ID NO: 288509 - DNA, 1120 bp, Unknown
  Bacterial polypeptide expressing nucleotide sequence isolated from the Sargasso Sea
atgattaaaagatactctcgaaaagaattaacagatatttggtctgaggaaaataaatacaaaatatggttggatgttgaaattgctgcagctcaagcaatggaaaaacttggtcaaattccaaaaggtgtctcgtcaatagttaggaaaaaagctagaataaatgtaaaaagaattcatcaaattgaaagtaaagttaaacatgatgtaattgcttttttaacttctgtaactgaaaaggcaggaattaaagctagataccttcatcttggcatgacttcatctgatgtagtagatacaagttttaatattcaattagttcaatcaggaaaaattatcttaaaagacatagatcaaattttaaaagtattaaaaaaacaagctagaaaatataaatttactccttgcataggtcgtagtcatggaattcatgctgagccaataacatttggattaaaattagcttccttttatgaagagtttaaaagaaatagagaaagattagtttacgctatagatcaaatatcaacttgtgcaatttctggagctgttggaacatttgcaaatgtaaaccctaatgttgaaaaacatgttgcaaaaaaacttggattaaaagttgaaccaatctctactcaaattattcctagagatcgacatgcattttatttttcagtattgggaattatcgcaggaagtatagaaagagtagctatagaaataagacatttacaaagatcagaagtttatgaactgcaagaatatttttctaaaagccaaaagggttcatctgcaatgccccataaaaaaaatccaattttaagtgaaaatttaaccggacttgcaagaatggtaagaagttctgttgttccagcacttgaaaatattgcactttggcatgaaagagatatttcacattcaagtgtagagagaaatattggtcctgatgcaaatattactctagactttgcactggtaagattagcaagtgttttagataatatgattgtttatccaaaaaaaatgctagaaaatcttaatcttactaaagggctaattttttcacaagaagtgatgctagaactgacaaaaactggtatcacaagagaaaaatcttataagt

SEQ ID NO: 288510 - DNA, 1294 bp, Unknown
  Bacterial polypeptide expressing nucleotide sequence isolated from the Sargasso Sea
tatgataacacgctactctagaaaagaacttacggatatatggtccgaacataataaatataaaatctggttagatgtggaaattgcagctgccgaagggatggaaaaattaggaactattccaaaaggtgttgctagtgcagttagaaaaaaagctaaaattaatgttaaaagaattcatagcattgaagctaaagtaaaacacgatgtaatagcttttttaacctctgttaccgaaaaagtaggaattaaagctagatatttacatcaaggaatgacctcgtcagatgtagtagatacaagttttaatattcaattagtccagtctggtaaaattttagtaaaagatattgatcaaatattaaaggttttaaaatcaaaagccaaaaaatataaatttacaccttgtatgggtagaagtcatggtattcatgcagaaccaattacatttggacttaaattagcttcttattatgaagaattcaaaagaaatagaaaaagattaataagtgctatagacgaaatatcaacgtgcgcaatttctggcgctgttggcacttttgcaaacattaatcccaatgtagaaaaacatgttgctaaaaaactaggattaaacgctgagccagtatctacacaagttattccgagagatagacatgcatactatttttcagttttaggaattattgcaggatcaattgagagagtttcaactgaaattagacacttacaaaaaactgaagtttatgaattgcaagaatttttttcaaaaaaacaaaaaggctcaagtgcaatgccacataaaaagaacccaatattaagtgagaatttaacaggattagctagaatggttagaagctataccatcccagctctagaaaatattgcactttggcatgaaagagatatttctcactcaagtgtagagagaaacattgggccagatgcaaatataacattagattttgctttagtgagattggcaaacgttttggataaaatgatagtttatccaaagaaaatgcttgataaccttaatatcacaaggggtaccattttctcacaagaattgatgcttgaattaactaaatcaggtttaactagagaaaactcttatagattaatccaagcgcatgcaaaaaaatgcatagcagataatcttaaccttttagatgttgtgatgagcgacaaaaacattacatctaggatatcaagtaaaaaaatgaaaaaaatatttgattattcctcacactttaagaatgtaaatttaatttttaacagggtatttaaataa

SEQ ID NO: 288511 - DNA, 1304 bp, Unknown
  Bacterial polypeptide expressing nucleotide sequence isolated from the Sargasso Sea
acaaaaaaaggtgattaatcagttagagattgaagctgctgcagcattatctcaaggtgaaataaatctaattccaaaatcaattgcaaaagatattgctaaagctgcacgttcaggaaaaattacggctaaacggattaaacagttagaggcaaaaagtgatcacgacactgctgcattggttgaatcattagctgaaagatgtaaaaaagaatcaagaccttggatacattacggattaacaagtaatgatcttgtagatacaagcaattcaatgcaaatgagagatgcaattcgtattattcaaccaaaggttgcaaaacttgcattggtattaacaaaaaatgcagtgaaatacaaaacacttccagcagtaggaagaacacatggtcaacatgcaagcattatttcgtttggtttgaaatttgctaattgggcagcggaaatgtcaacacatcttgaacgcattgatgaaataaaaaaacgaattcttatttgtaaaacattaggagttgtgggtacaggttctctgatgggtaaaaatgcagttagagttcaagacagagtagcaaaaaaattatcattatttccagctaaagtaacaacacaaataattcctcgtgaaagatatgcagaatatatttttcagctgtcacttctaggtgcaacattagaaaaaatttctattgaaataagaaatctacaaagaacagaaattggagaagttgcagaacacttcaaaaaaggtcagatgggaagtagcgcagttcctgtaaaaagaaatccaataaagagtgaacgaatttcttcattgtctaaattattacgtagtcaaatcaacacttcgtttgaaaatattccgttatggcatgaaagagatttatcaaattcagctaatgaaagattcaccataccaatggcatcaattctacttgatgaaatgattgaaacaatgattagaataattagtaatctaaaaatcaatgataaacgagtacgagaaaatctttacataactaaaggtcaaatttttgcagaatttgtattagaggcattaatcaaaaaaggaattccgagatttgttgcatatagagatgtacaaagagttgcatttgaggctcatgaaaagaaaatgaattacatggatgcattgattggagataaaaatatcttgaaatcattaacagaaaaagaggttagagagatttttgtacctgaaaaacatctcggagcatcacaaattatcataaacaatgtagacaaacacgttaaagtgaatgcaaaaaaattatctaagctttaag

SEQ ID NO: 288512 - DNA, 1372 bp, Unknown
  Bacterial polypeptide expressing nucleotide sequence isolated from the Sargasso Sea
catggatctttccgcactaactgctatctctccggtagacggccgttacggtagtaaaacagcgtcattgagagggattttcagcgagttcggtcttactaagtaccgtgttcaagttgaaatcaactggttaaaattactcgccgattgcccagaaatcaccgaagtgccgccgctgagcgaatctgctatcgcggtgttagatgcaattaaagacaatttcagcgagcaagatgcgctacgcgtgaaagccattgaaagcaccaccaaccacgacgtaaaagcggttgaatacttcatcaaagaaaaaatcgcagacaacgctgaactcgccgctgtgggtgaatttgttcacttcgcctgtacctctgaagacatcaacaacctgagccacggcttaatgttgaccgaagcccgtgagcaagtggttctgccatactgcaatgaactgctcagcgccatcaaaaaactggccgttgaataccgctcagtgccattgatgtcacgcactcacggtcaacccgcttcaccttcaactttaggtaaagaaatggccaacgttgcggtgcgtttagagcgtcaaatcaagcagatcgcagcggttgaagtcatgggtaaaattaacggcgcagtgggtaactacaacgcccacttatctgcttacccagaagtcaactggcatgcactgtctgagcgttttgtcaccagcttaggcctgcactggaacgcttacaccacgcaaatcgagccacacgattacatcgccgaactgtttgatgccatcgcgcgtttcaacactatcctgattgacttcgaccgtgacgtttggggttacattgcccttggtcacttcaagcaacgtaccgttgccggtgaaattggttcatcaaccatgccacacaaagtcaacccaatcgactttgaaaactcagagggtaaccttgggattgctaacgctctgatgcaacacttagcgtctaagttaccagtatcaagatggcaacgtgacttaactgactcaaccgtactgcgtaacttaggcgtgggtattgcccactcgctgatcgcctaccaagccaccttaaaaggcatcagcaagttacaagtgaacgaagatcatttacgtgccgaactcgaccaaaactgggaagtcttagccgagccagtacaaaccgttatgcgtcgttatggtattgaaaagccatacgagaagttaaaagaactgactcgcggtaagcgtatcgatgcccagcaattagcggtattcatcgacggtttagccctgcctgaagaagtgaaagcagagctgaagaagatgacgccagccaactacattggccgtgctgaagccttcgtcgacgagcttaactaa

SEQ ID NO: 288513 - DNA, 1021 bp, Unknown
  Bacterial polypeptide expressing nucleotide sequence isolated from the Sargasso Sea
atgataaaaagatactctcgaaaagaactaactgatatttggtcagaagaaaataaatataaaatttggctagatgtcgaagttgcagccgcacaagcaatggaaaaacttggacaaataccaagaggagtttcttcagttgtacgaaaaaaagcaaagataaacgtaaatagaatacatgttatagagtctaaagttaaacatgatgttattgcttttttaacttctgttacagaaaaagctggaattaaagcaaggtatttgcatcaaggaatgacttcctctgatgtattagacacaagttttaatattcaattagttcaatcaggtaaaattattctcaaagatattaatcaacttttaaaagtcttaaaaagacaatcaaaaaaatataaattaactccttgtatcgggcgtagccacggcattcatgctgaacctataacttttggcttaaaattagcctctttttatgaggagtttaaaagaaataggaaaagacttgtttatgcaattgatgaagtatcgacttgtgcaatttcaggtgcggttggaacatatgctaatataaatccaaaagttgaaaaacatgttgctaaaaaattaggtttaaaagttgaacccatttcaactcaaattattccacgagatcgacatgctttttatttttcagttttaggtattattgcaggatctattgaaagagttgcaacagagattagacatctacaaagaacagaagtttacgaattacaagaatatttttcaaaaaatcaaaaaggatcttcggcaatgccgcataaaaaaaatcctattttaagtgaaaacttaacaggccttgcaagaatggtgaggagcgctgtgatccctgctttagaaaatattgctttgtggcatgaaagagatatttcacattcgagtgttgaaagaaatatagggcccgatgccaatataacattagattttgctttggtgagattgacaaatattttagataacatgattatttatccaaaaaaaa

SEQ ID NO: 288514 - DNA, 1279 bp, Unknown
  Bacterial polypeptide expressing nucleotide sequence isolated from the Sargasso Sea
atgatagaaagatactcctcagatgaaatgtcttcaatttggagtgaagataataaagtagctaaatggctagatgttgaaagagcagtaattgaaattcttgaaaaagaggaaattacacctaaaggactgtcaaaacaacttaaagaagtttcgattactcacaatgaagtattagaaagagaagctgttacaaatcatgatttagctgcttttgttgatgttttacaaagcaaaatacagaaagactctaattggatacattacggattaacaagttctgatgttgttgatacagcaaatgcgcttttaattaaagagtcattaaatattgttgttgaaaaaatagctgaactcgtaaattcactaaaaaataaagcaataagtgaatctgatacattaattataggaagaactcatggagtctatgctgaaccaacaacattggggagtatatttggaaattggtgtcttgaagtatctagaggtctagataggttaagttctagcttagaaataataagttatggaaaaattagtggtgctgttggtaaccattctctaatttctgaagaaatagaaaataaaatccttgaacaactttccttaaaaccagaacctcttgcttcacaaatagttagtagagacagatatgcagatttattttctagctttgcaataattgctggaacttatgaaagaattgcaacaaatataagacactaccaaagatcggaagttggtgaaatgtatgaagcgtttaaacaaggtcagaaaggttcgtctgcaatgcctcataaaaaaaatccaattggttctgaaagaatctgtggattagcaagagtggttaggggaaatacacaagcaagttacgagactatggcactttggcatgaaagagatatatcaaattcatcagttgaaagaattattcttccggatacatttaaattgattgattttatgacaagagacttgattaatattatcaatgaccttgttattaatcatgagaatattgaatcaaacttaaattctgcaaaaacaaaacttggatctcaaaaacttctttcattaattgtgagtaaaggtaattcacgtgatgaaggttataagtttgtacaaaatattacacaaaataatttttcgatagacgcaattattgaatctactttgtcagaatttgatgatatatcaaaagatgaaattgaaaactgctttagcttaacaacgaatatagattctaaaataattgaaaagaagcttaaagaactttaaa

SEQ ID NO: 288515 - DNA, 1294 bp, Unknown
  Bacterial polypeptide expressing nucleotide sequence isolated from the Sargasso Sea
atgattaaaagatactcgcgtaaacaattaactaacatttggtcagaggaaaataaatataaaatctggttagatgttgaaattgctgcagcagaggcgatggaaaaacttggacaaattccaagaggagttgcatctattgttagaaaaaaagctaaaattaatgtctcaagaattcataaaatagagtctgaggttaaacacgatgtgatagcctttttatcttcagttactgaaaaagctggaattaaagctcgatatcttcaccaaggaatgacttcctctgatgttttggatactagtttcaatattcaattagtccaatcaggaaaaatcattttaaacgatatcgatcaaattttaaaagttttaaaaaagcaggctaaaaaatacaaactaaccccatgcatgggacgtagtcatgggattcatgcagaaccaattacttttggattaaaattagcctcattttacgaggaatttaaaagaaatagaaagagattagcagctgcaattgatgaagtttcaacttgtgcaatttctggagctgttggtacatttgctaacattaatcctaatgttgaaaaacatgttgcaaaaaaattaggtttaagagttgagccaatttcaacacagattattcctagagacagacatgcgttctatttttcagttttaggaattatagcaggttcaattgagagagtggctattgaaattagacacctccagagaacagaagtttatgagttacaagaatttttttcaaaaaaacaaaaaggctcttcagcaatgcctcataaaaaaaatcctattttaagtgaaaacttaaccggacttgcaagaatggtgaggagtgcagttgtacctgcgttagaaaatattgctctatggcatgaaagagacatatctcactcgagtgtggaaagaaatattggtccagatgctaatatcacaaccgactttgctctagtaagacttactaatattttagataatatgattgtgtatccaaaaaaaatgcttgaaaatctaaatataactaaaggtttgattttttcacaagaagtaatgttagaattaactaaatctgggttaagtagagaaaaatcctacaaaatggttcagagctatgcaaaaaagtgttttgcagaaaatctaaatttatatgatgttcttttaaaggataaattaattatgactaaaatttctcaaaaaagacttaaatccatctttagttactccaaacattttaaaaatgtaaatttaatctttagaagagtttttaaataat

SEQ ID NO: 288516 - DNA, 928 bp, Unknown
  Bacterial polypeptide expressing nucleotide sequence isolated from the Sargasso Sea
caactgattgacggcgtcacagcactttctgttgaatatcgcgatattcccctgctctcccgtactcacgggcaaccggccaccccatcaacgatgggcaaagaaatggcaaacgtggcgtatcgcatggagcgtcagtaccgccaactcaaccaggttgaaatcctcggaaaaatcaacggtgctgtgggtaactataacgcccacatcgccgcttacccggaagttgactggcatcagtttagcgaagagttcgtcacttcgcttgggatccagtggaatccatacaccacacaaatcgagccgcacgattacatcgctgagctgtttgattgcatcgcccgctttaataccattctgatcgatttcgatcgcgacgtctggggttacattgcgttgggtcacttcaagcagaaaactgtcgcgggcgaaatcggttcttcgaccatgccacacaaagtgaaccctatcgatttcgaaaactctgagggtaacctgggcctgtctaatgcggttctgcagcacctggcgagcaaactgccggtctcccgctggcagcgtgacctgactgattctaccgttctgcgtaacctgggcgtaggtattggctatgcactgatcgcctatcagtccacgctgaagggcgtgagcaaactggaagtgaaccgcgatcatctgctggatgaactggatcataactgggaagttctggcagagccgattcagaccgtgatgcgtcgctacggtattgagaagccgtacgagaagttgaaagaactgacccgtggcaagcgcgttgacgccgaaggtatgaagcagtttatcgatggtctggcactgccggaagaagagaaaactcgcctgaaagcaatgacgcctgccaattatattggtcgcgccatcgccatggttgatgaactgaagtaat

SEQ ID NO: 288517 - DNA, 910 bp, Unknown
  Bacterial polypeptide expressing nucleotide sequence isolated from the Sargasso Sea
aatgataacaagatactctagaaaagaacttacggatatttggtctgaacataacaaatatcaaatttggttagatgtagagatagctgcagccgaaggcatggaaaaattaggtacaataccaaaaggtgtagctagtgctgttaagaaaaaaagcaaaatcaatgtaaaaagaattcataatattgaagggaaagtaaaacatgatgttattgcatttctaacctcaatcactgaaaaagtaggaattaaggctagatatttacaccaaggaatgacttcttcagatgttttagatacaagttttaatattcaattagttcaatctggtaaaatattaataaaagatattgatcaaattttaaaagttttaaagttaaaagctaaaaaatataaattcactccttgtattggtagaagtcacggtattcatgcagaaccaattacatttggtcttaaactagcatcctattatgaggaatttaaaagaaatagaaaaagactctttgatgcaatagaagatgtatcaacttgtgcaatatcaggagctgtaggaacatttgccaacattaatccaaatgttgaaaaacatgtcgctagaaaattaggattaaaagttgaacctatatcgacacaagttattccaagagatagacacgctcattacttttctgtgttaggaattattgcagggtctattgaaagagtttcaacagaaataagacatttgcaaagaactgaggtatatgaactacaagaatttttttcaaaaaaacaaaaaggttcaagcgcaatgcctcataaaaaaaatcctattttaacagaaaatttaactggtttggcaagaatggttagaagctatactattcctgctttagaaaatattgctctttggcatgaaagggatata

SEQ ID NO: 288518 - DNA, 1072 bp, Unknown
  Bacterial polypeptide expressing nucleotide sequence isolated from the Sargasso Sea
ttgatcgagcgttacacccttcccgagatggggtccgtctggagtgagcaggcgaagttccagagctggctggatgtggagatcgccgccacagaagccaactgccgcctaggacgtgtcccccaggattcgctggacacgatcaaggccaaggctgacttttccgtggagcgaatcctcgaaatcgaagcggaagttcgccatgacgtgatcgccttcctcaccaacgtgaacgaacacgtcggtgatgccggccgtcacattcacgtgggcatgaccagcagcgatgtactggacaccggcctggcactgcagctgaagcggtccgttgccctgctccgacaggagctggatgccttggccgatgccctacgggcgttggcccgtgagcacaaagccaccgaaatgattggccgttcccatgccattcatggggagccgatcacctttggcttcaagctcgccggctggctggcggaaaccgaacgcaaccgcagccgcctggcgcggctggaagaagaggtggccgtcgggcagatcagtggggccatgggcacatacgccaacaccaacccccaggtggaagccatcacctgtgaaatccttggcctgacgccggataccgccagcacccaggtgatttcccgcgatcgccacgccgactacgttcagaccctggccctggtaggcgcctccctcgatcgcttcgcgacggagatccgcaacctgcagcgcaccgatgtgctcgaggtggaggagaacttcgctaagggccagaagggcagttccgccatgccccacaagcgcaacccgatccgcagcgaacgcatcagcggcctggcccgcgtgctgcgcagctacgtggtggcggccttggagaacgttgctctttggcacgagcgcgacatcagtcacagctccaccgaacgaatgatgctgccggactgctccgtcaccctccatttcatgctgcgtgagatgaccagcgtggtgaagggtctcggcgtgtatcccgacaacatgcgccgcaacatgaacatctacggcggtgtggtgttcagccaacgggtgc

SEQ ID NO: 288519 - DNA, 1294 bp, Unknown
  Bacterial polypeptide expressing nucleotide sequence isolated from the Sargasso Sea
atgattaaaagatactcgcgtaaacaattaactgacatttggtcagaggaaaataaatataaaatctggttagatgttgaaattgctgcagcagagtcgatggaaaagcttggacaaattccaagaggcgtttcatctattgttagaaaaaaagctaaaattaatgtctcaagaattcataaaatagagtctgaggttaagcacgatgtgatagcctttttatcttcagttactgaaaaagctggaattaaagctagatatcttcaccaaggtatgacttcatcagatgttttagatactagtttcaatattcaattagtccaatcaggaaagatcattttaaacgatatcgatcaaattttaaaagttttaaaaaggcaggctaaaaaatataaactaaccccatgcatgggacgtagtcatggtattcatgcagaaccaattacttttggcttaaaattagcttcattttatgaggaatttaaaagaaatagaaagagattagcagctgcaattgatgaggtttcaacttgtgcaatttctggagctgttggtacatttgctaatattgatcctaatgttgaaaaacatgttgcaaaaaaattaggtttaaaagttgagccaatttcaacacaggttattcctagagatagacatgcgttctatttttcagttttaggaattattgcaggttcaatagagagggtggctactgaaattagacatctgcagagaacagaagtttatgagttacaagaatttttttcaaaaaaacaaaaaggctcttcagcaatgcctcacaaaaaaaatcctattctaagtgaaaacttaaccggacttgcaagaatggtgaggagtgcagttgtgcctgcattagaaaatattgctttatggcatgaaagagatatttcccattcgagtgtggagagaaatattggtccagatgctaatatcacaaccgactttgctttagtaagacttacgaatattttagataatatgattgtgtatccaaaaaagatgcttgaaaatttaaatataactaaaggtttgattttttcacaagaagtaatgttagaattaactaaatctgggttaagtagagaaaaatcctacaaaatggttcagagctatgcaaaaaagtgttttgcagaaaatctaaatttatatgatgttcttttagaggataaattaattatgactaaaatttctcaaaaaagacttaaatctatctttagttactccaaacattttaaaaatgtaaatttaatctttagaagagtttttaaataat

SEQ ID NO: 288520 - DNA, 920 bp, Unknown
  Bacterial polypeptide expressing nucleotide sequence isolated from the Sargasso Sea
aatgattgaaagatactcgagaaaagaacttaaagatatttggtcagaggaaaataaatataaaatttggttagacattgaaattgctgcagctgaagcaatggaaaaatataaagtaataccaaaaggagttgcatcaatagtcaaaaaaagaggtaaaattaaagtaaaaagaattcatgatattgaggctaaggttaaacacgacgttatagcatttctaacatcaattacagaacaagctggtattaaagcaagatacttgcatcaaggaatgacatcatcagatgttttagatactactttaaatattcaattagttcagtcaggcaagatattattaacagacattgataaaattttgtcagttctgaaaaaacaatctaaaaaatataaaatgacaccttgtattggaagaagccatggcatccatgcagagccaattacatttggattaaaacttgcatccttttacgcagaatttaaaagaaataaagagagattaaagcattcaatagataacatttccacgtgcgcaatatccggtgctgttgggacatatgcaaatataagtccaaagattgagttatatgttgcaaaaaaattaaaattaaaaccagaaactatttcatctcaaataattccaagagatagacatgctcaatattttacaacattaggaattattgcaagttctgttgagagagttgcgactgaaataagacatcttcaaagatcagaggtttatgaacttcaagaatttttttcaaaagatcagaaaggttcctcggcaatgccccataaaaaaaatcctattttgtcagagaatttaactgggcttgcaagaatagttagaggacacgttgttcccgccttagaaaatgtaactttatggcatgaaagagatatatctcattcaa

SEQ ID NO: 288521 - DNA, 1294 bp, Unknown
  Bacterial polypeptide expressing nucleotide sequence isolated from the Sargasso Sea
atgatatctagatattccagaaaagaactcactagtatttggtctgaagaaaataagtataaaatttggcttgatgtagaaattgctgcagcacaagcaatggaaaaacttggtcaaatacctaaaggagttgcttcagttgttagaaaaaaagcaagaattaatgtaaaaagaattcatcaaattgaaagtcaggttaaacacgatgtaattgctttcttaacttctgttactgaaaaagcagggataaaggcaaggtatcttcatcaaggtatgacttcatcagatgttttggatactagttttaatattcaattagttcagtctggtaaaataattcttaaagacttagatcaaattttaaaagtattaaaaaaacaagctaagaaatataaattcacaccttgtatgggtcgaagtcatggtattcatgctgagcctattacatttggtttaaagttagcatcttattatgcagaatttacaagaaataaaaaaagattagaattggcaattgatgaagtatctacatgtgcaatatcaggtgctgtgggtacttttgcaaatattaatccaaatgttgaaaaatatgttgcaaaaaagttaggtttacaaattgaaccaatttcaactcaagtaattccacgagacagacatgcattttatttttcagttctagggataatagcaggatctattgagagagttgcaactgaaataagacatttacaaagaactgaagtttatgagttacaggaatttttttcaaaaaagcaaaaaggctcatctgctatgcctcacaaaaaaaatccaatattaagtgaaaatttaacagggctagcaagaatggttagaagctctgttgtgcctgcactagaaaatatagccttgtggcatgaaagagatatttcacactcaagtgttgagagaaatatagggcctgatgcaaatataactttagattttgcattaacaagacttacaaacatattggataacatgatagtttatccaaaaaagatgttgcaaaatttaaatataacaaaaggcttaatcttttctcaagaacttatgttagagcttaccaagaatggtttatcaagagaaaagtcatatagaatggttcaaaattatgcaaaaaaatgctttgctgaaaatttagatctgtttaatgttatacagtctgacaaatatataatgagtaaaattccatctaaaaaacttaaaactattttcagttattctaaacattttaaaaatataaatttaatttttagaagagtttttaaataat

SEQ ID NO: 288522 - DNA, 1417 bp, Unknown
  Bacterial polypeptide expressing nucleotide sequence isolated from the Sargasso Sea
atgatacgcgccccatttcgttgcccgactgtccgagaacaccccatgcagctctcttcgctcactgcggtttcccctgttgacggccgctacgccggcaaaacccaggccctgcgccctattttcagcgagtacggcctgatccgtgcccgtgtcctggttgaagtgcgctggctccagcgcctggccgctcaccccgccatcagcgaagtgccggcgttttccgccgaggccaacgctgtattgaacaccctggcggaaaacttctccctggagcacgccgagcgtgtgaaagagatcgagcgcaccaccaaccacgacgtcaaagccatcgaatacctgctcaaagagcaagcggcccaactgccggaactggcccaggtcagcgagttcatccactttgcctgcaccagcgaggacatcaacaacctgtcccacgccctgatgctgcgcgaaggccgtgatgacgtgatgctgccgctgatgcgccagaccgccgaagccatccgcgagctggcgatccgtttcgctgccgtgccgatgctgtcgcgcacccacggccagccggcctcgccgaccaccctgggcaaagaactggccaacgtggtgtaccgcctggagcgccagatcgcccaagtcgccgccgtgccattgctgggcaagatcaacggcgctgtaggcaactacaacgcccacctgtcggcctaccctgagatcgactgggaagccaacgcccgcgccttcatcgaagacgaattgggcctgggcttcaacccctacaccacgcagatcgaaccccacgactacatcgccgagctgttcgacgcgattgcacgcttcaacaccatcctgatcgatttcgatcgcgatatctggggctacatctccctgggctacttcaagcagcgcactattgcaggcgaaatcggttcgtcgaccatgccgcacaaggtcaacccgatcgacttcgaaaactccgaaggcaacctgggtatcgccaacgccctgttccagcacctggccagcaagttgccgatctcccgctggcagcgcgacctgaccgactccaccgtactgcgcaacctcggtgtcggcttggcccacagcgtgatcgcgtacgaagccagcctcaaaggcatcagcaagctggagctcaacgagcagaagattgccgctgacctggacgcgtgctgggaagtattggccgagccgatccagaccgtaatgcgccgctacaacatcgaaaacccctacgagaagctgaaagaattgacgcgcggcaagggcatcagccccgaagcgctgcaaactttcatcgacggcctggacatgccagccgcagccaaggccgagctgaaactgctcaccccagccaactacatcggcaacgctgtagaacaagccaagcgcatctgat

SEQ ID NO: 288523 - DNA, 1294 bp, Unknown
  Bacterial polypeptide expressing nucleotide sequence isolated from the Sargasso Sea
aatgatatcgagatattcaagaaaagaacttacagaaatttggtcagaggaaaacaaatataaaatttggcttgatgttgaaatagcagcagctcaagcaatggaaaaatttaagattatccctaaaggtgtagcttctgtagttaaacgtagaggcaaaattaatgttaaaagagttcatcaaatcgaaggaaaagttaaacacgatataatcgcttttctaacctcaataactgaaaaagcaggaatgaaagcaagataccttcatcaaggaatgacatcatcagatgtgcttgatacgagttttaatattcaattagttcaatcaggtaaaattttaatgaaagatatagagaaattattatctataattaaaaaaaaagcttttaaacataaaatgactccatgtattggtagaagtcacggtattcatgcagagccaattacgttcggtttaaaactagcaacttattatgaggaatttaaaagaaacaaaaagagattagaaaatgctataaatgaagtttcaacatgtgctatttctggagcggtaggaacttttgctaatatagatccaagagttgagttttttgtatcaaaaaaattaaagttaaagcctgaaccaatatcaacacaaattattccaagggatagacatgcttattatttttctgttttaggaattatagctggatccattgaaagatttgcaacagagattaggcatttacaaagatctgaagtttatgagttacaagaatttttttcaaagggccaaaagggttcttcagcaatgcctcacaagaaaaatccgatactaagtgaaaatttaacagggcttgcaagacttgtcagaagtaacgttattcctgcactggaaaatattgctctatggcatgaacgagatatatctcactctagcgtagagagaaatataggtcctgatgctaatattactttagattttgctttatttagacttacaaatcttgtggataatatgattatttatccaaaaaatatgatgaaaaatcttaatataactaaaggagtaattttttcacaagagatgatgttagaacttacaaaagttggtctttcaagagaaaaggcttataaaaaaattcaaatgcatgcgattaatagctttaataagaatatcaatctaattgaactggttaaaaaggataaatcaatcacatctctaatttctgaaaaaaaaattgataaagtgttcacatattcaaagcatttaaaaaatgtaaattatatttttagaagagtatttaaataa

SEQ ID NO: 288524 - DNA, 1258 bp, Unknown
  Bacterial polypeptide expressing nucleotide sequence isolated from the Sargasso Sea
atttggtcagaagaaaataaatataagatttggttagatgtagaaattgctgcagctgaaggaatggaaaagctgggacatattccaaaaggagttgcaagcgctgttaaaaaaaaagcaaaaattaatgtaaaaagaattcatgctattgaagataaagttaaacacgacgttatagcttttttaacttctgtaacagaaaaagtaggaattaaagcaagatatttacaccaaggaatgacatcatcagatgttttggatacaagttttaacattcagcttgtccaatctggtaagattttagttaaagatattgatcaaatattaaaagttttaaaatcaaaagctaaaaaatataaattcaccccatgtattggcagaagccacggtattcatgctgaaccaataacatttggtttaaaattagcatcttattatgaagaatttaaaagaaacaaaaaaagattaatcagcgcaattgatgaaatttcaacatgcgcaatatcaggacctgttggtacatttgccaatataaaccctaaaattgaaaaacatgttgcaaaaaaacttaagttaaaagttgagcctatatcaacacaagttattcctagagacaggcatgcatattatttttctgtgttaggaattattgcaggatctattgaaagagttgcaactgagattagacatttgcaaagaacagaagtttatgaattgcaggaattcttttcaaaaaaacaaaaaggatcatctgctatgccacataaaaagaaccctatcttaaccgaaaatctaacagggctagcaagaatggtaagaagttatacttttcctgcattagaaaacattgcactctggcatgaaagagatatctcgcattcaagtgttgaaagaaatataggaccagatgcaaatataactattgattttgctttagtaagactgggtaatgttttagataaaatgatagtctacccaaaaaagatgttaaataatcttaatatcaccaaaggtaccattttctctcaagaattaatgttagaacttaccaagtcaggcctaagtagagaaaaatcttacagattaatacaaacgcatgctaaaaaatgcatagcagataatcttgatcttttagatgttgtaatgaatgataaaagtattacatcaagaattccaattaaaaaaatgaaaaaaatatttgattattctgcacactttaaaaatgtaaatttcatatttaatagagtttttaaataat

SEQ ID NO: 288525 - DNA, 788 bp, Unknown
  Bacterial polypeptide expressing nucleotide sequence isolated from the Sargasso Sea
aagagccatcgaagatatttcgacttgcgcaatttctggagctgttggaacgtttgcaaatatagatccaagaattgaaaagtttgttgcgaacaaattaaaattaaaaattgaaccaatttcaacacaaattattccaagagacaggcatgctcattttttttcagtgttgggtataattgcgagttctattgaaagattttctgtcgagatacgaaatctacaaagaacagaagttgcagaagtttatgagttttttaaaaaaaaacaaatgggttcatctgcaatgcctcataaaaaaaatccagtcctaagtgagaatttaaccgggttagcaagattaataaggtcaatggtaataccggcaatggaaaacgttgcgttatggcatgaaagagatatttcacactcaagtgttgagagaaatattggtccagatgcaactgtaactctagattttgctctaaacagaatgagtgaggtagttaattctatgaaaataaataagaataatatgaaaaaaaatttagatttaacaaaaggattatttttctcacaaagagtaatgctttttcttacagaaaagggacttaaaagagaagttgcttacagaattgtacaaaaatgtgctctaagagcaattgaccagaatatatctttttacgatagtttgatggaagataaaaaaattaaggacataataactgttaataatttaaaaaacttatttgattttggttatcatactaagaaaattaatgtaatttttagtagagtactaaaatgaa

SEQ ID NO: 288526 - DNA, 1273 bp, Unknown
  Bacterial polypeptide expressing nucleotide sequence isolated from the Sargasso Sea
aagaatttaactgatatttggtcagaagaaaataaatacaaaatctggttagatgttgaagttgctgcagcagaaggaatggaaaaacttggtcatattccaagaggagttgcttcagtagtaaagaaaaaagctagaataaatgttagtaggattcataaaatagagtctgaagtaaaacatgatgtaatagcgtttcttacttctgttactgagaaagctggtattaaagctagataccttcaccagggtatgacctcatctgatgttctagatactagttttaacattcaattggttcaatcaggtaaaatcattttaaaagatatagatcaaattttaaaagttttaaaaagacaggctaaaaaatataaatttacaccgtgtatgggaagaagccatggtatccatgctgaaccaattacttttggtttaaaattagcctcgttttatgaggaatttaaaagaaatagaaaaagacttaaagatgcaattgatgaagtatcaacttgtgcaatttctggtgcggtaggaacatttgcaaatattaatcctaatgttgaaaaacatgttgcaaaaaaattaggattaaaagttgagccaatttccacacaagtaattccaagagatagacatgcattttatttttctgttttaggtattattgcaggatctattgaaagagtagcagttgaaataagacaccttcaaagaacagaagtttatgaactacaagaatatttttctaaaaatcaaaagggttcttctgcaatgcctcacaaaaaaaatccaattttaagtgaaaatttaacaggcttagccaggatggttagaagtgctgttgtaccagcacttgaaaacatagcgctttggcatgaaagagacatttctcattcaagtgttgaaagaaatattggaccagatgctaatataacaactgattttgcattggttagacttacaaatattttagataatatgattgtttaccctaaaaaaatgcttgaaaacttaaacttaacaaaaggtttaatttcctctcaagaagttatgttggaattaaccaaatcaggattaagcagagaaaaatcttatagattagttcaatcttatgcaaaaaaatgttttgcagaaaatttaaatttaattgatgtaatttcatctgataaattaataatgagtaaaatttcgccaaaaaaactaaaatctatatttaattattctaaacactttaaaaatgtaaattttatctttagaagagtttttaaataat

SEQ ID NO: 288527 - DNA, 532 bp, Unknown
  Bacterial polypeptide expressing nucleotide sequence isolated from the Sargasso Sea
tgttggaacatatgacagtatagatccaagagtagaaaagcatgttgcaaaaaaattaaaacttaagtgtgaagatgtttcaactcaaattattccaagagatagacatgctttctttttttcagtacttggaattataggtagctctatagaacgtttagctgttgaaataagaaaccttcaaagaactgaattattagaagtagaagaaaaatttaatccaaaacaaaaaggatcttctgctatgccacataaaagaaaccctgttttaagtgaaaatctaacaggattagctagatatataaggagtgctgttattcccagtatggaaaatatcgttttgtggcatgaaagagatataagtcattcaagtgtagaacgaatttttgctcctgatattactattgctctagacttctcattaaatagattaaatgaaattattaatactatgaaagtttatccagaaaatatgaaaaaaaatttaaactcattaggtaaacttcataatagtcaaaaactcattaggtaa

SEQ ID NO: 288528 - DNA, 1372 bp, Unknown
  Bacterial polypeptide expressing nucleotide sequence isolated from the Sargasso Sea
catggagctgtccgcgctgactgctgtttccccgattgacggtcgttatggcgacaaggccgatgccctgcgccctatcttctccgaattcggcctgctgcgttttcgcgtcgaagtcgaggtgcgctggttgcaaaaactggccagccacgccgggatcccggaagtccctgccctgagcgcgaccgccagtgccctgctcgacggcatagtccagagcttcaacgagcaggatgccgcccgcatcaaacagatcgagcgcaccaccaaccatgatgtgaaagcggtggagtacttcctgaaagaaaaagtcgaagtgaacccggagctggcagctgtcagcgagttcatccacttcgcctgcacctcggaagacatcaacaacaactcccacggcctgatgctgaaaaccgcccgcgaagaggtcatcaagccttactgcgagaagctgatttccgagctcaagcgcctggcccacgagtaccgcgacatgccgctgctgtcccgtacccacggtcagccggcgaccccgagcaccatgggcaaggagatggccaacgtcgcctaccggctggagcgtcagtacaagcagatcatggtggtggagatcctcggtaagatcaacggcgcggtcggcaactacaacgcccacatcagcgcctacccggatgtggactggcaccagttctccgaggagttcgttacctccctcggcctttcctggaacccctacaccacccagatcgagccgcacgactacatcgccgagctgttcgacgccatggcccgcttcaacaccatcctgatcgacttcgaccgcgacgtgtggggctacatctcgctgggccacttcaagcagcgcaccatcgccggcgaaatcggctcctccaccatgccgcacaaggtcaaccccatcgacttcgagaactccgaaggcaatctgggtctggccaacgccgtgttccagcatctggcctccaagctgcccatctcccgctggcagcgtgatctgaccgactcgaccgtgctgcgcaacctgggtgtggcggtgggttactccctgattgcctatcaggcgaccctcaagggtatctccaagctggaagccaacgacgccgccatggctgccgatctggatgccaactgggaagtactggccgagccgatccagaccgtgatgcgccgttacggcatcgagaagccctacgagaagctcaaagagctgacccgtggccgccgcgtcgatgccgaagggatgcgtacctttatcgacaccctggcgttgccggaagcggtcaaggtcgagctgaagaagctgaccccggccaactacatcggcgacgcccagcgtctggtcgatctgctgaaataa

SEQ ID NO: 288529 - DNA, 424 bp, Unknown
  Bacterial polypeptide expressing nucleotide sequence isolated from the Sargasso Sea
ctggcgccgcgcgcgcgctccgcggcctcggcgagcgcctcgtcgtcggacccggaccctctcgtcgaccccgatcatctctgcgtcagcgccgggtgcggcgccgtcatcgacaacctcttcctcgcgatcgccgccgagggcgacgccgtcctgatccccgcgccgtattaccccgccttcgacaacgacctgcgcgtgcgcgacggcgtcgtcgccgtcccggtccacggggaatccgccgcgtcgctcccgacgcccgccgcgctcgacgccgccgtcgacgcgcagcgaagagacttcggccgagacgtcagagccgtgctcctgaccaacccgagcaaccccctcgggatcgtgtacccggcgcgggacgtcgcggcgatcctcgcgtgggggctcgagcgcggcgtccacgtcgtcg

SEQ ID NO: 288530 - DNA, 815 bp, Unknown
  Bacterial polypeptide expressing nucleotide sequence isolated from the Sargasso Sea
ctccgactacctcgggcgcgatattttcatcaaacgcgatgacgtcacgccgatggccatgggcggcaataagctgcgtaagctggagtttctggccgcagacgcgctgcgtgaaggcgctgatacgctgataaccgcgggtgccatccaatctaaccacgttcgtcagactgcggcggtagcggctaagcttggcctgcactgcgtggcgctgttggaaaatccgattggcaccacggcggaaaactatctcaccaatggcaaccgtctgctgttggatctgtttaatacgcagatcgaaatgtgtgacgcgctaaccgatccgaatgcgcagttgcaggagctggcgacgcgcgttgaagcgcaagggttccgcccgtatgtgatccctgttgggggctctaatgctctgggggctatgggttatgtggaaagcgcgctggaaattgcccagcagtgtgaaggggccgtttcgctctcttccgtggtggtcgcgtcgggcagtgcgggaacgcatgccgggctggcggtggggctggagcaactgatgccagacgtcgagcttatcggcgtgaccgtttcgcgcagcgtcgccgatcaaaaaccaaaagttgtcacgttgcagcaggatattgccggtgaactggagctgacggcctcagcggatatcctgttatgggatgattattatgcgccgggctacggtacgccaaacgaagagggcatggaggcggtaaaactgctggcgcgcctcgaaggcattttgttggatccgggtgtatacacggtaaggcgatggcgggggtttgattgac

SEQ ID NO: 288531 - DNA, 637 bp, Unknown
  Bacterial polypeptide expressing nucleotide sequence isolated from the Sargasso Sea
tatgctccagcaaaatttgtccttgcaaaatcttactcgtttccctcgccttgaactgattggtgcgccaaccgcgctggaatacctgccacgtttatcagaccaccttggccgggaaattttcatcaaacgtgatgacaccacgccgctggcgatgggcgggaataaattgcgcaaactggagtttctggcggcagaagccctgcgtgaaggtgccgacacattagtgactgccggtgccattcagtccaaccatgttcgccagacggccgctgttgccgcaaaactggggttacattgtgtcgcattactggaaaaccccatcggcactcaggcagaaaactacctgacaaacggtaaccggctgttgctggatctctttaatgtccaggtggaaatgtgtgccgcgctggatgcgcctgacgcacaactggcagaaattgctgaacgcctggaagctcagggatttcgcccctacgttgtgcctgttggtggctctaatgcgctgggcgctctgggctatgtcgaaagtgcgctggaaattgccgggcagtgtgatgaagccgcgcgtatttcttcggtgatagtggcatcgggtagtgccggcactcatgcgggacttgctgtcgggcttgaa

SEQ ID NO: 288532 - DNA, 280 bp, Unknown
  Bacterial polypeptide expressing nucleotide sequence isolated from the Sargasso Sea
ttcgccgagtgcgtgcgaaaccattccgacgccgtcatcgacttcgggccgatgggatgccagaccgggttctacctcatcatgatcggagaaccggatgtcccaggcacatgcgaacttgtcgagaccaccctgcgcgacatcctcaagctcgacgccacccccgctgctaacgaagtgcagtgcggatggggagccaaccattccatcaaggccgcccaagaagccgcgcacacgatgctgaaccaccgcgacgaatgggaacaggtaatggcctgag

SEQ ID NO: 288533 - DNA, 130 bp, Unknown
  Bacterial polypeptide expressing nucleotide sequence isolated from the Sargasso Sea
atgccattacttgatagctttaccgttgaccatactcggatgaatgcgccagccgtgcgtgttgccaaacatatgagtaccccaaaaggcgatgcgattaccgtattcgatctacgtttttgtgcaccaa

SEQ ID NO: 288534 - DNA, 322 bp, Unknown
  Bacterial polypeptide expressing nucleotide sequence isolated from the Sargasso Sea
atgccattacttgatagctttaccgttgaccatactcggatgaatgcgccagccgtgcgtgttgccaaacatatgagtaccccaaaaggcgatgcgattaccgtattcgatctacgtttttgtgcaccgaataaagatatcctcagcgagcgtggtatccatactctagagcatctgtttgcgggttttatgcgtgatcatctaaacggcagcgatgttgaaattattgatatttcaccaatgggatgccgcaccggtttctacatgagcctgattggtgagccgagtgagcgccaagtggctgatgcatggcttgcctcaa

SEQ ID NO: 288535 - DNA, 508 bp, Unknown
  Bacterial polypeptide expressing nucleotide sequence isolated from the Sargasso Sea
catgcctttattagacagctttaccgttgaccacaccattatgaaagcgcctgctgtacgtgtggcaaaaaaaatgaatacacccaaaggtgatgacatcactgtatttgacttacgtttttgcgtgcctaacgaagaaatcctgtcggaaaaaggtattcatacgctggagcatttatttgctggttttatgcgtgatcatttaaatggtgacggcgtagaaatcatcgacatttcccctatgggttgccgcacgggtttctatatgagcctgattggtacgccggatgagcagcgtgttgctgcagcatggaaagcggcgatggcggacgtactgacagtgcaaaaccagtctgaaattcctgagctgaacatttaccaatgtggcacagcccagatgcattctttagctgaagccaaagagattgcccagaacatcatcagccgcggtgtaggtgtgaatttgaatgacgagttaaaactttctgctgaatttttaaagcaataa

SEQ ID NO: 288536 - DNA, 511 bp, Unknown
  Bacterial polypeptide expressing nucleotide sequence isolated from the Sargasso Sea
catgcctttattagatagctttaccgttgaccacaccattatgaaagcacctgctgtgcgtgtggcaaaaaaaatgaatacacccaaaggtgatgacatcactgtatttgatttacgtttttgcgtgccaaacgaagaaatcctgtcagaaaaaggcattcatacactggagcatttatttgccggttttatgcgtgatcatttaaatggcgatggcgtagaaattatcgatatttccccaatgggctgtcgcacaggtttttatatgagcctgattggtacaccggacgaacagcgtgttgctgcagcctggaaagccgctatggccgatgtgctgacagtacaaaaccagtctgaaattcctgagctgaacatttatcaatgtggcacagcccagatgcattctttagctgaagccaaagaaattgcccagaacatcatcagccgtggtgtaggtgtgaatttaaacgacgaattaaagctgtccgctgagtttttgaaaaacagctaa

SEQ ID NO: 288537 - DNA, 511 bp, Unknown
  Bacterial polypeptide expressing nucleotide sequence isolated from the Sargasso Sea
tatgccattacttgatagctttactgttgaccatactcgaatgaatgcacctgctgtgcgtgtcgccaaacatatgactacccccaaaggtgatgcgatcacagtattcgatctacgtttttgcgcgccgaataaagatatccttagcgagcgtggtattcacactttggaacatttatttgcaggctttatgcgtgatcatctaaatggcaatgatgtggaaattattgatatttcgccaatgggctgccgcactgggttttatatgagcctgattggtgtgcccactgaacatcaagtggcggatgcttggcttgcttctatggaagatgtgctgaaagtcgttgaacaatctgaaattcctgagctgaacgaatatcaatgcggtacctacgagatgcactctttggagcaagcacaggaaattgcacgcaatattattgctgctggtgtgagtgttaaccgcaacgatgatttaaaactcagtgatgagattttaggtaaactctaa

SEQ ID NO: 288538 - DNA, 511 bp, Unknown
  Bacterial polypeptide expressing nucleotide sequence isolated from the Sargasso Sea
atgccattacttgatagctttaccgttgaccatactcggatgaatgcgccagccgtgcgtgttgccaaacatatgagtaccccaaaaggcgatgcgattaccgtattcgatctacgtttttgtgcaccgaataaagatatcctcagcgagcgtggtatccatactctagagcatctgtttgcgggttttatgcgtgatcatctaaacggcagcgatgttgaaattattgatatttcaccaatgggatgccgcaccggtttctacatgagcctgattggtgagccgagtgagcgccaagtggctgatgcatggcttgcctcaatggaagatgtgctcaaagtggttgagcaatctgaaatccctgagcttaacgagtatcaatgtggcacttacgagatgcactcgttagaacaagcccaagatatcgcccgtaacattatcgccgcaggtgtgagtgttaaccgtaatgatgacttaaaactcagcgatgagatcttaggtcaactctaag

SEQ ID NO: 288539 - DNA, 511 bp, Unknown
  Bacterial polypeptide expressing nucleotide sequence isolated from the Sargasso Sea
atgccattacttgatagctttaccgttgaccatacacggatgaatgcgccagctgtgcgcgttgccaaacatatgagtacccccaaaggcgatgccattaccgtattcgatctgcgtttttgtgcaccgaataaagatatcctcagcgagcgcggtatccataccctagagcatttgtttgcgggctttatgcgtgatcatcttaatggcagcgatgttgaaattattgatatttcaccaatgggatgccgcactggtttctacatgagcctgattggtgagcctagcgagcgccaagtggccgatgcatggcttgcctctatggaagatgtgctcaaagtggttgagcaatctgaaattcctgagcttaatgagtatcaatgtggcacttatcagatgcactcgttagaacaagcccaagatattgcccgtaacattatcgccgcaggcgtgagtgttaaccgcaacgacgacttaaaactcagcgatgagatcttaggtcaactctaag

SEQ ID NO: 288540 - DNA, 520 bp, Unknown
  Bacterial polypeptide expressing nucleotide sequence isolated from the Sargasso Sea
cctgtatgaagagaaagatgccgcgacacaaggttttgtgttcaaccaaactatgctgcgcattgccgaccccaagcgttcgctagatttctatacgcgagttatgggaatgacgctaattaagcgtctagattttgaagaaatgaagttcagcctttattttttggcggcaggtgatgatttctctgatatttctgacgatgtagacgaacgtactcagcaaacttttggtcgcccggccatgttggagctaacccacaattggggcgatacaccagaaacggttgattatcacaacggaaatacagagccaaaaggttttgggcatattggttttcatgtgcctgatgctgaagctgcatgtgcacgatttgcatcactagacgttccttttcagaaagggcttaatgatggttctatgaaagggatcgcatttatcaaagacccagacggctattggatcgaaattttcaacgcgtctaacgtatccgcaacttgcgcgccccatttgaagaagtag

SEQ ID NO: 288541 - DNA, 400 bp, Unknown
  Bacterial polypeptide expressing nucleotide sequence isolated from the Sargasso Sea
atgcggttgctgcacaccatgctccgggtcgcagacctggagcgctccctggccttttacaccgaagtgcttggcatgaccctgctgcggcgcaaggattacccaagcggacgcttcacgctggcgtttgtcggctacggacctgagagtgagcaaaccgttttggaactgacccacaactgggatacggactcctattcccttggagatgcctacgggcacatcgccctcggtgtggacgacatccagagcacctgtgccggcatctccagtcagggtggccgtgtggtccggcaacccgggccgatgaaacacggcagcaccgtgatcgcttttgttgaggatccggatggctacaaggtggaattgattgaactcgcctcccgctctgctgcctgag

SEQ ID NO: 288542 - DNA, 391 bp, Unknown
  Bacterial polypeptide expressing nucleotide sequence isolated from the Sargasso Sea
aatgcgtatccttcatacaatgttgagagttggagatttagataaatccattgatttctacgttaatagattaggaatgaatttattaagaaaaaaggattaccctcatggaaaattcactttggcatttgttggctatggttcagaaaatgagaattcagtaattgaattaacttataactgggacaaaaaatcagacgactatgagcttggagataaatatggacatatcgctattggagtaaaagatatccatcttacttgccaaggattagaaaataatggttgtaaagtaataaccaaacctaaaacaatgaaaaacagtactactatcttggcttttgttgaagatcctgatggatataaaattgaacttattgaaagagattaa

SEQ ID NO: 288543 - DNA, 406 bp, Unknown
  Bacterial polypeptide expressing nucleotide sequence isolated from the Sargasso Sea
catgcgtttgctgcacaccatgcttcgggtgggcgatctggagcgctccctcgccttctacaccgaattgctcaagatgagcctgctgcgacgcaaggactaccccagtggacgcttcaccctggccttcgtggggtatggcccagagtccgatcaaacggtgctggagctcacccacaactgggacaccagcagctacaccttgggtgagggctatggccacattgcgctgggtgtggatgacatctatagaacctgtgagcaaattcgcctgcagggcggcaaggtggttcgtgaacccggtccgatgaagcacggctccaccgttattgcctttgtggaggatccggatggttacaaggtggaactaatccagttgagctctcgagccgatgcggctgcctga

SEQ ID NO: 288544 - DNA, 394 bp, Unknown
  Bacterial polypeptide expressing nucleotide sequence isolated from the Sargasso Sea
gatgagactgctgcataccatgctgcgtgtcggcgacctggaccaatccatcgccttctacaccgaagtgctgggcatgaccttgctacggcgcaaggactacccggacggacagttcaccctggcgttcgtcggttatggcgacgaagcgcacaacagtgtgatcgagctgacccacaactggggtgtggacagctacgaactgggtaccggctacggccatatcgctctggaagtcgaggacgtctacagggcctgcgaggacattcgcagtcgcggcggcaagatcacccgcgagccgggtccgatgaagcatggcagcagcatcctggccttcgtcgaggatccggacggttacaaggtcgagttgctgtcgcccaagcgaagcgattga

SEQ ID NO: 288545 - DNA, 391 bp, Unknown
  Bacterial polypeptide expressing nucleotide sequence isolated from the Sargasso Sea
aatgcgtatcctacatacaatgttgagggttggagatttagaaaaatccattgatttctacgtcaatagattaggaatgaatttattgagaaaaaaggattaccctcatggaaaatttactttagcttttgttggttatggctcagagaaagaaaacacagtaattgaattaacttacaactgggacaaaaagtctgaagactatgagcttggagataaatatggtcatatagctattggagtaaaagatattcatggcatttgtcaggggcttgaagataacggctgcaaagttacgaccaagccaaaaaccatgaagaacagtacgacagttttagcgtttgttgaagatcctgacggatataaaatcgagcttattgaaagagactag

SEQ ID NO: 288546 - DNA, 363 bp, Unknown
  Bacterial polypeptide expressing nucleotide sequence isolated from the Sargasso Sea
gatgcttcacaccatgctccgggtcgctgatctggagcagtctctgggcttctacaccgaggtcctgggcatgcagcttctgcgtcgaaaggattaccccagcggccgcttcaccttggcgtttgttggctatgggtcggagagcgaccacacggtcctggaactcacccacaactgggacaccgacagctacaccctgggtaatgcctacggccacatcgcgctgggggtggaggacatccacagcacctgcgccggcattgccgacaagggtggtcgtgtggtgagggaacctggtccgatgaagcacggcaccaccgtcatcgcctttgttgaggatccggatggctacaaggtggaatt

SEQ ID NO: 288547 - DNA, 397 bp, Unknown
  Bacterial polypeptide expressing nucleotide sequence isolated from the Sargasso Sea
atgaacaataactatgaactattgcatgccatgataagggtttatgacttagaaaagtcaatagatttttatacccgcttaatgggaatgaagttattaagacgaaaagaatttcctgaagggcgttttacgcttgcttttgtggggtatggtcctgaaaaagagtctacggttattgagctaacccacaattgggaccagcaagagcagtatcaaatgggtaatgcatttggacatttagctattggtgttaacaatatttatggggtttgtaaaatgttggtggaagaaggcgttcgtgttcctaggccagctggtcctatgaaaggaggggagagaataatagcatttgttgaagatccggatggatataagatagagcttatagaacgttaga

SEQ ID NO: 288548 - DNA, 412 bp, Unknown
  Bacterial polypeptide expressing nucleotide sequence isolated from the Sargasso Sea
tatgtcacaactgttacacaccatgcttcgcgtcggtaacttagaacgcagtatcgctttttacactcaagtgctgggcatgaagctgctccgcacctcagaaaacccagagtacaaatattccctcgccttcgtgggtttcggtgaagaatcaacgggtcaggccgtcatcgagttgacctacaactggggaacggaaaaatacgatctcggcacggcctttggtcatatagccatcggtgatgaagacatttatgcccgctgcgaagccattgccgccgcgggtggtaaagtgactcgcgcacccggccctgttgctggcggcaccactgaaatcgcctttgtagaagacccagacggttataagattgaatttattcaaatgaaatcagcgacccaaggtttaggttaa

SEQ ID NO: 288549 - DNA, 550 bp, Unknown
  Bacterial polypeptide expressing nucleotide sequence isolated from the Sargasso Sea
tatgagccgacatttcgacaaggccgaaggcctgtatgaagagaaagatgctgcgacacaaggttttgtgttcaaccaaactatgctgcgcattgccgaccccaagcgttcgctagatttctatacgcgagttatgggaatgacgctaattaagcgtctagattttgaagaaatgaagttcagcctttattttttggcggcaggtgatgatttctctgatatttctgacgatgtagacgaacgtactcagcaaacttttggtcgcccggccatgttggagctaacccacaattggggcgatacaccagaaacggttgattatcataacggaaatacagagccaaaaggttttgggcatattggttttcatgtgcctgatgctgaagctgcatgtgcacgatttgcatcactagacgttccttttcagaaagggcttaatgatggttctatgaaagggatcgcatttatcaaagacccagacggctattggatcgaaattttcaacgcgtctaacgtatccgcaacttgcgcgccccatttgaagaagtag

SEQ ID NO: 288550 - DNA, 391 bp, Unknown
  Bacterial polypeptide expressing nucleotide sequence isolated from the Sargasso Sea
aatgcgtatcttacatacaatgttgagggttggagatttagataaatccattgatttctacgtcaataggttaggaatgaatttattgcgaaaaaaggattaccctcatggaaaattcactttggcatttgttggttatggctcagaaaaagaaaactcagtaattgaattaacttataactgggacaaaaagtctgaagactatgagattggagataaatatggtcatatagctattggagtaaaagatattcatctaatttgcaaaggattagaaaaaaatggttgcaaaataacaaccaaacctaaaacaatgaaaaacagtactactgtcctggcttttgttgaggatcctgatggttataaaattgaacttattgaaagagattaa

SEQ ID NO: 288551 - DNA, 517 bp, Unknown
  Bacterial polypeptide expressing nucleotide sequence isolated from the Sargasso Sea
atgcaagaaatgtctcaaaatcctgatcaagaaacattagaatatgtgtttaatcaaactatgcttcggataaaagatcctgaaaaatcaattgatttctatactaaggtccttggcatgactattttaaaaaaattagactttccagactttaaattctctttatattttcttgcctaccttagagatggagatgatccagttcctgaaaataaccaagatagatttgcttatactttaagtcaaaaggctgttttagaattaactcataactggggaacagaaaatgatgaagacttctctcatcatgacggtaattctgatcctagaggatttggccatattggtataactgtccctgatgtttatgaagcatgcgaaagatttgagtcgcttggggtagagttccaaaaaaaaccagatgatggaaatatgaaaggacttgcttttataaaggatcctgatggatattggatagaaattctctcggctaagggtttggctagcacaatctagt

SEQ ID NO: 288552 - DNA, 517 bp, Unknown
  Bacterial polypeptide expressing nucleotide sequence isolated from the Sargasso Sea
tatggaagaaatgtctcaaaatcctgatcaagaaacactagattatgtatttaatcaaactatgcttcggataaaagatcctaaaaaatctatcgacttttacactaaagttcttggtatgaccattttaaaaaaattagactttccagatttcaagttttctctttattttcttgcttacctgagaaatgaagatgatccagttcctgaaaacaatcaagagagatttgcttataccttaagtcaaaaggctgttttagaattaactcataattggggaacagaaaatgacgaagacttctctcaccatgacggtaattctgatcctagaggatttggtcatattggtataaccgttccagatgtttatgaggcttgcgagagatttgaatcgcttggtgtagaattccaaaaaaaaccagatgatggaaatatgaaaggacttgcttttataaaagatcctgatggttattggattgagattctttcagctaaaggtttagctagtacaatctag

SEQ ID NO: 288553 - DNA, 508 bp, Unknown
  Bacterial polypeptide expressing nucleotide sequence isolated from the Sargasso Sea
atgtctcaaaatcctgataaagaaactttagagtatgtttttaatcaaactatgcttaggataaaagatcctgaaaaatctatagatttttacactaaagtccttggtatgactattttgaaaaaattagactttccagatttcaagttctctctatattttcttgcttacctgaggaatgaagatgatccggttcctgaaaataatcaagaaagatttgcttataccttaagtcaaaaagctgttttagaattaactcataattggggaacggaagatgacgaagacttttctcatcatgatggtaattctgaccctagaggatttggtcatattggtataaccgttccagatgtttataaagcgtgcgcaagatttgaagagcttggtgtagaatttcaaaaaaaacctgatgatggaaatatgaaaggacttgcttttattaaagatcccgatggatattggatagagattctttcagctaaaggtttagctagcacaatctagt

SEQ ID NO: 288554 - DNA, 272 bp, Unknown
  Bacterial polypeptide expressing nucleotide sequence isolated from the Sargasso Sea
tacgcacaattgggggtcagaaaatgatgataaagtaaaattccatgatgggaatgcagagccaaaaggttttggacacatatgtttttcagttcctgatatatacgcagcttgtaaaaaattcgaagaaaacggagttgaatttgttaaaaaaccagacgacggatccatgaaaggtttagcttttataaaagatccagatggatattggattgaaattgttcaatcaaaaaaagttgcaaatatcgtaaaagagatgggaaaaatttagc

SEQ ID NO: 288555 - DNA, 394 bp, Unknown
  Bacterial polypeptide expressing nucleotide sequence isolated from the Sargasso Sea
atgctccacaccatgctccgggtcggggatctggatcaatccatcgccttctacaccgaggtgctcggcatgcagctgctgcggcgcaaggactaccccaccggtcgtttcaccctggccttcgtgggttacgggccggagtccgagcagacggtgctggagctcacccacaactgggacaccagttcctacgagctgggtgatggctatggccacatttccataggggtggaggacatccgcaccacctgtgccgccatcagtggcaaaggtggccgggttgtgcgtgagccggggccgatgaagggcggttccacggtgattgcgttcgtggaagaccctgatggctacaaggtggagttgatcgaaatgtcctcccgcgccgctgcatgac

SEQ ID NO: 288556 - DNA, 394 bp, Unknown
  Bacterial polypeptide expressing nucleotide sequence isolated from the Sargasso Sea
atgcttcacaccatgctccgggtcgctgatctggagcggtctctgggcttctacaccgaggtcctgggcatgcagcttctgcgtcgaaaggattaccccagcggccgcttcaccttggcgtttgttggctatgggtcggagagcgaccacacggtcctggaactcacccacaactgggacaccgacagctacaccctgggtgatgcctacggccacatcgcgctgggggtggaggacatccacagcacctgcgccggcattgccgacaagggtggtcgtgtggtgcgggaacctggtccgatgaagcacggcaccaccgtcatcgcctttgttgaggatccggatggctacaaggtggaattgatcgagatgtcctccaaagcccacgcctgaa

SEQ ID NO: 288557 - DNA, 550 bp, Unknown
  Bacterial polypeptide expressing nucleotide sequence isolated from the Sargasso Sea
atgagtcgccattttgaacaagcggatggtttgtgtgaagagatagacaccgctacccaagggttcgtgtttaatcaaactatgctgcgtatagctgaccctaaacgctcgctagacttttacacacgagttatgggcatgacgcttatcaagcgcctagattttgaggaaatgaagttcagcttgtattttcttgcggcaggtgatgacttttctgatatttctgatgacgttgaaaagcgcacgcaacaaacatttggccgcccggcaatgctggaattaacccataactggggcgatacgccagaaacggtcagctaccataacggcaattctgagccaaaaggctttgggcatattggttttcacgtacctgatgccgacgcagcgtgcgcccgcttcgaagcgctcgacgtgccttttcaaaaagggctcaacgaggggtctatgaaaggtattgcctttattaaagatcccgacggctactggattgaaatatttgatgcatcaaaagtggcacaaacgtgtgcgccgcatttgaagaaataaa

SEQ ID NO: 288558 - DNA, 514 bp, Unknown
  Bacterial polypeptide expressing nucleotide sequence isolated from the Sargasso Sea
aatggatgaactaaccaaaactaaggccataggcactgaagaatttgtatttaatcaaacaatgctaagaatcaaagatcctgaggtttctctagatttttatgtaaatcaacttggaatgacccttgtaaagcaattagattttcctgaaatgtctttcactctttattttttgggttatttaagagattttgatgaagaggttcctgaagatcctgtacaaagggctgaatatgcttttagtcaaaaagctatgttggaattaacacataattggggcactgaaagcgatgctaatttttcctatcatgatggtaattctgatcccagaggttttggccatattggcattacagttccagatgtatatgccgcatgtaaacaatttgaggagtacggtatagaatttgttaagaaacctgatgatggcagcatgaaaggcttggcttttataaaagatcctgacggatattggatagaaatattatctgcaaaagcttcttcacaattttaa

SEQ ID NO: 288559 - DNA, 412 bp, Unknown
  Bacterial polypeptide expressing nucleotide sequence isolated from the Sargasso Sea
atgtcacaactgttacacacaatgatccgcgttggtaacttagagcgcagtattaatttttacactcaaatacttggcatgaagctgctacgcacctcagaaaacccagaatacaaatattctttagccttcgtgggctacggtgaagaatcaacaggccaagcggtgattgaattgacctataactggggcactgaaaaatacgatctcggcacaggctttggccatatcgccattggtgatgaagacatttatgctcgttgtgaagccattgccgccgcaggcggtaaagtcacccgcgcgcctggccctgttgcgggtggcaccaccgaaatcgcctttgtggaagaccctgacggctataagattgaatttattcaaatgaaatcggcaacccaaggtttaggttaaa

SEQ ID NO: 288560 - DNA, 241 bp, Unknown
  Bacterial polypeptide expressing nucleotide sequence isolated from the Sargasso Sea
tttgccagcgaagggattattcagttcttctttgaagaggcggataacgagagcggatttaatatctatattctcgacgagagcaaccgcgccgaggtttatcatcactgtgaaggcagtaaagaggagctggtgcgtgacgtgagccgcttctactcttcatcccacgatcgtttcacctacggctccagttttatcaacttcaacctgccgcaagttctatcagatcgtcgacgttgac

SEQ ID NO: 288561 - DNA, 643 bp, Unknown
  Bacterial polypeptide expressing nucleotide sequence isolated from the Sargasso Sea
ttgaaccgcgccggctggtatctctacaaacattcgctggagccggcagacatcatcggccgggcgccgctcgaatataacggctacatcagcaagctggtgtcgtgggcctacttcaacggcctgctgacgccgcagtcgcgagtgcacctgttcaaccagggctcggatctgcacatcgacaacctgcaccagttctgtcgcgatctgtccggcaccttcccggtcaagtatccccgcgccaccaacctggccctcagccggccgtgcgaaattcgtcagctctccatcttcctcaacctggagacggacccgaccagtcactgggtgggccaggtgatcgaattcgacgccaacgccgccgacgtcttctcgttcggccgcaaccaggagtgtctggtggggtcggtggacctggtctatcgcaactcctggagcgagatccgtaccctgcacttccagggggacgaggcggtggtggacgctctcaccaccatcctcggcaagatgcaccaggatgccgccgcccccgagatgatcgaggtgttctgctacagccagcacttccgctccctggtgcgcacccgcttccagcagctggtggccgaatgcatcgagctgcgtctggcccgcgacaagcagc

SEQ ID NO: 288562 - DNA, 862 bp, Unknown
  Bacterial polypeptide expressing nucleotide sequence isolated from the Sargasso Sea
tgctgccacgcttttgcactaccatcatccgttgatgccgggctacctcgaaggtagcgttccaaaaggcatttgcctctacacgcctgatgaaacccaacgccactacctcaacgagcttgagctctaccgtggaatgcccccgcaggaatcgccaaaaggcgagttgccgataaccggcgtctactccatgggcagtacttcatcggtaggacaaagctgctcttctgacctggatatctgggtttgccaccagtcgtggctcgataacgaagagcgccaattgttgcagcgtaaatgcagcctgcttgagagttgggccgcatcgctgggtgtggaagtcagcttcttcttaattgatgaaaaccgcttccgccataatgaaagcggcagtctgggtggtgaagactgtggctcgacgcagcatattttgttgctcgatgaattctatcgtaccgctgtgcgtctggccggtaagcgtattctgtggaatatggtgccgggcgatgaagaagagcactatgacgattacgtcatgacgctctatgcacagggcgtactgacgccaaatgaatggctggacctcggcggcctgagctccctttccgccgaagagtacttcggcgccagcctgtggcagctctataaaagtatcgactccccctataaagcagtgctgaaaactctgctactggaagcctattcctgggagtatccgaacacccgcctgttggcgaaagacattaaacagcgtctgcacgacggtgaaatcgtttcgttcggtctggatcattactgcatgatgctggagcgcgtcacccattatctgaccgcgattgaagatttcacgcgtctcgatctt

SEQ ID NO: 288563 - DNA, 844 bp, Unknown
  Bacterial polypeptide expressing nucleotide sequence isolated from the Sargasso Sea
cggcgtgctgacccgtaagttatatgccgctttcgaagcgttgccgggtaaagtcactctggtgaatccgcagatttctccggatctctccgagcctaatttaacctttatccatgtgccgccgggccgtgcgaatcgtacgggttggtatctgtacaaccgtgccccaaacatggactctatcgttagccaccagccgctggaatataaccgttacctgaacaaactggtggcgtgggcgtggttcaatggtttgctgacgtcgcgtactcgcctgtttattaaaggtaatggcattgtcgatttggcaaaactgcaggagatggtggcgaatgtgtcccatcacttcccgctgcgtctgcctgcgccaacgccaaaagcgctgtacagcccctgcgaaatccgccatctggcgattatcgtgaacctggaatatgacccaactgcggcattccgtaaccaggtcgtgcatttcgatttccgtaagcttgatgtgttcagcttcggtgagcagcaaaactgcctggttggcagcgtagacctgctttatcgcaactcctggaatgaagtgcgtacactgcatttcaacggcgagcaggcgatgattgaagcgctgaaaaccattctgggcaaaatgcatcaggatgccgcgccgcccgatagcgttgaagtgttctgttatagccagcatctgcgcggcttgatccgtacccgcgtgcagcaactggtttctgaatgcattgagctgcgtctgtccagtacccgccaggaaacggggcgcttcaaagcgttacgcgtggccggacagacctgggggcttttcttcgagcgcctgaatgtatcg

SEQ ID NO: 288564 - DNA, 897 bp, Unknown
  Bacterial polypeptide expressing nucleotide sequence isolated from the Sargasso Sea
cttgtacctctatattgagactctgaaacagagactggctgccataaatcaactgcgtgtggatcgcgcgcttgctgccatgggacctgctttccagcaggtatacagtctgctgccgacattattgcactaccaccatccactgatgccgggttaccttgatggtaacgttcccaaaggcatatgcctttacacgcctgatgaaacccaacgccactacctgaacgaactggaactgtaccgcggtatgtcgccgcaggacccgccgaagggcgaactgccgatcaccggcgtttactcgatgggcagtacctcttcggtagggcaaagttgttcgtctgaccttgatatctgggtctgccatcaatcctggctggatagcgaagagcgccaactgctgcagcgtaaatgtagcctgctggaaagctgggcggcctcgttgggcgtggaagtcagtttcttcctgattgacgaaaaccgtttccgtcacaatgaaagcggcagtctgggtggtgaagactgtggctcgacgcagcatatcctgttgctggatgaattctatcgcaccgctgtgcgcctcgcgggtaaacgtattctgtggaatatggtgccgggcgacgaagaagagcactacgacgattacgtcatgacgctctacgcacagggggtgttaacgccaaacgaatggctggatctcggcggactcagttcgctttccgccgaagagtactttggcgccagcctctggcagttgtacaagagtatcgactccccgtacaaagcggtgctgaaaacgctgttgctggaagcctattcctgggaatatcccaacccacgcctgttggcgaaagacattaaacagcgcttgcatgatggcgagatcgtctcttttggtct

SEQ ID NO: 288565 - DNA, 732 bp, Unknown
  Bacterial polypeptide expressing nucleotide sequence isolated from the Sargasso Sea
aagctggtggcatgggcctggtttaacggcctgctgacgtcacgcactcgcctgtttattaagggcaacggtatcgtcgatctggcgaagcttcaggagatggtcgccgacgtttcgcaccatttcccgctgcgtctgccgtcgccaacgcccaaagcgctgtatagcccctgcgaaatccgccacctggcgattatcgtcaacctcgaatatgacccgacggcggcgttccgcaatcaggtcgtgcattttgacttccgtaaactggatgtcttcagttttggcgaagagcagaagtgcttaatcggtagcgtcgatctgctgtaccgcaactcgtggaacgaagtgcgcaccctgcactttaacggcgagcaggcgatgatcgaagcgctgaaaaccattctcggtaaaatgcatcaggatgctgcgccgccggatagcgttgaagtgttctgctacagtcagcatctgcgcggtctcattcgcacccgcgtgcagcagatggtgtccgagtgcattgagctgcgcctttccagtacccgtcaggataccgggcgctttaaggcgctgcgcgtttccgggcagacctggggactgtttttcgaacgtcttaacgtgtcggtgcagaagctggagaacgccattgaattctacggcgctatctcgcataacaagctgcacggcctgtcggttcaggtggaaaccaaccatgttaagctaccggcggtagtg

SEQ ID NO: 288566 - DNA, 1219 bp, Unknown
  Bacterial polypeptide expressing nucleotide sequence isolated from the Sargasso Sea
ctggtaaaactcgacacgctggtggcgcgctacgacgaactcaatcgtctcaagacgcaacgggcgctaggtctcatgagtcgctacgggcagcaggtttttcagctgctacccgtcatgctgcacttcaatcacccccttctgcccggttatgtggcgggggatgtgccgcacggcatctggagttttaccgccaatgacgcccagcaggccttcatcgaggatctgtgccagaacgccaactgcctgaacggcctcaccacccatgacaagtcgatccaggggctctactccatgggcagcacctcgtccatcggtcagtgctgtcactcggatctcgatatctgggtctgccacgtggccggtttgtcgcaggagcggctcgagctgctggatctcaagtgccagcaactctccaagtgggccgagcagcggggggtcgatctcaacttcttcctgatccccgaggacaagttccgccagcgcaacgatgcccagatgcagggtgagagctgcggcagcgcccagcacctgctgctgctcgacgagttctaccgcagcgccatgctgatcgccggcaagcggctgctctggtatctggtgcccagcgagtatgacgatcactacgatgactacgtcaacggcctgtttgcccatggcaagctgagtcaggatgactggctcgatctcggtggcttcaaccgcattccggccgaggagtacttcggctccgccctctggcagctttacaagggcatcgactctccctacaaggcggtgctcaagtcggtgttgatggaggcctactcccacgagtatcccaacacccgcctgctgtcggtgaccagccgtgactggttccagcacaacgaggggatgcactaccggctcgacaactactgcctgatgctggacaaggtgaccaactacctcaagtccatcggcgacatgcagcggctcgatctggtgcgccgctgcttctatctgaaggtgtgtgacggtctcagccacccgaaggaggagcactccccggcctggcgccgcgagcagatgacccagctggtctcctactggggctggagtcaggagcggttgcaccatctggatcaccgccaggagtggaaggtcgaggacgtcaaggtggctcatgccgagttgctggaagccctgatgcagagctaccgcaacctgatccagttcgcccggcgcaacaacatca

SEQ ID NO: 288567 - DNA, 767 bp, Unknown
  Bacterial polypeptide expressing nucleotide sequence isolated from the Sargasso Sea
tataaaaaaaataaataaaaaaaatttaaaaattatttatggagatagtgaaagggctggatcctcgcttaaagctattaattatatagataaatttaaacctaataaagtatttattcatgatgctgctagacctaatatttcattaaagttaattaagaaactcgcaaaattaataaaaaaatataaaactgtggtaccttatattaaagttgatgactcaatcaaaattaaaaaaaaaaaaaattatgataatttagatagaaataaaataattttaactcaaactcctcaatgctttgattacaaacttttaaaagaaaattataaagatattaaaaataatattacagatgaagtttcaattcttcttaaaaataaaattaaagttaagtttgtaactggagaaaaggaaaattttaaaattacacataggaaagatttaataaatgaaggtttaaaaatattttatggtattggttttgatatccatagattaattaaaaataaaaaactttatcttggtggaataaaaattccatatcattcaggtttaaagggacattctgacggtgatgtaattttacatgcaataattgatgcaatattaggagcaatgagaaaaaaggatataggttctttgtatcctgacaataacaaaatatttaagaatattagatctacaaaaatgctttatccgttaatatctgatctaaataaaaataattattttataaataacctcgatataaatttaatttgtgaaa

SEQ ID NO: 288568 - DNA, 469 bp, Unknown
  Bacterial polypeptide expressing nucleotide sequence isolated from the Sargasso Sea
atgcgcattgggcaggggtacgacgcgcacgggtgggcggaagacgacaggcccctcgtgataggtggagtcacgtttaccgaaaagcgcggtctggacggccatagtgacggtgatgtcgtcactcacgcaattatggacgcgatgcttagtgcggcgggcctcggcgacataggtcagatctttccggacacttctgaggaactcaacggcgcaaatagcgttcaacttttaagggaaacagccgagatgatcagtgatgccggatgggtactcgtaaatgctgactgtacggtcgtaaccgacacaccccggatagcgccggtaaaaaagcagatggaagctggtctttccgatgcagctgggggcgtcgtcacggtttgcgggaagcggactgaaggtataggtgccttagggagaggcgaaggtgtcgtcgccttagcggtcgctttgctggagaaaaagtgaa

SEQ ID NO: 288569 - DNA, 646 bp, Unknown
  Bacterial polypeptide expressing nucleotide sequence isolated from the Sargasso Sea
agcatttaaatttaaaatactttataaattatttaaacaaaactcaaaatttataacagacgatgtatcactttttattgataataatttaaaagtaaaatttattaaaggtgatgaaaataatttaaaaattacaaataaaatagatattaaaaaaaatattcaaaaaacacattttggtattggttttgatattcatcgtttggaaacaaataaaaaactttttttaggtggggttaaaattccttaccatttgggattgaaagctcattctgatggagatgtaattatacatgctctaatagatagtttattgggagcttgcaaattaaaagacattggaattttattttctaataaaaaacaaaaatataaaaatattagatcttctaaaatgctaattaaagttttaaaacttattaatcaaagaaaattttatgttaataatattgatataaatgtagttgctgaacgccctaaaattaataaatatagaaataaaataattaactctatttcaaaactttgtaatattaacaaaagtcaaattaatattaagggcaaaacagcggaaaaattaggattgataggaaaagaaaaagctatagcatgtgaggtaataacttctgttataaagtatgcttaa

SEQ ID NO: 288570 - DNA, 775 bp, Unknown
  Bacterial polypeptide expressing nucleotide sequence isolated from the Sargasso Sea
aaaagattattaaatcatttaaaaaaaaataatgctgtagttccatatataaactctaaaaatacaataaaatataaagtcaaaaatgaattttataatcttaatagagaaaacacttttctaactcaaacacctcaagcatttaaatttaagaaattatacgaacttgcaattaatgagagtgataaaattacagatgaagcaactttattcatcaataaaaatagaaaaataaaatttataaaaggagaaaatactaatgataaaatcacttttaaaaatgatataaaattaactaagactttttttggaattggttttgatattcatagattagttaaaaacaaaaagctttatttaggtggtgccaagataccctttcactcgggattaaaagggcattcagatggagatgtaatcttgcattcaattatagatgcaattttaggtgcaatgagaaataaagatattggatcctttttccccaacacaaaaaaatataaaaatattagatctccaaaaatgttaaaacctgtaattgaaaatctttataaatcaaatttttttataaataatttagatataaatttaatttgtgaacaacctaaggtatcaaaatacagagatcgtatcattaaatctatatccaaactcatgatgttgaaaaaagatttaataaatttaaaaggtaaaacagttgaaaaacttggtttgattggaaaagaaaaagctattgcatgtgaagtaattatttcaataacaaaatatgattaaa

SEQ ID NO: 288571 - DNA, 385 bp, Unknown
  Bacterial polypeptide expressing nucleotide sequence isolated from the Sargasso Sea
aggggctgttggtcattcggacgctgatgttttaattcatgctatctgtgatgcaatacttggagcatgtaatcttggtgatattggttatcattttccagatacagatagtaaatacaaaaacattgattcgaaaatcatccttaaaaaggtttctgatttgatgaaaaaagcaggttattcaattgtaaatattgactcaacagttgttcttgaaaaacctaaattagctcatcatttaagtgcaatgaaaaaaactttagcagaaattcttatgatttcttctttagatatttcaataaaagcaactactcatgaaaaagttgactcatttggtaagtcagagtcaataaaggcttatgctgtttgtttgttgactaagtaa

SEQ ID NO: 288572 - DNA, 487 bp, Unknown
  Bacterial polypeptide expressing nucleotide sequence isolated from the Sargasso Sea
gatgattcgggttggtcatggtttcgatgcccatcggcttgagtcagatcaagctttgatcattgggggcgtctccattccttacgaaaaaggtcttgttggttactctgatgcggatgtattaatccatgcgttatgcgatgccttgcttggtgcagcgagtcttggagacattggccagcactttccaagtcacgatcaagcgcacgcggggcgcgatagtcgagagtttttaagggtcgtgatcgaccttttggatgaagcggggtaccggcccgtcaatgtcgactgcacgatcattgccgaagcacctcggatggctccgtttctgcctgagatgcgattgatcctttcgtccctactgctgatttccccgacctgcattaatgtgaaggcgacgactactgacggtatgggttatgtcggccgtggggaaggcatcgcagcacatgcagtggcatcgatttcagatgcgcacgttgagtaa

SEQ ID NO: 288573 - DNA, 339 bp, Unknown
  Bacterial polypeptide expressing nucleotide sequence isolated from the Sargasso Sea
cgcttctcggggcactggctttgggggatatcggagatcattttccagataccgattctcaatacagagaggcagacagtcttgtgctgcttaaaaaagtatgggaaatgattcagcaacaaggttacaggatcaacaacctcgatagtgttttaatcgcccaacgtcccaggctgaaacccttccttgaaaccatgcggactaacttggcaagttgtgtggactgcgagattgagcttgtttcggtaaaagcaactactactgaaaagctgggatttgccggcagggaagaaggaattgccgcaaaatccgtagttctgctcagtaagtttcagtaat

SEQ ID NO: 288574 - DNA, 886 bp, Unknown
  Bacterial polypeptide expressing nucleotide sequence isolated from the Sargasso Sea
tggtaaagaaagatctgactcttcgttaatagcattaaaatatctaaaaaaatacagaccaaaaaatgtttttattcatgatgcagcaagacctaatttttcatataaattacttcaaaatttatttaaaaatttaaaaaaaaataaagccgtagtccctgtagtttcatcaaaagactcgattaaatataaaataaaaaatcaaatatttaatctaaataaaaataattcttacttaactcaaactccacaagcttatagatttaaagaattatataatctagcaataaatgaaaaagataaaataagcgatgaagctacactgtttattaataataatactcaagttaaattcatacctggggaaaataaaaataacaagattacatatttaagcgacattgatacttctaaaacatattttggtataggttttgatattcataaacttatagaaaataaaaaactttatcttggtggagttaaaattcctttccattctggcctcaaaggacattcagatggggatgtagttttgcatgcaataattgatgcgattttaggtgctactaaaaaaaaagacattggcactttttttccaaatacaaaaaaatttaaaaatattagatctccaaaaatgttaaaaccaattatcgataatctttataaatcaaacttttcaataaataaccttgatataaatttaatttgcgaacgacctaaagtttcgaaatatcgaaacaaaataataaattcaatatcaaaactgataactttaaataaaaatcaaattaatttaaaaggtaaaacaacagaaaagttaggtttgataggaaaagaaaaagctatcgcttgtgaagtaataatttcaattacaaaatatgat

SEQ ID NO: 288575 - DNA, 595 bp, Unknown
  Bacterial polypeptide expressing nucleotide sequence isolated from the Sargasso Sea
aaagataatatatccgatgaagcaactttatatttaaataataatattaaagtaaaatttatttcaggtgaaaatcaaaataataaaataacatactttaatgatttaaaaaaaataaaattatttgctggaataggttttgatattcataaattagtcaaaaataaaaaactttaccttggtggagtaaaaattccatttcattcaggtctcatgggacattcagatggtgacgtaattttacatgctataattgatgcaattttaggagctacacaaaaaaaggatattggcacttatttcccaaacacaaaaaaatttaaaaatattagatcaccaaatatgctaaaaccaattataaaaaatctttataaatcaaatttttcaataaataaccttgatataaatttaatttgtgaacaacctaaagtttcaaaatatcgagacaaaataattaattcaatatcaaaactgacaaccataaataaagatcaaattaatttaaaaggtaaaactgtagaaaaattaggtttaatagggaaagaaaaagcaatagcttgtgaagtaataatttcaataataaaatatgattgat

SEQ ID NO: 288576 - DNA, 691 bp, Unknown
  Bacterial polypeptide expressing nucleotide sequence isolated from the Sargasso Sea
aaaagtaaattttatcttgttcaaaccccacaaatatctaactttaatgatctaaaaatatcactaaagaaatgtattgatgaaaatattaattgtcctgatgagtcttttgcaattgagtattcagacctaacttcatcaaaagttatgggcgctaggtctaatattaagattactgagcctgaagatatagaacttttgagtaaatttcttacgcgaagcggaatagggtttgatttacacaaatatgaggcaggagatggaattattttaggcggttataaaatgaagtgtgattataaaattgtcgcccattctgatggagatgttttacttcattcaatagcggattcaattctaggtgctgcaggtttaggtgatattgggaagttcttcccagataatgatgaaaataatagggacttgaacagttcaaaaatcattaaatattgtttagataagataaatgaagttaatctagaaatttataatattgacgctactgtgatttgtgaagagccgaaaattaatccatacagaggagagattttacagaaattatcaagcatcttaatgatcccaatttcaagcattggattaaaagcaacaacttctgaaaaaataggtattattggtgaaaataaagcaatagctgttcaaagcattgttaatcttagagagaaattatgaa

SEQ ID NO: 288577 - DNA, 487 bp, Unknown
  Bacterial polypeptide expressing nucleotide sequence isolated from the Sargasso Sea
atgatcgatgttaggttaggtaatggttttgacgttcatgcttttactgaaggaaatgaagtaaccctttgtggcattaaaatacctttctcaaaaaaactattagggcattctgatgctgatgttggattacatgccatcactgatgccatatatggagcgattgcagccggtgacattggtacacattttcccccgaatgatcaaacatggaaagatgtttcaagtgatatatttcttaagcacgccgttcaacttgcagataaattaggctatcagatcaataacgttgactgcaccattatatgtgaaaaaccaaaaattggaccattatccgataaaatgaagagctctatttctaaaattatggagctagataaaaatcgcatcagcgtaaaggccactacatctgaaaagttgggtttcactggtagagaagaaggaatagctgcacttgccactgcctcggtaagtaaagttgagtaag

SEQ ID NO: 288578 - DNA, 661 bp, Unknown
  Bacterial polypeptide expressing nucleotide sequence isolated from the Sargasso Sea
tgttgccattcatgatgccgcccgcccgttaataccgaccaatctattagacggtttaatcgccgctataaataataccaatgacgacaagcaaaaagctgaaatcattggtgcagttccggttttgctgcttgccgatagcatcaagaccattgacaagagcaacggtcaaaacaacagccaaaacaacccgacaagcaacctcgcccttattactggcagcattgaccgaagccagctggccgccgctcaaacaccgcaattattccgccgtaatttcatcaccaagctgcatgatgattttgccggcaaaagcgactttaccgatgattgcagccttgctgaagcagccggtttcaaaatcaccatgattgatggcgccaaacagcttatgaagctgaccgatgctgatgattttgctatgttatcatatcttttcgcgtccgacagggcggcaccgagctaccagcagcacacggatgataacagcatgacggaaacgcgctttggcaccggctttgatgttcataaattcagcgatgaagctggtccgatctggcttgggggtatcaagctcgatagtgaccgccgcatgttggcgcattctgatggtgatgttggtttacatgccttatgtgacgcgatttttggtgcaattgcc

SEQ ID NO: 288579 - DNA, 574 bp, Unknown
  Bacterial polypeptide expressing nucleotide sequence isolated from the Sargasso Sea
tacgctttttattaataataatttaaaaataaagtttataaatggtgaaagccaaaataaaaaaattacttttaaaaatgatgttgaaaattcaaaaatattttttggtataggttttgatattcatcgacttatcaaaaataaaaaactttatctaggaggtgttaaaataccatttcattcaggtctcaaaggtcattcagatggagatgttattttacattcaatcatcgacgctattttaggagcaacgtctaacaaagatataggagcacattatccagataataaaaaaaaatttaagaatataagatctccaaatatgcttaaacctattatggaaaaatttaataaacaaaaatactcaattaataatttagatataaaccttatatgtgaaagaccaaaaatatcaatttatagaaatagaataattacttctttatcgaaacttttatcattagataaaaataagattaatttaaaaggtaagactactgaaaaattaggtttaataggaaaagaaaaagctatagcttgtgaagtaatagtttctgtgacgaaaaatgattaa

SEQ ID NO: 288580 - DNA, 670 bp, Unknown
  Bacterial polypeptide expressing nucleotide sequence isolated from the Sargasso Sea
gatctagtaaaaaatttaaaaatatataaagctgtaatacctgtaataagttcaaaagattcaataaaatataaaattaaaaatcacatctttaaccttaatagagattatacattgctaacgcaaactcctcaagcttttaggtttaaagatgtatttgatttagcaataaatcaaaaagaaaaaattaatgacgaagctactctttttataaatacaaatcgtaaaataaaatttatacgaggagaaaataaaaacaataaaatcacttactttgatgatgtaaacgcatctaaaacttatttcggtataggtttcgacttacatagattaataaaaaataaaaaactttatcttggtggattaaaaataccttttcattcaggtctaaaaggacactcagatggagatgttattttacatgcaataattgatgcaattttaggtgccacaaagaaaaaagatattggaacttattttccaaactcaaaaaaatttaaaaatataagatcacctaaaatgttaaaacctataatagataatctttataaatctaattgctcaataaataatcttgatataaatttaatttgtgagcaaccaaaagtttcaaaataccgagagaaaattataaattcgatatcaaaattaacaaatttaaataaaaatc

SEQ ID NO: 288581 - DNA, 406 bp, Unknown
  Bacterial polypeptide expressing nucleotide sequence isolated from the Sargasso Sea
gcatcatcccgataagttgggattggatggccatagtgatgcggatgttttaagtcactcaataatggatgcattattgggagcactttcactgggggatatagggaaatattttccaccaactgatgaaaaatggaaaaacgctgatagcttgtttttgttatcaaaagtaattgatctgataagacagaatggttgggaaattaataacattgatagtgttcttattgctgaaaggccaaaaatcatgccacatataaaattaatgaaaaaaaacatttctgagatattaaagattgatgaaaatttaattggtattaaggcaactacaaatgaaaaattgggccctgaagggagagaagagggtataagttgccattcagtagtactacttgagaaaaaatga

SEQ ID NO: 288582 - DNA, 490 bp, Unknown
  Bacterial polypeptide expressing nucleotide sequence isolated from the Sargasso Sea
ttgaaagtcattaaaactttttatggtataggttttgatattcataaattagttaaaggtaaaagattatacctaggtggaattaaagttccatttcattctggcttaaaaggtcattcggatggagatgtaatattacatgctattattgatgcgattttaggtgctacaagaagtaaagatattggcacttattttcctaacataaaaagatttaaaaatataaaatcatctaaaatgttaaaacccattatggataatctaactaagtctaatttttatattaataaccttgatataaatttaatttgtgaacaaccaaaagtatcaaaatatcgtaacagaattattaactcagtctcaaaactaatgaatttagataaagatctaattaatataaagggtaaaacagtagaaaagttaggtttgataggaaatgaaaaagcaatagcctgcgaagtaataatttcacttagtaaatatgattaaa

SEQ ID NO: 288583 - DNA, 484 bp, Unknown
  Bacterial polypeptide expressing nucleotide sequence isolated from the Sargasso Sea
atgattaaaagtggaattggttatgacgctcatcaattaggagaaggcgaaagtttagttattggcggtgttaagatagaaagcaatgttggatcaattggtcactcagatggagatgttttaattcatgcaatcatagatgcaattttaggcgcaactgcaagcggtgacataggattactttttcccagcgataacataaaatacaaaaattttcacagcggtgattttttaaaaattgttaaaaaagagattttaaataaaaattataaaatactgcatattgactctgttgtaatacttcaaagcccaaaacttagagcctttattgatcaaatgaggacaaatatttcaaatattttagatttgaaattaaatcaagtatctattaaagcgaccacaactgactttctaggttacattggaagaggggaaggtttagctgcccaatctattgtaacaattgaagacaatagattatgat

SEQ ID NO: 288584 - DNA, 593 bp, Unknown
  Bacterial polypeptide expressing nucleotide sequence isolated from the Sargasso Sea
cgcccggtggcgccaggagcagcgggagcagcgcacccgcgagcggcggcccgatctgtttgcccgctggcagaccgcgacaatgaatgaccctttagatcccggcatggagctgcgcatcggcaacggatacgacatccatcggctggtgcctggacgggccctcatcctggggggtgtgaccctggaccatcccgatggtcttggcctggatggccacagcgacgccgatgtgctggtgcatgcggtgatggatgcgctgctcggggcccttgccctcggtgatatcggcaagtatttcccccctaccgatccccaatggaaaggggccgacagcttgaagctgctggttcaagtggtgaagctggtgaaggagcgtggctggtcggtggtgaacatcgatgcggtggttattgctgagcgtcccaagctcaagccgcatatcgccgagatgagcagccggatggcgtcagcgatcggcattacctctgatgccgtgggtgtgaaggccactaccaacgaaggcttgggtccggagggacgggaagagggcatcagttgccaggctgtggctctgctgcagcggagctgaa

SEQ ID NO: 288585 - DNA, 589 bp, Unknown
  Bacterial polypeptide expressing nucleotide sequence isolated from the Sargasso Sea
gaatcatttgccattgaatattcaaatcttaaattatctaagattcttggagatagatcgaatataaaagtaacagagaaagctgatatagaaattctcaataattttcttacaagaagtggtattggttatgaccttcacaaatatgaaccaggagatgggattattttgggcggatataaaattacatgtaattacaagattgtagctcattctgatggagacgtattactccattcaattgctgattcaatattgggtgctgccgggttgggtgacattgggatgtttttttcagatcaagataataaaaataagaatttagatagtacgcttatcattgaacactgcctaaatgaattaaataaaatggatttagaaatttataatattgatacaacaattatttgtgaaaatcctaaaattaatcctcacagagaaaaaattttagaaaatttgtctgcaatattaaaagttcctatgaaaaaaattggcttaaaagctaccacatcagaaaaaattggaattattggaaataatgaagctatatcagttcaaagtatagtaaatttaaaggatctatcatgaa

SEQ ID NO: 288586 - DNA, 613 bp, Unknown
  Bacterial polypeptide expressing nucleotide sequence isolated from the Sargasso Sea
aatgccagttattactatagacggtgatcctcttacattaaaaataacttatgaaaaggatctcaatttattggagcctcatttgactaaaaatttaaacaattacataacaaaaataggtaatggatttgatattcatcgatttgataatagtaaaaaatcaggtaataactttattttacttggcggcattaaaattaaagcttcaaaaccgttaataggccactcagatgctgatgtcttacttcatgctataactgatagtatcttaggagtaatgaacaaaggtgatataggtagtatttttccacctactgatgaaaaatggaagaatgcggacagttccatatttttaacacatgcctcaaaattacttcaaaatgaaaaagggataattaataatatagatgctgtaattgtttgtgaaaaaccaaaaatattagattattcaaagaaaatgaaaaaaaatattgcaaaaatactaaatattaatgagcaaaaagttagtattaaaggaaaaacttcggaaagtattggttttattggcagggaagaaggtatagcagctatggtttcaactgctatacaagttaacaacactgatttaaaatga

SEQ ID NO: 288587 - DNA, 900 bp, Unknown
  Bacterial polypeptide expressing nucleotide sequence isolated from the Sargasso Sea
aagtaagagatttcataataaaacagccaaacaattctatcattataaaaataaagaaattattgatcactccatcgaaaaatcattaaattccaagcttttcaaaaagattattattataacaaataatttaaatcatcttaagaaaaaaaaactacctaaaattataaaaataatcaaaggtggcaaagaaagatctgactcttctttgattgctttaaaatatctaaaaaagtttaaacctgccaacgtactcattcatgatgcggcaagaccaaatttttcaataaagctgctaaagaatttaattaataagttaaagaaaaatagagctgtcataccctatatatattcaaacgactcaatcaaatataaatcacaaaatcagctatttaatttgaacagaaataaggcattattaactcaaacgcctcaagcatttaagtttaaagacttatacaatctttcatcaaaacaaatgacaaaggtaaatgatgaagcaacattatttataaaaaataacttaaagattgccttcattaagggtgaaattaaaaataataagattacttactttaacgatgttaaacaaaataaagtatcttttggtattggtttcgatattcatagattggtaaaaaataaaaaactttatcttggaggaacgaaaatacctttccattcaggtttacaaggtcattcagatggtgatgtaatattacacgcaacaatcgatgcaattttaggtgctattcaaaaaaaagatataggtacttattttccaagtaataaaaatagatttaaaaatataagatctccaaaaatgctcaaaccgattatagaaaatttatataaaaatgacttttcaattaataatttagatattaacttgatttgtca

SEQ ID NO: 288588 - DNA, 481 bp, Unknown
  Bacterial polypeptide expressing nucleotide sequence isolated from the Sargasso Sea
aatgattaaagtgggacttggttatgatgttcacaaatttgaaaaaggagacaaaataactttatgcggtgttaccataccttttgataaaaagctaataggacattctgatgcagatgtttgttatcattctatagttgatgctattcttggatcattatcattaggagatattggagatcactttccacctagtcaaaaaaaatggaaaaatgcggattcaaaaatttttatgatttttgccaaaaaaaaacttattgaaaataatgctgaaatacaaaaccttgaccttactataatttgtgaaaaaccaaagataggaatatataaaaaagaaatgaaaaaaaaaatatcctcagttttagatttaagtatagaaactattaacattaaagcgacaacctcagaaaaacttggatttactggcagagaagaaggtatagctgctcaatccattgtactaataaagtgtgaaaagtaa

SEQ ID NO: 288589 - DNA, 671 bp, Unknown
  Bacterial polypeptide expressing nucleotide sequence isolated from the Sargasso Sea
attaacttttaaagatatgaaagtgccagatattttagtgagcggtaatcatgaagagattaaatcgtggagaagaagaaagagttttgaaagaacattagagagaagaagtgacttaatttcaaatgaaaactacaaaaaatccccacaaagtaagagaataataaaagaaaataatcatttcatgaaatttagaataggcaatggatacgatatacacagactagtagaggatagagatttaattattggaggtgtaaaattgcatcatcctgaaaatttaggattggatggtcatagtgatgctgatgttttaagtcactcaataatggatgcattattgggagcactttcgttgggcgacataggaaagtatttccccccgtctgatgaaaaatggaaaaatgctgatagcttgtttttgttatcaaaagtaattgacttgataagacaatatggttgggaaataaataatattgatagtgttcttgttgctgaaaggccaaaaatcatgccacatataaaactaatgaaaaaaaacatttctgaaattttaaatattgataaaaatttaattggtattaaagcaaccacgaatgaaaaattgggtccagaagggagagaagagggtataagttgccattcagtagttcttcttgagaaaaaatgag

SEQ ID NO: 288590 - DNA, 861 bp, Unknown
  Bacterial polypeptide expressing nucleotide sequence isolated from the Sargasso Sea
atagcggcagctggattaggagagagatttggcaatgagactcctaagcaatatgctagagtaaatggaaaaaccataattgaaagtgcggtcaagccttttgttgattctaaatatgtatcagaaataattattgccatatctgaaaatgataatcatattaaaaatcaaaatttttacaattctaataagattaaatatgttgttggtggtgcttcgagacaagaatcaataaataatgcacttaatgctgctgataaagattatgaatatgtattaactcatgatgcagccagaccaaatattacagaagatgatattgttaaattatataaagatattaaaaagtccaaaacaagttgttcctttctgtatacccccgtttacgattcacttaaggaagtaagccctaaagatacaacaaaagataaaaataaattctatcttgttcaaacgcctcaaatttctaaattcagtcatttaaaatcatcaataaaaagatgtattgatgaaaatataaattgccctgatgaatcttttgctatcgaatatgcaaatttaactttgtcaaaagttaaaggatctcgttccaatattaaagttactgaaccacaggatttagagattttaaataattttcttactagaagtggtgtgggttttgacttacataaatatcaagctggagatggaataattttaggtggctacaaaatagaatgtgattatgaaattatcgctcattcagatggtgatgttttgcttcattcaatagcagactcaattttaggtgcagctgcattaggagatataggaatatttttttcagatcaagatgaaaagaataaagatttaaatagt

SEQ ID NO: 288591 - DNA, 832 bp, Unknown
  Bacterial polypeptide expressing nucleotide sequence isolated from the Sargasso Sea
ccaaagtaattgtcatgtaattcaaggtggagcaacccgtcagcaatcagtttacgctggtctgcagactgccgcagatattgacccagccgcccgttttgttgcgatccatgatgccgcacggccattactgccggcacgcttgcttagcaccatgctggcaaccattagtgacgctgttgccggggtcgcccccgttttgccacttgccgacacattgtcatgcgttgatgcacaacagcatatagatcgtatcattgaccgcgcacccataagggcgctgcaaacgccgcaactattctggcgcgaggcaatcacagatcttcataaacattacgttgataacccgacatttactgatgattgcggtctggcgcttgctgctggtcataccatagcgacagtgactggcgcgcaccaacttctaaagctgacgcaaccacaagattacgatatgctaaaaacttactgtaacgccaatgatagcgcctcaataccggcaggacatagcatgccagatatacgtattggaaatggctatgatgtgcataaatttgctgatacacccggccctataatgctggcaggcatcagcgttgaaagcggccgcagtgtactggcacattcagatggtgatgttgctttgcatgccctttgcgatgctattttcggagcgctagcagaaggtgacatcgggcatcattttccaccatcagatccacaatggcaggcggctgacagttctttgttcttaaagtttgcgatagaccgagttcgtaaacgcggcggacaaattatgaatcttgaccttaccatcatttgcgagacgcct

SEQ ID NO: 288592 - DNA, 484 bp, Unknown
  Bacterial polypeptide expressing nucleotide sequence isolated from the Sargasso Sea
gaagttccgcattggtaatggttatgatatccatagattgataaagggtagggatctgatattaggtggagttaaattgcatcaccctgagaatttaggattggatgggcatagtgatgctgatgttttaagtcactcaataatggatgcattattgggagctctttcgttgggcgacataggaaagtatttccctccatctgatgaaaaatggaaaaatgctgatagcttgtttttgttatcaaaagtaattgacttaataagacaagatggttgggaaataaataatattgatagtgttcttgttgctgaaaggccaaaaatcatgccacatataaaactaatgaaaaaaaacatttctaaaattttaaatattgatgaaaatttaattgggattaaagcaaccactaatgaaaaattgggtccagaagggagagaagagggtataagttgccattcagtagttcttcttgagaaaaaatga

SEQ ID NO: 288593 - DNA, 856 bp, Unknown
  Bacterial polypeptide expressing nucleotide sequence isolated from the Sargasso Sea
aagatttgatggtgatttgcccaagcagtatgtcaaaattaacggaagatctataattgaaaatgctgtaaagccttttatagattcaaaatatatttctaagatagtaatcgcaatttctgatggagacgagcttataaaaaatcagaacttctataattgcgaaaaaattgaatacattatcggaggattaactcgtctagaatcaatttttaatgctctttactcgattgaaggtaattatgaatttgttattacgcatgacgcagctcgaccaaatgtttccgaaaatgatattgcaagactttttgaagatattgttcattcaaagtcgagttgttcatatctatatactcctgtatatgattcaattagggaggacgatagaacattagataagtctaaatttaatttagttcaaactcctcaaatatgtaattttaaagacttaaaaaaatctatacaaagctgtatcgataataatgtagattgtcctgatgaatcatttgccattgaatattcaaatcttaaattatctaagattctgggaaatagatcgaatataaaagtaacagagaaagctgatatagaaattctcaataattttcttacaagaagtggtattggttatgaccttcataaatatgaatcaggagatgggattattttgggcggatataaaattacatgtaattacaagattgtagctcattctgatggagacgtattactccattcaattgcagattcaatattgggtgccgctggattgggtgacattgggatgtttttttcagatcaagacaataaaaataagaatttagatagcacgattataattgaacactgcctaaat

SEQ ID NO: 288594 - DNA, 458 bp, Unknown
  Bacterial polypeptide expressing nucleotide sequence isolated from the Sargasso Sea
aatgttatcggctaatcttagaattggtcatggatatgatgtccatcagcttgttgaggaaagagtattagtaatctgtggtgttgttattgattatcataaaggttctttaggacatagcgatggagatgttggcattcatgcaatttgtgatgctatacttggtgcattagcattaggagatttaggcacccatttttcatcttcagattcgaaatggtctggacaagatagccgtacttttctgaatcatgtattaaaattaatgaatgatgaaggctatcatattaataatattgattgtacaattattttacagtctcctcatctgaatatatatattaaatctatgagaaaaataattgctgagatttgtcaaattaatattaacatggtatcaattaaagcaactacaacagataaattaggcgccattggtagaggagaaggtattggcg

SEQ ID NO: 288595 - DNA, 400 bp, Unknown
  Bacterial polypeptide expressing nucleotide sequence isolated from the Sargasso Sea
ttccattctggtttacaaggtcattcagatggtgatgtaatattacatgcaataatcgatgcaattttaggtgctattcaaaaaaaagatataggtacttattttccaagtgataaaaatagatttaaaaatataagatctccaaaaatgcttaaaccaattatagaaaatttatataaaaataacttttcaattaataatttagatattaatttaatttgtcaaaaacctaaagtttcaacgtatagaaatagaataattaattcattgtcaaatcttatgaatttagaaagaaataagattaatttaaaaggtaaaactgtagaaaaattaggtttaataggtaaagaaaaagctattgcttgtgaagttttaatttcaataaataaatatgattaaa

SEQ ID NO: 288596 - DNA, 487 bp, Unknown
  Bacterial polypeptide expressing nucleotide sequence isolated from the Sargasso Sea
atggatctgcgcgtcggcaacggctatgacatccaccgcctggtggccggccggcccctaatcctgggcggccagcatctggagcaccccgatggtctggggctcgatggtcacagcgatgccgatgtgctggtgcatgccttgatggatgccctgctcggggccctctccctcggcgatatcggcaagtatttcccccccaccgatcccaaatggaaaggggctgacagcctcgtgctgctcgagcaggtgatgggcctagtgcgcgagcgcggctggagtgtggtgaacgtggacaccgtggtgatcgccgagcggcccaaactcaagccccatatcgaggcgatgcgcggcgcgattgccgagcgcatgggcctcgattctgagcgagtgggcgtcaaggcgaccaccaacgaaaaactcggtgccgagggccgcgaggagggcatctccagccacgccgtcgccctgctgtgcaaaccatgag

SEQ ID NO: 288597 - DNA, 843 bp, Unknown
  Bacterial polypeptide expressing nucleotide sequence isolated from the Sargasso Sea
aaaaatataaaccaacctctgtatttatacacgatgcagcaagaccaaatttttcaatcaagttactaaatactatgatcaaaaatttaagaagatataaagctgttgttccaattattaaatctaaagactctgtgaaatatagtattaaaaagcaaatttttaatctagatagaaataatgtattgctaactcaaactcctcaagcttttaaatttaaagagttgtataaacttgcaataaaacaaaaagataaggttaatgatgaagcaaccctttttatcaatgaaaattacaagattaaacttataacaggagaaaaccaaaataataaaattacatatcttgatgatataaacactccaaaaactttttttggcatagggtttgatattcataaattaattaaaggaaaaaaattgtatctaggtggtataaaaattccttttcattcgggtctgaaaggacattcggatggagatgtgatattgcatgctgtaattgatgcaattttaggtgctataagaaaaaaagatattggcacccattttccgaatacaaaaaaatttaacaatattagatctccaaaaatgttaaagcctattttagataaactttataaatcaaatttttcaataaataatcttgatataaatttgatttgtgaacagcctaaagtttcaaagtatagaaataaaataattaattcaatatcaaaactaatacaattggataaaaatcaaattaatttaaaaggtaaaacagttgaaaaattaggtttaataggaaaagaaaaagcaattgcttgtgaagtgataatttcaattacaaaaaatgattaaa

SEQ ID NO: 288598 - DNA, 205 bp, Unknown
  Bacterial polypeptide expressing nucleotide sequence isolated from the Sargasso Sea
atgaaattgcgtatagggcacggttttgatgtgcatgcctttggtggcccagggccagtaacgcttggtggcgttaaaattgattacgcccagggtttactggcgcattctgatggtgatgtggtgctgcatgcgttgtctgatgcgctgttaggtgctgttgcgcttggcgatatcggacatcactttccggataccgatgacg

SEQ ID NO: 288599 - DNA, 694 bp, Unknown
  Bacterial polypeptide expressing nucleotide sequence isolated from the Sargasso Sea
agataaagataaattttatcttgtccaaacacctcaaatttgtatattaaaagatcttaaagcatcgttaaaaaaatgtattgatgaaaatattagttgtccagatgaatcttttgcgatcgaatatgccggtctttcttcatcaaaggttctgggatctcgttcaaacataaagatcaccgagcctgatgatttaaagatgttaaataattttcttgtaagaactggagtaggttttgacttacacagatatgaggctggaactgaaataattttaggaggtcacaaaataaaatgtgaatataaaattcttgctcactctgatggggatgttttacttcattcaattgcagactcaatcttaggagcggcggccttgggtgatattggaatctttttttcggataaagatgacaaaaataaaaatttagatagttcagatattattaagtattgcttagatcaattagaaaggcttaagttagaaatatttaatattgatacaacaataatttgtgaaaaacctatgatttctcctcatagagacaagattttaaaaaatctatcaagtttattgcatatacctatttcaaacattggcttaaaggctacgacctctgaaaaattagggatcattggagaaaataaggcaatagctgttcaaagccttgtaaatctcaaagaaaaaatatga

SEQ ID NO: 288600 - DNA, 484 bp, Unknown
  Bacterial polypeptide expressing nucleotide sequence isolated from the Sargasso Sea
aatgaaagaaataaagattggtaacggatttgatgtccataaattatcttctggaaaaaaaataaaattatgtggtgttgaaatcaatcataacaaaaaattgataggtcattctgatgctgatgtaggattacactctttgacagatgcattatttggtgcgttaggcaaaggtgatattggtatttggtttcctcctagtaaaaagaaatggaaaaatgctgattctgaaatatttttaattaaagcacttaaattaatgagaaaagaaaaatttttgttatcaaatattgatctcacatttatttgtgaagaaccaaaaatccattattacagagataaaatgataaaatatttgtcaaaggtttgctatatattgccaaaaaatattaatattaaggcaactacttcagaaaagttaggatttaccggaagaaaagaaggaattgctgtaataactacagtattaatttataagatataa

SEQ ID NO: 288601 - DNA, 496 bp, Unknown
  Bacterial polypeptide expressing nucleotide sequence isolated from the Sargasso Sea
atgaccgcccgtccttttgatatccgtcttggcaatggctacgacgtgcaccggtttaccgatggcgatcatgtgattctttgcggtgtgaccatcccgcatgagcgcgcccttttgggccattccgatgctgatgtcggcatgcatgccgtcaccgatgcgatttacggggcgcttgcaatgggagatattggtcggcattttccgccctcggatccgcaatggaaaggcgccgcaagcgagatgttccttgcccacgctggaaagctggcgcgtgaaaacgggttcgagatcagcaacatagactgcactcttatatgcgagcgcccgaaaatcggaccccacgccacagccatgcaaactgaattggcgcggattttgcaagtcgacgccgcgcgcatatccgtcaaagccaccacctccgaacggctcggattcaccggccgcgaggaaggcatcgcctccatcgccacagccactttgatcaatcagtaaa

SEQ ID NO: 288602 - DNA, 487 bp, Unknown
  Bacterial polypeptide expressing nucleotide sequence isolated from the Sargasso Sea
ttggataaaactacatttggtattggttttgatattcataaattgatcagaaaaaaaaaactttttctaggtggagtaaaaatacccttccattctggtttacaaggtcattcagatggtgatgtaatactgcatgcaacaattgatgcaattttaggagctactaaaaaaaaagatataggtacttatttcccaagtaacaaaaataaatttaaaaatataagatctccaaaaatgcttaaacctgttattgaaaatttatataaaaacaattattcaataaataatttagatattaatttaatttgtcaaaaacccaaagtttcgaagtatcgtaataagatagttaattcattatcaaatcttatgaatttagataaaaaaaagattaatttaaaaggtaaaactgttgaaaaattaggtttaataggtaaagaaaaagctattgcttgcgaagtaataatttcaattacaaaatatgattaaa

SEQ ID NO: 288603 - DNA, 613 bp, Unknown
  Bacterial polypeptide expressing nucleotide sequence isolated from the Sargasso Sea
aatggaaattattactatagacggcgatccacttacattaaaaataacatatgaaaaggatctaaatttattggagcctcatttgaataaaaattataataattacataacaaaaataggcaatggttttgatattcatcgatttgataatagtaaaatatcagaaagtaactttatttttcttggtggtattaaaattaaatcttcaaaacaactaattggtcattctgatgctgatgttttgcttcacgccattactgatagcattttaggtgtaataaataaaggtgatataggaagtatttttccacctactgatgataaatggaagaacgaagacagctcgatatttttaaaacatgcttcaaaattgcttcaaaatgaaaaaggaatgattaataacatagatgctataattgtttgtgaaaaaccaaaaatattagatcattcaaaaaaaatgaaagaaaacatagcaaaaattctaaatattagtgagaaaaaagttagtattaaaggtaaaacttcggaaagcatcggctttattggtagggaagaaggaatagcagctatggtctcaactgctattcaaattaaagatactgattttcaatga

SEQ ID NO: 288604 - DNA, 535 bp, Unknown
  Bacterial polypeptide expressing nucleotide sequence isolated from the Sargasso Sea
tttgtcaaaagaaataaaatatataactaaggttggtaatggatttgatattcatagatttgatattaaaaaaagagataaaaataattatataattcttggtggtattaaaattttaaacttaaatccattaatcggtcactctgatgcagatgtattacttcatgctataaccgatagtattttaggaatagttaataaaggtgacataggcaaaatatttccttcctctgacaaaaaatggaaaaatgctgatagctcgctttttttaagttatgcttcaagagttttaaaggatgcaaaaggtaaaataaataatattgatgctgttataatttgtgaaaaacctaaagtattagattattcaaaaaaaattcaagaaaacatagctaaaattttaaatataagcccaaaaagaataagtgttaaaggcaaaacctcagaaagtgtaggttttataggtcgtaaagaaggcatagctgcgatggcttgtacatctgtagaaattgttgaaaatatttttgatgatcaataa

SEQ ID NO: 288605 - DNA, 468 bp, Unknown
  Bacterial polypeptide expressing nucleotide sequence isolated from the Sargasso Sea
aatgattaaaagcggaattggttatgacgctcatcaattaggagaaggcgaaagtttagttattggcggtgttaagatagaaagcaatgttggatcaattggtcactcagatggagatgttttaattcatgcaatcatagatgcaattttaggcgcaactgcaagtggcgacataggattactttttccaagcgataatataaaatacaaaaattttcacagcggtgattttttaaaaattgttaaaaaagagattttaaataaaaatcataaaatactgcatattgactctgttgtaatactacaaagcccgaaacttagaacttatatagatcaaatgaggacaaatatttcaaatatgttagaattgaaattaaatcaagtatctattaaagcaacgacaactgactttctaggttacattggaagaggggagggcttagctgctcaatctattgttacaattga

SEQ ID NO: 288606 - DNA, 829 bp, Unknown
  Bacterial polypeptide expressing nucleotide sequence isolated from the Sargasso Sea
atgaacaactattttgtaatattggcagcaggaaaaagtaagagatttggtaaaaattttcttaaacaattcttcaaatatgaaaataaggaaattatagatcattctgtagaaaaatcattaaaatcaaaattatttaaaaagataattatcgtatcaaacaacgcgagataccttaaaaaaaagaaatatccaaaattagtaactattattaagggtggtaaagaaagatcagattcttctttaagtgctctaaaattcataaagaaatacaacccaaaaaatgtttttattcatgatgctgcgagaccaaatttttcgataggattgctcaaaaatatctcaaaaaatttaaaaaaaaataaggctgtcgttcctatcgtaaattcaagagactctattaaatataaagttaaaaacgaggtgtttaacttgaataggaaaaattcgttactgacacaaacaccacaagcctttaattttaaggaattatataaactagcaataaaagaaaaatctaaaattaacgatgaagctacattgttcttaaatcaaaactataaaattaaatttatcccaggtgaaaattctaataaaaaaattacctatttagatgacatcaaatcaccgaaaactttccatggattaggatttgatattcatagattagttaaaaataaaaaactttttcttggcggagctaaaataccttttcattcaggtttaaaaggccattctgatggtgatgtaattttacatgcaataactgatgctattttaggagcattaagaagaaaagatataggtacatattttccaaaatactaaa

SEQ ID NO: 288607 - DNA, 898 bp, Unknown
  Bacterial polypeptide expressing nucleotide sequence isolated from the Sargasso Sea
ataaatttcccaaaaaatgtaataattattaatggtggtaaagaaagatcagactcatctttgaaaggtttaaattatatcaagaaatataaaccaaataatgttttaattcatgatgctgcaagaccaaatttttcaattgatctcttaaaaaaacttattagttcattaaaaaaaaataatgcatcagtgcctataattaattctaaagactcaataaaatataaaattaaaaatcaattatttaatttaaaaagagataattcttttttaacacaaacaccacaggcttttaaatttaaagatatttacgaattatcaatcaagcaaaataaaaaaattcaagatgaagctacattatttattgaaaacaatttaaatattaagtttattaaaggagaaatcacaaacgataaaattacatttaaagaagatattaaaaaaacaaaaacttattttggtattggttttgatatccatagattaattgagaaaaagaaactttatttaggtgggacaagaataccctttcactctggtttaaaaggtcactcagatggtgatgttattttgcatgcaataattgatgcaatactaggtgcaattagaaaaaaagatataggttcactttttccagataacaaaaataaatataaaaatattagatcaccaaatatgcttaaacctgttcttaaaattttagataaaaataatttttatataaataatttagatataaatttaatttgcgaacaacccaaagtatcaaaatatagggaaaaaataataagctcattatctagcttgttaagattggataaagatcttattaatttaaaaggtaaagcagttgaaaaattgggtttaattggaaaagaaaaagcaatagcttgtgaag

SEQ ID NO: 288608 - DNA, 697 bp, Unknown
  Bacterial polypeptide expressing nucleotide sequence isolated from the Sargasso Sea
tgatagaagtaatttatattattcacaaactccccaattttttaatttcaaaaaattaagtcaactcataattaaatatggagatgataataactatactgatgaaattcagctttttgaaaaagaaaatatgaaaataggaactattgatggaaacttattgaatcataagattactttcgaaaatgatttagttgctcttgacaaccttaattatgaatcaaattttactggcatagcatcagatgttcatggattgaaaaaaggtgaagtactgtatttgggtggtgtaaaaataccatcaagcaagggcttgctcggccatagtgatggtgatgttgttctgcatgctatttgtgatgcaattttgggggcatcttcaaatggtgatttaggaaagtattatccttcatcaaataaaaaatggaaaaatgcaccttcaaaattatttctaaaaaatactttagatcttataaaaaaagaaaacaaacaaataaaaaacattgatgttcagataattttacaagaacccaaacttgttaaatatctcgaatcaattaaagaaaatattggcaaattattgaacttaaacagtgaaaatattaatgtaaaggtcacttcaactgataagttggggctgataggttctggtgaaggtattggaactctatgtgcggtaaatttaattaagttatga

SEQ ID NO: 288609 - DNA, 421 bp, Unknown
  Bacterial polypeptide expressing nucleotide sequence isolated from the Sargasso Sea
tatcttggtggaataaaaattccatttcattctggcctagaaggtcattctgatggggatgtaattctacattctataattgatgcaattctaggcgctattagaaaaaaagatattggtacatattttccaaacacaaaaaaatttaaaaatatacgatctccaaaaatgctaaaacctataataaataatcttaataaatatagtttttcagttaataatattgatataaatttgatctgtgaaaaaccaaaagtttcaaaatatagagataaaataattaactcaatctcaaagttaatggatgtaaataaaaatctaattaatttgaaaggtaaaactgttgaaaagttaggtttaataggtagtgaaaaagcaatagcttgtgaagtaataatatcgattactaaatatgattaaa

SEQ ID NO: 288610 - DNA, 873 bp, Unknown
  Bacterial polypeptide expressing nucleotide sequence isolated from the Sargasso Sea
aagcagtatatcaagattaacggaagatctataattgaaaatgctgtaaagccttttatagattcaaaatatatttctaagatagtaatcgcaatttcttatggagatgagcttataaaaagtcagaacttttataattgcgaaaaaattgaatatattattggaggattgaccagacaagaatcaatttttaatgctcttaactcgattgaagataattatgaatttgttattacgcatgatgcagctcgaccaaatttttccgaaaatgatattgcaagactttttgaagatattgttcattcaaagtcgagttgttcatatctatatactcctgtttatgattcaattagggaagacgatagaacgttagataagtctaaatttaatttagttcaaactcctcaaatatgtaatttcaaagacttaaaaaaatctatacaaagctgtatcgataataatgtagattgtcctgatgaatcatttgccattgaatattcaaatcttaaattatctaagattctgggagatagatcgaatataaaagtaactgagaaagctgatatagaaattctcaataattttcttacaagaagtggtattggttatgaccttcacaaatatgaaccaggagatgggattattttgggcggatataaaattacatgtaattacaagattgtagctcattctgatggagacgtattactccattcaattgctgattcaatattgggtgcagctggattgggtgacattgggatgtttttttcagatcaagacaataaaaataagaatttagatagtacgcttattattgaacactgcctaaatgaattaaataaaatggatttagaaatttataacattgat

SEQ ID NO: 288611 - DNA, 378 bp, Unknown
  Bacterial polypeptide expressing nucleotide sequence isolated from the Sargasso Sea
ctcattcagatggagacattattttgcatgccatatctgatgcattgcttggtgcagcaggtttaagagatatcggttactactttcctgacactgatccaaaaaataaaaacttgagcagtttaaaaattattgaacagtcattagatttattaaaacaaagcggcttgcaaccaaggaatattgattttgttgttgtgtgcgaacaaccaaaaattgcaccttatgttgatgatttaaaaaagtccctttcatcaattttgaatattgaagaaagtttcattggtgtaaaggcaaccactacagaaaagatgggggtgattggtaatggcaatggaatcgcggtcttcgctatagcttccttaagggatctttaat

SEQ ID NO: 288612 - DNA, 1011 bp, Unknown
  Bacterial polypeptide expressing nucleotide sequence isolated from the Sargasso Sea
ttgatcactcaattgaaaaatcagtcaattctaagctatttaaaaaaattttagttgtaactaacaacattaaacatcttaaaaaaaaacaaattcataactcagtcaaaataataaaaggaggtaaagaaagatctgactcatctttaatagctttaaaatatcttaaaaagtataaacctaataatattcttatccatgacgctgcaagaccagattttactataaaattgttaaagcaaatattaaatcatttaaaaaaaaatatagctgtaattccatatattaattctaaagatacaataaaatataaagttaaaaatgaattatataaccttaatagacaaaacacttatctaactcaaacaccacaagcatttaaatttaaaaaattatatgaacttgcaattaatgaaaaaaataaaataacagatgaggcaactttatttatcaataaaaatagaaaaataaaatttataaaaggagaaaatactaataataagatcacttttaacagtgatgtaaaattaaataaaactttttttggaattggctttgacattcatagattagttaaaaacaaaaagctttatttaggtggtactaagataccttttcactcaggattgaaaggacactcagatggagatgttatcttacattcaatcatagatgcaattttaggtgcaatgagaaataaagatattggatccttttttcctaacacaaaaaaatataaaaatattagatctccaaaaatattaaaaccagtcattgaaagtctttttaaatcaaatttttttataaataatttagatataaatttgatttgtgaacaacctaaggtatcaaaatacagagatcgtatcattaactctttatccaaactcatgatgttgaataaagatttaataaatttaaaaggtaaaacagttgaaaaacttggtttgattggaaaagaaaaagctattgcgtgtgaagtaattatttcaataacaaaatatgattaag

SEQ ID NO: 288613 - DNA, 967 bp, Unknown
  Bacterial polypeptide expressing nucleotide sequence isolated from the Sargasso Sea
catgagtaattgttttatactattagctgcaggtaaaggtaagagatttaaatcaaaactagcaaaacagttcataaattataaaaataagccactttttatgcattctatagataaagctttaaaatccaatttattcaaagaaatagttatcgttaccaataataaaatcaaacttaaaaacaaaaaaataaaagttataaaaggtggtaaagaaagatatcaatcttcacaaaaagctctcgaatatattaaaaataaaaaattaaaaaatgtttttattcatgatgcagctagaccaaatttttcaataaatttattaaaaaatttaaaaaaacatttaatcaagaataaagctgtagttccatatattaacactgaaaattcaactaaatacgcgaataaaaatgaaatagttaatttaaaaagagaaaaagttttgctaactcaaactcctcaatgttttgactttaaaactttatataatttatcaaaaaataataaagttcttgtaaccgatgaagctactttatttttaaacgataataaaaaagtaaaatttataaaaggagagcagataaatattaaaattacaaaaaaatctgatttggacaagtcccctattaaaaatttttatggaataggatttgacattcatagattaattaaaaataaaaagctttatttaggtggtatacaaataccttttcattcaggtttaaagggtcattcagatggtgatgtaatacttcattcaataattgatgcgatacttggagctatgagaaaaaaagatataggatctttatatccaagtaataaaaataaatttaaaaatatgagatcaacaaaaatgttaaaacctataatttcagatctagaaaataatagtttttttattaataacctagatattaatttaatttgtgaaaaaccaaaagtttctaaaattagaaataaaataata

SEQ ID NO: 288614 - DNA, 409 bp, Unknown
  Bacterial polypeptide expressing nucleotide sequence isolated from the Sargasso Sea
attggatcatcccgataatttaggattggacggtcatagtgacgctgatgttttaagtcattcaataatggatgcattattgggagcactatcgctgggcgatataggaaagtatttcccaccatctgatgaaaaatggaaaaatgctgatagcttgtttttgttatcaaaagtaattgacttgataagacaagatggttgggaaataaataatattgatagtgttcttgtcgctgaaagaccaaaaataatgccgtatataaaaataatgaaaaaaaatatttctgagatcttaaatattgaagaaaatttaattggaattaaagcaactacgaatgaaagattgggcccagaaggaagagaagagggtataagttgccattctgtagtgttacttgagaaaaaatga

SEQ ID NO: 288615 - DNA, 673 bp, Unknown
  Bacterial polypeptide expressing nucleotide sequence isolated from the Sargasso Sea
ttgttcaacccctcaaatatctaactttaatgatctgaaaattgcacttaaaaaatgtattgacgaaaatatcaattgtcctgatgaatcttttgcaattgaatattcagatctaactttatcaaaagttatggggactaggtctaatattaagattactgaacccgaagatgtagaacttttgagtaaatttctcactcgaagtggaacagggtttgatttacataaatatgaggcaggagatggaattattttaggcggctataaaattaagtgtgattataaaactgttgctcattctgatggagatgttttacttcattcaattgcagattcaattttgggtgctgcggctttgggtgatattgggaagtttttcccagacaatgatgagaataatagggatttgaatagttcaaatattattagatattgtttagataaaataaatgaacttaatttagaaatttataacattgatactaccgtaatttgcgaaaaacctaaaattaatccttatagagaagagattttacaaaaattatcaagtcttttaatgataccagtctcaagaattggcttgaaagcaacaacttcagaaaaaataggcattattggtgaaaataaagcaatagctgttcaaagtcttgttaatctaagagagaaattatga

SEQ ID NO: 288616 - DNA, 1138 bp, Unknown
  Bacterial polypeptide expressing nucleotide sequence isolated from the Sargasso Sea
atgaaagaaaatagtatattggcaataattgcggctgcaggaattggaaaaagatttgatgatgatttgcccaagcagtatgtcaagattaacggaagatctataattgaaaatgctgtaaagccttttatagattcaaaatatatttctaagatagtaatcgcaatttctgatggagatgagcttataaaaagtcagaacttttataattgcgaaaaaattgaatatattatcggaggattgactagacaagaatcaatttttaatgctcttaactcgattgaagataattatgaatttgttattacgcatgatgcagctcgaccaaatgtttccgaaaatgatattgcaagactcattgaagatattgttcattcaaagtcgagttgttcatatctatatactcctgtttatgattcaattagggaagacgatagaacattagataagtctaaatttaatttagttcaaactcctcaaatatgtattttcaaagacttaaaaaaatctatacaaagctgtatcgataataatgtagattgtcctgatgaatcatttgccattgaatattcaaatctcaaattatctaagattatgggagacagatcgaatataaaagtaacagagaaagctgatatagaaattctcaataattttcttacaagaagtggtattggttatgaccttcacaaatatgaaccaggagatgggattattttgggcggatataaaatttcatgtaattacaagattgtagctcattctgatggagacgtattactccattcaattgctgactcaatattgggtgctgctgggttgggtgacattgggatgtttttttcagatcaagacaataaaaataagaatttagatagtacgcttatcattgaatactgcttaaatgaattaaataaaatagatttagaaatttataacattgatacaacaattatttgtgaaaatcctaaaattaatccgcatagagaaaaaattttagaaaatttgtctgcaatattaaaagttcctatggataaaattggcttaaaagctactacatcagaaaaaattggaattattggaaataatgaagctatatcagttcaaagtatagtaaatttaaaggacctatcatgaa

SEQ ID NO: 288617 - DNA, 889 bp, Unknown
  Bacterial polypeptide expressing nucleotide sequence isolated from the Sargasso Sea
gatgaaaaagaatagcttattgacaattattgctgcggctggagtgggtgaaagatttagttgtaaagcaccaaaacaatatgctcagattaatggacactctattattgaaagagctcttaagccttttattgattcaagttatgtatcagaaattattatagctatatctaaggatgacaatttgattaagaatcaggatttttataactctaaaaagattaaatatgttattggaggtgctacaagacaggaatcgattaataatgctttacatgctgctgaaaaggaatatgaatatgttattacgcatgatgcggcacgaccaaatattactgaagatgatattactaatttatacaaggatattactaattcaaaaacaagttgctcttttttatatacccctgtttatgattcaattaaagaaatagactccaaagaaaaaacaaaagataaaagtaaattttatctagttcaaacccctcaaatatctaactttaatgatctaaaaattgcacttaaaaaatgcattgatgaaaatatcaattgtcctgatgaatcttttgcaattgaatattcagatctatctttatcaaaagttatgggagctaggtctaatattaagattactgaacctggtgatatagaacttttgagtaaatttctcacgcgaagtgggacagggtttgatttacataaatatgaggctggagatggaattattttaggcggctataaaataaagtgtgattataaaattgttgctcattctgatggagatgtcttacttcattcaattgcagattcaattttgggcgctgcagccttgggtgatattgggaagtttttcccagacaatgatgaaaataatagggatttggatagt

SEQ ID NO: 288618 - DNA, 544 bp, Unknown
  Bacterial polypeptide expressing nucleotide sequence isolated from the Sargasso Sea
tctgggagatagatcgaatataaaagtaactgagaaagctgatatagaaattctcaataattttcttacaagaagtggtattggttatgaccttcacaaatatgaaccaggagatgggattattttgggcggatataaaattacatgtaattacaagattgtagctcattctgatggagacgtattactccattcaattgctgattcaatattgggtgcagctggattgggtgacattgggatgtttttttcagatcaagacaataaaaataagaatttagatagtacgcttattattgaacactgcctaaatgaattaaataaaatggatttagaaatttataacattgatacaacaattatttgtgaaaatcctaaaattaatccgcatagagaaaaaattcttaaaaatttgtcttcaatattaaaagttcctgtgaaaaaaattggcttaaaagctaccacatcagaaaaaattggaattattggaaataatgaagctatatcagttcaaagtatagtaaatttaaaggacatttcatga

SEQ ID NO: 288619 - DNA, 481 bp, Unknown
  Bacterial polypeptide expressing nucleotide sequence isolated from the Sargasso Sea
atgaattttagagtaggattgggatttgatatccatgaactgatagcaggtacgatgattaaactagcaggcgtcagtattcctagtaaaaaaatgattaaggcacattctgatggagatatcatttatcactcattagctgatgcaatacttggagccttatcaaaaggtgatattggtatgcattttccagattcagacttaaagaataaaaatctagatagtggtaaaattctttcacatgcatactctttaatgataaataataaatatattataaacaatatcgatattaccctgatactggaagaaccaaaaatcaaaaaatataaagataatatgtgtcaaaatataagttcattacttcattgtaatagtgacttaattaatattaaagctactacatctgagagtattggttttgtaggaagaggcgagggtattgcttgtcataccatagtttctatcataagtgactagt

SEQ ID NO: 288620 - DNA, 699 bp, Unknown
  Bacterial polypeptide expressing nucleotide sequence isolated from the Sargasso Sea
tattagaatatccccaatatacgaggccgttaacttttaaagatatgaaagttccagatattctagtgagcggtaatcatgaagagattaaatcgtggagaagaagaaaaagtttggagagaacattggagagaagaagtgacttaatttcaagtgaaaactacaaaaaatccccacaaagtaagagaataataaaagaaaataatcaattcatgaaatttagaataggtaatggatacgatattcacagactagtagaggatagagatttaattattggaggtgtaaaattgcatcatcctgaaaatttaggattggatggtcatagtgatgctgatgttttaagtcactcaataatggatgcaatgttgggagcactttctctgggagatataggaaagtatttccctccatctgatgaaaaatggaaaaatgctgatagcttgtttctgttatcaaaagtaattgacttgataagaaaggatggttgggaaataaataatattgatagtgttcttgtcgctgaaaggccaaaaataatgccacatatacaactaatgaaaaaaaatatttctgagatcttagatattgatgaaaatttaattgggattaaagcgactaccaatgaaaaattgggtccagaaggtagagaagagggtataagttgccattcagttgtgctacttgagaaacaatgaa

SEQ ID NO: 288621 - DNA, 430 bp, Unknown
  Bacterial polypeptide expressing nucleotide sequence isolated from the Sargasso Sea
atgtaccggataggattgggttatgatgttcatcaattgactcaagggagaaaattgatattggctggggttgagattcctcatgaacttggactcgaggggcattccgatgcggatgttttaacccatgctgtgatggattcgcttgtcggggcactggctttgggggatatcggtgatcattttccagataccgattcccaatacagaggggcagacagtcttgtgctgcttaaaaaagtatgggaaatgattcagcaacgaggttacagggtcaacaacctcgatagtgttttaatcgcccaacgtcccaggctgaaaccctaccttgaaaccatgcggactaacctggcaagttgtatggactgcgagattgagcttgtttcggtaaaagcaactactactgaaaagctgggattcatcggcaggg

SEQ ID NO: 288622 - DNA, 334 bp, Unknown
  Bacterial polypeptide expressing nucleotide sequence isolated from the Sargasso Sea
atgtataaagtaggaattggatatgatgcccatcgtcttgaaaaaggtgagaaattaattttgggtggagttcaaataaaaaatgaatacggaataattgggcattcagatggggatgtattagtccattctataattgatgcaattttaggcgctgcagccaaaggggatctaggaaaatttttcccaagcagtgataatcagtggaagaattatagtagtcttaaaatgctaaaaataatcttcaataatgaaataaaagatgagtttataatcaatcatattgattctgttagtcattcttcaaaaaccaaacatatcgggctttattgaa

SEQ ID NO: 288623 - DNA, 1147 bp, Unknown
  Bacterial polypeptide expressing nucleotide sequence isolated from the Sargasso Sea
gatgaaagaagatagcatagtagcaattatccctgctgctgggattggatcaagatttgatggagatgttccaaaacaatactttaatgtaaatggatcttcaattatagaaagtgcagtcctgccttttttaaactctatatatgtttcaaaaataattattcctattgctaaaaacgataaatacattaatgcacagaatttttttaatcatgaaaaaatatcatttgttgaaggtggaaaagatagacatgattcagtcctgaatgctcttgaagttattgatgagagttacgaatatgtcataacccatgatgctgcgagaccaaatatctctgaaaaagatatagaagacctatacaaaataattattgaaaaaggctcaagctgtgtttatttttactcaccggtatacgactcgataaaacagcttagcaataacgataaaacagtagataaaaatgattttcttcttgttcaaacgcctcaaatttcaaaattagttgatttaaagaattcaattaaatcctgtttaaaagaaggcttgcatatccctgacgagtcatttgcaattgaacattgcggattttcttcatcaaaaattctgggacgcagatccaacattaaagttactgaaaaacatgatatcgattatttaaataaatttcttacaaggggaggaataggttttgatttacataaatataaacaaggaaaagggattactctgggaggagtaaagattgagtgtgattttgagatagttgcacattctgatggagatgtcttattgcactcaatagcagattctattttaggtgcagctggtcttggagacattggtgaacatttcccagacactgacataaaaaataaaggcttagatagtaaaaaaattattaatttttgtcttgagacaattaaaaataaaaatttagaaatatacaatatagacaatactataatatgtgaaatacctaagattaacccacatagaaaagcaatcttaaattcactatcaaacatactaaaaattgactccgaaaaaataggccttaaagcaacaacatctgaacaaattggtatcattggaaaaaataaagctattgctgttcaaagctttgtaaatctaagaaagagagtatga

SEQ ID NO: 288624 - DNA, 502 bp, Unknown
  Bacterial polypeptide expressing nucleotide sequence isolated from the Sargasso Sea
catgggtgaaaattatagaataggccaggggatcgatgtccataagtttgcagatacaatagataaaaaaaagcctctgaagcttgctggtatacaagtatctgaggagtatagtttaatagcccattctgatggggatgttgtattacatgcaatttgtgatgcaattctcggagccgcatctaaaggagatattggttatcatttcccagatgatgatgaggattattttgggattaacagctcaaaattattagcacatgtgttggctcttattcataaggacaatttcgaaatagtaaatattgatataacggtgctcgctgaggttccacggttgtcgccatttagaaaaaaaatgatagataacctatgcggtttgctgagtcttgactcgagtaggtgtaatttgaaagcaaccacaaccgaagggttgggctacttagggagaaaagaaggcattgcgtgccattgtgtagttcttctgaaacaaaatggatag

SEQ ID NO: 288625 - DNA, 781 bp, Unknown
  Bacterial polypeptide expressing nucleotide sequence isolated from the Sargasso Sea
tgaaggctattcaggtgtggtgcccacattaccaatgagtgacagcattattaagaaagataaagttttgtcatcaattaaaagaaagaacttatatagagttcaaacacctcaaatcttttcagctaatgttttaagttttaaagattttgataaaaataatgaagctactgatgaatcagaaatgattattagaaaaaataaaaaagtgaaaattgttaaaggaaatgaaaaactgcataaaattacaacagagtgggattacaaatttttaatgaatatttttgatacaaaaattaatactagagtaggtaatggatttgatgttcatgcatttacaaaagagccttcaaaattaatacttggtggagttattattgattatccatttggtcttaagggtcattctgatgccgatgttttacttcattcaattactgatgctattctcggttcaatttctatgggtgatattggtacacattttcctccaaatgatagtaagtggaaaaatgctaaaagttcaatttttttaacaaaatctctaaaattacttaaagaaaaaaatggagagattaataatttagatattaatattatctgtgaagaacccaaaattagcaaatatacaaaaaaaattcaaaaaaacttatcaaaacttttaaatattaaagaagaaaaaatttctttaaaagcaactactacagaaggacttggatttacggggaggaaagagggtatagctgtaatgtcaaatattttagtaaatattaagtcctaa

SEQ ID NO: 288626 - DNA, 481 bp, Unknown
  Bacterial polypeptide expressing nucleotide sequence isolated from the Sargasso Sea
atgtaccggataggattgggttatgatgttcatcaattgactcaagggagaaaattgatattggctggggttgagattcctcatgaacttggactcgaggggcattccgatgcggatgttttaacccatgctgtgatggactcgcttatcggggcactggctttgggggatatcggagatcattttccagataccgattcccaatacagaggggcagagagtcttgtgttgcttaaaaaagtatgggaaatgattcagcaacgaggttacagggtcaacaacctcgatagtgttttaatcgcccaacgtcccaggctgaaaccctatcttgaaaccatgcggactaacctggcatgttgtatggactgcgagattgagcttgtttcggtgaaagcaactaccactgaaaagctaggattcgctggcagggaagaaggaattgccgcaaaatccgtagttctgctcaagaagtttgagtaat

SEQ ID NO: 288627 - DNA, 213 bp, Unknown
  Bacterial polypeptide expressing nucleotide sequence isolated from the Sargasso Sea
tatgttcagaacaggaataggatttgatgcacactcacttttagagggacgaccccttgtgattggaggtgtgcgtatacctcactcgaaggggctgctagggcattcagatgctgatgtgctagttcatgctgttatggatgccattctgggggcactggcactcggggacattggagagcattttcctgatacagaagatgaatatgaagg

SEQ ID NO: 288628 - DNA, 206 bp, Unknown
  Bacterial polypeptide expressing nucleotide sequence isolated from the Sargasso Sea
catgaatccttctgctttcccccccatccgtatcggccagggctatgacgtgcacgccttcggcgaaggcgaccacgtcatgctcggcggcgtgcgcgtgccgcaccgttgcggggtgctcgcgcacagcgacggcgacgtgatcctgcatgcgctgtgcgacgccatgctgggggcgctggcgctgggcgacatcggccagcact

SEQ ID NO: 288629 - DNA, 226 bp, Unknown
  Bacterial polypeptide expressing nucleotide sequence isolated from the Sargasso Sea
atggatataagaattggtcacggttttgatgtacacgcttttgaggaaggtaattttgtaatcttgggtggcgttaaaatttctcacacctctaagctcagcggacactcggatgcagatgtgctactgcatgcgataacagacgctattttcggagccctagcagagggagacattggcactcattttccaccagatgacgtaacctggaaggatgccccgagcg

SEQ ID NO: 288630 - DNA, 360 bp, Unknown
  Bacterial polypeptide expressing nucleotide sequence isolated from the Sargasso Sea
tattacacgcaatttgtgatgcaattctaggagcggcatctaaaggagatattggttatcattttccagatgatgataaagtttattctgggattaacagttcaaaattattggcaaatgtgttggctcttattcataaggataatttcgaaatagtaaatattgatataacggtgctcgctgaggttccaaggttatcgccacttagaaaaacaatgatagataacctatgcggtttgctgagtcttgactcgagtaggtgtaatttgaaagcaaccacgaccgaaggattaggctacttagggagaaaagaaggcattgcgtgccattgtgtagttcttctgaaaaagaatggataga

SEQ ID NO: 288631 - DNA, 276 bp, Unknown
  Bacterial polypeptide expressing nucleotide sequence isolated from the Sargasso Sea
ttcaaggagcagatagcatcgggcttcttagtcgtgtccaaaagatgatcgagaaaaaaggatattgctgtgaaaatttggacagcatcatcattgcagagaaaccgaaactgaaaacttaccttggagatatgcgtggaaacttggcttctgtcctcaaaataaatattgatcagttgtcaattaaggctacaactactgagcacatggggttcacaggtagggaagaaggcatagccgcgcaggctatcgtactccttaaatcaaacaactaaa

SEQ ID NO: 288632 - DNA, 481 bp, Unknown
  Bacterial polypeptide expressing nucleotide sequence isolated from the Sargasso Sea
atgtaccggataggattgggttatgatgttcatcaattgactcgagggagaaaattgatattggctggagttgagattcctcatgaacttggactcgaggggcattccgatgcggatgttttaacccatgctgtgatggattcgcttctcggagctctggctttgggggatatcggagatcattttccagataccgattcccaatataaaggggcagaaagccttatgctgcttcaaaaagtatgggaaatgattcagcaacgaggttacagggtcaacaacctcgatagtgttttaatcgcccaacgtcccaagctgaaaccctatcttgaaaccatgcggactaacctagcaattattatggactgcgagattgagcttgtttcggtgaaagcaactaccactgaaaagctgggattcgctggcagggaagaaggaattgccgcaaaatccgtagttctgctcaagaaatttgagtaat

SEQ ID NO: 288633 - DNA, 227 bp, Unknown
  Bacterial polypeptide expressing nucleotide sequence isolated from the Sargasso Sea
tatgcgtattggccacggctacgatgtgcaccgtttcgctgaaggcgatttcatcaccctgggcggcgtgcgcattgcacaccaccatgggttgctggctcattccgacggcgacgtggtcctgcacgccttgagcgatgccttgctcggcgcggctgcattaggcgatatcggcaagcactttccggacactgaccccaccttcaagggggcggacagccgtgtgt

SEQ ID NO: 288634 - DNA, 481 bp, Unknown
  Bacterial polypeptide expressing nucleotide sequence isolated from the Sargasso Sea
atgtataggatcggaacagggtttgatgttcatgcgttcaaacctggaaagaagttagttttgtgcggaattgaaatccccttcgataaaagtcttgctggacattcagacgcagacgtagctcttcactcgttaactgatgctatactaggcgctttagctctcggtgatataggattgcattttccagattcagatacaagatggaacggggcagattctgtcatttttttgagttggtctttagaaagagcgaaacaaatgaatttaaagctcgctaatatcgatttaactatcatttgcgaaaaaccaaaaataaataaatatagagagcaactaatacttaatcttgcaaagatttgctcactagagcataataaaattaatgtcaaagcaactactactgaacggctagggttcacaggacgagaggaagggatagcatcaatttgctcagtcctactatatgattttatttaaa

SEQ ID NO: 288635 - DNA, 166 bp, Unknown
  Bacterial polypeptide expressing nucleotide sequence isolated from the Sargasso Sea
attagcaaatatacaaaagaaatccaaaaaaacttgtctaagcttttaaatatcgaagaagaaaaaatttcattaaaagcaactactacggagggtcttggatttacaggcaggaaagaaggtatagctgtaatgtcaaatattttagtaaatattaaatcttaat

SEQ ID NO: 288636 - DNA, 481 bp, Unknown
  Bacterial polypeptide expressing nucleotide sequence isolated from the Sargasso Sea
atgttcagaacaggaataggatttgatgtacacgcacttgcagagggcctgcccctagtgattggaggggtgaacatacctcattcaagagggctgcatgggcattcagacgcggatgtattggtacatgcagttatggatgcgattctggggtcactggcacttggagatattggagagcattttccagacacagaaggtgaatttaaaggagcagacagcctggagcttcttagtcgtgttcaaaagataattgaggaaaaaggatatagctgcgaaaatctggacagcatcatcattgcagagaaaccgaaacttaaatcttacattggggagatgcgcgaaaacctggcttctgttctcaaaataaatgttgatcagttgtcaataaaggctacaacaactgagaatataggattcacgggccgggaggaaggaatcgccgctcaggctatcgtcctccttaaatcaaacaattaaa

SEQ ID NO: 288637 - DNA, 167 bp, Unknown
  Bacterial polypeptide expressing nucleotide sequence isolated from the Sargasso Sea
gaaaatggccccccatattgaagcgatgcgcgcagtgatcgccgcagacctgcaaattgaattggatcaagtcaacgtgaaagccaccaccaccgaaaagctcgggtttaccggtcgtgaagagggcattgcggtgcactccgtcgccttgttgctgcgcgcatgaa

SEQ ID NO: 288638 - DNA, 910 bp, Unknown
  Bacterial polypeptide expressing nucleotide sequence isolated from the Sargasso Sea
aatgaaaggcttggaatatcttagtagttctggaacaacacacgtttttattcatgatgctgcaagaccaaattttttgtccactttacccaataatctgataaaagcggcaaaaggccatgatgggtcaataccaataatagaagcttcaaatacaattaagcagttaaaaaacgaaaaattaaaaacgcttgatcgatcaaccattatagagtcgcaaaccccacaattttttgaattcatggcaatatataattcgtacagaaatctagtcgagctaactaatggtgttgatcatataactgatgatgcacaagtagcagaattatctgggcttaaagtaaacacctttaaagataataaaaagaattataaaataacaacatacgatgatttagatcgttttaaaatggataatgaaaatatgtcttcttcaagagttggaatcggttttgacgtgcacaggtttggtgaaggtcataatattcgaatattcggtattgatattcctttcaataaaacattggttggtcactcagatgcagatgttggccttcacgctataactgatgcgatatatggctcaattggctctgacgatattggatctcactttaatccagcagataagagatggctaggagcagactcaaaaatattcctagatcactcactgttgaagttagaagaatttggaggaaagatactaaatattgatctagttgtaattgcagaggagccaaatattaatgcatataagaatgtaataaaaaaagagctatcagcactattaaagattgatgtgtcgaatataggtttaaaagctacgacaacagaaaaattaggttttactggtagaaaagaaggaattgctgtacaaactattgttaacatatcggtcaagaaatga

SEQ ID NO: 288639 - DNA, 496 bp, Unknown
  Bacterial polypeptide expressing nucleotide sequence isolated from the Sargasso Sea
aatggacttgacgcatatggatttcagaattgggcagggttatgacgtgcatgcgctggtgccgggccgtccgttgattattggcggggtgacgattccttacgaacgcggcctgctcgggcattcggacgcggatgtgctgctgcatgcgattaccgatgccatttttggcgctgctgcaatgggcgatatcgggcgtcatttctccgacaccgatgctaaattcgccggcgcggatagccgggttttgctgcgggagtgttttgcccgtgtaacggcgggtggattttctatcgctaacgtggatagtagtgtggttgctcaggcgcctaagctcgcgcctcacattgaagcaatgcggattaacatcgccgcggaccttaacctgccggtcgagcgcgttaacgttaaggccaagacgaatgagaagttgggatatctcggccgtggcgaagggattgaagctcaggccgtagttttgttgattaaaaactag

SEQ ID NO: 288640 - DNA, 327 bp, Unknown
  Bacterial polypeptide expressing nucleotide sequence isolated from the Sargasso Sea
gatgccgtttcgtattggtcatggttttgacgtacacgcttttggtggcgaaggccctattactttaggtggagtgaaaatcccttatcagcaaggattgctagcgcattccgatggtgatgtggtgctgcatgccgtgtcagatgctttgttaggcgctatggccttaggtgatattggccatcatttcccggatacagacgctgcattcaaaggcatcgacagccgtattttattacgcaaggtgtttgctgatgtcaaagctttaggttatgaagtcggtaatctggatgtgaccattatggcgcaggcaccaaaaatggctcc

SEQ ID NO: 288641 - DNA, 478 bp, Unknown
  Bacterial polypeptide expressing nucleotide sequence isolated from the Sargasso Sea
catgatccggattggacatggttttgatgtacacaagtttggtggggttggcccctgcatgctgggcggggtggcggtgccgtatgagcagggcctgctggctcactccgatggtgacgtggtgctgcacgcggtgagcgatgcgctgctcggcgccatcggggccggcgatatcggccgtcactttcccgatactgcggccgagttcaaggggatcgacagccgcatcctgctgcgagacgtgtttgcccgggtgcagcagtcgggctatgccatcggcaacctggatgtgaccatcattgcccaggcacccaagatggcgccgcatatcgaagccatgtgcgccgtgctggccgccgatctgcaatgtgatttgaaccgggtgaacgtcaaggcgaccaccaccgaacagctgggattcacggggcgcaaggaagggatcgccaccgaagccgtcgtcttactggtgaaacaataa

SEQ ID NO: 288642 - DNA, 331 bp, Unknown
  Bacterial polypeptide expressing nucleotide sequence isolated from the Sargasso Sea
atgattcgaattggccatggttttgacgtacataaatttggcggcgaaggcccgttaactatttgtggtgaaaaaattgattacccacaaggctttttagcacactcagatggcgatgtagctattcatgcattatgtgatgctattttaggtgcgctcgctatgggcgatattggcaagcactttcctgatacagcgagcgaatatgaaaatatagacagccgcattttgcttcgtcatgttgttaagttagctaaagagcaaggctatgtattaggaaacgccgatgtcaccattgtggcacaagcaccaaaaatgctgccgcacatac

SEQ ID NO: 288643 - DNA, 169 bp, Unknown
  Bacterial polypeptide expressing nucleotide sequence isolated from the Sargasso Sea
ggcccgcatcgcgatgccatgcgggcaagggtggctgagattctcgccgtcgatgtctcgcgggtttcggtcaaggcgaccaccaccgaacaactcggttttacgggccgcggcgagggcatcgcggcacaggccacggcaaccattgcgctggacatcggcgaatgag

SEQ ID NO: 288644 - DNA, 331 bp, Unknown
  Bacterial polypeptide expressing nucleotide sequence isolated from the Sargasso Sea
atgaactggatggacatccgcattggccaaggttacgacgtgcacgcgctggtggagggccgcaagctgattctcggcggcgtggagattccgcacacccgtggcctgctcggtcactccgacgcagacgcgctgctgcacgcgattaccgacgcgctgttcggcgccgccgggctaggcgacatcggccggcattttcccgacacagatccggcgtttgccggcgccgacagccgcatgttgctgcgcgaagccgtgcgccgcgtgcacaaggccggctacgcggtcggtaatgtcgacgcgaccgtcatcgcgcagaagccgaagctcg

SEQ ID NO: 288645 - DNA, 374 bp, Unknown
  Bacterial polypeptide expressing nucleotide sequence isolated from the Sargasso Sea
cgtcgccctgcacgcgctatgtgacgcgctgctgggcgctgccgggttgggggatatcggccgccactttccggataccgatcaggcgttctccggtgccgatagccgggatctattgcgcgcggtggtcgaacagttggcagctgcgggttggtcagtgggtaacgttgatctgacggtgatcgcccagacgcctcccttgggcccacatatcgccgagatgcgggcgtgcattgctgaggaccttcgtgtgagtgaggatcaggtcaacattaaagccaccactacggagcggctggggtttgtgggccgcgaggagggcattgccagtcatgccgtggcgctgattgtaacgggtggagccactgagtgaa

SEQ ID NO: 288646 - DNA, 571 bp, Unknown
  Bacterial polypeptide expressing nucleotide sequence isolated from the Sargasso Sea
tacggtctccggagaggttgaaaatataaaaattacaactcaagaagattataagctgttagtaaaaatgcattatcaattaaatggcaccatacatgtaggtacgggattcgacgtacatccatttagtgaaggcaatcatctagttctctgtggtgtaaaaattccatataaacaaagtctaaagggtcattcagactcagatgtagcaatacatgcagcaaccgatgccattctcggcgctattggtgaagacgatattggaaagcattttccatctgaagacaaaaaatggaagaacacgccatcctcaatctttctgcaacacgctttgtttttagtgaacgaactaaatggaagggttaataatctcgatgtaaccattatttgtgaaaaaccaaaaattggcccctaccgaaaacaaatgcgtgaaaaactctcaaaaattctcgccttaccggttacatctgttaatgttaaggctacaacaacagaaaaacttggttttacaggacgcgaggaaggaatagctgctcaagcaattgccacggttttccttccaattaggtag

SEQ ID NO: 288647 - DNA, 334 bp, Unknown
  Bacterial polypeptide expressing nucleotide sequence isolated from the Sargasso Sea
atgcgaattggacacggttttgacgtacacgcttttggcggtgaaggcccaatcatcattggcggggtacgcgttccctatgaaaaagggctgctggcccactccgacggcgatgtggcgctgcatgcgctgaccgatgccctgcttggggcggcggcgctgggggatatcggcaagctgttcccggataccgacccggccttcaagggagccgacagccgtgagctgctgcgcgaagcctggcggcggatccaggccaaaggctataccctcggaaacgtggatgtcaccatcatcgctcaggcgccgaaaatgctgccgcatattccgcaga

SEQ ID NO: 288648 - DNA, 481 bp, Unknown
  Bacterial polypeptide expressing nucleotide sequence isolated from the Sargasso Sea
aatgtttaggacaggaataggatttgatgcacacccacttttagagggacagccccttgtgattggaggtgtgcgtattcctcattcaaaggggctgctagggcattcagatgctgatgtgttagttcatgctgttatggatgccattctgggggcactggcacttggcgacattggagagcattttcctgatacagaaaatgaatttgaaggagcagacagcttggagcttcttagtcgtgttcaaaagatgattgaggacagagcatattgttgtgaaaatctggatagcattatcattgcagagaaaccgaaattaaaagcttatcttttggatatgcgtaaaaatttagcttctatactgaaaataaatattgatcatttgtcaatcaaggccacaacaactgaacacatggggtttactggccgtgaggaaggaatagccgctcaggcagtcgttctacttaaatcaaaaaactag

SEQ ID NO: 288649 - DNA, 481 bp, Unknown
  Bacterial polypeptide expressing nucleotide sequence isolated from the Sargasso Sea
atgaaaatccgaatcggccatggttttgatgtccataaatttggtgaagcgcgcccgttaattttatgtggggtcgaagtcccttacgaaactgggttggtggctcattccgacggtgatgtggtgttgcatgccatctccgatgccattctaggggcgatggcccttggggatattggtaaacatttccccgataccgatgccgcctataagggcgccgatagtcgcgtcttgttgcgccactgctatgcattagcgcgggcgaagggatttgagctgggtaatctggatgtcactatcattgcccaagcgcctaagatggcgccgcatatcgaggatatgcgcctagtgctggcggccgatcttaatgctgacattgccgatatcaacgttaaggccaccaccaccgaaaaactcgggtttaccggccgcaaagaaggcattgcggtcgaagccgttgtattactcagccgccaatagc

SEQ ID NO: 288650 - DNA, 481 bp, Unknown
  Bacterial polypeptide expressing nucleotide sequence isolated from the Sargasso Sea
atgccgtttcgtattggtcatggttttgatgtgcacgcttttggtggtgaaggtcctgtcactttaggtggggtaaaaattccttacgaacaaggtttgctggcgcattcagatggtgatgtagtgctacatgctgtatccgacgcattgttaggcgctatggccttaggtgatataggccatcattttcctgacacagacgcggcttttaaaggcatagacagccgtattttattgcgtaaagtttttgctgatgtcaaagctttaggctacgaagtgggtaatctggacgtgaccattatggcgcaagcgccaaaaatggcgcctcatgtcgatgcgatgcgcgcttgtattgctgaagatctggtctgcggtttgtcacaagtcaatgtcaaagccactacaacagaaaaacttggttttgttggtcgcaaagaaggcattgctgttgaagccgtggtgctgttggtgaagtcctgat

SEQ ID NO: 288651 - DNA, 478 bp, Unknown
  Bacterial polypeptide expressing nucleotide sequence isolated from the Sargasso Sea
atcgcggggccgattatgctggctggcattcaggtggatagtgaccgtgccatgttggcgcattcagatggtgatgtggggctgcatgcgctttgtgatgctgtttttggcgccctcgccgatggcgatattggccatcattttccaccatctgatccgcaatggcaggcagctgacagcgcgctgtttttgaaatttgccatgcagcgggtgcgcgcccgcaacgcaacagtgatgaatcttgacctgacgatcatttgcgaaacgccgaaaatcgggctgttgcgcgatcaaatgcgggcgcggatcgcggcaatcaccgagctgccggtcgagcggatcgcggtcaaggccacgacctcggaaaagctgggttttaccggccgcggtgaaggcatcgcggcgcaggcaacggcatcaatcctgctgccggatgacgcaaacaacccgccgcaggcaccagccagcgggtcatgag

SEQ ID NO: 288652 - DNA, 481 bp, Unknown
  Bacterial polypeptide expressing nucleotide sequence isolated from the Sargasso Sea
atgttcagaacaggcataggatttgatgcacacgcacttttagagggacgcccccttgtgattggaggtgtgcgtatacctcattcaaaggggctgctagggcattcagatgctgatgtgttagttcatgctgttatggatgccattctgggggcactggcacttggggacattggagagcattttcctgatacagatgatgaatttgaaggagcagacagcttggagcttctaagtcgtgttcaaaagatgattgaggacagagcatattgctgtgaaaatcttgatagcattatcattgcagagaaaccgaaattaaaagcttatcttttggatatgcgtaaaaatctagcttctgtactgaaaataaatattgatcagttatcaatcaaggccacaacaactgaacatatggggttcactggccgtgaggaaggaatagccgctcaggcagccgttctccttaaatcaaaaaactaga

SEQ ID NO: 288653 - DNA, 487 bp, Unknown
  Bacterial polypeptide expressing nucleotide sequence isolated from the Sargasso Sea
catggatttcagaatcggacaaggctacgacgtgcaccagctcgtcgaggggcgcgccctcatcatcggcggtgtgacgattccgtacgaacgcggcctgctcggccactcggatgcggacgtgctgttgcacgcgatcaccgatgcgctgttcggcgcggcggcgctcggcgacatcggccgccatttctccgacacggacgcggcgttcaagggggccgacagccgcgtgctgctgcgcgagtgcgccgcacgcatcaaggcggccggtttcacgatccagaacgtcgacagcaccgtgatcgcccaggcgccgaagctggcgccgcatatcgacgggatgcgcgcgaacatcgcggccgatctcgggctgccgctcgatcgcgtgaacgtgaaggcgaagaccaacgagaagctcggctatctcggccgcggcgaagggatcgaggcgcaggccgccgcactgctggtgaagcagggcggctga

SEQ ID NO: 288654 - DNA, 385 bp, Unknown
  Bacterial polypeptide expressing nucleotide sequence isolated from the Sargasso Sea
actgttagctcactcagatggcgatgtattactacacgcactgtgtgatgcaatgctaggtgcagcagcactcggtgatattggcaagcacttccctgacacagacgacgcatacgcgggtgcagacagccgcgtgctgctgcgtcacgttgtcaatgtagtaagggagaaaggttaccgcttaagtaatgcagatatgaccattgtggcgcaagcacctaagatggcgccgcatattactgctatgcgtgagattattgcccaagactgcaacgtatcgcttgacgacatcaacgtaaaagcaacgaccactgaaaagctaggctatacaggccgtaaagaaggcattgcctctcacgccgttgttctactggaaaaattatga

SEQ ID NO: 288655 - DNA, 481 bp, Unknown
  Bacterial polypeptide expressing nucleotide sequence isolated from the Sargasso Sea
atgaaaatccgtatcggccatggttttgatgttcataaatttggtgaaccacgcccgttaattttatgcggggtcgaagtaccctacgaaacggggctggtagctcattccgatggtgatgtagtcctgcatgccatctccgatgccattttaggggcgatggcccttggggatataggtaaacatttccccgataccgatgccgcctataagggcgccgatagtcgcgtcttgctgcgccattgttatgccttagcgcgggcgaagggatttgagctgggtaatctggatgtcactattattgcccagacgcctaaaatggcaccgtatatcgaggatatgcgccacgtgctggcagccgatctcaatgctgatgttgctgacattaatgtaaaggccactactacagaaaaactcggatttactggccgtaaagaaggtatcgcggtcgaagccgtcgtattactcagccgccaatagc

SEQ ID NO: 288656 - DNA, 243 bp, Unknown
  Bacterial polypeptide expressing nucleotide sequence isolated from the Sargasso Sea
cagatgagctcatagaaaaatacactgaaatgggcatcaaggacatgccagtaatatctcccggtttcagcgtggattgtttagaaacgcttgaagaaatcgagattcaatacaaagagttattccttgaaaaaggtggtgaaaaatttacctacatcccttgcttaaatgattcaaacgaacatatatctttgattgaagatatcattcgatcagaaacgaaaggatggaaaaatgtttgaa

SEQ ID NO: 288657 - DNA, 626 bp, Unknown
  Bacterial polypeptide expressing nucleotide sequence isolated from the Sargasso Sea
caaatcttctctggatgcatggttcaaagaagcacaaaaccaggaattaatcgcaaaaacaaaatacacctgttgttatccgtacgacacaaaattaatcaaagcccatcagaaactgatccaagataaaataaaccacatcaaagataaaaaaataagagttctgttttccgctcacagtttaccagtatcaataattaaaaaaggtgatccatatcaatggcaagtggagcaaacagtaaaagcggtcatacaaggcattcatggttatgaagatcatgttttggcttaccaaagcaaagttactccagttaaatggcttgaaccaacaacaccaagtgaaattgaaaatgcaattaacgaagacagggcgctggttattgttccaattgcgtttgtctctgatcactctgaaacgcttgttgaattagatattgagtaccaagaacttgcaaacgaattaggctgtaagcattattatagatctgagtctttaaatattgatcaaacatttatagaaagcttatctgaaatagttagtgagtcagagaaagttgagagcgggaatattaggcaaaagatatgtccagcaacgtttaaacagtgtgatcaagaattaagatgag

SEQ ID NO: 288658 - DNA, 403 bp, Unknown
  Bacterial polypeptide expressing nucleotide sequence isolated from the Sargasso Sea
aatgaaatctgaacatcctaaagtaaaatttggaaagacaggaatacttctagtcaatcttggaacaccgaactcaactaaatggttggacataagaaaatatcttaaagaatttctttctgacagaagagtaatagaagtaaatccaataatctggcaaataattctaaacttatttatactaaatcttagaccttcgaagactgcggaggcgtacaaaaaaatatggatgaaagaagaaaacttatcaccgttaagatattacacagtgatgcaagcaaaaaaattaagtaaaagatttgtagatcctcaaatagaagttgattatgctatgagatatggagaccctagcataaaaagtaaaattggcgcactccacgaaaagggttgtgaaaatttgatt

SEQ ID NO: 288659 - DNA, 187 bp, Unknown
  Bacterial polypeptide expressing nucleotide sequence isolated from the Sargasso Sea
atgttaagtgatcagcatccgaaaataaactatggaaaaaccggagttctaatagtaaaccttggaacccctgactcaaccaagtggttagacataagaaaatatttgaaagaatttctgtcagataaaagagttatagaggttaaccctataatctggcaaagtagttttaaatctattcatttaa

SEQ ID NO: 288660 - DNA, 329 bp, Unknown
  Bacterial polypeptide expressing nucleotide sequence isolated from the Sargasso Sea
catggaaaaaaaccatccaaaagtaaatttcggaaaaactggtattttattaataaatttaggtacccctgactcaacaaactggtttgatattcgaaaatatttgaaagaattcttatctgatagaagagtaatagaagtaaatccattaatttggaaaataattttaaatacattcattcttacctttagaccttccaaaacagcaaaagcgtataagaaaatttggatgcaaaaagagaatatgtccccgttgagacattacacaatcatgcaggcaaaaaaacttgaaaataaaatcggtaatgaaaatattataatagattatg

SEQ ID NO: 288661 - DNA, 247 bp, Unknown
  Bacterial polypeptide expressing nucleotide sequence isolated from the Sargasso Sea
tatggtaaaatatattggtgaaaaagattacgagcacggtagcaaagagaaaataggagttttaattacaaatctaggaaccccagatgctccagaaaaaaaagaattaaaaatttatcttaaccaatttttgtctgatcctagggtaattgagctgccaagaatattatggcaaattttattaaaacttgtcatattacaaattagaccatcacgttcagcagcagcctacaagaaagttggacca

SEQ ID NO: 288662 - DNA, 424 bp, Unknown
  Bacterial polypeptide expressing nucleotide sequence isolated from the Sargasso Sea
atgagatcagagcacccaaaagttaattatggtaaaacaggagttttaattataaaccttggcacacccgattcgactagttggctggatataaggaaatatttaaaggaatttttatcagatagaagagttatcgaagtaaatcctcttatttggcaagtaattcttaacttatttatacttacttttaggccatcaaaaactgctaaagcctacaaagagatatggatgaaagacaagaacatgtcaccacttaggttttttacagaaagccaagctcataaattatctcagaaaattggtaatgaaaagttgattgttgattttgctatgaggtatggcaatccaagtattaaaaacaaaataaatgatattcatgaaaaaggttgtgaaaatttaattgtgctacctctttatcctcaaa

SEQ ID NO: 288663 - DNA, 364 bp, Unknown
  Bacterial polypeptide expressing nucleotide sequence isolated from the Sargasso Sea
atgatcgaagaccatccagatataaaatttggtaaaacaggattattattagtaaatcttggaactccggattcaactaaatggtttgatataagaaaatatcttaaggaattcttgtctgacaaaagagttatagaggtaaaccctattctttggcaaatcatacttaatttgtttatcctaaattttcgtccatcaaaaacagcaaaggcatataaagaaatttggatgcaaaaagagaatatgtcgccgcttagatactatacaattatgcaaacaaaaaagttatctgagaaaatgcaaaaaaaaaatcttatcatagattttgctatgagatatggaaacccaagtataaaaaaataag

SEQ ID NO: 288664 - DNA, 544 bp, Unknown
  Bacterial polypeptide expressing nucleotide sequence isolated from the Sargasso Sea
catgaatgaaaatcacccaaaagtaaactacggtaaaacaggattactattaattaatcttggcactccagatagtactgggtggtgggatataagaaaatatttaaaagaatttttatctgataaaagagtaatagaggtaaacccctttctttggcaaataatattaaatctttttatattaacatttagaccctccaaaaccgcaaaagcttataaagaaatctggatgaaagacaaaaatatgtctccacttagatattataccatgatgcaaactcaaaaattgtcaaaaaaatttaatacggaaaacttaatagttgactttgcaatgagatatggatcaccaagcattaatggaaaaattaaagatcttaaagaaaaaggttgtgaaaatttaataatattacctctttatcctcaatatgcatcacccacaaccgcaacagtttgtgatgaggtctttagatctttaatgaaattgagatggcagccaagccttcaaattgtatcccattatgaggcaaaccctctttatatagat

SEQ ID NO: 288665 - DNA, 454 bp, Unknown
  Bacterial polypeptide expressing nucleotide sequence isolated from the Sargasso Sea
aatgataaataacatagagcacccccctgttaagtttggaaaaactggggttttgattattaatttaggcacccctgattcaacaagctggtttgatattagaaagtatttaaaagagtttttatcagacaagcgcgtaatagaggtaaacccttttgtttggcaaattattcttaatgtttttattttaaacttaagaccgtccaaaacagccaaagcgtataaagagatatggatgaaaaatgaaaatatgtcacccctcttatattatacaaaaaaacaaacagaaaaattatcaagctctatttccaaagaaaacataattgtagactttgcaatgaggtatggaaatccaagtataaaaagtaagattgtcaaattacatgctgagggttgcgaaaatttaataattttaccactatacccccagtatgccgcagcaacaacagcgact

SEQ ID NO: 288666 - DNA, 601 bp, Unknown
  Bacterial polypeptide expressing nucleotide sequence isolated from the Sargasso Sea
aaaaaaaacaatttaaaagttaaaacaagcacaatttgctgttatccaactaataaaaattttattcaagcgcataaagatgaaatattaaaaaaaattaataatttagataattttaaattaatattttctgcacatggattacctgaaaaaaatattaaaaaaggtgatccttatcaatggcaggtagaacagtcagtaaataacattgttaaatctttaaacattgaaaatttagattggatattaagttatcaaagccgagttggacccttaaaatggattggaccatctactgaagatataattgtggaaaattctaaattgggcaaacatattgttttagtaccagttgcttttgtgtcagaacactccgagaccttggttgagctagatattgaatataaagaattggcagataaaaatggttgcaagaattacctaagggtacctgctttaggaacaaacattaattatattcaagcaatgtctaatttaataattaataaagaagagtataattttaatggagaggttttccctccgcagatacaatgtccaaataaatttaagaaatgcccatgtcttaattatgaatagt

SEQ ID NO: 288667 - DNA, 316 bp, Unknown
  Bacterial polypeptide expressing nucleotide sequence isolated from the Sargasso Sea
tacgggacttctgaacagggcgagtcaggtgttgtcctagtccctattggttttatctctgaccacatggaggttctattcgacctggataccgaagctgccgatctctgccaaacactgggcatgaaaatggcgagagcgaatacggcaggcaccgatcccgagtttgttcagatgattcgagaccttatttcagaaagagctttcggtctttccgagaagacagcgatcgggtgcatgcctgctaaccacgatgtctgcccgcttgactgttgtccagcacctgttcgtcccgcaacgagccgaccttcctaga

SEQ ID NO: 288668 - DNA, 343 bp, Unknown
  Bacterial polypeptide expressing nucleotide sequence isolated from the Sargasso Sea
atgaataaagatcacccaaaagtaaaatttggtaaaactggcatactcataattaatcttggtactccagactcaacaagttggtgggacataagaaaatatttaaaagagtttttatccgaccgaagagttatagaggtgaacccaataatttggcaaataatacttaatttgtttattctgacattcaggccatcaaaaacagctcatgcatacaaacaaatttggagaaaggaaagcaacgagtcacctttattatattttacaaagagtcaagcggctaaacttagaaacaaggtggaaagcgaaaagactattgtagattatgccatgaggtatggaa

SEQ ID NO: 288669 - DNA, 341 bp, Unknown
  Bacterial polypeptide expressing nucleotide sequence isolated from the Sargasso Sea
aatggaaaaacatcctgaaattaaatatggaaagaccggagttataataattaatttaggaaccccagattccacaaactggctagatgttagaaggtatttaaaagagtttttatcagacagaagagtaattgaggtaaatccaataatttggcaagttatacttaatctttttattcttaactttagaccatcaaaaagtgctaaggcttataaagaaatatggatgaaagaagaaaatatatctccgttactgtattatactaaaaaacaagctgaaaaattatcaaaatcttttttaagtgaaaatctaattatagattttgctatgagatatggaa

SEQ ID NO: 288670 - DNA, 181 bp, Unknown
  Bacterial polypeptide expressing nucleotide sequence isolated from the Sargasso Sea
atgtcaaaacttacgattttagtcaatctaggcactcctgatcagcctttcgagaaggaagttcggacatacttaagagaatttctatcagataagtatgtgataaggctgcccagaattttttggttaactttacttaatttagtaatcttaagaactaggcctaagaaaagtgctgagc

SEQ ID NO: 288671 - DNA, 725 bp, Unknown
  Bacterial polypeptide expressing nucleotide sequence isolated from the Sargasso Sea
atcacaaactgaaaaagtgaataaagaaataggaaatgaaaacttaattattgattatgctatgaggtacggaaatccaagtattaaaaataagatagtagatttgcaaggtaaaggttgtgaaaaaataatcatattacctctctatccccaatatgcagctccaacaacagcaactgtttgtgatgaagtatatagaacattgatgaagctcagatggcagccaaatttacagattatacctcattatgagtctgagccattatatattgatgcaattgtaaatagtttaaataaaaagatctcccaaattgattggaaaccagaagttatcattgcatcttatcacggtgtgccaaaaaaatattttgaaaaaggcgatccatatcactgttattgtcataaaactacaaggctgatttccgaaaaatttgataaaattcctctcatcacaacttttcaatctcggtttggcccagaacaatggctgcaaccttatacagataaaaccttagagtctttaccaaaagaaggaaaaaaaaatattttaataatttgtccagggtttgcttcagattgtgtagaaactttagaggaaatttccatagagggcaagaaaagttttattgaagctggggggaaaaatttttctatggttccatgtttaaacgacagctcagatcatattgagcttttaaaatatttaataaaaaaatctctttaaa

SEQ ID NO: 288672 - DNA, 584 bp, Unknown
  Bacterial polypeptide expressing nucleotide sequence isolated from the Sargasso Sea
gatggatagcaatcatccccagataaattttggaaaaaccggtgtattattaattaaccttggaacaccaggctctacagggtggtgggatattagaaaatatctaaatgaatttctgtcagacagacgtgttattgaagtaaacccttttctatggaaaattattttaaatttattcatccttacatttagaccatctaaaacagcgaaagcttataaagaaatatggatgaaagaagaaaatatatcgcctctacgttattatactattaaacaaaccgagaaggtaagatcctttattggcaataaaaatttaatagttgattatgcaatgagatatgggaatccaagcattaaaagtaaaatgttagatttacaggaaagtgggtgtgaaaatataattatacttcccctttacccgcagtatgcagcggcgacaactgccacagtttgtgatgaggtttatagaagtttaatgaagatgagatggcagcccagtcttcaaattattcctcattacgagtctgagccactttatattcaagcaatagtaaattccattaatcataaattgagtaatatta

SEQ ID NO: 288673 - DNA, 526 bp, Unknown
  Bacterial polypeptide expressing nucleotide sequence isolated from the Sargasso Sea
gatgaaagaagatcacccaaaaataaactttggtaaaactggagttcttctgattaatttaggtacacccgactctacaagctggttggacataagaaaatatttaaaagaatttttatcagataaaagagttatagaagtaaacccattactttggcaagtaattcttaatctatttattttaaattttaggccatcaaaaactgcgaaagcttataaagaaatatggatgaaaaaagaaaatatgtcaccattgaggtattacactattatgcaaacaaaaaaattattagatagaattagcaacaaagatttaattgttgattacgctatgcgctatggaaacccaagcatcaaaagcaaaatcaaaaaacttcatgaggttggttgcgaaagacttattattttgccgctttatccacaatatgcagcagcgaccactgccactgtttgtgacgaagtgtacagagttttaatgaacatgagatggcaaccaagcttaaacataataccacattacgagtcg

SEQ ID NO: 288674 - DNA, 470 bp, Unknown
  Bacterial polypeptide expressing nucleotide sequence isolated from the Sargasso Sea
agctcatgggttaccaaaaaaaatcatcgaagaaggtgacccatatcaaagtcaagttgaggaaacggtttctgaagttgtggcaaaattatcaaggccagaattagattgggtaatttgctaccagagtagagttggaccactagaatggattggtccctccacagaggacgagcttcaaaaagcagggcttgataaaaaaaatgtcatagttgtacctatagcatttgtgtccgatcattcggaaaccttagtagagcttgacatagaatataaagagcttgctgcttcatttggtattgacaaattttatcgagttcccgtaacaggaacgcatccaaaatttatagaggggctcagtaagatgatatttaacgcatcagagaaaacagggaaattgtttccagaagcccgcaaaaagtcattcttctgcggcattgattttaaagaatgtcaaaagtttcaataaa

SEQ ID NO: 288675 - DNA, 497 bp, Unknown
  Bacterial polypeptide expressing nucleotide sequence isolated from the Sargasso Sea
aattgatcaagtgaaagataaaaaggtcagagtcttgttttctgcacatagtttgcctgtatctatcattaaaaagggagacccttatcagtggcaagtggagcaaacagttaaggctgtaatgaagggtattcaaggatatgaagatcacattctggcttaccaaagcaaagtaacaccggttaagtggcttgagcccacaacgcccagcgaaattgaaaatgcaattcacgaagatcgggcattagtaattgtgccaattgcttttgtatcggaccactctgagacactggttgagttggatattgagtatcaggaactcgctagtgaattaggatgtaatcactactatagatccgagtctttaaacattgatcaaacctttatagaaagtttatctgaaatagtcggtgagtcggaaaaagttaagagtggcaacattaggcaaaaaatatgtccgacaacattcaaacaatgcgaccaagaattgagatgaa

SEQ ID NO: 288676 - DNA, 193 bp, Unknown
  Bacterial polypeptide expressing nucleotide sequence isolated from the Sargasso Sea
aatgaaaatcgatcataatcacccacctattaaatttggaaaaacaggtgttcttatagttaatttaggaacaccagactcaacaaattggcttgatatcagaaaatatttaaaagagttcttgtctgataaaagagttattgaagtcaatcctataatttggcaattcgtttttaacttattcatactaact

SEQ ID NO: 288677 - DNA, 295 bp, Unknown
  Bacterial polypeptide expressing nucleotide sequence isolated from the Sargasso Sea
tattcagatattgaaatcaagactacctttcaatctagatttggtcctcaagagtggttgcaaccttacacagataaaacttttgagactctacctaaagaaggtataaaaaatattttggttatttgtccaggattttcatctgattgtgtagaaactttagaggaaatatcaattcaaggtaaggaaagttttatcaaatcaggaggtgaaaattttgaaatggtaccatgtttgaacgatagtgaagatcatatttcattgttaaaacatttagttacaaaaaacttataac

SEQ ID NO: 288678 - DNA, 145 bp, Unknown
  Bacterial polypeptide expressing nucleotide sequence isolated from the Sargasso Sea
atgaacatagatcatccaaatgtaaactatggaaaaactggaatactattagtaaatcttggtaccccaaattctacgagctggtttgatattagaaaatatttaaaggaatttttatctgatagaagagttatagaagtaaatc

SEQ ID NO: 288679 - DNA, 359 bp, Unknown
  Bacterial polypeptide expressing nucleotide sequence isolated from the Sargasso Sea
ataccaaaaagaatgtctacatacggcacatctgattgctaatgaattgaaattaactgaggatgagtatgagattgcctttcaatctagatttggaaaagctgaatggataaaaccttatttgtcatctaggctagaagaacttccaaaagaaggtataacaaatttacatgtattttgccctgggttttcgtcagattgtttggaaactatagatgaaattgggagagaatctaaggaagattattttgaacatggtggaaaagaatttacttttatcccatgtttgaatagtgatgaacaatttattaaagctttaatggatatacaaactgtctctgataccaagctattatgat

SEQ ID NO: 288680 - DNA, 709 bp, Unknown
  Bacterial polypeptide expressing nucleotide sequence isolated from the Sargasso Sea
agtgaataaagaaattgggaatgaaaacttaattattgattatgcaatgagatacggaaatccaagtattaaaaataagatagtagatttgcaaggaaaaggttgtgaaaaaataattatattacctctctatcctcaatatgcagctccaacaacagcaactgtttgtgatgaagtatatagaacattgatgaagctcagatggcagccaaatttacagattatacctcattatgagtcagagccattatatattgatgcaattgtaaatagtttaaataaaaaaatctcccaaattgattggaaaccagaagtcatcattgcatcctatcacggtgtaccaaaaaaatattttgaaaaaggcgatccataccactgttattgccataaaactacgaggctgatttctgaaaaatttgataaaattcctattatcacaacttttcaatctcggtttgggccagaacagtggttgcaaccttatacagataaaaccttagagtctttaccaaaagagggaaaaaaaaatattttaataatttgtccagggtttgcttcagattgtgtagaaactttagaggaaatttccatagagggcaaggaaagctttatggaggctgggggaaaaaatttttctatggtctcatgtttaaacgatagctcagatcatattgagcttttaaaatatttaataaaaaaatctctttaa

SEQ ID NO: 288681 - DNA, 583 bp, Unknown
  Bacterial polypeptide expressing nucleotide sequence isolated from the Sargasso Sea
tcttaatatagaaacaagtactatttgttgctacccagaggatgataaatttataaaagcccacatagaactaataagaaaaaaaataaaagggataagtaactttaaattaattttttcagctcatggcttaccagaaaaaaatataaaaaaaggagatccctaccaatggcaagtagagcaaggtgtaaaaaaaattatagaaggaatcgatgattcaagtattgattttattttaagttatcaaagcagagttgggcctttaaaatggattggtccttccacagaagatgtaattgtagaaaattcaaaaatgggaaagcatttagttatagtaccaattgcttttgtatcagaacattctgaaacactggtggaattagatattgagtatgcaaaacttgctaaaaaaaatggatgtcaaaattatactagagtggaagccttaggaattaatgaaaattttattgaaagtttaacagatttaattttacataaagataagtataagtttaaagaaaatctctacgcacctaaaaataggtgtccctcaaattttattaaatgtccctgccttaattaa

SEQ ID NO: 288682 - DNA, 183 bp, Unknown
  Bacterial polypeptide expressing nucleotide sequence isolated from the Sargasso Sea
aatgattgaaaaaaaccacccaccaataaaatatggcaagacaggtgtactcataatcaatcttggcacacccgattctactaattggtttgatataagaaaatatttaaaagagtttctttctgacagaagagttatcgaggtaaatccattagtttggcaaataattttaaatttgttcat

SEQ ID NO: 288683 - DNA, 387 bp, Unknown
  Bacterial polypeptide expressing nucleotide sequence isolated from the Sargasso Sea
aacttaataatgacagttggaatatttgctatcaaagtagggttgggcctctcgaatggattggtccatctttagacgacgaattaaaacgtgcgtcagaagataaaattggggttattgttctaccgatagcatttgtttcagaacattcagaaacacttgttgaattagatattgaatatcgcaaactagctgaagatctaaatgttccgtattatggccgagtcccagctataggcacacaccctaattttattgatggactgaaggaattgattgataaagcgattttaagtgagtcttctgtaatatctggacgcggagatccaatttgtctgaaggatcagaaatgttatcttcgtcaagagtcagttaaaaatgtttgaa

SEQ ID NO: 288684 - DNA, 178 bp, Unknown
  Bacterial polypeptide expressing nucleotide sequence isolated from the Sargasso Sea
aatggataaaataggcgtcttactaatgaatttaggagggcctgaacgcattaccgatgtaggcccatttttatataatcttttttctgatccagagataatcagaactcctttccctgcttttcaaaaacctttagcatggttaattagcactctaagaagcactacttcacaacag

SEQ ID NO: 288685 - DNA, 517 bp, Unknown
  Bacterial polypeptide expressing nucleotide sequence isolated from the Sargasso Sea
attattaaaaaaatagataatcttaaaaatttcaagttgatattttctgcgcacggtttgcctgaaaaaaatattaaaaaaggagacccatatcaatggcaagtagaacaatcagttgataaaattgttgaagcactaaatattaaagaattagattggatacttagctatcaaagccgagttggacctttgaaatggatcggcccttcaactgaagatatcattgtagaaaattcaaaattaggaaaacacattgttttagttcctattgcttttgtgtctgaacactctgaaactttagttgagctcgatatagagtataaagagctagcagataaaaatggttgtaaaaactattcgagagtgccagctcttggaactaatgaaaattatataaaagcaatggccaatttaataatcaataaaaatgattataatttcaatggagagattttccccccaaagttacaatgccccaaccaatttaaaaaatgtccgtgtataaattatgaatagt

SEQ ID NO: 288686 - DNA, 328 bp, Unknown
  Bacterial polypeptide expressing nucleotide sequence isolated from the Sargasso Sea
atggaaaataatcatcctaaagtaaattttggaaaaactggagttttaataataaacttaggaacaccagactcgacaagttggttagatataagaaaatatttaaaagaatttttatcggatagaagagttatagaagtaaatccaattatatggcaaataatattaaatctttttatacttacttttagaccttcaaaaactgcaaaagcttataaaaaaatttggtttaaaaaagaaaacatgtctcctttaagattttatacaaaaagtcagtctgaaaaactttctgaagcaattaaaagtgataaaattttagttgattatg

SEQ ID NO: 288687 - DNA, 210 bp, Unknown
  Bacterial polypeptide expressing nucleotide sequence isolated from the Sargasso Sea
aatggatagtaatcatccccaggtaaactttggaaaaactggtgttttattaatcaaccttggcacacccgactctacaggatggtgggatataagaaaatatttgaaagagttcctatctgatagacgagttattgaagtaaatccttttttgtggaaaataattttaaatttatttattcttacttttagaccatcaaaaacagcaaa

SEQ ID NO: 288688 - DNA, 162 bp, Unknown
  Bacterial polypeptide expressing nucleotide sequence isolated from the Sargasso Sea
aatggaaattgataataatcatccacctattaagtttggaaagacgggtgtccttattgttaatttaggaactccagattcaacaaattggttcgatattagaaaatacttaaaagagtttttatctgataaaagagtaattgaagtaaatcctataatttg

SEQ ID NO: 288689 - DNA, 583 bp, Unknown
  Bacterial polypeptide expressing nucleotide sequence isolated from the Sargasso Sea
aactataatactaaaactaaaattatttgttgttatcctacagaggattattttatagaatcccacatttctctaatcaaaaaaactatagaaaaagtcgaaaataataattttaaattaattttttctgcacacggattgccagaaaacaagataaagaaaggcgatccttatcagtggcaagtagagaaaactgtaaaaaaaataatgtcaaaaataaaaaatgaaaagttagactatatattgagctaccaaagtcgtgtaggtcctttaaaatggattggaccttcaacagacgaagtaattaaaaaatactctaaagaaaaaaaaggaatcgttatagttccagtagcctttgtttcggaacattcagaaactttagtagaattagatattgaatataagcaattagcagaaaaaaatggttgcagtttttacaaaagagtaccagcattaggaattgaagaaaactttataaaggggctggcacatttagttttaaaaccaaaaacaaaaggtaattttgtttcatcaacaacatgtcccagtaaatacaaaaagtgcccttgtttgaaattatgaa

SEQ ID NO: 288690 - DNA, 393 bp, Unknown
  Bacterial polypeptide expressing nucleotide sequence isolated from the Sargasso Sea
aatggaaagggttgctgttgttctatataatttaggagggccagataaacctgaggctattcaaccttttctttttaatttatttaatgaccccttaattttaaggctctcgccgccgattcgctggattttagcaaagataatatcaagtcgccggacgccaatcgctaaagagatttacgctaaaatagggggtggatctcctattttagaagaaacaagaaaacaggcttgggcactgcaggaagagttagaaaaagatggaaagtttaaagtttttgttgctatgcggtattggcggccgttcgctgatgaatgtatagatgaggtgattaactttaatccggattcagtaatcctgttaccgctctacccccagttttcaactactac

SEQ ID NO: 288691 - DNA, 362 bp, Unknown
  Bacterial polypeptide expressing nucleotide sequence isolated from the Sargasso Sea
aacatgttataaacatcaatgcctcgaaactacaagattagtaactgaaaaactgaacattgaaaaggataagtacagtaactcctttcaatcaaggcttccaaatgaaccttggttgaagccttatacagatagtgaattagaaagactagctaagagcggtaagaaaaagttagttattattactccagcttttgtcacagactgtcttgaaacacttgaggagattgaaatggaaggtaaagaggaattcttagaagcaggtggcgaagagtatacatatgttccttgtcttaatgatgatgataattgggccgagttaatatcaagttggaccaaagattatttaaaattaaattaaa

SEQ ID NO: 288692 - DNA, 610 bp, Unknown
  Bacterial polypeptide expressing nucleotide sequence isolated from the Sargasso Sea
aatgaaatataaaaaagctttactaattataaatcttggtactccagataatcctagttatttttctgtttttaaatttttaaaagaatttttgtcagatcctagagttattgatataccacgaatgtttagaattttgatcgtaaacctaataatttgtccatttagatcattttcaagttctaaagtatatagccaaatgtggaaagcaaataataatgaatctcctattaaaactaatacagaaaagttaatacaaaaacttcagagcaagctccctgagtatgatgtttatagtgcgatgagatatcaaaatccttctattaaagatacactcagtgaaatattactcactaatcctgatgaaattataattttcccttccttcccacaatatgcttcttctacaactggaagtgtttatgaagaagtatttaatattctttcaaaagaatgggtaattccaaaaattaaatttataaatcaattttttaataatgacttatttattgatgcttggattgaaaaaatttctgattttgatatatcaaattatgaaaaaataattttttcttatcatggtttaccagatacacaagtagataaagta

SEQ ID NO: 288693 - DNA, 388 bp, Unknown
  Bacterial polypeptide expressing nucleotide sequence isolated from the Sargasso Sea
aatgattgaaaaaaatcatcctcctataaagtttggtaaaacaggtgtactcataattaatttaggcacgccagattctactaattggtttgatataagaaaatatttaagagaatttctttccgacagaagggttatcgaggtaaatccattagtctggcaaattattttgaatttgtttattttaaatctcagaccctcgaaaaccgctaaagcttataaagaaatttggatgaaagatgaaaatatgtcaccacttctttattatacaaaaaaacaaagtgagaaaatttcaaacgtactgtcaaaagaaaacattattatagattttgctatgagatatggaaatcctagtattaaaagcaagattcataaattgcacaaaatg

SEQ ID NO: 288694 - DNA, 390 bp, Unknown
  Bacterial polypeptide expressing nucleotide sequence isolated from the Sargasso Sea
tccaaaagaaatattttgatcaaggggatccatatcattgtttatgtcagaaaacttcacgtctggttgctgaaaaattaggcataaaagaagaaaatttcataacaactttccagtcaagattgggaactgcagaatggctcaaaccatatacaagtgacgtaatgaaaaaattgccttcggaggggtgcagcaatatcttggttattgctccaggttttagtgtagattgtcttgagacaattgaagagatagacgaagaaaataaggaatatttccttgaatccggcggaaaaaaattcacttatataaattgtcttaatgattcagatcagcatataaaatttttaaatgcatttattgaacaaaaagtttcattatggaattgaa

SEQ ID NO: 288695 - DNA, 412 bp, Unknown
  Bacterial polypeptide expressing nucleotide sequence isolated from the Sargasso Sea
aatgaatacagaacacccaaaagttaattacggtaaaacaggtgttttaataataaaccttggcacacctgactccactagttggctggatattaggaaatacttaaaagaatttttatcagatagaagagttatagaagtaaaccctcttatttggcaagtaatacttaacttatttatacttactttcaggccatcaaaaaccgccaaagcctacaaagaaatatggatcaaagacaaaaatatgtcaccgcttaggttttttacagaaagtcaagctcgtaaattatctgagaaaattggtgatgaaaagttgatagttgattttgctatgcggtatggcaatccaagtatcaaaagcaaaataaataagctacatgaaaaaggttgtgaaaatttaattatactacct

SEQ ID NO: 288696 - DNA, 322 bp, Unknown
  Bacterial polypeptide expressing nucleotide sequence isolated from the Sargasso Sea
gctggatgctagccagactgccaagatccccgagcacgccaatgccgatcaccccgctattcccaaggcgaaaacgggtgtccttctggccaacctcggaacaccggaccactatagctattggccgatgcgccggtatctgagcgagtttctgtcggatcgccgtgtcattgattacagcccgtggaaatggcaaccgctgttgcaactcatcatcctgtcgaagcggccctttgccagtggcgaggcctataagtcgatctggaacgaagagaaaaacgaaagcccgctgatgaccatcacgcgggaccagaccgccaag

SEQ ID NO: 288697 - DNA, 615 bp, Unknown
  Bacterial polypeptide expressing nucleotide sequence isolated from the Sargasso Sea
aatgcagggaatacttttaattaatcttggatctccaaaggatttggaagatttatctattaaagaatatcttaaagaatttctttcagatgatttagtcattgactatcctaaatttattcaaaaagttttagtaaatttattaatagttccaaatagatataaaaaaacaaaggaagcatattctcaaatatggacagatacaggttcacctttaatttctcaaactatagaacttggtaaaagattaagtaaaagaacatctctctgtgtagaagtggctatgagatatcaggaaccgtcaattgaagatgctttgattaaatttagcaaaagtaatatttcgaaactaaaggtagtgcctttatatcctcattacgcaatgtctacaagcaagacgacgcaaagagaagtaaggagagtaagggataagttgaacttaaagattgatcttgaatttgtagattcattccataatgctaatggctacatagatgctttgtgtgaaattatcaagaataaaatgcaacctcaaagtgaatttctattgtttagttatcatgggataccaaatagacatcttaaaaaaactgacccgacaaaaaaacactgcct

SEQ ID NO: 288698 - DNA, 254 bp, Unknown
  Bacterial polypeptide expressing nucleotide sequence isolated from the Sargasso Sea
aatgataaacaataatcatccccctattaaatttggaaaaacaggcgttttgataatcaatctaggtacgccagattcaacaaattggtttgatataagaaaatatttaaaagaatttctttcggacagaagagttatagaagtaaacccgttaatttggcaaccaattttaaatttatttattttaaactttagaccatcaaagaccgcaaaagcttataaagaaatttggatgaaagaagaaacatttctcc

SEQ ID NO: 288699 - DNA, 871 bp, Unknown
  Bacterial polypeptide expressing nucleotide sequence isolated from the Sargasso Sea
atgcttgaacacgtgactagtgcgaaaattggctgtttattgatgaatattggaactccatcagaacctactgtatcaggcttaagaacctaccttaaggaatttttatctgaccctgatgtagttgatactaatccgattttacgatggattattgtcaatttgcttgttgttccttttagaccccaaaaaatattgccacaatatcaaagcgtttggatggatgaaggatctcctttacttgtttacacccaaaaattcgtaaaaaaaattacagagaaaaacactgatattatatttgatataggtatgaggtatggcacaccatctatagagcaaggactcaaaaatttggtagaagccaaggtcgaaaaagttatattgtgcccaatgttcccacagtatgctcaagcgacgtcagggtcttgtataaaaagagctattgaagtgattgaacatgaagatatcaatattccttatgaaattaattcatatttttatgatgaagatttattaattaattgtttagctgaaacaattaaaaattcaacagcatatcatgaaagcgaatttcttctctttagttttcatggtttaccagaacgacaaattaaaaaaatggatacttctaacaaccattgtttagttcaggagaactgttgtgaaattgagtgtgagtttaatcagttgtgttataagcgccattgttatgaaacagtgcaaagagtagttgataaagcagatttaaaaaaaccttttgatatagcatttcaaagtcgatttggtattgatccctggattaaacctaacactacagatattattgaagcattacctaaaaaaggtataaagaatatttcagttatttgcc

SEQ ID NO: 288700 - DNA, 394 bp, Unknown
  Bacterial polypeptide expressing nucleotide sequence isolated from the Sargasso Sea
aatggttaaggctaatcaacatcaacagaaagccaaattacgcaccacaattcttttggttaatttaggaacaccaataaaaccaagttattttgctactttctcatttcttagagaatttttatcggatagaagagtcatcaatatcaacaaattattatggtatccaattttgtatggattcattttgccctttagatcctatagttcatcaaaaaaatatgcacaaatagtaacagaaaaaggaatgcctctggcatacctaagcgaacagttgcaagaaaaagtgaatcgtgagatccaaagacagcatcaaggagtagcagtaaaattgtgcatgcgctatggcaaaaatagcatcgaggcaacattaagttcaattaaacagattcct

SEQ ID NO: 288701 - DNA, 571 bp, Unknown
  Bacterial polypeptide expressing nucleotide sequence isolated from the Sargasso Sea
atgaaaaaaaaaataggagttgttctttttaatctaggcggacctgataaattatctgcagttaaaccttttttattcaatttatttaatgaccctgctattattggggctccttcatttattaggtattttttagctaagcttatttcatcaaaaagagaaaaaacagctaaagaaatttactcttttatcggaggaaggtctcctatattagaagagacgaaagaacaaaaaaaacagctagaaaatttattaaaaacagaaaaagacgactataaagtttttatatcaatgcgctattggaagccttttgttaacgaaacggtaacaaaaataatgaaatggcaacctgatgaaattattcttttgcctctttatcctcaattttcgacaacgacttctggctcttcactgcattcatggaagaaagaaatagatactaagaaatttagggttccaacaaaaattatatgctgttatcctacagaagaaaatttcatcaaagcacatgttaatgaaataaaaaaaataattaacaaagcaaaaaaacaaaatataataaacaaaaaat

SEQ ID NO: 288702 - DNA, 652 bp, Unknown
  Bacterial polypeptide expressing nucleotide sequence isolated from the Sargasso Sea
atgagcaaaaaaggtgttttaattcttaacttaggtactccaaatagcccatcagtaaaagatgttagattatacctaagagaattccttaatgacccaagagtaatagatattggaagaattgcacaattattactagttaatttaataatagttcctttcagagctcctaaatctgctaaagaatataaaaaactctttaaaattggaagaggaaaatctccacttttaacgtatggttatagtttaactgaaaaattaaaaaaattagcagcaaatgattttaatatagaactagccatgcgatatggatctcctagtatggaaaatgttttaagtaaaatgaaaatggaaaattatgatgaaatttatatcttccccctttatccacaatatgcatcagcttccagtggttcgactattgaaaaagcctttagaattattaataagtggtgggttatcccagaggtttcagtcataggacaattttataagaactctaactatataaattgcatagtaaaccgatctaaaaaatttaatctttctgattatgatcatataatattttcttatcatggaattcctgaaagacatgtagataaagtatatttagatggtttgccatgttcagatcattcatgtgaagaga

SEQ ID NO: 288703 - DNA, 183 bp, Unknown
  Bacterial polypeptide expressing nucleotide sequence isolated from the Sargasso Sea
attgactattataaaaaaacctattaatcaccccgtttttcctgataaaaataagattggtgtattgcttgttaatttaggaacgcctgatggcaccgactattggtctatgagaagatatttaaaacaatttctaatggacaaaagagttgtagacctttttaaacctttatggtggttgat

SEQ ID NO: 288704 - DNA, 142 bp, Unknown
  Bacterial polypeptide expressing nucleotide sequence isolated from the Sargasso Sea
atgcaaaaagatcatccagaagtaaaatttggcaaaactggagtattgctgataaatcttggtacaccggactcaacaagttggtgggacatacgaaaatatttaaaagaatttttatctgatagaagagttatagaggtaa

SEQ ID NO: 288705 - DNA, 541 bp, Unknown
  Bacterial polypeptide expressing nucleotide sequence isolated from the Sargasso Sea
aatgtttgatacttcaacgcccctcgagacaccacagtacgcagaagaagaccatccaaaaattccaaagcaaaaaattgggatcttggttgccaacttaggcacacccgataactatgattattggtcaatgagaagatacttgaatgaatttttatcggatagaagggttatcgattattctccttttctatggcagcctttactacaactgcttatccttacatcaaggccttttaggtctggtgccgcctataagtcaatttggaatgaacctgaggcagaaagtccattgatgacaataaccaaagctcaaacagctgcaattaagaagattatgcatgagaaatatgcagataatgtggctgtggatttctgtatgcgctatggtaatccttcaacaaaatcacgtgtccgatccttggttagtatggggtgcagcaaaattctattttttccgctctatccccactatgcaggggctacaagtgctacggctaatgatcaatttttcagagctctcatgaatgagaaatggcag

SEQ ID NO: 288706 - DNA, 392 bp, Unknown
  Bacterial polypeptide expressing nucleotide sequence isolated from the Sargasso Sea
catgaggtatcaatttccaagtattgaagaaggattagttaatctcaaaaaaaagggatgctctgaaatttttgtggttcctctgtatcctcattacgcaatgtctaccgtgttaaccacggaaaaagaggttaaaaggattgaaaatgaccttgaacttggtcttaaactcaattttattaaggccttttacagtgaacgcgaatatatttctagtctaagcaatgtcataagcagtaacaggcaatcagaaagcgatttcttgttattcagttaccacggcatacctaataggcacttgttaaaaacagatcctactcaaagccattgtttgaaagtagaaaattgttgcgatatagaatctaaagcaaaacctttgtgttacaaagctc

SEQ ID NO: 288707 - DNA, 627 bp, Unknown
  Bacterial polypeptide expressing nucleotide sequence isolated from the Sargasso Sea
caattaaagaatggaatgatttgtgtaataaagaaaattataaagttaaaaccaaaactatttgttgctatcccacagaaaacaattttatagagtctcatgctaatcttattaaaaaaacactaaaaactttagatagtaaaaattttaaattacttttttcggcgcacggtttgccagaaattaaaattaaaaaaggtgacccatatcagtggcaggtagaacaaactgttgaagagataatgttaaaattaacgaatgaaaacctagatcatataataagctatcagagtcgcgtgggacccttaaaatggattgggccatctacagatgatgtaattattaaatattctaaagagaaaaaaggtattgttatagttccggtggcttttgtttcggagcattcggaaaccttagtagaattagatattgagtataaaaaattagcagaaaaaaatggttgcagtttttacaaaagagtaccagcattagggatagaggagagttttattaaaggacttacagaattaatttttcaaaaggaaacgaggggtaattttgtttcatcagtaatgtgccctaataaatatgtgaaatgtccatgcttagagttaaaaatagaataat

SEQ ID NO: 288708 - DNA, 462 bp, Unknown
  Bacterial polypeptide expressing nucleotide sequence isolated from the Sargasso Sea
tatgaagactaaaaaaggactgttacttataaaccttgggactcctgatgatcctggatatttagctgtctttaaatacttaagacagttcttaatggatccaaaagtaattactgttccatacattcttagatttattctagtttcacttatcattgttcctttcagagcttttagttctggaaggatttacaaaaaaatatggactgaaaatggttctcctctcatagttaatacatctgctttagctgataaagttagtaaaaaagtacccaacatagaggttgaatttgccatgagatatcaatctccatctatcgaagataagttaaaaaagttaatctctcagaatcttgatgaaattataatacttcctctatttcctcaatatagcactgcaacaaccggatcagtttttgatgaaatctctagagttcttaaaaaacaaagtgttacaccgtc

SEQ ID NO: 288709 - DNA, 263 bp, Unknown
  Bacterial polypeptide expressing nucleotide sequence isolated from the Sargasso Sea
aatgaacaaagatcatcccgaagtaaaatttggcaaaactggaatcttattaattaatttgggtaccccagactctactagttggtgggatattagaaaatatttaaaagaatttctttctgacagaagagtaatagaagtaaatccttttatttggcaaataatactgaacttatttattttaacttttagaccttcaaaaacggcacatgcttataagcaaatttggagaaaagaaagtaacgaatctcctttattgttct

SEQ ID NO: 288710 - DNA, 163 bp, Unknown
  Bacterial polypeptide expressing nucleotide sequence isolated from the Sargasso Sea
atgaacgaagaacatccaaatgtaaattatgggagaacgggagttttaattattaatctcggaacaccggattctaccagctggtgggatataaggaaatatcttaaggaatttttatctgataggagagttattgaagtaaatccattcataggaaaataat

SEQ ID NO: 288711 - DNA, 223 bp, Unknown
  Bacterial polypeptide expressing nucleotide sequence isolated from the Sargasso Sea
atggataaaaatcaccctgaagtaaactttggcaagtctggtgttcttattataaaccttggcacaccagactcaacaaattggtgggatatcagaaagtatttaaaagaatttttatctgacagaagagtaatcgaagttaatcctataatatggcaagtaattttacatttatttattttaacttttagaccttcgaaaacagctcatgcgtataaaaaaa

SEQ ID NO: 288712 - DNA, 525 bp, Unknown
  Bacterial polypeptide expressing nucleotide sequence isolated from the Sargasso Sea
gatggcaaccaagtttgcagatcataccacattatgaatctgagccgttgtatataaaagcgttggtaaaaagtattgatgaaaaaatttctaaattaagctggaaaccagatttaattatagcctcctatcatggtattccaaaaaaatattttgaaaagggagatccatatcattgttattgccaaaaaacttctcgcttaatcaaggagagttttagcagtaacataccaattatgacaacttttcaatccagatttggaccacaggaatggttgacaccttacactgataaaacatttgaaaagttacctggagaaggaaagaaaaatatattagttatttgcccaggtttttcatctgactgcgtggaaacattggaagaaatttccatacaaggcaaggagacttttctggaaaaaggtggaaaaaattttgaaactgtatcttgtttaaatgacaacgaagaccatattaatctgctacaacacttaataaataaatttcttattgaaaaaaaatgaa

SEQ ID NO: 288713 - DNA, 179 bp, Unknown
  Bacterial polypeptide expressing nucleotide sequence isolated from the Sargasso Sea
aatggataaaaatcttgagcatcccccgattaaatttggcaaaactggagcattaattgtaaacttaggaactccagattcaacaagttggtttgatatcagaaaatatttgaaagaatttctttctgataaacgtgttattgaggttaatccctttatttggcagctaattctaaatg

SEQ ID NO: 288714 - DNA, 145 bp, Unknown
  Bacterial polypeptide expressing nucleotide sequence isolated from the Sargasso Sea
aatggaaaagcatcccgaaattaaatatggaaagactggagttttaatagttaatttaggaaccccagactctactgactggctagatgttagaagatatttaaaagagttcttgtcagacaaaagagttatcgaggtaaatcca

SEQ ID NO: 288715 - DNA, 299 bp, Unknown
  Bacterial polypeptide expressing nucleotide sequence isolated from the Sargasso Sea
aatgattgaaaaaaatcatcctccaataaagtttggcaaaacaggcgttttgataattaatttagggacgcccgactctactagttggcttgatataagaaaatatttaagagagtttctttctgatagaagggttatcgaggtaaaccctgtgatttggcaaataattttaaatgtctttattttaaacttcagaccctccaaaacagctaaagcttataaggaaatatggatgaaggaagaaaacatgtctccactactttattatacaaaaaaacaaagtgagaaaatctcaaatt

SEQ ID NO: 288716 - DNA, 618 bp, Unknown
  Bacterial polypeptide expressing nucleotide sequence isolated from the Sargasso Sea
aatgacaaaaaaagttgcattggtatttttcaatttaggtgggcctgattctcttgaaacagtcaaaccatttttatttaacctgtttaatgataaagcaatcattcagctgcctcagccatttcgctacttgcttgcaaaattcatctcttttaaaagagaacataccgcgcaagaaatttatgattatattgatggtcaatcgcctatattacaaaacacaaaaaaacaagttaaagatattgaaacatatttaaaaacaaagagcagtaatacttttaaaacctttattgctatgcgttactggcatcctatgagtccagaaacagctttaaaagtacaagattataatccagatgaaattattttagtgccgctatatccgcattggtctaccacaacgtcggagtcttctgttaaagattgggataaggcttgtcgtcggattggcttgaaggcacctacaaagcttatttgttgttatcctacaaatgatggctttatcaaacaaaatgctgaaatgatcaaaaaagagtaccaaaaagctcaaaaatttggagagccccgtattctattttcagcccacggtttaccagaaaaaattattaaacaaggtga

SEQ ID NO: 288717 - DNA, 249 bp, Unknown
  Bacterial polypeptide expressing nucleotide sequence isolated from the Sargasso Sea
aatgaatgttatacagtcaaatatcccaaaagaccatcctagaattttaaaaccaaaggtaggtgtgataataggcaaccttggtacgccagatgctacagattactggtctatgagaagatatctaaaggaattcctttctgataggagagtaatcgattactccccttgggtatggaagccaatattaaacctaattctactaagaagacctttctcttctggtgaagcatacaaggagatttggaa

SEQ ID NO: 288718 - DNA, 562 bp, Unknown
  Bacterial polypeptide expressing nucleotide sequence isolated from the Sargasso Sea
gatgtcaaaacttacgattttagttaatttaggaacccctgatcagccatttgagaaggaggttagaaaatacctaagagaatttctatctgacaaatacgttataaggctgcctagaattttttggcttactttactgaacttagtaattttaagaactaggcccaagaaaagtgctgagctctatagaaaagtctggagtaaatggggatcaccattattatttcacacttatgctcagactgggcatctcagaaaactagcaatctctaccaaagaagatatacattttgatacagcaatgagatatggtaatccgtcaataaaaaatattctttataagtcaattgataatggttactctgacataacaatattgccaatgttccctcaatattcaactacaactactctatctatctttgagcttataaagtctattatagagaatgacaagaatttctttaaaaatgtaaatatcagcgccgtgaatgattttcatgataatgatgcatacattgaatcttgcgccataaaattagagctacacaacaaagtatag

SEQ ID NO: 288719 - DNA, 538 bp, Unknown
  Bacterial polypeptide expressing nucleotide sequence isolated from the Sargasso Sea
aagaaagtggcaccagccgtgcgggttgtagaaccttactttgaacaacccctatacattgaggccctagcaaaatctgtagaagaagcctatgctacaaaaaaaaccaaacctgaaatccttgtttgtagctaccatggcgtaccaaaaagatatctaatgcaaggtgacccctatcactgccagtgtcagaaaactactaggttattaaaagaacgtctcggttggagagacacagatattgttacaacttttcaatctaaatttggaccagaggagtggttgaaaccttacacagttgaagaagtcgcaagacttgttgaagaagagaagaaaaagtccatagccgttattgcaccagctttttcttccgactgtattgaaactttggaagagataaatgaagagattaaggaaagttttgaagaagctggaggagaagaatttacttatataccttgtctaaatgacagcaaagctcacattgatgcactttctgctttgattgacaaaaatttaagtggttggattacctaat

SEQ ID NO: 288720 - DNA, 814 bp, Unknown
  Bacterial polypeptide expressing nucleotide sequence isolated from the Sargasso Sea
caaaaaaatatggaccgaaaatggttctcctctcatagtaaatacatctgctttagctgataaagttagtaaaaaagttcccaacatagaggttgaatttgccatgagatatcaatctccatctatcgaagataagttaaaaaagttaatctctcagaatcttgatgaaattataatacttcctttatttcctcaatatagcactgcaacaaccggatcagtttttgatgaaatctctagagttcttaaaaaacaaagtgttacaccgtctataaagtttataaatcaattttatgaacaagaatcattcatagattcttgggaagaaagattacagtcttttaatgttgaagaatatgatcatatattatttagttatcatggattacctactaaagctgtagatgaaatttacgaagattcgctatgtgcggataataattgcgaaaatgaaataactaatgaaaataagttttgctataaagcaacgtgttatgaaacaacccggcttatcgcaaatagatttaatctttcttcagataaatatacagtttcatttcagtcgagattaacaaaaaactggctagagccttttacagatgaagttctcgaaagtttcccaggcaaaggcatagaaaaaatacttgttctgtctcccgcttttacagccgataatttagaaacattatatgaaatagatgatgaatataaggagttatttttggaaaatggaggtaagtctttaactatggtaccttcattaaatgattcgtcgaaatgggctgattcaatagtagaaattatagatgcatag

SEQ ID NO: 288721 - DNA, 245 bp, Unknown
  Bacterial polypeptide expressing nucleotide sequence isolated from the Sargasso Sea
ttatactgatgaaactattatagaattagctaaacaaggatcaaagaatattgttgtcattgctccaggttttatctctgattgtctagaaacacttgaagaattaaatgttgaggcaagagagttgttttttgagaatggtggaaaaacttttcaatatataccttgtttaaatgataacgaatattcaattaaatttttaaatgaaatagttaaacaaaatttattaggttggaataattaaa

SEQ ID NO: 288722 - DNA, 877 bp, Unknown
  Bacterial polypeptide expressing nucleotide sequence isolated from the Sargasso Sea
ccaaaagacctagaggacgaatccataaaagaatatctaaaagaattcctctctgacgacttagtggttgattatcccaagcaaatccaacagatactagtaaattggataatagttcctaatagatataaaaaaacacaagaagcctattcaaaaatctggaccgaagaaggctctcctctaatacagaatactaaggaacttggtcttaggttagctaagctaagttctttgcctatagaggtggcaatgcgttaccaagaaccttctatagaaaaagcaattacatctttaaagaaaaaaggctgtactacgattagagccattcctctttatccacattttgccatttcatcaactttaactactcaaaataaaatgatagaagaagtaagaaaaattgataaagacattgaaattgattttatagaacccttttataaagatcctgaatatattgattctttatgttctttaattgatgagaatataagtaaaaactcagattttcttttatttagttatcacggaattcctattagacatttaagaaaagctagcccagaaggaaaacacaacgacaatctttgtaagaattcagattgcccttcaagagactactgttatagatttcaagtttatgaaacttctagattgtgtaccgagaaactaaatatccctaaagaaaaatggaaagtatcttttcagtccaggatcggtcctggttggcttaaacctttcacggataaagaactcaataaacttccaaaaagaggaataaaaaaactagatgtaataagtcctagtttcgttatagataatttagaaactttagaagaaatcaatatagaaggtcgtcataatttcttagccgctg

SEQ ID NO: 288723 - DNA, 411 bp, Unknown
  Bacterial polypeptide expressing nucleotide sequence isolated from the Sargasso Sea
ggcaggtagagcaaactgttgagggcgtaatgtcaaaattaacgaatgaaaatccagatcatataataagttatcaaagtcgagtgggacctcttaaatggattgggccatctacggatgaaatgattataaaatattctaaagaaaaaaaagggattgttatagttcccgtagcctttgtttctgaacactcagaaaccttagtagaattagatattgaatataaaaaattagcagaaaaaaatggttgcagtttttacaaaagagtaccagcattagggatagaggagaattttattaaagggcttgcagaactagttttgaaacaagaaacaagaggaaactttgtttcatctttaatgtgtcctgataaatataaaaaatgtccgtgcttggcgtcaaaaagctaaa

SEQ ID NO: 288724 - DNA, 304 bp, Unknown
  Bacterial polypeptide expressing nucleotide sequence isolated from the Sargasso Sea
atggtaaaatacataggtgaaaaagactacaagcatggaagtaaagaaaaaattggagttttaattactaatttaggcactccagatgctccaaatagaaaagaattaaaagtttatcttaatcaatttttatccgatccaagagtaattgaattacccaaaattctatggcaaattttattgaagcttgtaattttacaaattagaccatcaagatccgcagaagcatataagcaaatttggactgaaaatggttctccacttctagatatagctaataagcaattaaataaaatccaatcat

SEQ ID NO: 288725 - DNA, 277 bp, Unknown
  Bacterial polypeptide expressing nucleotide sequence isolated from the Sargasso Sea
aatggagaatcaccctaaaataaaatatgggaagactggagttttaataattaatttaggaaccccagattctacaaactggttagatgttagaaaatatttaaaagagtttctatcagacagaagagtaatcgaggtaaatccaataatttggcaagttatacttaatctttttattctcaattttaggccatcaaaaagcgccaaggcttacaaagaaatatggatgaaagaagaaaatatatctccattactgtattacactaaaaaacaagct

SEQ ID NO: 288726 - DNA, 439 bp, Unknown
  Bacterial polypeptide expressing nucleotide sequence isolated from the Sargasso Sea
aaaatctccgaaattagctggaaaccagacttaatagtagcttcgtaccatggaataccaaaaaagtattttgaaaagggagatccatatcaatgctactgtcaaaaaacctcaaggcttttaaaagaaagctttaacaaagacattccaattaaaacaacttttcaatcaagatttggcccccaacagtggttacagccttatactgataaaactttcgaaagccttcccaaagacggtgttaaaaatatattagttatttgtccaggtttctcatctgattgtgtagaaactttagaagaaattctaattcaaggcaaagaaagctttttaaaatcaggaggtaaaaattttgatcttgttccttgtttaaacgataacgatgaccacatcgcactttttagagaattaattaatagatatattccaaaaaaatgaa

SEQ ID NO: 288727 - DNA, 496 bp, Unknown
  Bacterial polypeptide expressing nucleotide sequence isolated from the Sargasso Sea
aataaaccacatcaaagacaagaaagtaagagttctgttttccgctcacagtttacctgtatcaataattaaaaaaggtgatccatatcagtggcaagtggagcaaacagtaaaggcggtcatacaaggcattcatggttatgaagatcatgtcttggcttaccaaagtaaagttaccccagttaaatggcttgaaccaacaacaccaagtgaaattgaaaatgcaattagcgaagatagagcgctggttattgttccaattgcgtttgtctcggaccactctgaaacgcttgttgaattagatatcgaataccaagaacttgcaagcgaactaggctgtaagcattattatagatctgaatctttaaatattgatcaaacatttatagaaagcttatctgaaatagttagtgagtcagagaaagttgagagcggaaatatcaggcaaaagatatgtccagcaacgtttaaacaatgtgatcaagaattaagatga

SEQ ID NO: 288728 - DNA, 948 bp, Unknown
  Bacterial polypeptide expressing nucleotide sequence isolated from the Sargasso Sea
aattttatttaatttaggtggtcctgataaattagatagtgttgaacctcttttatttaatttgttttatgatccagcaataataaatttacctaaattatttagatatcctctggcaaaaataatttctaaaagaagaacaccaatagcaaaaaaaatttataaagaactaggtggatcttctcctattttaaagttaactaggaagcaatctgatgcactagaaaaaaaattaaatcaaaataaaaataaagatttatataaatgttttgttgtaatgagatgctggcatccaagagcggaaaatgtaattagtgaaataaaactttataatcctgatgaggtaatattaatgcctctttatcctcaattttctgcatctacatctggatcttcaataaatgaatggaaagacatatgtatgaaatataattataaagtaaaaacaagcacaatatgctgctaccctacagacgaaaattttattaatgcacatattgaaaatattaaaaataaaataggaaaaaatataaatgaaaagttaattttttctgctcatggacttccagaaaaaaacattaaaaatggtgacccttatcaatggcaaatcgaacaaactgttaaaagtatagtaaaaaaaatgaatattacagatcttgattatattcttagctatcaaagtagagtaggtcctttaaaatggattggaccttccactgatgatataattattgaaaattctaaattaggaaaaaatattataatagtgccaatagcttttgtatcagaacactccgaaacattagtcgaactagatattgaatataaaaaaatagcagaagaaaatggttgtaagagttattccagggtgcctgcaattggaataaatgaaaattatataaaaggtatgtcagatttaaattttaataaagaaatttataaatttaa

SEQ ID NO: 288729 - DNA, 445 bp, Unknown
  Bacterial polypeptide expressing nucleotide sequence isolated from the Sargasso Sea
atgaagattaaaaaaggactattacttataaaccttgggactcctgatgatccaggctatttatctgtctttaaatacttaagacagttcttaatggatccaaaagtaattactgttccatactttcttagatttattctagtttcactaatcatcgttcctttcagagctttcagttctgggaggatttacaaaaaaatatggagtgaaaatggttctcctctcatagtaaatacatctgctttagctaaaaaagttagcaataaagttccccacatggaggttgaatttgcgatgagatatcaatctccatctatcgaagataagttaaaaaagttaatctcccagaatcttgatgaaattataatacttcccttatttcctcaatatagcactgcaacaactggatcagtttttgacgaaatctctagagttctaaaaaaac

SEQ ID NO: 288730 - DNA, 817 bp, Unknown
  Bacterial polypeptide expressing nucleotide sequence isolated from the Sargasso Sea
tcagagcctactatatctggtttacgatcgtaccttaaagaatttttatctgatccagatgttatagatacaaacccacttttgcgttggattattgtcaatttatttgttgttccatttagaccccaaaaagtattaccacaatatcaaagtgtttggatggatgaaggatctccattgcttgtttatactaaaaattttgtaaaaaaaatcacaaaaataaacccagatattatatttgatataggtatgcgttatggtaaaccatcgatagaacaagggctcagaaatttacaagaagctaaagtggaaaaaattgtattatgccctatgttccctcaatatgcacaagcaacttcaggatcttgtataaaaaaagcaattcaaattattgaagatcaaaatataaatattccttacgaaattaattcatatttttatgacgaagattttataattgattgtttagcagaaacaattgaaaaatctgatgtttatcaagaaagtgaatttttgttatttagttttcatggtttgcctgagcggcaagttaaaaaaatggatatctcaaagagtcactgtttaattcaggataattgttgtgaaattgaatgtgaatttaataaaatgtgttacaaacatcattgttatgaaaccgttaaaaatgtaatgaataaagtcagtataaaaaaaccttttgatattgctttccaaagtagattcggatttgatccatggattaaaccaaacactacagatataattgaagcattacctggtaagggaattaaaaatatttcagtgatttgtccagctt

SEQ ID NO: 288731 - DNA, 809 bp, Unknown
  Bacterial polypeptide expressing nucleotide sequence isolated from the Sargasso Sea
tatgattatgaaagcaatccttctagtaaatttaggttcgccaaaagatcttaatttaagttctattaaagagtatttaatggagttcttaacagatgataatgttgtcgatcttccgaaaattatccaaaaaattttagtaaaaaatattattgttccttttagatccaagaaaactcaagaggcatatagctctatatggaaaaaagatggatcacccttaataataaatacaaattctttagcaaaaaaactatcagagaaaaccaattattctgttgaaatagctatgaggtatcaatatccaactatcaatgaggcaatagaaaaattaattaataaaggatgtaaagaaattattgccgttcctctttatccgcattatgcacaatcaacaatattgacaacagagaataaaataaaagagatatcaacatctttggaaggagactttaagttatcatttataaagccattttataatcaagaaggttatatcaattcattgacatctttaattaaagaaaacttaccatctgagtttgatcatttgctttttagctatcatggtataccagaaagacatgttagaaataccgatccatcaaaaaaacattgtctcaaagtgagagattgctgcaatattaaagctgatgcgcatcaattttgctataggcaccaggttttagaaactacaaaactttgtgcagaaaggttaaatatagaaaaagaaaaatggagtatttcttttcagtcaagaattggaccgggatggcttaaaccttttactgataagattttagatgaat

SEQ ID NO: 288732 - DNA, 604 bp, Unknown
  Bacterial polypeptide expressing nucleotide sequence isolated from the Sargasso Sea
aaccagctggtttgatatcagaaagtatttgagagagtttctttcatacagaagagtgatcgaagtaaatcctataatttggcaaataattttaaatttatttattttaacttttaggccatctaaaactgctaaagcatataaggaaatttggatgaaaaaagaaaatatgtctccacttctttactacacaaagcaacaaagtaaaaaaacttctcaactactttacaaagaaaatactgttgtagattttgcaatgagatacggcaatccaagtataaaaagtaaaatagaaaaacttcatgacgtgggttgtgaaaatttagttatacttcctctttacccgcaatatgctgcagcaacaacagctacagtttgtgatgaagtatatagaactttaatgaaaatgagatggcagccttctctaaaaataattccacattatgaatctaatcctctttacattgatgcattggttaattcgattaataaaaaaattaatgaaattaattggaaaccagacctaattatagcttcataccacgggataccaaaaaaatattttgataaaggagatccgtatcattgctattgtcataaaaca

SEQ ID NO: 288733 - DNA, 760 bp, Unknown
  Bacterial polypeptide expressing nucleotide sequence isolated from the Sargasso Sea
tatgagtaaatcattattattaataaatttaggaacacctgataaacctacttattttagtgtttttaaataccttagacagttcttgatggatggaagggtcataaatatcaatcctatattaagatatattttggttaattttataatctgtccaactcgttcattctcatctacaaagatctacaaagaggtatgggattcaaaaacaggctcaccattacttcacaatacaaaagaacttacaaaaaaaattaaatctaggttgcatgagtatgatgtacattttgcaatgcgataccaaaatccatctattgaaaaagtaatagatgatattttgaaaaaaaatcctgatgagctaataattcttccgctttttcctcattatgctgctgctacaactggttcagtgtatgaagaagtttcgagaatactatcaaagcgctgggttgtgcccaaaataaaatttataaatcaattttatgataatgataaatttattgatgcatggattgacaaggcatcaaagtttcaaatagatacttatgacaagattatatttagttaccacggaatcccaaatagtcatgtagacaatgtatatccagattctatgtgtgcagatcataattgtgagatggaagtcactcaagataataagttttgttataaagctacaacatatgaaacaacgaaaatcttagctaaaaagttaaatatacctgaggataaatatatagttacctatcaatctcgttta

SEQ ID NO: 288734 - DNA, 379 bp, Unknown
  Bacterial polypeptide expressing nucleotide sequence isolated from the Sargasso Sea
atgaaattccccaagaaatattttgataaaggagatccgtatcattgttattgtcataaaactaccagactaatatctgaaaatttttcagatattgaaattaagactacctttcaatcaagatttggtccccaagaatggctgcagccttatactgataaaacttttgaaactttgcctaaagaaggtaaaaaaaatattttagttatttgccctggattttcgtctgattgcgtggaaactttggaggaaatatctattcagggcaaagaaagctttattaaatcgggtggtgaaaattttgaagtggttccatgtttaaatgatagtgaagatcatatctttctattaaaacatttagtgtcaaaaaatttgtaac

SEQ ID NO: 288735 - DNA, 658 bp, Unknown
  Bacterial polypeptide expressing nucleotide sequence isolated from the Sargasso Sea
atgaaaggcattcttttaataaatttgggctctcctaaggacttagaatttgaatcaataaaagattacttaaaggagtttttatcggatgatcttgtcatagattatccaaaatttttgcaacaaattctagtgaattggataattgttccttccagatataaaaatactcgagaagcttattcagagatatggactgatcaaggctctcctctaattaatagcaccttaaacttaggtgagaaaataaagtccaaagctgaagttcctgttgaagtctctatgagataccaatatccaagtattgaggagggtttagttaagctgaaaaacaaaggttgctctgacatttttgttgttcctctctatcctcattatgctatgtcgactacgttgactacagaaaatgaagtgaaaaggattgcaagtgaattgaatttagggctcaatttaaaatttattggtgctttctacaataaagaagaatacataaagagtttaagtgctgtgatagctaaaaacagacaagaagatagcgactttctgttattcagctatcacggaattccaaatcgccatctattgaaaacggatccaacaaaaaaacactgtcttaaggttgaaagctgttgtgatgtgcaatcagacgcaacacctt

SEQ ID NO: 288736 - DNA, 488 bp, Unknown
  Bacterial polypeptide expressing nucleotide sequence isolated from the Sargasso Sea
tatgactaaatatattggagaaaataattatgaacatggaagtgtcgaaagaactggaattttattaactaatttaggaacccctgatgagcctaattctaaagctgtaaaaatatatctagcagaatttttgtctgatactcgagtaattgagtttccaaaattgatttggaaagtaatactacatggaattattttacgaatcagaccaaaaagatcggctaaaacttataaaactatttggacagatgaaggttcacccttactcaatatagccaaaaaacaaattgaactaataaaagaaaaatttgaaggtaaatatcctaacactgtttttgctttagggatgagatatggaaacccatcaattgaaagtgctttattggaattgcaaagtaaaaaagtaagacgtctgattatttttcctctttatcctcaatattgtgcagcaacaacagcaagtacatttgatgctgtgacaaatgttt

SEQ ID NO: 288737 - DNA, 550 bp, Unknown
  Bacterial polypeptide expressing nucleotide sequence isolated from the Sargasso Sea
agcttttgatgctatcgccagagaaatgatgaaatggcgttacctaccctttttacattttatcaatacttaccacgacaaccctgactctttcgacgccattgccgcatcaataaaacaagattttgacgctcacggtaaaccgcaaaaattagttatgtcgtatcatggtatgccagagcgtaatttacatcttggcgatccttactactgtttttgcatgaaaaccactcggttagtggcagaaaagctagggttaaatcaagacgattatgttgccaccttccaatcacgttttggtaaagcgaaatggctacaaccttacactgacgccaccataggtagcctgccagaaaaaggtattaccgatatcgctgtcatttgccctgcatttagcgccgattgtttagaaaccctggaagaaatcaaaggcgaaaatcgccatgtatttgaagacgcaggtggaaaaaactttcgttacattgagtgtttaaatgacaacgatgatcacatcaacatgatggcaaacctggttaagccttatttataa

SEQ ID NO: 288738 - DNA, 475 bp, Unknown
  Bacterial polypeptide expressing nucleotide sequence isolated from the Sargasso Sea
tatgactaaatatattggagaaaataattatgaacatggaagtgtcgaaagaactggaattttattaactaatttaggaacccctgatgaacctaattctaaagctgtaaaaatatatctagcagaatttttgtctgatactcgagtaattgagtttccaaaatttatttggaaaatcatactacatggaattattttacgaattagaccaaaaagatcggctaaaacttataaaactatttggacagatgaaggttcacccttactaaatatagctaaaaaacaaattgaactagtaaaagaaaaatttgaaggcaaataccataacactgtttttgctttagggatgagatatggaaacccatcaattgaaagtgctttattggaactgcaaagtaaaaaagtaagacgtttgattatttttcctctttatcctcaatattgtgcagcaacaacagcaagtacatttgatgca

SEQ ID NO: 288739 - DNA, 373 bp, Unknown
  Bacterial polypeptide expressing nucleotide sequence isolated from the Sargasso Sea
tatgaaatactttggtgaaaaaaattatgagcatggaagtaaggataaaactggagttttaattacaaacttaggaactcctgatgcaccagatgcaaaatctctaaaagtatatttaaatcaatttctttcagatccaagagtaatagaaatacctaagtttttatggcaaattattcttaaaggcataatacttcaagtaagaccaagaaaatctgctgctaattataaaaaaatttggaccaataacggctctccacttttagacatatcaaataaacaactaagtggaattaaaaaaatactgtcatcaaaataccctaatattgaatttgccttgggtatgcgttacggcaatccttcaattgataac

SEQ ID NO: 288740 - DNA, 535 bp, Unknown
  Bacterial polypeptide expressing nucleotide sequence isolated from the Sargasso Sea
aagttaatcaaagctcatcaaaaactgatccaagataaaataaatcatataaaagacaagaaagtaagagtgctgttttccgcacacagtttacctgtatcaataattaaaaaaggcgatccttatcagtggcaagtggagcaaaccgttaaggcggttatacagggaattcacggctatgaagatcatgtgttggcctatcaaagtaaagttacgccagttaaatggcttgaaccaacaacaccaagtgaaattgaaaatgcaattagtgaagatagagcgcttgttattgttccaattgcgtttgtatcggatcactctgaaacacttgttgaattagatatcgagtaccaagaacttgcaagcgaactaggctgtaagcattattatagatctgagtctttaaacattgatcaaacatttatagagagcttatctgaaatagttagtgaatcagaaaaaattgaaagcggaaatatcaggcaaaagatatgtccagcaacgtttaaacaatgtgatcaagaattaagatgaa

SEQ ID NO: 288741 - DNA, 328 bp, Unknown
  Bacterial polypeptide expressing nucleotide sequence isolated from the Sargasso Sea
atggaaaattcacatccaaaagtaaagtttggcaagacaggagtattattaattaacctaggtactccagactctactggctggtgggatattagaaaatatttaaaggaatttttatccgatagaagagtaattgaagttaatccagttgtttggaaaataattcttaacttatttattttaactttcagaccctcaaaaacttcgaaagcgtataaaaaaatatggatgaaagaaaaaaatatgtcacctctaagatactacacggaaatgcaaacaataaaattaagtaaaaaaatcggaaataaagatgtaatagttgattacg

SEQ ID NO: 288742 - DNA, 700 bp, Unknown
  Bacterial polypeptide expressing nucleotide sequence isolated from the Sargasso Sea
atgcctgaatacgaagcgatcctaatactttcatttggcggaccagaatcgaaagaagatgttatcccttttctgaaaaatgtcaccgctggaaaaaatatcccccttgaacgattacaggaagtcgcagctcaatatgacctatttgatggggttagcccgataaaccagcagaatcgagactttattagggtccttgaagaagaattaaggaagcatgatttaaatcagcccatctatttcggaaatcgtaactgggagccttttcttcaagataccgtcaagcaaattgtcgatgatggccaccggaaggttctaactttcgttaccagtgcgtttggctcatactcaggctgccgccaataccaagaagatatcgaccgagcaatccagaacattcaagttgagaatctcacaattgataaaatcagattgttctggaatcacccaaaatttctttcagcagttgcaagccgaatcgagacaacaatgaaagacgttcctcacgccaatcgccctcatacaaagcttcttttcactgcccattccataccgaaagcttgggaaaagacaagcccatacacttcccaactgctagccatctccaatgagataagccaaagggttgcccctgacctccaatgggacctggtgtatcaaagcagaagcggccctccagcagtcccatggctggaaccgg

SEQ ID NO: 288743 - DNA, 340 bp, Unknown
  Bacterial polypeptide expressing nucleotide sequence isolated from the Sargasso Sea
atgatattaaaaccaactgatcatcctaaaacccatagtaaaaagaatataggagtactcttagttaatttagggacacctgaaaatactgaaactaaatctattagaatttatttgaaagaatttttgtctgatcgacgtgtaatcgacgttcctaaaattctttggtggttaatacttaatttaattattcttaatacaagaccgaaaaaaacagctgcagcatataaaaaaatttggttaaaaaatgatcctgatgggagcccactgagaaagattactaggttacagtctgaaaaattacaaaagaaaattaataaaaaaaaatgtaatcgttgat

SEQ ID NO: 288744 - DNA, 613 bp, Unknown
  Bacterial polypeptide expressing nucleotide sequence isolated from the Sargasso Sea
tacgaatggaatgatttatgtaaaaaagaaaattacaaagttaaaactaaaactatttgttgctatcccactgaaagtaattttgtaaaatcccatgcaaatcttattaaaaaaactattaaaaatttagataataaaaattttaaattacttttctcagcgcacggtctaccagaaagtaaaattaaaaaaggtgatccttatcagtggcaagtagaaaaaacagttgaaagtataatgtctgagttgattaacgaaaatttggattttttaataagttatcaaagccgtgtgggaccgttaaaatggattggaccatctactgatgagataattatcaaatattctagagaaaaaaaaggaattgttatagttcctgtggcttttgtttcagaacactcagaaacactagtggaattagatattgaatataaaaaattagcagaaaaaaatggttgcagtttctataaaagagtaccagcattaggcatagaggaaaattttattaaaggacttacagaattagttctacaaaaagaaaaaaaaaataattttgtatcatctgtgacttgccctaataaatatgtaaaatgtccatgtttagaactttaaa

SEQ ID NO: 288745 - DNA, 792 bp, Unknown
  Bacterial polypeptide expressing nucleotide sequence isolated from the Sargasso Sea
catgaaaggcattcttttaataaatttgggctctcctaaggacttagaatttgaatcaatcaaagattatttaaaagagtttttatcagatgatcttgtcatcgattacccgaaatttttacagcaaattcttgtgaattggataattgttccttccaggtataaaaagactcgagaagcttattcagagatatggactgatcaaggctcccctcttataaatagcactttacatttaggagaaaaaataagctctaaggcaggagttcctgttgaagtctctatgagataccaatatccaagtattgaagagggtttgcttaagctgaaaaataaaggttgctctgacatttttgttgttcctctatacccacattatgcaatgtcgactacattgactacagaaaatgaagtgaaaagaatagcaagtgaactgaatttagacctcaatttaagatttattggtactttctacgataaggaagaatacataaaaagtttaagtaccgtgatagctaagaacagacaagaagaaagcgactttcttttatttagctatcatggaattccaaatcgccatcttttgaaaacggatccgacaaaaaatcactgtcttaaggttgaaaattgttgtgatgttcaatcagatgcaacacctttctgttataaagctcaagttttagaaacatctaagttgtgtgtaaacaacttgaatttaaaagatcatgagtggggagtttccttccagtctcgtataggtccaggctggatagagccttttacggataaaga

SEQ ID NO: 288746 - DNA, 157 bp, Unknown
  Bacterial polypeptide expressing nucleotide sequence isolated from the Sargasso Sea
aatggacagtaatcatccccaagtaaactttggaaaaactggtgttttattaattaaccttggaacaccagattctacagggtggtgggatataagaaaatatttaaatgaatttttatcagacagacgggttattgaagtaaatccttttttttgg

SEQ ID NO: 288747 - DNA, 277 bp, Unknown
  Bacterial polypeptide expressing nucleotide sequence isolated from the Sargasso Sea
aaaaatagtgccacatatgagtcgggatccattatatataaaagcgctcgtaaattctttgaataaaaaaataaaagaaataaattggaagccagatttgatattagcttcttatcatggaatacctcaaaaatattttgataagggcgatccttatcattgctattgtcacaagaccacgagactaatatcagaaaagtttacttcaattgaaattaagacaacattccaatctagatttggtcctgaaaaatggcttcaacccttacacagataa

SEQ ID NO: 288748 - DNA, 1000 bp, Unknown
  Bacterial polypeptide expressing nucleotide sequence isolated from the Sargasso Sea
atgagtaaatcactattattaattaatttaggaacacctgataaacctacttactttagtgtttttaaataccttagacaattcttgatggatggaagggtcataaatatcaatcctatattaagatatattttggttaattttataatctgtccaactcgttcattctcatctgcaaagatttacaaagaggtatgggattcaaaaacaggctcaccattacttcacaatacaaaagaacttacaaaaaaaattaaatctaggttgcctgagtatgatgtacattttgctatgcgatatcaaaatccatctattgaaaaagtaatagatgatattttgaaaaaaaatcctgatgaactaataattcttccgctttttcctcattatgctgctgctacaactggatcagtgtatgaagaagtttcgagaatactatctaagcgctgggttgtacccaaaataaaatttataaatcaattttatgataataataaatttattgatgcatggattgataaggcatcaaagtttcaaatagatacgtatgacaagattatatttagttaccacggaatcccaaatagtcatgtagacaatgtatatccagattctatgtgtgcagatcataattgtgagatggaagtcactcaagataataagttttgttacaaagctacaacatacgaaacaactaagatcttagctaacaagttaaatatacctgaggataaatatatagttacctatcaatctcgtttaacaaataaatggttaagcccatttactgatgaggtgttagagtcactcccaaaagatgataaaaaaaatgttttagtattttcacctgcctttacagctgattgtcttgaaacaatcattgagatcggtgatgaatataaagaattgtttgaagaatctggtggagaaaatttagattatgttgagtcactaaattactcagatttatgggcagatgctattattgatattattaaatagg

SEQ ID NO: 288749 - DNA, 698 bp, Unknown
  Bacterial polypeptide expressing nucleotide sequence isolated from the Sargasso Sea
tatgaaaaaagcattacttctaattaatttaggtactcctgataagccttcatactttagtgtttttaggtatcttagacagtttttaatggatggccgagtaattaatataaatccaattttaagattttttcttgttaacttcataatttgtccaacacgatcattttcatcaacaaagatctataaaaaagtttgggatgataataatggatccccattgctctataacactgcaaaattgtccaaaaaagtagctaagaaattgcctgaatatgacgtgcattttgcaatgagatatcaaaatccatcaattgagatagcaataaaaaaaattatggaaaaaaatccagatgaaatagtcattcttcctttatttccacattatgcctcagcaacaactggttctgtttatgaagaagtttcaagaattttgtcaaagcaatgggtggtaccaaaaattaatttcattaatcagttttatgataatgagaaatttatagatgcatggattgagaaagcttcaaaatttaatgttcaatcttatgacaaaataatatttagttatcatgggattcctaatagccatgttgataatgtatatcaagattctgtatgtagtgatcataattgtgaagattcaataacagaaatgaataaattttgctataaagcaacaacctacgaaacaacaaaaa

SEQ ID NO: 288750 - DNA, 1027 bp, Unknown
  Bacterial polypeptide expressing nucleotide sequence isolated from the Sargasso Sea
aatgaaaagcaaaataggcgttttattacttcaattaggcactcctgatgatccatccgtatcatctgtacgtaaatatttaaaacagtttttaaacgatcccagggttattgatattccttacttgttgcgaaaaatacttgtaaatcttataattgttccatttagagctcccaaatcagcaaaaatttataaagaattatgggattatggaaatggtgtttcaccacttattcatcattcagaggctctacaaaatgaacttcaaaataggttttcaaatgaaaatgttcatgtgcatcttgccatgagatacaaaaacccatcaatgccttctgttttaaatcgaatgaaaaatgatggtttcgatcatattataattcttcctcttttccctcaatatgccagtgcatcatctggctctgcaattgagcatgcaatgcagttgatttctaaatggtgggtaatacctcaattaagtgttatcaatcaattttataccaatgagggttatctcgattcaataattgaaagagccaaagtaaatgatttgtcatcatttgaccatattgttttttcatatcatggattgcctgaaagacaggttgataaagtgtatgaagcagatgatctttgtggagatcaaccttgtgaaactgaaataaacgacaagaataaactttgctacaaagctacttgttatgctacaactaggctgctagcagataaattaaatttggataatgaccattacacagtagcttttcagtctcgattggataaaaaatggttgactcctttttctgatgaaattgttgctgatcttgcaaagaatggagccaaaagaattttagtttttagtcctgcatttgttgctgattgtcttgaaacaattattgaaataggtgatgaatatcaagagatttttgaagaaaatggaggtgaagaggttgtgcttgttgaaagcaacaatacccatccgttatttatagatggtatggaagccttaataagatccagattctaa

SEQ ID NO: 288751 - DNA, 1000 bp, Unknown
  Bacterial polypeptide expressing nucleotide sequence isolated from the Sargasso Sea
tatgagtaaagcattattattagtaaatctaggaactccagataagccatcatacttcagtgtttataaatacttaagacaatttcttatggatggcagagtattagatattaatcccgttctaagatattttttagttaactttataatatgtccaactagatcatactcatcagcaaaaagttatcaagaggtttgggatgacgaaaatggctcacctttattatataacactgaaaaattatcagaaaaaattcaaaaaaaactgtcaaactatgatgtttattttgctatgagatatcaaaatccttccattaaaaatgttttagataaaattttagaaaaaaatcctgatgaactaattatattacctcttttccctcattatgcagcagctacaacaggctcagtttacgaggagatatcaagacttctatcaaaaaaatgggttgtccctaaagttaaattcataaatcagttttacgataatgataagtttttagatgcctgggtagataaagcttcaaaatttgatgttaattcctatgataaagtaatttttagctatcatggcgtgccaatcagtcacgttgataatgtatatcctaattctctttgtaaagataatgattgtgaaaataaaataacaaatgataataagttttgttataaagcaacaacatatgaaaccacaaaacttttggcatcaagactcaatatcccagaagaaaattacattgttacatatcagtctagacttttcggcaaatggctaaccccatttacagacgatgtattaaaattatctccaaaaaatggagatagtaacattttagtattttcaccagcatttacagcagactgccttgaaacaattatagaaataggtgatgaatataaagagctttttcaaaagtttggaggagaaaatttggattatgttgagtctctaaattattcagatttatgggcagatgctatcattgatattattaaataa

SEQ ID NO: 288752 - DNA, 520 bp, Unknown
  Bacterial polypeptide expressing nucleotide sequence isolated from the Sargasso Sea
atgattgataataatcacccacccattaagtttggcaaaacaggagtcctcataattaatttaggcactcccgactcaactagttggtttgatataagaaagtatttaaaagaatttctttctgataagagagttattgagttaaatcctataatctggcaattaatcttaaatctttttattcttaatctaagaccttctaaaactgcaaaagcctataaagaaatatggatgaaagaccaaaatatgtctcctcttctttactatacaaagcgtcaaagcgaagaaatttcaaagtccttttcaaataaaaatgttattattgatttcgccatgagatatggaaatcctagcatcaagagtaagatttttaaattgcacgagattggatgtgaaaacctagttatacttccactttatccacaatatgcagcagccacaaccgcaactgtttgtgatgaagtatatagaaccttaatgaaaatgaggtggcaaccctccttaaagattatacctcact

SEQ ID NO: 288753 - DNA, 361 bp, Unknown
  Bacterial polypeptide expressing nucleotide sequence isolated from the Sargasso Sea
tatcgattatatttaagttatcaaagcagagtcgggcctttaaaatggattggtccatctacagaagatgtaattgtagaaaattcaaaaatagggaagcatttagttattgtgccaattgcctttgtatccgaacactccgaaacattggtggaattagacattgaatatgcaaaacttgcaaaaaaaaatggatgcgaaaattatactagagtggaagctttaggaattaataaaaattttattgaaagtttatctgatttaattttacataaagataattacaagtttaaagaaaatctctatgcacctaaaaataggtgtccctcaaattttactaaatgtccttgtctcaattaat

SEQ ID NO: 288754 - DNA, 535 bp, Unknown
  Bacterial polypeptide expressing nucleotide sequence isolated from the Sargasso Sea
atggaaatacttttcataaaagattttcacgataatcaattatatattcaatcctgtaaatcaaaaattgagcaatttcaggagattaacggtaaacctgaaaagcttgtcttatccttccatggaatcccagaatcctatatcggccatgacgagccttatagagatcagtgcattcatacttctaagttgattgcagccgcgttagatattaaagaagataaatacgaagttgcatttcaatctagatttggaaaatctgagtggataaagccttatttagccaacaggctagagtctctgcctagtgagggagtgaggaatatacaagtattctgtcctggatttgtttctgattgtcttgaaactattgaagagataggcgaggagtctaaagagcttttcatcgagtcaggcggtgattcattcaaccatataccatgtttaaatgattcagaattatttatagatatgttgaaaaatcttttagaaaaccatcaatctttgaatacaaactataaaactatactttaaa

SEQ ID NO: 288755 - DNA, 172 bp, Unknown
  Bacterial polypeptide expressing nucleotide sequence isolated from the Sargasso Sea
atgattgaaaaaaatcacccacctataaaatttggcaacactggtgtgcttataattaatttaggcacacccgattctaccaattggtttgatataagaaaatatttaaaagagtttctttctgacagaagagttattgatgtaaatccatttttttggcaattattttgaa

SEQ ID NO: 288756 - DNA, 236 bp, Unknown
  Bacterial polypeptide expressing nucleotide sequence isolated from the Sargasso Sea
cactgacgatgttatagaggattgtgttaaagatggtataaaaaaaattgcagtaatctcacctggatttagtgtggattgccttgaaacgttagaggaaattgaaattcaatataaagaattattccttgagcttggaggaacagactttgcatacataccctgccttaatgattctaatgatcacatatctttaatagcggatctgattgattctgaaactaaaggatggtaag

SEQ ID NO: 288757 - DNA, 1096 bp, Unknown
  Bacterial polypeptide expressing nucleotide sequence isolated from the Sargasso Sea
atggttgcatctaaaaaaaatggatacttaatacttaacactggtactcctgacgaacctagtatacccgcattgagaagatatctaaaagaattcttatctgatcctgatatgcttgattatccttcaactagacctgaagaattttctaaaggattcgataagataaaaaatcgttttgcttctgttcttcgttggatgatagttaatctaattgtcgttccatttagaccagcaaaaattcagcataaatacaaaggaatttggacagaagaaggatccccactattagtaaatacagtcaaatttacagagaaattgaaaaaatttactaatggaaatattgaaataggtatgagatatggcaatccttcaatagaaagtgctataaaaaaattaaaagataatggaacagaaaaattatttctagtttctatgtttcctcaatatgctgaagcaacttctggatctacatttactgaaattgatcgagttcttaaagcagaaaattacaatccagaattagtaaaagtagagcactattataatgaagatttttatcttaaatcactagctaaaagtattatagattctgaagaatataaaaatagtgaatatttactatttagtttccacggacttccagttaggcatcttacaaaatcagatatctctcagtctcattgtcaaaaaatagaaaattgctgtgaaaaagttagtgaaaataatgaattctgttataaatctcattgcgtaaaaacaattatgaaacttgcagatattatagatcctgataaacctttcaaggtttgttatcaaagtacttttggtccagaacaatggattcaaccaaacatagtggatgttctagaagacttagctgaaaaaggtataaagaacgtttctgttgcttgtccatcttttactgcagattgtcttgaaacattagaagaaattgcagtagagaatcacgaagattttgaaaaaaatggtggagaatcagttaagttgattccaagtttgaatgataatgatgattgggttaaagggtttgctaattatcttcatgataaagaatttgaatctacaaaatagt

SEQ ID NO: 288758 - DNA, 301 bp, Unknown
  Bacterial polypeptide expressing nucleotide sequence isolated from the Sargasso Sea
atgaaaaaagcattactattggtaaatttaggaacgcctgataagcccacgtatttcagtgtctttagatacctaagacaatttttaatggacggccgtgtaataaatataaatccattcttaagatttattttagttaatttcattatttgtcctacaagatcattttcatcaactaaggtatataaagaagtatgggatgaaaatacaggatcacctttgcttcataatacaaaaaaattatccgaaaaattaactagcaaacttcaagaatatgatgtttattatgcaatgcgatatc

SEQ ID NO: 288759 - DNA, 229 bp, Unknown
  Bacterial polypeptide expressing nucleotide sequence isolated from the Sargasso Sea
catgaaaacaggcttactgctgatcaatctcggcaccccggacagtccaagcacggcagatgtgaggagttatctccgtgagtttctttcagatccgagagtgattgatttaccgtttctcggaagatggttgttgttgaacctaatcatccttcctttccgcccccgtcgttcggcaaaggcttacaaatcaatctggaccggaggaaggttctcccctaaaagttga

SEQ ID NO: 288760 - DNA, 152 bp, Unknown
  Bacterial polypeptide expressing nucleotide sequence isolated from the Sargasso Sea
aatggacaaaaatcacccaaaggtaaaatttggtaaagtaggaattttactaattaatttaggaaccccagattctacaagttggtgggatattagaaaatatttaaaagaatttctttcggacagaagagtaatagaggtaaatcctattg

SEQ ID NO: 288761 - DNA, 1015 bp, Unknown
  Bacterial polypeptide expressing nucleotide sequence isolated from the Sargasso Sea
tatgcagaaaaatattcttttaatcaaccttggctccccaaaaactttacagctaaaagatgttagagcttacctagctgaattcttatccgataaatttgttattgatttgcccaagctgttgcagcagattattgttcgattaattatacttccatttagatcccctaaaacaaggaaagcatataaggctatatggaattcagaaggatcgcctttgatccaaaatacaaatcggatagcccaatcactaattaaacagactgggtggaatgttaaggtggcaatgcgatatcaagagccatcaattaaagattcaattttatcattcaagaataaacagctgaatgatgttattattattccactttatccgcataacgccatgtctactactcattccactaaagtagaggttgatagaataataaaaaaatattatccagatttacgttattcaattataaagcccttttttgaccatccgaaatatataaatgctttatcagaacaattaaagcctcatatttcaggtaaaatggataaactaatctttagctaccatggcttacccgaaaggcatattagaaagtcagataaaagcgaaatacattgccttcaatcatcgctatgttgtgagattgattgtgatgcagcaaaacattgctatagatccaatacgcttaatacttctaggctagtagctaaagaattgaatcttgatgaagaacaatggatgagcagttttcaatctcgtgttactattattgatcgtaaatggttaaagccgttcaccgatattgaattgaaagattttccattgaaaggaataaaaaatattgtaattatatgcccttcatttgttgctgactgtctcgagacattggaagaaatagatttgagagcacgggaaactttcatgaaggccgggggtaaaaattttatttatatcccctgtttaaataatgataaaaattttatcaatttacttcagcaattgatttctgaaatttaa

SEQ ID NO: 288762 - DNA, 1000 bp, Unknown
  Bacterial polypeptide expressing nucleotide sequence isolated from the Sargasso Sea
atgaagagagcattattaatagttaatttaggcacacctaataagcccacatattttagtgtgtttaaatacctaagacagtttttaatggatagaagggtcattaatattaatccaatactaagattttttcttgttaatttaataatttgtccttcaagatcattttcatcaacaaaaatatacaaaaaagtttggaataaagaaactggctcaccattacttcataacaccaaaaaattaacacaaaaaattcaatctaagttacctgaatatactgttgaatatgccatgagatatcagaatccatcaattgaaaaagttttaaataagttactaatacaaaatccagatgagataataatattgcctttatttcctcattatgctgctgctaccacaggatcggtttatgaggaagtttcaagaatactatctaaaaaatgggttgtacctaagatcaaattcattaatcaattttatgataatgataagtttatagatgcatgggttgagaaagctagaaaatttaatattaactcatatgataaaattatttttagttaccacggaatacccaatagtcatgtagataatgtttatgagaactctgtatgtaatgatcatgattgtgaatcaaaaataacagaagataataaattttgttataaagcaacgacatatgaaacaacaaaattaatagcatctaggttaaatataaatccagaaaattatttagttacctatcaatctagattaacaaataagtggttatccccatttactgatgaggtattacaatcgatggcaaaagaaggaaagaaaaatgttttggttttttcaccatcatttacagcagattgtttagaaacaattatagaaatcggtgatgaatataatgaactatttattagttcaggtggccaaaaactagactacgttgaatcattaaattattcagatttatggtcagatgctattattagtattattaaataaa

SEQ ID NO: 288763 - DNA, 423 bp, Unknown
  Bacterial polypeptide expressing nucleotide sequence isolated from the Sargasso Sea
catgagttttcttggagagcaaaattttgaacatgagtcttctgagaaaattggagtattgttgtgcaatttaggaactccagatagttttcaaacaagcgatgtaagaaaattcttaaaagaatttttatcagatggaagagtagtagaaattccaaaattcgtttggtggtttattttaaatgggataattcttatttttcgaccaaaaaaatctgcaaaattatatgaatctgtttggacaaaggaaggctctcctttgatggtttattcagaaaagctagtaaataaactatcgaaggaattaccagataattttgaaataaaattagcgatgagatatagaaatcccagcatagaagaaagtttaatttctttaaagaaaaaaaactgtagaaatttaatcgtattgcctttatttcc

SEQ ID NO: 288764 - DNA, 388 bp, Unknown
  Bacterial polypeptide expressing nucleotide sequence isolated from the Sargasso Sea
atgaaagatcatccgaaagttaattatggaaaaacaggagtgcttttagttaatcttggtacaccggattcaactagttggtgggatgtaagaaaatatttaaaagaatttttatctgataagagagtgatagaagttaatttttttttgtggcaaataatactcaatctttttattttaacatttagaccttcaaaaaccgctaaagcttataaagaaatttggatgaaaaaagaaaatatgtctccattaagatattatacagagatgcagacaaaaaagttaaaagaaaaaatgaaaaatgaaaaaataattatagatcatgcaatgagatatggaaatccaagtataaaaatacaattgaaaatctttcaaaaaatggatgtga

SEQ ID NO: 288765 - DNA, 359 bp, Unknown
  Bacterial polypeptide expressing nucleotide sequence isolated from the Sargasso Sea
gatgcgttatatcaacagccccaactacgaccataagcaaaacgacaaaattggtattttgctgaccaatttaggcactcctgatgagccaactcctaaggcactgaagcgttatctgaagcagtttttatcggacccaagagtggtggaagtaccgcgtttattgtggtggctgattttaaattgtgtgattttgcaattccggccacgtcgctcggccaaagcttatgccactgtttttaccgaacaaggctcgccgctgttgtttaatacccaggcgcaaagtgacgctattgctgcccagctgcagcaacaaggcatgcaaaatgtggtggttgattttgccatgcgttatggca

SEQ ID NO: 288766 - DNA, 297 bp, Unknown
  Bacterial polypeptide expressing nucleotide sequence isolated from the Sargasso Sea
aattaacttcaattaaaattaaaactacatttcagtcaagatttggtccacaagaatggcttcagccatatactgataagactttagaaaatttacccaaagaaggtgtcaaaaacgttcttacgatctgtccaggcttcgcatctgattgtgtggagaccttagaggagatacaaattcaagctaaagaaagctttttaaattctggaggagaaaattttgatatggtcccctgtctaaatgataataacgatcatattattttactaaaatccttaattgaaagaaatatctaat

SEQ ID NO: 288767 - DNA, 106 bp, Unknown
  Bacterial polypeptide expressing nucleotide sequence isolated from the Sargasso Sea
tttgaaaaacaggattattgttgtaaatcttggaactccggacacaactaaatggcttgatataagaaagtatctcaaggaattttttttgacagaagagttatag

SEQ ID NO: 288768 - DNA, 630 bp, Unknown
  Bacterial polypeptide expressing nucleotide sequence isolated from the Sargasso Sea
atgctctaaataatctaataaaccaaggttgcgaagaaataagagtattacctttataccctcaatttactggttcctcatccttaacttctataaataaagttaaagagttaaagaaagagctaaatagcaaaagcatcaactacatctataaagaatccttctacaacgaccaaaattacattaagtatttaacagagagcatttctaggaaactaccagacaatgtagattatttattatttagctttcatggcctcccgaatagacaagatactcaatttgaaccttcttatagtagccaatgcaaggaaacttctaggctagtagctgaaaaattaggattctccgaaaagcagtggggagtgtcttttcaatcaagattaggcccaggctggactaaaccatttacagacaaagttttgtctaacttgcctaacgaaggtaaaaaaaatctagcagttgttagtcctgctttttatgtggacaacctagagacattggaagaattatctatagaaggtaagaagacttttttagactctggaggagaagaatttacctatatagactgcttaaatgattctgattttggagtaaaggttattgcgagtcttttagaagaatgaa

SEQ ID NO: 288769 - DNA, 334 bp, Unknown
  Bacterial polypeptide expressing nucleotide sequence isolated from the Sargasso Sea
atgtttgatacttcaacgccactcgagacaccacagtatgcagaagaagaccatccaaaaattccaaagcaaaagattggtatcttagttgctaatttaggtacgcccgataattatgattattggtcgatgagaagatacttaaatgaatttttatcagatcgaagggtgatcgattattctccatttctgtggcagcctttgctacaactgcttatccttacgtcgcggccttttcggtctggtgccgcttataagtcaatttggaatgaagctgagtcagaaagcccactgatgacaataaccaaagctcaaacagccgcaattaagaaga

SEQ ID NO: 288770 - DNA, 400 bp, Unknown
  Bacterial polypeptide expressing nucleotide sequence isolated from the Sargasso Sea
aatggaaaaacaccccgaaataaaacatggaaagacaggagctctaataattaatttaggaaccccagattctacaaattggttagatattagaaaatatttaaaagagtttttatccgatagaagagtaatcgaagtaaatccaataatctggcaagtaatacttaatgtttttattctcaattttaggccatctaaaaccgcaaaagcttataaggaaatatggatgaaagaagaaaatatttctcctttactgtactacacaaaaaaacaggctgaaaaattatcaaaatctatttcaaatgaaaatctgattatagactttgctatgagatatggaaatccaagcattaaaagtaaaataataaaattgcatgaagaaggttgtgaaaatataata

SEQ ID NO: 288771 - DNA, 513 bp, Unknown
  Bacterial polypeptide expressing nucleotide sequence isolated from the Sargasso Sea
aatgcctaaactgatatctgaaaaaaacttttctcatgggacaccaagttctgttggtattttgctaattaatttaggcacacctgaaaatactaagacatcatcagtcagaaagtatcttaggcaatttttatctgaccccagagtaatagaagttccgaaattgctatggtggtttattctaaatctctttattcttccattcagaccctcaaaatctgctgaggcttacaaagagatatggacagaggaaggttcacctctcctcctctattcggaggaaattaccaaaaaaattcaggaagctttcgatgaacgtaacttcgatattgactttcatattgaacttgcaatgtcatatggccagccctcaataaaaagctcactaaataaattgaggaaaaaaaatgcaaggaggattcttttactgccaatgtatccccaatattccagcacaacgactggctctgtatttgaaaatgtgacaaaagagctttcaaaacagcgatggat

SEQ ID NO: 288772 - DNA, 238 bp, Unknown
  Bacterial polypeptide expressing nucleotide sequence isolated from the Sargasso Sea
aatgattgaagatcatccaaaagtacaatttggtaaaacaggagttttaattattaatcttggtacaccggactcaacaagttggcttgatataagaaaatatttaaaagaatttttatctgatagacgtgttattgaggtaaatccaatattatggcaaattattcttaatttatttattttaaatctaaggccttctaaaacagcaaaagcttataaagagatttggatgaaagat

SEQ ID NO: 288773 - DNA, 619 bp, Unknown
  Bacterial polypeptide expressing nucleotide sequence isolated from the Sargasso Sea
atgccgattaaaactaatgctattccttcagggcatccaaatgttccaacaaaaaaggtaggaattttacttgcaaatttaggtacgccagataattacgactattggtcaatgcgacgctatttatcagagttcttgtcagatagacgtgttattgattactcaccctggctatggcagcctttgttacagttggtaattttatcaattcggccgtcaagatctggcgcagcctataaatcaatttggaataatgaggatgatgaaagccccttgatgaccataacaagaaatcaaaccctaaaaataaaaagcattatggaaaagcaatacggggacaaaattaaagtagatttttgcatgcgttacggaaatccctcaactcaatctaaagtaagagaaatggtccaagcgggatgttcaaaaattttgttttttcctctttatcctcattatgcaggagcaacatcagcgacagcaaatgaccaattttttaaagctttaatgaaagaaacgtggcaaccagccgtgcgagttgtagaaccttactttgaacaacccctatacattgaagccctagcaaaatctgtagaagaagcctatgctgcaaagaaaacca

SEQ ID NO: 288774 - DNA, 163 bp, Unknown
  Bacterial polypeptide expressing nucleotide sequence isolated from the Sargasso Sea
atgaaaaaaactcttcttattgttaacttaggtaccccagataagcccaattactttagtgttttcaaatatctaagacagtttttaatggatggtagagtaataaatgtaaatccaattatcagattttttttagtaaatttaataattgtaccttttagaa

SEQ ID NO: 288775 - DNA, 235 bp, Unknown
  Bacterial polypeptide expressing nucleotide sequence isolated from the Sargasso Sea
atgattgaaaaaaaccacccaccaataaaatatggtaacacaggtgtgctcataatcaatcttggtacacctgattccactaattggtttgatataagaaagtatttaaaagaatttctttctgacagaagagttatcgaggttaacccgttagtttggaaaataattttaaatttgtttattttaaattttagaccctctaaaaccgccaaagctataaagaaatttggataaa

SEQ ID NO: 288776 - DNA, 343 bp, Unknown
  Bacterial polypeptide expressing nucleotide sequence isolated from the Sargasso Sea
atggttaaatatataggtgaaaaagattatgagcatgggagtaaagaaagaattggtgttttaattactaatttagggactccagatgctccaaataaaaaagaactaaaagtttatcttaatcaatttttatcagatccaagagtaatcgaattacctaaaatcttatggcaaattttattgaaattagtaattttgcagataagaccatcaaagtcagcagaagcatacaaacaaatttggactgataagggttctccgcttttagatatcgcaaacagacaactagataaaatccaatcatctttttctttgaaaaatgaaaatatagttttgaagtgga

SEQ ID NO: 288777 - DNA, 816 bp, Unknown
  Bacterial polypeptide expressing nucleotide sequence isolated from the Sargasso Sea
taaaaaaatatgggactgaaaatggttcacctctcattgtaaacacgtctgcattagctgataaagtgagcaaaaaagttcctcacatagaggttgaatttgctatgagatatcaatctccatctatcgaagataaattaaaaaagttaatctcacaaaatcttgatgaaattataatacttcctttatttcctcaatatagtactgcaacaactggatccgtttttgatgaaatttctagagttctaaaaaaacaaagtgttacaccgtctataaagtttataaatcaattttatgaacaagaatcatttatagattcttgggaggataagctgaaatcatttgatgttgataagtatgaccatatcttatttagttatcacggattaccaactaaagcagttgatgatatatatgatgattctctttgtgctgacaacaactgtgaaaacaaaattactaatgagaataaattttgctacaaagccacgtgctatgaaacaactagacttattgcaagtagatttaatcttccgtcagaaaaatatactgtttcatttcaatctaggttaacaaaaaactggattgagccttttacagatgagcttcttgaggattttcctagtaaaggtataaaaaatatacttgttctgtctccggcttttacagccgataatttagaaacattatacgaaatagatgatgaatataaggagttgtttattgaaaatggaggtaaatcattaactatggtaccttcattaaatgattcgtctaaatgggctgattcaatagtaaaaattatagagtcatagg

SEQ ID NO: 288778 - DNA, 253 bp, Unknown
  Bacterial polypeptide expressing nucleotide sequence isolated from the Sargasso Sea
atgaaatcagaccatccaaaagttaattatggcaaaacaggggttttaattataaatcttggtacacctgactccactagttggctggatataaggaaatatttaaaggaatttttatcagatagaagagttatcgaagtaaatcctcttatttggcaagtaattcttaacttatttatacttactttcaggccatcaaaaacagctaaagcttacaaagaaatatggatgaaagataagaacatgtcaccac

SEQ ID NO: 288779 - DNA, 406 bp, Unknown
  Bacterial polypeptide expressing nucleotide sequence isolated from the Sargasso Sea
ttgggagataaaattaaaaatgaaaatataattgtagattatgcaatgcgttatggaagtccaagtataaaagataaaatttatagtttgcaaaaaaaaggttgtgaaaatttaatagttttacccctctatccacaatacgctgcagctacgacagctaccgtttgcgacgaggtttacagatgtttgactcagatgaggtggcaaccaagtttacaaattatacctcattatgaatctgagcctttgtacataaaagcactaacaaaaagtcttgataaaaaaatttcacagttaagttggaaaccagacataatcgtagcatcttatcatggtatcccaaaaaaatattttgaaaaaggtgatccttatcattgttactgccagaaaactacccgcttataaa

SEQ ID NO: 288780 - DNA, 522 bp, Unknown
  Bacterial polypeptide expressing nucleotide sequence isolated from the Sargasso Sea
tatacataaatgccatagcaaataccataaagccttgtctcgaaaaagcttcatttgacaaaattgtctttagttatcatgggattcctaagcgacaagcaaaaaaaactgacgagacaggtgtgcattgcttttcagacagtaaatgttgtgagattgcaggtgatggctcaaaagactgctacagatctcatacaaggattgcctcagacttaacagcaaaaaaactaggcttaagtgatgatcaatgggaagttgcttatcaatctaggttaggtcctggatggcttactcccttcacagacaaaagacttgctgaattaccagaagaaggtaaaaagaatatagctgtgttatgcccatcttttatatcagattgtcttgaaactttagaagagatagatattcgaggaagaaaaacattttttgatgctgggggtaagattatgacatacataccatgccttaatgattcagaggatacaattaatcttttagaaaatttagttaagagtgcctgat

SEQ ID NO: 288781 - DNA, 838 bp, Unknown
  Bacterial polypeptide expressing nucleotide sequence isolated from the Sargasso Sea
caattaattcttaacttatttattttaacatttcgaccttctaaaactgccagggcttataaaaaaatttggatgaaaaaagaaaacatatctccacttctctattacacaaaaaaacaaagtgagaaaacttctcaattattacaaaaagaaaatatcattttagattttgcaatgagatacggtaatccaagtataaaaaaaaagatacataaattaaatgagatgggatgtgaaaatttagtcatccttcctctttatccccaatatgctgcagcaacaacagctacagtttgtgacgaagtatatagaactttaatgaaaatgagatggcaaccttctttaaaaataattccacattatgaatctaatcctctttacattgatgcattggttaattcgataaataaaaaaattaataaaattaattggaaaccagatctaatcatagcctcataccatggtataccaaaaaaatattttgataaaggagatccatatcactgctattgtcacaaaacaacaagacttatttcagaaaagtttacttccattaaaattaaaaccactttccagtcaagatttggtccacaagaatggcttcaaccatacactgataaaactttagaaaatttacccaaagaaggaattaaaaatattctcacaatttgtccaggtttttcatctgattgtgtggaaacgttagaagaaatattaattcaaggcaaagaaagttttataaatgctggaggtataaactttgatatggttccatgtttaaatgataatgatgaccatattattttaataaaatctttaattgaaaaaaatatttgat

SEQ ID NO: 288782 - DNA, 457 bp, Unknown
  Bacterial polypeptide expressing nucleotide sequence isolated from the Sargasso Sea
aatgaaagttgcggtaatattatttaatttaggaggacctgataaactggacaatgtcgagccatttttatttaatctttttaatgatcctgcaattttaaatttaccttcatttataagatatcctattgcaaaactaatctcaaaaaaaagagccccgatagcaaaagatatttataaagaaattggaggatcttctcccattttaaaattgacccaagatcaggccgaaagtttggaaaaatcccttaacagcaatgaaaaagcctttaattataaggtatttattacaatgagatgttggcacccaagagcatccgaaacaatcaagctggttaaggattttaatccatcggaaattattttacttcctttgtacccccagtactctgcagcaacttcaggctcttcaattttggaatggaaagaaattgcaaaaaaaaataatcttaatata

SEQ ID NO: 288783 - DNA, 430 bp, Unknown
  Bacterial polypeptide expressing nucleotide sequence isolated from the Sargasso Sea
aaaagcgacatctcagggaactggtgcaaaaataacaaagagtgctgccatgaattaacaaatgataataaatactgttacagtgcacattgccacgaaacatcaaaattaattgcaaaacgcctgaaacttgatggggaaaaatggtctgtgagttttcagtcccgctttggccgtgaggaatgggttaaaccatacacagagaaacatcttgaagaactagcgcaaaatggcgcaaaacgggtattggttttttgtccttcatttgttgcagactgtcttgagacaactgaggaaataggaatgcaagcagcagaaaatttccaaaaatacggtggtaaagaacttattctagttgattctcttaatgaccatcctgaatggataaaatccttgacttcaattattcgacagcagattcccagctgac

SEQ ID NO: 288784 - DNA, 784 bp, Unknown
  Bacterial polypeptide expressing nucleotide sequence isolated from the Sargasso Sea
agcctataaagaaatatggatgaaagacgaaaatatgtcgccacttctttattatacaaaaaagcaaagtgagaaaacttcaaactcaatacttaaagaaaatattattatagattttgcaatgagatacggaaaccccagtataaaaagaaagatttataaattacatgaaatgggttgtgaaaatttaattatacttcccctttatccacaatatgcggcagccacaacagcgacagtttgtgatgaagtttacagaaccttaatgaaaatgagatggcaaccctctttgaaaataatacctcattatgagtctgatccactttatattgatgcgctcgttaattccattaacaaaaaaataaatgaaataaattggaaaccagatctaatcatagcttcttatcacgggataccaaaaaaatactttgataaaggagatccctatcattgttactgtcacaaaaccacaaggcttatttcggaaaagtttaattcaataaaaattaaaactacattccaatctagatttggtccgcaagaatggcttcaaccatatactgacaagactcttgaaaacctgcccaaagagggaattaaaaatgttcttacaatttgcccaggattttcatcagattgtgttgagactctggaggaaatcttaattcaaggaaaagagagttttattagttcgggaggagaaaattttgatatggttccttgcttaaatgataatgatgatcatatcctcttattaaaatctttaattgaaagaaatatttga

SEQ ID NO: 288785 - DNA, 406 bp, Unknown
  Bacterial polypeptide expressing nucleotide sequence isolated from the Sargasso Sea
atgagaaaggatcacccagaagtcaaatatggaaagaccggagttttgcttgttaatttaggaacaccagattctacaagttggtttgatattagaaaatatttaaaagaatttttatccgatagaagagttatagaggtaaatccaattttgtggcaaattatattaaacctttttatcttaacgtttaggccctcgaagactgcaagagcctataaagaaatatggatgaaaaatgaaaatatgtcacccttaagatattatactcaaatgcagactaaaaaactggctggcaagttaaacgatcataaaataataattgattatgccatgagatatggaaatccaagtattaaaagtaaactaaataagcttcaaggccaaggatgtgaaaatatagtaatct

SEQ ID NO: 288786 - DNA, 748 bp, Unknown
  Bacterial polypeptide expressing nucleotide sequence isolated from the Sargasso Sea
atggttaaatatataggtgaaaaagattatgagcacgggagtaaagaaagaattggtgttttaattactaatttagggactccagatgctccaaataaaaaagaactaaaagtttatcttaatcaatttttatcagatccaagagtaatcgaattacctaaaatcttatggcaaattttattgaagctagtaattttgcagacaagaccatcaaagtcagcagaagcatacaaacaaatttggactgataaaggttctccacttttagatattgcgaacagacaattgaataaaattcaatcatctttttcttcaaaaaatgaaaatatagtttttgaagttggtatgcgttatggcaacccatctattctagatgcattgttaaaacttcaaaaaaaacaagtaagaagattattagtcttacctatgtatccacaatattgtgctgcaacaacaggcagtacatttgatgaggtaactaatgttttgcaaaaatggcgttggatacctgaaatgcgttttatcaatcaatactttgaagaaaaaaattatattgaagctttgtcaaattctataaagtcatattggaaaaaaacccctaaaccacaaaaaattatttttagttatcatggtataccaaaacggtacttgactaatggtgatccgtatcattgcttttgtcttaaaacaacaagactggtcaaagaacatatgggattatctaatgatgagataattactacttttc

SEQ ID NO: 288787 - DNA, 667 bp, Unknown
  Bacterial polypeptide expressing nucleotide sequence isolated from the Sargasso Sea
atgaatacagatcatccggaagtgaaatttggaaaaactggtgttatgattataaatctaggaacaccagactctacaagctggtgggacataagaaaatatttaaaagagtttttatcggatagaagagttatagaagtaaatccaataatttggaagctaattttaaacctatttatccttactttcaggccatccaaaacagcgcatgcttataaaaaaatttggaggaaagaaagcaacgagtcccccttgctctactttacaaaagagcaagcaaacaagttaaatactaaaataggaaacgataaaataattgtagattttgcaatgagatatggaaatccaagtataaaatataaacttaacaaacttaaagaaaaaggatgtgaaaacataatcatactcccattatatccacaatatgctgcagctactactgcaactgtttgtgatgaggtttatagatcgttaatgaaaatgagatggcaaccgagtttacaaattatccctcactatgaaagtgagccttcttatatcgactcattgattaagagcatagaaaaaaaacttaatgaaattaactggaaaccagatctgataatttcatcttatcatggaattcctaagtcttattttgataaaggtgaatcccttatcacttgtt

SEQ ID NO: 288788 - DNA, 675 bp, Unknown
  Bacterial polypeptide expressing nucleotide sequence isolated from the Sargasso Sea
aatggaacttgataataatcacccccctattaaatttggaaaaacaggtgttctcattgttaacttaggcactcctgactcaacagattggcttgatattagaaaatatctaaaggagtttttgtcggacaaaagagttatcgaagtaaatcccataatttggcagttcattttaaacgtatttattttgactttcaggccatccaagacagcaaaagcttataaggaaatttggatgaaagatgaaaacatgtctccacttttatattatactcaaaagcaaagtgaaaaaatctccagttcaatatcaaaagagaatttattaatagattttgctatgagatatggaaatcctagtatcaaaagtaaaatttatagacttcagcaacaaggttgtgaaaatttagttatacttccactttatccacaatatgcagcagcaacaactgcaacagtatgtgatgaagtttatagaactttaatgcaaatgagatggcaaccttctttaaaaattattccacattatgagtctgactcgctctatatagatgctttggttaaatctattaataaaaaaataaatgaaataaattggaaaccagatgtaataattgcctcatatcacggcatacccaaaaaatattttgataaaggtgacccctatcattgttactg

SEQ ID NO: 288789 - DNA, 589 bp, Unknown
  Bacterial polypeptide expressing nucleotide sequence isolated from the Sargasso Sea
aatgaaatcagatcatccaaaagttaaatatggaaaaacaggagtgcttataataaaccttggcactccagactcaacgagttggtttgatataagaaaatatttaaaagaatttttatcagatagacgggtaatcgaagtaaatccaataatatggcaaataattttaaatgtttttatcttaaatttaagaccctcaaaaacagcagaggcgtacaaaaaaatttggatggaagaagaaaatatgtcaccacttaggtactatactttaaatcaatctaaaaaattaaaaaataaaattaatgatgaaaatataattattgattatgcaatgagatatggaaatccaagcataagcagcaaaatgaacaaactccaacaagatggttgtgagaatgttgtaattctacctttataccctcagtatgcagccgcaacaacagcaactgtttgtgatgaggtttataggactttaatgaaaatgagatggcagccaagcattcaaattattcctcattatgaatctgagccactatatattgaagcattagtaaatagtttaaataaaaaaatttctgaaataaaatgg

SEQ ID NO: 288790 - DNA, 616 bp, Unknown
  Bacterial polypeptide expressing nucleotide sequence isolated from the Sargasso Sea
attctagttcttccactttacccgcaggcgggatctccaacgaatacaagtaccttagatgagatctcaaatgttttttcaaaatggccatgggtgccaagcttacggtttgtaaatggctatcatgatagagaagattatatagcagctctttccaaatcaattatttcgtcagtttcagatacctctacaattgaaaaattgatcattagctttcatggaatgccatttcgatatcttaaggaaggtgacccctattattgtttctgtcataaaacagccaggttgcttgcaaataaactaaaactgaaaagtgaacaatattccttagcatttcaatccaggtttggcagggaggagtggcttaaaccttatattgatgaagagattgttaaatatgctaaaaatggtactaaaaaattgcatgttatatcaccaggcttcagtgttgattgtttagaaacgctggaagagataaaaattcagtataataaactatttaaagaaaatggtggagaagaacttgcctatatcccttgtttgaatagtagtgaagaacacctggaaataattaagggtatattagatgaaaatttaaatggatggttaacatgaa

SEQ ID NO: 288791 - DNA, 457 bp, Unknown
  Bacterial polypeptide expressing nucleotide sequence isolated from the Sargasso Sea
aatgattgaaaaaaatcacccacctataaaatatggcaatactggtgtacttataattaatttaggtacacccgattctactagctggttggacattagaaaatatttaaaggagtttctttctgatagaagagtaatagaagttaacccattactttggcaaataattttaaatttgtttattttaaattttagaccctctaaaaccgctaaagcttataaagaaatatggatgaaggatgaaaacatctcaccacttctttattatacaagaaagcaaagcgagaaaatttcaaatttattgtcaaaagaaaacgtcattgtagattttgccatgagatatggaaaccctagcattaatagcaagattcacaaattacacaaaatgggttgtgaaaacttagtgatacttcctctttatccacaatatgcggcagctacaacggcaacagtttgt

SEQ ID NO: 288792 - DNA, 452 bp, Unknown
  Bacterial polypeptide expressing nucleotide sequence isolated from the Sargasso Sea
aatgaatgttgcagtagtattatttaatttaggaggacctgataaattggataacgtagaaccttttttattcaatttatttaatgacccggcgatattaaatttaccatcattcataagatatccacttgctaaattaatttcaaagcgaagaacccctactgcaaaagctatatacaaagaaatgggaggatcttctccaatagtaaaattaaccagagatcaagcttcttctcttgagcaatgccttaatatgaatgaaaaagacaataattataaggtttttatcgctatgagatgttggcacccgagagcatcagaaacaatgcaattggtaaaggaatttaatccagcagaaattatattacttccgctttatcctcaatattctgcagccacttcaggctcatccatattagaatggaaagatattgcaaaaaaaaataacttaa

SEQ ID NO: 288793 - DNA, 342 bp, Unknown
  Bacterial polypeptide expressing nucleotide sequence isolated from the Sargasso Sea
aatgacaccagatcacccaaaaattaattatggcaaaacaggagtcttgattgtaaatcttgggacccctgattcaacaaattggttagatataagaaaatatttaaaggagtttttatcagacagaagagttattgaggtaaatccagtaatttggcagataatactaaacctattcatacttactttcaggccatcaaaaactgctaaagcttacaaagaaatatggatggaggataaaaatatgtcacctctaagatattttacggaaagccgagctgaaaaattatctcaacatattggaaatgaaaaattaattgttgattttgccgtgaggtatgg

SEQ ID NO: 288794 - DNA, 533 bp, Unknown
  Bacterial polypeptide expressing nucleotide sequence isolated from the Sargasso Sea
catggaaaaaaaccatccaaaagtaaatttcggcaaaaccggcattttattaataaatttaggcacccctgattcaacaagctggtttgatattcgaaaatatttgaaagaattcttgtctgatagaagagtaatagaagtaaatccattaatttggaaagtaattttaaatacattcattctaactttcagaccttccaaaacagcaaaagcttacaagaaaatttggatgcaaaaagaaaacatgtccccactgagacattacacaatcatgcaggcaaaaaaactcgaaaataaaattggtaataaaaatattataatagattatgcaatgcgctatggaaatcctactatcaaagataaaataaaatatttgcaaaaaaatggatgtgaaaatttaatagttttacctttatacccacagtatgcagcagctactacagctactgtctgtgatgaggtttataggtgcttgacaaaaatgcgatggcagccaagtttgcagatcataccgcattatgaatctgagccat

SEQ ID NO: 288795 - DNA, 571 bp, Unknown
  Bacterial polypeptide expressing nucleotide sequence isolated from the Sargasso Sea
tatgcttgctgcaaccacggcaacagtatgcgatgaagtttacagaacattaatgtctatgagatggcagccttcacttaaaattattccccattatgaatctgatcctttgtacattgatgctttggtgaattccattaattctaaaatagaaaacataaattggaaaccagatttaatattagcatcttatcatggaataccaaaaaaatattttgataaaggagacccataccattgttattgtcacaaaactacgaggctcatttctgaaaagtttaaagaaatcgaaattaaaactacttttcaatcaaggtttggacccgaggaatggttacaaccttatactgataaaactttagaacgtttaccaaaagagggagtaaaaaacgttttagcaatttgtccaggattctcttcagattgtgttgaaacattagaagaaatattaattcaaggaaaagaaagttttatggaatccggtggtgaaaattttgatatggtctcgtgtcttaatgataatgatgatcatataaaattacttaataatttgattaaaagaaatatttaa

SEQ ID NO: 288796 - DNA, 634 bp, Unknown
  Bacterial polypeptide expressing nucleotide sequence isolated from the Sargasso Sea
aatgataccagaccatccaaaaattaattatggcaagacaggtattttaattgtaaatcttggtacacctgattctacgagttggttagacatcaggaaatatttaaaagaattcttgtcagacagacgagtaattgaagttaatcccttaatttggcaggtaatactaaacttatttatacttacttttagaccctctaaaacagcgagagcctataaagaaatatggatgaacgataaaaatatgtctcctttaagatattttacagaaagacaagcagaaaaattatcttatcaaattggcaaagaagatttaattgttgattttgctatgagatatggaaacccaagtattaaaagtagaattcatggtcttcaaaaaaagggttgtgaaaatttaattgtgcttccattgtatccacaatatgcagcagcaacaacagcaacagtttgtgatgaagtttatagaactttaatgaaaatgaggtggcaaccaaatcttaaaataattcctcattatgagtctgaaccattatacattgaggcaatcaaaaatagtattttaaaaaagataagtgaaattaattggaagcctgatttaataattgcatcatatcacggaatccaaaaaaat

SEQ ID NO: 288797 - DNA, 678 bp, Unknown
  Bacterial polypeptide expressing nucleotide sequence isolated from the Sargasso Sea
ttgttgattttgctatgagatacgggaacccaagtatcaaaagcaaaattcatgggcttcaaaacataggttgtgaaaatttaattattttacctctttatcctcaatatgctgcagcaacaacagcaacagtttgtgatgaggtttatagaactttgatgaaaatgagatggcagccaaatttaaaaataattccacattatgagtcagagccgctttacatagaagcgcttaaaaatagtattttaaagaaaattgatgaaattaattggaaaccagatttaataattgcctcatatcacggaatacctaaaaaatattttgaaaaaggtgatccatatcattgctactgtcataagactactagacttatttcagaaaaatattctgatattgaaattaaaactacatttcagtcaagatttggtcctcaagaatggttacagccttataccgataaaacttttgagaccctgccccgagaaggtaaaaaaaatattttagttatttgtccaggattttcatccgattgtgtagaaactttagaggaaatatgtattcaaggaaaagaaagttttatcaaatcaggaggggaaaattttgagatggtaccgtgtttaaatgacaatgatgatcatattgatttattcaaacatcttattttaaacaatacgtgat

SEQ ID NO: 288798 - DNA, 478 bp, Unknown
  Bacterial polypeptide expressing nucleotide sequence isolated from the Sargasso Sea
aatggataaaaatcatcccaaaataaattttggaaagacaggagttcttattattaatctaggcacacccgattcaacaagctggtgggatataagaaaatatctaaaagagtttttatctgatagaagggtgatagaggtaaatccagtaatttggcaaataatactaaatttatttatactgacttttagaccctctaagacagcccatgcttataaacagatatggagaaatgagagcaacgagtctccacttttatattttactaaaaatcaaaccgctaagcttaataatttaataggaaatgagaaaatcatagtagattttgcaatgaggtatggaaatcctagtataaaatcaaagctgaatattctcagagatagaggttgtgaaaatataatagttctgcctttgtaccctcagtatgctgcagcaacaactgctactgtatgtgatgaagtttacagatcattaaga

SEQ ID NO: 288799 - DNA, 316 bp, Unknown
  Bacterial polypeptide expressing nucleotide sequence isolated from the Sargasso Sea
ttcaaggttaatctcagaaaaattcaaagaaataaaaataataacaacatttcagtcgaggtttggaccccaggaatggcttcaaccttacacggataaaacaattgaaaaactgccttcggaggggaataaaaatatattagttatatgtccaggatttgcatctgattgtgttgaaactttagaggaaatatctatccaaggtaaagagagttttattaattcaggtggtaataactttgatctaataccttgtcttaacgatagcgaagatcatataaaattattaagttatttgataaataaacatatttaa

SEQ ID NO: 288800 - DNA, 914 bp, Unknown
  Bacterial polypeptide expressing nucleotide sequence isolated from the Sargasso Sea
aatgttatttgagtcaaataccccagaagaccacccaaagattttaaaacagaaagtgggtgtcataatagggaaccttggtacaccagacgccacagattattggtctatgagaagatacctaaaggagtttctatctgataggagggtaattgattactctccttgggtctggaagccaatattaaacctaattttactcagaagacctttctcttctggcgaagcatacaaagagatttggaatacaaaggaaaatgaaagcccactgttgacgaccactaaagctcaaacaaaaaaattgcaagctaagtttcataaagagtacggtgatcaagttttattggatttttgcatgcggtatggtaacccctcgacagaaagcgtacttagaaaaatggtatctcagggatgtacaaaaatacttttttttccactttatccacaatatgcagctccaacgactgccactgccaacgatcagatattcagatctttaatgaggttaaactggcagccatctattagaacagtgcccccatactttgacaatccagaattcatcagttcggtctcaaaatcaatagagacagcgtataaaaagtcaaaatttaagcctcagcacctggtgatatcatatcatggtgttcctgaacgttacttgttaaatggagacccttaccattgtcaatgccaaaaaacgtccaggctaatcagagaaaagcttaagtggaagaaaagtgaattgactacggcatttcagtcaaaatttggtccagaaaagtgggtagggcctgctaccgttgagctcgtagcggatttagccaaatctggtaaggataatatcgccattatagcgccctctttttcttctgattgtgttgaaactctggaagagatctgtggggagatag

SEQ ID NO: 288801 - DNA, 640 bp, Unknown
  Bacterial polypeptide expressing nucleotide sequence isolated from the Sargasso Sea
aatggataaaaattttgaacatcccccaattaaatttggtaaaacaggagtactgattataaacctaggaactccggactcgactaattggtttgatattagaaaatatttaaaagaatttttatctgataaacgtgttattgaagttaatcctataatttggcaagtgattttaaatgtttttattttaaacttaagaccctctaaaacagctaaagcttataaggaaatatggatgaaaaatgagaatatttctcctctattatattacacacagaagcaaaaagataaaatttcaaattcaatctcttcaaaaaacttaattattgattttgcaatgcgttatggcaatcccagtataaaaagtaaaattcataagttacatcaacaaggatgtgaaaatttaattattttgcctttgtaccctcagtatgctgctgctactactgccactgtttgtgacgaagtttatagatcattaatgaatatgaggtggcaaccatctttaaagataattccacactacgagtctgatccattatatattgacgctctagttaattctatcaacaaaaaaattaatgaaattaattggaaaccagatttaatacttgcatcatatcacggtatcccaaaaaaa

SEQ ID NO: 288802 - DNA, 475 bp, Unknown
  Bacterial polypeptide expressing nucleotide sequence isolated from the Sargasso Sea
aatggataaaaattttgaacaccctccagttaaatttggtaagacaggagttctaattgtaaatttaggaactccagactcgaccagttggcttgatattagaaagtatttaaaagaatttttatctgataaacgtgttattgaagttaatcctataatttggcaattgatcttgaatattttcattttaaacttgagaccctctaaaacagctaaagcttataaagaaatatggatgaaaaatgaaaacatttcacctttattatattacacacagaaacaaaaagataagatttcaaatttaatctcttcagaaagtttaattattgattttgcaatgcgttatggcaatcccagtataaaaagtaaaattgataaattacaccaacaaggatgtgaaaatttaattatcttacctttataccctcagtatgctgctgctaccactgccactgtttgtgacgaggtttatagg

SEQ ID NO: 288803 - DNA, 253 bp, Unknown
  Bacterial polypeptide expressing nucleotide sequence isolated from the Sargasso Sea
aatggaaaaaaaaatagaacacccgccagttaatttcggaaaaacaggagttttaattgtcaatcttggaactcccgactcaacaagttggtttgatataagaaaatatttaaaagaatttttatcagataggagagtaatcgaagttaacccgataatttggcaaatcatattaaatgttattatattaacttttcggccatccaaaacagccaaggcttataaagaaatttggatgaaagacaaaaacatt

SEQ ID NO: 288804 - DNA, 739 bp, Unknown
  Bacterial polypeptide expressing nucleotide sequence isolated from the Sargasso Sea
atggaaaaaaaccacccaaaagtaaactatggaaaaactggcgtacttataattaatttaggcacacctgactcgacaagttggttagatattagaaaatatctgcgagaatttttgtctgacagaagagtaatagaggtaaatccgattatttggcaggtaattcttaatgttttcattttaaatttaagaccatctaaaaccgcagaagcatataaaaaaatttggatgaaaaaagaaaatatgtcaccgcttagatattttactatcatgcaggctaaaaaactttcagataaaattaacaaagactcaataattatagattatgctatgaggtatggaagcccaagcataatgcaaaaaatgaatagtcttaaaaaatctggttgtgaaaatattataatcttgcccctatatccacagtacgcggctgcaaccacagcaactgtgtgtgatgaagtttatagatgtttaatgaaaatgagatggcaaccaagtttacaaattatacctcactacgaatcggagcctttatatattaatgctttaaaaaatagtttagaaaaaaaaatttctgaaataaattggcacccagacctgatagttgcgtcttatcatggtattccaaaaaaatattttgacaaaggagatccctaccattgttattgtcaaaagactactcgacttttaaatgaaaggacagaaaacgatatagaaattaagacaactttcagtcgag

SEQ ID NO: 288805 - DNA, 634 bp, Unknown
  Bacterial polypeptide expressing nucleotide sequence isolated from the Sargasso Sea
catggaaaagaaccatccaaaagtaaattacggtaaaacaggtattttactaataaatctaggcacgcctgattcaacaagttggttagatataagaaaatatttaaaagaatttttatctgatagaagggtgatcgaggtaaatcctatcatttggcaaattatattaaatacatttattttaactttcagaccctcaaaaacagcaaaggcttataaaaaaatctggatggaaaaggagaatatgtctccactaagacattacacaattatgcaaacaaaaaaacttggaagtaaaattcgaaatgaaaatataatagtagactatgcaatgcgttatggaaatccatctattaaaaataaaattgaaattcttcaaaaaaaaggatgtgaaaatttaattatattgcctctatatccacaatacgctgcggctacaacagccacagtatgtgatgaagtttacaggtgtttaacaaaaatgagatggcagccaagtttacaaatcatacctcactatgagtctgaaccattatatataaatgcaatagtaaaaagtcttgagaaaaaaatttctcaattaaactggaagcctgacacaattgtagcttcttatcatggaataccaaaaaaa

SEQ ID NO: 288806 - DNA, 826 bp, Unknown
  Bacterial polypeptide expressing nucleotide sequence isolated from the Sargasso Sea
tagctccatatgggagaaagacggatcgcctctaataatcaatacaaattctttagcaaaaaaactatcagagaaaactaattattccgttgaaatggctatgaggtatcagcatccatcaatcaaacatgcaatagaaaaactaatcaataagggatgtaacgagataattgccgtgcccctttatccgcattacgcacaatcaactatcttaacaacagagaataaaattaaagagatatcaacttccttaggaggtaacttaaaagtatcattcattagacctttttataatgaagaaggctatatcgatgctttaacatctttgataaaagaaagtttaccatctgattttgatcatttgcttttcagctatcacggtataccagaaagacatgttaaaaatactgatccctctaaaacacattgtcttaaagtaaaagattgctgcaacataaaagcagatgcacatcagttttgctatagacaccaagttttagaaacaacaaaactttgtgctaaaaagttaaatatagaaaaagaaaagtggagtgtttctttccaatctagaattggcccaggttggcttaaaccttttactgataaggtattagatgaattacctaaaaagaacataaaaaagctggcggtagtatgccccgcttttgttgcggataatttagaaacattggaagaaattaatataagagctagagaacaatttattcataatggaggaattgaatttacctacattccttgtttaaatgataataataattgggtagactttttaagtaattatataattcaaaagggaggctag

SEQ ID NO: 288807 - DNA, 701 bp, Unknown
  Bacterial polypeptide expressing nucleotide sequence isolated from the Sargasso Sea
atttaacaaaatttttgttctgccgctttatcctcataatgctatgtcaacaactattactactcaagtagaagtagatcgtatcgcaaaagaaattattcctgatgctgaattggtatatataaaacccttttacaaaaatcaaaaatatatcagtgctgttgcagattctgttcaaaaatatctcaataaagaaaaatttgataagttaatattcagctaccacggtattccaaagaggcaagcaaaaaagacggacgaaactggatctcactgttttgttagcaatgaatgttgcgaagttgaagaacttggttcagctgattgttacaaggctcatacagtacaagcctcaattaagatcgcaaaagagttagggcttaatgacacacaatgggaaattgcatatcaatcaagaattggtccaggatggttgacacctttcactgataagagattggaagctttaccaaaggaaggcaaatcatcaataggaattctatgtccttcttttatttcagattgtttagaaacattagaggaaatagacatcaggggaagaaaaactttttttgatgcaggtggagaaagaatgacttacataccttgtttaaatgattctgaagatactataaatcttataatttccataattaatgatgctgaaagtttaaaagttaaatctttgaaaattgcttgaa

SEQ ID NO: 288808 - DNA, 565 bp, Unknown
  Bacterial polypeptide expressing nucleotide sequence isolated from the Sargasso Sea
agccgcaacaacagcaactgtgtgtgatgaagtatatagaactttaatgaaaatgaggtggcaaccaaatttaaaaataattccacactatgaatctgagccactttacattgaggcaatcaaaaatagtattaaaaaaaaagtaaatgaaattgattggaaaccagatttaataattgcatcatatcatgggataccaaaaaaatattttgataagggtgacccatatcattgttactgccataaaactaccagacttatttctgaaaaatattcagatatcgaaatcaaaactacatttcaatctagatttggcccgcaggaatggttgcaaccttatacagataaaacatttgaagctctcccaaaagaaggtaagaaaaatatcttagttatttgtccaggtttctcatctgattgtgttgaaacattagaggaaatatctatccagggaaaagaaagttttattaattcaggtggtgaaaattttgaaatgataccttgtttaaatgacagtgaagatcatatactgttatttaaacatcttttaacgaaaaatatttaa

SEQ ID NO: 288809 - DNA, 871 bp, Unknown
  Bacterial polypeptide expressing nucleotide sequence isolated from the Sargasso Sea
aggagagttatagagttaaacccttttatttggcagataattttaaatgtttttattctcaatttaagaccatctaagaccgcaaaagcctataaagaaatttggatgaaaaaagaaaacatgtcacctcttagatattacacgatcatgcaaacaaagaagcttttagatagaattagcagtaaagatttaatagtggactatgcaatgaggtatggaaatccaagtataaaaagtaaaataagtaaattacataatgcaggatgcgaaaagttaattgttttgcccctttacccacagtatgcagctgcaacgaccgcaacggtttgtgatgaggtttttagaacactaatggaaatgaggtggcaacctagtctgcaaataataccacactatgagtcagaaccactttacataaaagctttgaataatagtctcagcaaaaaaattagtgcattgagttggagaccagacataattgttgcatcataccatggaataccccaaaagtattttaacaaaggagatccttaccattgttattgtcacaaaacatctagattactcagagaacaatttaaagatatcgaaataataacgactttccaatcaagatttggaccagaggcttggcttaaaccttatactgataaaaccctagagcgtttacccagcgaaggtaaaaaaaatgttcttgtaatctgtccaggattttcatctgactgtgtagaaacactagaagaaatctctatacaaggaaaggaaagctttctgaaatcaggtggaaaaaactttgatgtagttccatgtttaaacgatggtaatgatcatattaatttactagaaaaattaacaagagacgtattataat

SEQ ID NO: 288810 - DNA, 544 bp, Unknown
  Bacterial polypeptide expressing nucleotide sequence isolated from the Sargasso Sea
atggataaaataggcgtcttactaatgaatttaggagggcctgaacgcattactgatgttggcccattcttatacaatcttttctctgatccagaaataatcaggactccgttccctgtttttcaaaagccccttgcttggttaattagcacgcttaggagtactacttcacaacaggcttacctttcgataggtggaggctcacctattaggaggataactgagcaacaagcaagagaattacagtctaaattaagggataagggatttaatgctactacctatatcgcgatgagatattggcatccttttacagaatcagctattgctgatatgaaagcagatggcatagatcaagttgttgtaatacccttgtatccacatttttcaataagtacaagtggttcgagctttagagaattaaaaaaattacgagattctgatgatgaatttaaaaaggttccaatgagatgtgtaaggagttggttcagtcaatcaggttatttaaagtctatggtcgaattaatttctgaacaaatttcac

SEQ ID NO: 288811 - DNA, 844 bp, Unknown
  Bacterial polypeptide expressing nucleotide sequence isolated from the Sargasso Sea
attttaaatactagacctagaaagtctgctaaggcatataaaaaaatctggtggaaagaggggtctcctctaatagttctttctaaaaggttattcaataaagtaactaagtcgcttgatatacctgttgcccttgcaatgaggtatggatcaattagtataaaaaagggactagatgaattgaataaaaagggggtgaaaaatgtcttagtccttcctctataccctcattatgcaatgtcatcatatgaaactgtagttgaaaaagtaaaagaagaaaaagaaactaattttcctagccttaatctagatgttattcctccattctataagaatccacaatacattgatattttaagtgcaaaaatagaagagtcaattaagaatgttgagtacgatcatctacttttttcatatcatggaattccagtcagtcatcttaaaatatctgatacaacaaatagtcattgttataaagtaaatgattgttgtaatgtagattctttagcccatagtacttgttataagcatcaatgccttgaaactaccaaaaaggttgtagaaaaacttaatattggtgaggataagcatagtaactcatttcaatctagacttccaaatgaaccttggttaaaaccatatacagatagtgagcttgaaagacttgctaaggctggtaaaaagaaacttgtcatagtaactccagcttttgttacagattgtcttgaaactcttgaagagattgcaatggaaggaaaagaagaatttttggaagctgggggcaaagaatatacatatgtaccttgtttaaatgaagatgataactgggctgaattaatatcaa

SEQ ID NO: 288812 - DNA, 585 bp, Unknown
  Bacterial polypeptide expressing nucleotide sequence isolated from the Sargasso Sea
aatgaatattgcagtagtattatttaatttaggagggcccgataaattagataatgttgaacctttcttatttaatttatttaatgatcctgcaatactaaatttaccatcttttataagatatccacttgctaaattaatttcaaagcgaagaacccctattgctaaagctatatacaaagaaatgggaggatcctcaccaatagtaaaattaactcaagatcaagccacttcacttgagcaatcccttaataagaatgaaaaagggtttaattatagggtttttatagctatgagatgttggcatcctagagcatcagaaacagtaaaatcggttaaagattttaatccttccgaagttattttgttacctttatacccacagtattctgcagctacatctggttcgtccatattagaatggaaagaaattgctaaaaaaaataatttaaatactaacacaagtacaatttgttgttatcctcaagatattaattttgttaaagcacatgcagaattaattacaaaaaaaattgatggacttaaaaacttcaaattaattttctcagctcacggattaccaga

SEQ ID NO: 288813 - DNA, 695 bp, Unknown
  Bacterial polypeptide expressing nucleotide sequence isolated from the Sargasso Sea
aatgaaagttgcggtaatattatttaatttaggaggacctgataaactggacaatgtcgagccatttttatttaatctttttaatgatcctgcaattttaaatttaccttcatttataagatatcctattgcaaaactaatctcaaaaaaaagagccccgatagcaaaagatatttataaagaaattggaggatcttctcccattttaaaattgacccaagatcaggccgaaagtttggaaaaatcccttaacagcaatgaaaaagcctttaattataaggtatttattacaatgagatgttggcacccaagagcatccgaaacaatcaagctggttaaggattttaatccatcggaaattattttacttcctttgtacccccagtactctgcagcaacttcaggctcttcaattttggaatggaaagaaattgcaaaaaaaaataatcttaatatagaaacaaatactatttgttgttatccagaagatgataaatttataaaggctcatatagaattaataaagaaaaaaataaaaggaataagaaactttaaattaattttttcagcacatggcttaccagaaaaaaatataaaaaaaggagatccttaccaatggcaggtagagcaaggtgtaaaaaaaattatagaagggatccacgacacaagtattgattatattttaagttatcaaa

SEQ ID NO: 288814 - DNA, 751 bp, Unknown
  Bacterial polypeptide expressing nucleotide sequence isolated from the Sargasso Sea
attttatttaatctagggggtccagataagctggaaaacgttgaaccctttttgtttaatttatttaatgatccagcaattttaagtttaccaagttttttaagatttccattagctaaacttatagcaaacagaagggctccaactgcaaaaaaaatctatgaggaattaggaggatcttcccctattctaaagcttactaaagaacaagccaacgctctagaattaaaacttaataatgaagatgatctatctgattataaatgttttatagtaatgagatgttggcatccgagagcagaaaatgttgttaaagaagtgattaaatataatccagatgaaataatcttaatgccactttacccacagtattcagcggcgacatctggttcatcaataaaagagtggaaagatatttgtataaaaaacagttttaaagtgaaaactagtacgatttgttgttatccaactgatgaaaactttattgaagcacataaaaatgaaatattaaaaaaaattaaaaacttaaagaattttaaattaatattttctgcacatggtttacctgaaaaaaatattaaaaaaggggatccataccaatggcaggtagaacaatcagttaatcaaattgttaaatttttaaattttaaggatcttgactggattctaagctatcaaagtagagttggacctttaaaatggattggcccatctacagaggatataattgtagaaaattcaaaattaggca

SEQ ID NO: 288815 - DNA, 760 bp, Unknown
  Bacterial polypeptide expressing nucleotide sequence isolated from the Sargasso Sea
gatgaaaacatatcgcctcttctttattatactaaaaaacaaagccgagaaaatatcaaacgcaatatcaaaagaaaacattgtcctggattttgcgatgagatatggaaatcccagcattaagagcaagattcacaaactacatgaaatgggttgtgaaaatttagtgatacttccgctttatcctcaatacgcagcagccactacggcaacagtttgcgacgaggtatacagaactttaatgaatatgaggtggcaaccttctttaaaaataattcctcactacgaatctgatccactttacataggtgctcttgttaattcgattaataaaacaatagaagaaattaattggaaaccagacctaattatagcttcttatcacgggataccaaaaaaatattttgataaaggtgatccttatcattgttattgtcataaaactacgagacttatttcagaaaaattgagttcaattaaaataaaaactacatttcaatcaagatttggtccgcaagaatggcttcaaccatatacagataagactttagaaaatttacccaaagagggtgttaaaaatgttcttacaatctgtccaggttttgcatctgattgtgtagagactttagaagaaatacaaattcaagctaaagaaagttttttaaaatcaggaggagaacactttgaaatggttccctgtttaaatgatagtgatgatcatatcattttactaaagtctttaattgaaagaaatatttga

SEQ ID NO: 288816 - DNA, 680 bp, Unknown
  Bacterial polypeptide expressing nucleotide sequence isolated from the Sargasso Sea
agggatgagatatggtaacccatctataaagaatgctctaaaaatctttaaagaaaaaacaatttctaaaatcttggttttgccattatacccacaggctggatcacctactacaactagcaccttcgatgcaattaacgcccacataaaagaccaaagctgggtgcctaatatcagatttatttctggataccatgacgatgagaattatataaactccctatcggtatcgatagaaaaaagtttttcaaaacatggtaggcctgataaacttatttttagttatcatgggatgcctgaacgctatcttcatgagggggatccttattactgcttctgtcataaaacaacacggttggttgcagaaaggttatcccttgatagtaaattttatgacatggccttccaatcacgttttggatatgaaaaatggcttcaaccatacatagacgatatgataccaaaagctgctgatgatggagttaggcatcttcagattatttctccaggctttagcgttgactgcctcgaaaccctggaagagatcaacatacaatacagagaattatttttagagcaaggcggggaaaaatttgaatatataccctgtttaaatgatggtgatgaccatataaaaatgatccaatcaatcattaataataatataaaagggtggtgac

SEQ ID NO: 288817 - DNA, 724 bp, Unknown
  Bacterial polypeptide expressing nucleotide sequence isolated from the Sargasso Sea
aatgaacaaagaccacccagaagttaaatttggaaaaaatggtattttattagtaaatctaggcacccccaactccacaggttggtgggacatcagaaaatatttaaaagaatttttatcagacagaagagtgatagaggtaaacccttttatttggcaaataattttaaatttgtttattttaacttttaggccatcaaagacagcgcacgcttataaaaagatttggagaaaagaaagcaatgaatctcctttattatattttacaagaaaccaagcaaacaaacttaaaaataaaattggaaatgagaaggtaattgtagattttgcaatgagatatggtaatccaagtataaaatctcgattaaatatacttagagaagaagggtgtgaaaatataattatcctacctttatacccccaatatgcagccgctactaccgcaacagtttgtgacgaagtttatagatccctaatgaggatgagatggcaaccaagtcttcaagttatccctcactatgaaggagagccccaatacattaatgctttgataaccagtatagaaaagaaaattgaagaaataaaatggaaacctgatttaataatttcttcatatcatggaataccaaaatcttattttgataaaggagacccctatcattgttactgtcacaaaactaatagattgatgagagaaaaatttaataaagtagaaatacaaaca

SEQ ID NO: 288818 - DNA, 753 bp, Unknown
  Bacterial polypeptide expressing nucleotide sequence isolated from the Sargasso Sea
agtgaaccgagtcctttggagtgttattctaaatttaattatattaaatgtaaggccaaagatatcagcgaaagcgtacaaggaaatctggttggaaacaacggatgagtcaccccttagatttcatacccgcgcacaatcagagacattatctcagcgatttaaagagaacggggttcccgttgagataaattgggcgatgcgatacgggacaccagctatcgctgatcgtctggaagaaatgcgcgctaaaggttgccgcaaaatacttctgctagctctttatccgcaatatagcgccactacaacagcaagcgcttatgataaagcttttcaggctttgcaaaagatgaggtggcaacctgtcataaggacatcaccggcatactataacaataaaaattatataaggatcttggcaaagtcgattaatgaacatatcgaaatcctcgattgggaacccgatgtgctcttgacgtcctttcacggtttacccaaacgttatttggatgcgggcgacccctaccactgtgagtgtgcccaaacatcccgacttttagcagaggaaattggttggactggtgacagggttagattagctttccagtcaaggtttggtagggaagaatggttgaagccatacatacaagaggtaataactgaattaccatcgcaaggcataaaaaagatagcgataatctccccagggtttatatctgactgcgttgaaactttggaagaagtcgcaatagg

SEQ ID NO: 288819 - DNA, 339 bp, Unknown
  Bacterial polypeptide expressing nucleotide sequence isolated from the Sargasso Sea
aatgaaatcagaccacccaaaagttaattatggtaaaacaggggttttaattgtaaatcttggaacacccgattccactaattggctggatataaggaaatatttaaaggaatttttatctgatagaagagttattgaagtaaatcctcttatttggcaagtaattcttaacttatttatacttactttcaggccatcaaaaactgctaaagcttacaaagaaatatggatgaaagacaagaacatgtcaccgcttaggttttatacagaaagtcaagctcataaattatctgagagaattggtaatgaaaagttgattgttgattttgctatgaggta

SEQ ID NO: 288820 - DNA, 743 bp, Unknown
  Bacterial polypeptide expressing nucleotide sequence isolated from the Sargasso Sea
tatggataaaaataccagcgacactggaatactgctgataaacctcggcacaccagattccacaaatacttcagacgttcgaaagtatcttaaagagttcttgatggacccttacgttgtgaatgccccgtctttcatcagagcgttgatcgtatacggattcatactgcccacccggcccaagaaaagcgccgaagcctactctcacatctggacagacgagggttcgccacttttggtgggtagcactaaactttgccaggctttgcgagccgagctgaaaatgactgtggaactagccatgcgttacgggaatccaagtatcagcgaaggccttcaccgaatgaaaaaaaatggtatcaaacacgtgttagttgtgcctctttaccctcagtatgcggattcaaccgtcacgacatccatagagaaagtgagaagtgagctgcccagcgacatttccgcggaggtcctgccaacattttttaattccgaccatttcatagaaccctgggctaaccagataaaaaagaatcttccggccgagtgggatcatttacttctaagttatcacgggattcctgagaaacacctcaaaatcgccgaccaaaccaatagccactgcttagctacgagagattgttgcaacatgcagtccccagcttggcgaacttgttatcggcatcaagtctttgagacatctaaacgaatagctaaagccttagggatacccgattcaaaataca

SEQ ID NO: 288821 - DNA, 644 bp, Unknown
  Bacterial polypeptide expressing nucleotide sequence isolated from the Sargasso Sea
gatggaaattgataataatcacccacccgttaaatttggaaaaactggtgttcttatagttaatttaggcaccccagactccacaagctggttcgatattagaaaatatttaaaagaatttttgtctgataaaagagttatagaagttaatcctataatttggcaaataattttaaacctgtttatattaactttcagaccatcaaaaacagcaaaagcttataaagaaatttggatgaaaaatgaaaacatgtcccctcttttatattatacacaaaaacaaagtgaaaagatttcaaagtttataaaaaaagaagatttaataatagattttgcaatgagatatggaaatccaagcattaaaagtagaattaacaaactccaggagcaaggttgtgaaaatttagtcatactaccactttatccacaatacgctgcagcaacgacagcaacagtatgtgatgaagtttatagaactttgatgaatatgagatggcaaccgtccctaaagattattcctcactatgaatctaacccactttatattgacgcattggttaaatctattaatgaaaagatcagtgatataaattggaaaccagatttaataattgcttcatatcacggaatacctaaaaaatatt

SEQ ID NO: 288822 - DNA, 603 bp, Unknown
  Bacterial polypeptide expressing nucleotide sequence isolated from the Sargasso Sea
tacctttgtatccacagtatgcagcagctactacagctacagtatgtgacgaggtttatagatgtttgataaaaatgcgatggcaaccaagtttgcagatcataccacattatgagtctgaaccactgtatataaaagcgttagtgaaaagtctcgataaaaaaatttctcaattgagttggaaaccagatttaattgtagcttcttatcatggtataccaaaaaaatacttcgaaaaaggagacccatatcactgttattgccaaaaaacttctcgcttaatcaaggagagtttcagtagcgatatacctattatgacaacttttcaatccaggtttggaccacaagaatggttgacaccttatacggataaaacatttgaaaaattaccacaagaaggaaagaaaaatttattagtcatttgcccgggtttttcatcagactgtgtagaaactctggaagaaatttctattcagggtaaggagacttttctagaaaaaggtggaaaaaattttgaaactgtatcttgcttgaatgacaatgaagatcatattaatttgctgcaacacttaataaataaatttcttattgaaaaaaaatgaa

SEQ ID NO: 288823 - DNA, 406 bp, Unknown
  Bacterial polypeptide expressing nucleotide sequence isolated from the Sargasso Sea
atgataccagatcatccaaaagttaattacggtaaaacaggggttttaatagttaatcttggaacgccagactcaactagttggtgggatataagaaaatatttaagagaatttttatctgacagaagagttatcgagatcaatccatttatttggcaattaatacttaacatatttatacttaattttaggccttcaaaaactgccaaagcttataagaagatttggatgaaagataagaatatgtcaccattaagattttatacagaaatgcaagcaagaaaattatcagataggataagtaatgaaaaaataatagtaaattttgcaatgagatatggaaatccaagcatcaaaagcaaaattaatgaattacaaaaaaatggctgtgagaatttaattattt

SEQ ID NO: 288824 - DNA, 557 bp, Unknown
  Bacterial polypeptide expressing nucleotide sequence isolated from the Sargasso Sea
tactgtttgcgatgaagtttttagatctttgattgacatgaggtggcaacctagtttgcaaattataccccattatgaatctgagcctctttatatcaccgctttagaaaaaagtttaaataataaaatttcagagataaattggaaaccagatttaatagtagcttcttaccatggcataccgaaaaaatattttgacaaaggagacccttatcactgctactgccaaaaaacatcaagactactatcagagaaatttactaaaattccaatccaaacaacgttccagtctcgatttggaccccaggaatggttaaagccttataccgataaaactttggaaagcttaccaaaagaaggaaaaaaaaatattttggtaatttgccctggtttttcatctgactgtgttgaaactttagaggaaatatctattcagggcagggaaagtttcttaagcagtggtggaaaaaattttgatgttgtgccatgtcttaacgatggcaaagatcatattgatttacttgaacatttggcgaaaagatacatggtaaaatgaa

SEQ ID NO: 288825 - DNA, 799 bp, Unknown
  Bacterial polypeptide expressing nucleotide sequence isolated from the Sargasso Sea
agaaaatctgcaaaagcatataaaaaaatttggtggaaagagggttctcctctaatagttttatccaaaagattatttgataaagtaacaaaacttgtaaaatttcctgttgcattagcaatgagatacggatcaataagcatattcaagggcttaaaagagttggatgacaaaggagttaaaaatataactgtgcttccactctaccctcactacgcaatgtcgtcttatgaaactgttgttgaaaaagtgaaggatgaggtaaaaactaattttccacatttgaaaataaaaacagttgaaccattttataatgacaaaaaatatattgatcttctatgtaaaaaaataaagagtactattagtaaaattgagtatgatcacattttattttcataccacggaataccaattagtcatttaaagatttctgaccctaccaatagtcattgttacaaggttaaagattgttgtaataaccattctgatgctcataagttttgttacaaacatcaggtccttgaaacaacagaattagttatcaaaaaacttaaaattgataagaaaaaatacagtaatgcttttcaatcacgacttcctaatgaggcttggcttaagccatacactgatgatgaattggttagattggccaaggatggtaaaaagaaattagtcattgtaacaccagcatttgttactgattgtttagaaacgttagaagaaattgcaatggaaggaaaagaagagtttttagaggcaggtggtgaaagctatcattatgtaccttgtctaaatgatg

SEQ ID NO: 288826 - DNA, 478 bp, Unknown
  Bacterial polypeptide expressing nucleotide sequence isolated from the Sargasso Sea
aatggaaaatcaccctaaaataaattttggtaaaacaggagttttattaataaatcttggaactcccgactccacaaactggcttgatataagaaaatacttaaaagaatttttatcagacagaagagtaatagaaatcaaccctattttatggaaaattattttaaatactttcattttaaattttagaccatcaaaaactgcaaaagcttacaaggagatatggatgaaggatataaatatgtccccgcttttgtattatactttaaaacaaacagaaaaagtttcaaaaaacatgtctgataaaaatttagttgttgattttgctatgaggtatggaaacccgagtattaaaagcaaaataaaggctcttcatgatgatggatgtgaaaaccttataatactacctctgtaccctcaatatgcggccgcgacaacagcaactgtgtgtgatgaagtatatagaacattaatgaaa

SEQ ID NO: 288827 - DNA, 785 bp, Unknown
  Bacterial polypeptide expressing nucleotide sequence isolated from the Sargasso Sea
tttggaaaaatctcttaataacaatgaaaaaggctttaattataaggtttttattaccatgagatgttggcacccaagagcatcggaaacagtaaaaatagtaaagaattttaatccttcagaaataattttgcttcctttatacccccaatactccgcagcaacttcaggttcatccatttctgagtggaaggagattgcaaaaaaaaataaccttaacataaacaccagtactatttgttgttaccctgaagacgataaatttataaaagctcatacagaattgataagaaaaaaaattgaaggaataaataattttaaattaattttttcagcccacggtttaccagaaaaaaatattaaaaatggagatccttatcaatggcaagtggaacaaggtgtcaaaaaaattatggaaggaataaatgatgcaaatatcgattatatcttaagctatcaaagtagagtgggtcctttaaaatggattggtccatcaactgaagatgtaattgtagaaaattcaaaaagaggaaaacatttggttgtagtccccatagcttttgtttccgaacattcggaaaccttagtagaattagatatcgagtatgagaaattggctagaaaaaatggatgtaaaaattatacaagaatagaggctttgggcgttaatgaaaattttatccaaagtttgtcaggtttaattattaacaaagataattacaaatttaaagataacttatatccacctaaaaataggtgtccttctagctttaccaaatgtcctt

SEQ ID NO: 288828 - DNA, 492 bp, Unknown
  Bacterial polypeptide expressing nucleotide sequence isolated from the Sargasso Sea
aatgaaagttgcagtaattttattcaatctgggtggtccagataaattagaaaatgttgagccttttttatttaatttatttaatgacccagcaattttaaacttaccttcatttataagatacccacttgcaaaaataatttcaaaaagaagagctcctgttgctaaaaaaatctaccaggaattaggaggctcatcaccaatattaaaattaactcaggatcaagcaagtagtttagaaaaatctcttaataacaagcaaaaaagctttaattacaaagtttttattaccatgagatgttggcatcctagggcatccgaaactgtaagaatggttaaagattttaatccctccgaaataattttacttcctttatatccacaatattcagccgcaacttctggatcatctattttagagtggagagaaattgcaaaaaaaaataattttaatattaatacaagcaccatttgttgttatccagaggatac

SEQ ID NO: 288829 - DNA, 550 bp, Unknown
  Bacterial polypeptide expressing nucleotide sequence isolated from the Sargasso Sea
aatggaaaaacaccccgaagtaaagcatggaaagacaggagctctaataattaatttaggaactccagattctacaaattggttagacattagaagatatttaaaagagtttttatctgatagaagagtaattgaggtaaatccaataatctggcaagtaatacttaatgtttttattctaaatttaaggccatccaaaaccgcaaaagcttataaggaaatatggatgaaagaagaaaatatttctcctttattgtattacacaaaaaaacaagccgaaaaaatttcaaaatcaatttcaaatgaaaatttgattatagattttgctatgagatatggaaacccaagtattaaaagtaaaatattgaaattaaatgaagaaggatgtgaaaatataatagtattacctctttaccctcagtatgcagccgcgacgaccgcaactgtttgtgacgaagtatatagaactttaatgaatatgagatggcagccttctttaaaaattattcctcattatgagtcagatccactatacgtcgatgctttggta

SEQ ID NO: 288830 - DNA, 249 bp, Unknown
  Bacterial polypeptide expressing nucleotide sequence isolated from the Sargasso Sea
catgcccttcttgcccgaacccctgtttcagcacggccagcccgatcgcacggcgatcctgctcgtcaacctcggtacgcctgacggtacatcgccgcgcgaggtcggccgctacctgcgtcagttcctgtccgacccccgcgtggtcgaaattccgcgcgcggtgtggtggttcatcctccacgggctgatcgtgccgctgcgctcgcgcgcgtcggcgcacaagtacgaaagcatctggctgcgcga

SEQ ID NO: 288831 - DNA, 685 bp, Unknown
  Bacterial polypeptide expressing nucleotide sequence isolated from the Sargasso Sea
cttaaaagagttttatctgacagaagagttatcgaagtaaacccaatattatggaagattattcttaacttatttattttaaacttaaggccttctaaaacagcaaaagcctacaaagagatatggatgaaagacataaacatgtcacctttaagatattatacattaaaacagacggaaaagctttccaaagagataggaaataaaaatttattagttgattatgccatgcgttatggaaaccctagtattaggtctaaaatccacagtcttaaagaagatggttgtgaaaatctgattgttttaccactgtatcctcaatacgcggctgccactacagcaacagtatgcgacgaagtttatagaactttaatgaaaatgagatggcaacctaacttacaaattattcctcactatgagtcagaaccgctttatattgacgctttaatcaatagtataaataaaaaaataaatgaaattaattggaaacctgaaattataattgcatcttaccacggcattccaaaaaaatactttgataaaggagacccctaccattgctattgtcataaaactaccaggctgatgtctgaaaaatttaaagaaataccaataaaaacaacttttcaatcaagatttggtccacaggaatggttacaaccttacaccgacaaaacaatttcaa

SEQ ID NO: 288832 - DNA, 304 bp, Unknown
  Bacterial polypeptide expressing nucleotide sequence isolated from the Sargasso Sea
gcggtttggtggtttgtttttgttggtttcctttttacctttcgccctcggcgttctgctggggctttttcccccgtatggacggaagaaggctctccacttatggctattactaaagcgcaagcatcagctattgctgaacgctgtaaagcccaatatggcgatgacgtaattgttgattttgccatgcgctacggcaagcccgccattggtgataccatcgagtccatgttggaaaaaggcgtacgcaaactcgtcgttttaccgctttaccctcaatacagcgcgtcgacaactggctcca

SEQ ID NO: 288833 - DNA, 376 bp, Unknown
  Bacterial polypeptide expressing nucleotide sequence isolated from the Sargasso Sea
atgaaagatcatcctaaaattaattttggtaaaactggaattttattagttaatcttggaacacctgactcaacgagctggcttgatatacgtaaatatttaaaagagtttttatcagatagaagagtcatagaagttaatccgataatttggcaaataattttaaacctctttatcttaactttcaggccctcaaagaccgcaaaagcatataaggaaatatggatgaaaaatgagaacatatctccattaagatattatacacaaaatcaagcatctaagttaagggctaaaatatcaactaaaaatattattgtagattttgctatgcgatatggaaatccaagcattaaaaatgtaatgaccaaaatgcaaa

SEQ ID NO: 288834 - DNA, 802 bp, Unknown
  Bacterial polypeptide expressing nucleotide sequence isolated from the Sargasso Sea
taaaactgcaaaagcatacaaggaaatatggatgaaaaatgagaatatgtctccgttaagatattttacaatctcacaagcggacaagctcagaaaagttttaggcacagaaaatattttaatcgattacgcaatgagatatggtaacccaagtattaattcaaaacttgttaaattgcaggagatgggttgcgaaagaattataatacttccattgtatccccaatacgctgctgcgactaccgctacagtatgtgatgaagtttacagatgtttgatgaaaatgcgatggcaaccgagtttacagattatacctcattatgagtctgagcctctttacataaactctcttgtaaaaagtatcgagacaaaaataaatcaaataaaatggaaaccagatttaataatagcttcttatcatggaataccaaaaaaatattttgataaaggagatccatatcaatgttactgccaaaaaactacaagattaatgagtgaaaagtttaatagatttccaattattactacattccaatctagatttgggccggcagaatggttaaaaccatatactgataaaacttttgaagatttaccaaaacaaggaaaaaaaaatatcctggttgtttgtcctggcttcgcttcagattgtgtagaaactttagaagaaatttcaattcagggaaaaaaaacttttatagaaatggggggaaaaaatttcgacaccgtgccttgtttgaatgatagtgatgatcaaatcagcttatttaaaaaattaatagagcagtatataataaaataa

SEQ ID NO: 288835 - DNA, 625 bp, Unknown
  Bacterial polypeptide expressing nucleotide sequence isolated from the Sargasso Sea
atgaagaaagcagtaatcctttttaatttaggtggccctgataaattggaaaatgtggagccttttttatttaacttatttaatgatccggcaattttaaatataccaagtttttttaggtatccgttagcaaaattaatatcaaatagaagagcgccaaccgcaaaaaaaatctatcaagaattaggtggttcttcgccaatcctaaaacttacgcaagaacaatcttcagcgctagagacagatttaaatcaaaacgacaatctttccgaatataaatgttttgtggttatgagatgctggcatcctagagcagatgatgttgtaaaagaagttatgaaatatggtccagatgaaataattttaatgcctttatatcctcaatattctgcagctacctcaggctcatctataaaagaatggaatgatgtttgttttaagaacgattttaaaataaaaacatctacaatttgttgttacccaactgatgaaaattttgttcaagcacataaagatgaaataattaaaaaaattaaaaatttgaaaaattttaaattaattttttctgcacacgggttgcctgaaaaaaacattaaaaaaggcgatccatatcaatggcaagtag

SEQ ID NO: 288836 - DNA, 686 bp, Unknown
  Bacterial polypeptide expressing nucleotide sequence isolated from the Sargasso Sea
aaatattattatagattttgcaatgaggtatggaaatcccagcattaagagtaagatttataaattgcatcaaatcggatgtgaaaacctagtaatacttcctctttatccccaatacgcagcagccacaactgctacagtttgtgacgaggtatacagaactttaatgaaaatgagatggcaaccgtctttaaaaataattcctcattacgaatctgattcactttacattgatgctctcgttaattcgattaataaaaaaataaatgatataaggtggaaaccagatctaattatagcttcttatcacgggataccaaaaaaatattttgacaaaggtgatccttatcattgttattgtcataaaacgacaagactgatttcagaaaaatttagttcaattaaaattaaaaccacattccaatcaagatttggtccacaacaatggctgcaaccatatacggataagactttagaaagccttcccaaagagggtgttaaaaatgttcttactatctgcccagggtttgcgtctgattgtgtagaaactttagaggaaatacaaatacaagctaaagaaagttttttaaattcaggcggagaaaattttgatatggtcccatgtttaaatgataacaatgatcatatcattttattaaagtctttaattgaaagaaatatctgac

SEQ ID NO: 288837 - DNA, 655 bp, Unknown
  Bacterial polypeptide expressing nucleotide sequence isolated from the Sargasso Sea
tggaaatcccagcataaaatcccgattagaaatacttaaagaacaaggatgtgaaaatataatagttttgcctttatatcctcaatatgcagcagccaccacagcgacagtttgtgacgaagtctatagatctttaatgggaatgagatggcaaccaagccttcagattattcctcactatgaaagtgagccattatacattgatgctttgataactagcatagaaagaaaaattaaagaaataagttggaaacctgatttaataatttcttcatatcatggaattcctaaatcttattttgacaagggagacccctatcattgttactgccataaaactacaagattgatgaaagaaaagtttaataatgtagaaattcaaacaacatttcaatcgagatttggaccacaagaatggttaaccccttatacagacaaaactcttgaagatttgccaaagaagggaacgaaaaatttattagtcatttgtccaggttttgcttcagactgtgttgaaactttagaggaaataaatattcaaggcaaagagagttttttaaaaaatggtggggaaaattttgatttgattccctgtttaaatgatagcttggatcatattaaattgcttgaaaagctagttacaaaatatttataa

SEQ ID NO: 288838 - DNA, 725 bp, Unknown
  Bacterial polypeptide expressing nucleotide sequence isolated from the Sargasso Sea
aaaacagagtgaaaaaatttctaaacttataacaaatgaaaatttaataatagactttgctatgagatatggaaccccaagcattaatagtaaaatttataaacttcaggaaagtggttgtgaaaatttagttatacttccactttatccgcaatacgctgcagcaacaactgcgacagtatgtgatgaagtttatagaaccttgatgaatatgagatggcaaccatccctaaaaattatccctcattacgaatctgacccactttatattgacgccttggtgaaatctattaataaaaagattagtgcaataaattggaaaccagatttaataattgcctcatatcacggaatacctaagaaatattttgataagggtgatccttatcattgttattgtcataaaacgactagattaatttctgaaaaattcaattctatagaaattaaaaccacatttcagtccagatttgggccccaagcatggctacagccctatacagacaaaaccctagaaagtttgccaggagaaggaaaaaaaaatattcttacaatttgtcctggattctcttccgactgtgtagaaactttagaggaaatcttaattcaaggcaaagatagttttttaaagtcagggggtgaaaattttgacatggttccatgtttaaatgataatgatgatcatatacttttattaaaatctttgattgaaaaaaatatttaaa

SEQ ID NO: 288839 - DNA, 784 bp, Unknown
  Bacterial polypeptide expressing nucleotide sequence isolated from the Sargasso Sea
tttaataataaatttggaaacaccggactcaacaagttggctagatataagaaaatatcttaaagaatttttatcggacagaagagtaattgaagttaacccgataatttggcagtttatcttaaatgtttttattttaacttttcgaccttctaaaacagcaaaagcttacaaagaaatttggatgaaagataaaaacatttcaccacttctgtattatacccaaaaacaagcggagaaactctcaagcacaatatcagaaaaaaacctgataatagattacgcaatgagatatggtaatccaagcataagaagtaaaattgcaactcttcatgaaatgggttgtgaaaatttaataattcttccgctttatcctcaatacgctgcggcaaccaccgcaaccgtctgtgacgaagtatatagaactcttatgaaaatgagatggcaaccatcactaaaaatagtgccacattatgagtcggatcctttatatatagaagcgcttgttaattctttgaataagaaaattaaagaaataaattggaagccggatttgatattggcttcttatcatggaataccacaaaaatattttgataaaggtgatccctatcattgttattgtcacaaaacaacgagactgatatcagaaaaatttacatcagttgaaattaagacaacattccaatctagatttggccctgagaagtggcttcaaccttacacagataaaactttagagggtttacctaaagagggtaaaaaaaatattttagcaatatgc

SEQ ID NO: 288840 - DNA, 301 bp, Unknown
  Bacterial polypeptide expressing nucleotide sequence isolated from the Sargasso Sea
aatgacaataggccacccaaaagttaattatggaaaaacaggggttttaattgtaaatcttggcacacccgattccactagttggctggatataaggagatatttaaaggaatttttatcagatagaagagttatcgaagtaaatccttttatttggcaggtaattcttaatttatttatacttactttcaggccatcaaaaacagccaaagcttataaagaaatatggatgaaagacaagaacatgtcaccacttagattttttacagaaagccaagcccataaattatctgagaaaatg

SEQ ID NO: 288841 - DNA, 175 bp, Unknown
  Bacterial polypeptide expressing nucleotide sequence isolated from the Sargasso Sea
ttgtcccgagtcggaatcgtcctcctcaacctcggggggccagaacgaatccaggacgttggcccgttcctttacaacctgtttgccgatcccgagatcatccggctgccgattccggccctgcagaagccgttggcctggttgatcagcaccctgcgcagcaataaatcccaag

SEQ ID NO: 288842 - DNA, 667 bp, Unknown
  Bacterial polypeptide expressing nucleotide sequence isolated from the Sargasso Sea
atatggaaacccaggaattatgaataaaatgaattatcttcaaaaatctggttgtgaaaatataataattctaccgctttatcctcagtatgcagcagcaacaacagccactgtatgtgatgaagtttatagatctcttatgaaaatgagatggcagcctagtcttcaaattataccacattatgaatctgaacctttgtacatcaacgctttaaaaaaaagtttagaaaaaaaagtttctgaaataaattggaaaccagatttaattatcgcttcataccatggcataccaaaaaaatattttgacaaaggagatccatatcattgctactgtcaaaagactacaaggcttttaaaagaaagttttcaaaataaaattcctattttaactacttttcaatcaagatttggtccacagcaatggctgcaaccatatacagataaaactttagaaaaagttccacaagagggaaaaaaaaatatattagtcatatgtcctggcttttctagtgattgtgtagaaactttagaggaaattgcaatacaaggtaaagaaagttttcttaaaaatggtggaaaaaaatttgatattgttccctgcttaaatgatagtgccgaacacattgaattattatacaatttagtaaagaaatatttaataaagtaa

SEQ ID NO: 288843 - DNA, 683 bp, Unknown
  Bacterial polypeptide expressing nucleotide sequence isolated from the Sargasso Sea
tatcattatagattttgcaatgagatatggaaaccccagcactaaaagcaagattcataaattacatgaaatgggctgtgaaaatttagtcatacttcctctttatccacagtatgctgctgccacaacagcaacagtctgtgatgaagtttatagaactttaatgaaaatgagatggcaaccctctttaaaaataataccacattacgaatctgatcctctctatattgatgcactcgttaattctattaacaaaaaacttaacgaaataaattggaagccagatctaattatagcctcttatcatggcttaccaaaaaaatattttgataaaggtgatccttatcattgttattgtcataaaacgacaagacttatttcggaaaaatttagttcaattaaaattaaaactacatttcaatcaagatttggtccacaagaatggcttcaaccatatactgacaaaactctagaaaacttacctaaagaaggagtcaaaaatgttcttacaatttgcccgggcttttcatctgactgcgtcgagacgttggaggaaattttaattcagggtaaagagagttttattagtgctggaggagaaaattttgatatggttccttgcttaaacgataatgatgatcacatccttttattaaaatccttaattgaaagaaatatttgat

SEQ ID NO: 288844 - DNA, 646 bp, Unknown
  Bacterial polypeptide expressing nucleotide sequence isolated from the Sargasso Sea
aatggaaaacaaacaagaacacccacctgtaaaatttggtaaaactggagtcctaatagtaaatctaggaaccccggactcaacaaggtggtttgatataagaaaatatttaaaagagtttttgtcggatagaagagtaattgaaattaacccgataatttggcagtttattttaaatgtttttatattgactttccgaccttcaaaaacagcaaaagcttataaagaaatctggatgaaggacaaaaatatttcacctcttttgcactatactcaaaaacaagcggaaaaactctcaaatcaaatgtcagaaacaaacctgttggtggattatgccatgagatacggaaatcccagcataagaagtaaaattgcaaaccttcataaaatggggtgtgaaaacttaataatacttccactttatccacagtatgctgctgcaactaccgcaactgtttgtgatgaggtatatagaactcttatgaaaatgagatggcaaccatcactcaaaatagtgccgcattatgaatctgatcctttatacatcgaagcacttgtaaattctttgaataaaaaaattaaagaaattaattggaagcctgatttaatattggcttcttaccatggggatccaccaaaaatattt

SEQ ID NO: 288845 - DNA, 817 bp, Unknown
  Bacterial polypeptide expressing nucleotide sequence isolated from the Sargasso Sea
aattgtttggcaaataattcttaatctctttattcttacatttagaccttccaaaacagctaaagcatataaagaaatttggatgaaagataaaaatatgtctccgttactttattatacaaagaaacaaatggaaaagacttctaactatctcaaaaatgaaaatttaattatagattttgcaatgagatatggaaatccaagtattaaaagtaaaataaaaaaactacattcacaagggtgcgaaaatttagtaatattacctctataccctcaatatgctgcggccactacagccacagtttgcgacgaggtttatagaacactcatgaacatgagatggcagccctctttaagaataataccacattatgaatctaatcctttgtacatagaggcattggtaaaatctataaataaaaaaatcagtgagattgattggaaaccagatttaatattagcttcttatcatggaattccaaaaaaatattttgataaaggtgatccataccattgttattgtcataaaacgacaaggctaataaacgaaaagttaaactcaattgaaattaaaacgacgtttcagtcgaggtttggaccacaggaatggttacaaccttatacagacaaaactttagaagagctcccaaaagacggaaaaagaaatgtcttggctatatgtcctggcttttcttctgattgtgtagaaacattagaagaaatacttatacaaggcaaagaaagcttcatggagtctggtggagaaaattttgacatggttccttgcctaaatgataacgatgatcatatatttttg

SEQ ID NO: 288846 - DNA, 443 bp, Unknown
  Bacterial polypeptide expressing nucleotide sequence isolated from the Sargasso Sea
aatgaagaaaattgcgataatattgtttaaccttgggggtccggacagcccggaagctgtccagccgttcttgttcaatctgttcaacgacaaggcgattatcggcgcaccacaaccgatccgttggctgatcgcgaagctgatttcaacgcggcgcgcaccaattgcacaggagatctataaggaattgggtgggaagtcgccgcttttagagaataccgaggcgcaggctaaagcacttgaagagaccttgcgaacggcgcatcccgataaatcattcaagtgttttatttccatgcgatattggcacccgatggcggctgaaacggcggcaggggttcgcgactggaacgcggacgaagtggtcatgctgccactatatccgcaattctcgacgacgacgacggggtcatcggttgaaaattggcagaaagcgctcgtaa

SEQ ID NO: 288847 - DNA, 139 bp, Unknown
  Bacterial polypeptide expressing nucleotide sequence isolated from the Sargasso Sea
gatgaatgagcaccctaaaattaaatttggtaaaactggagttttaattgttaacttaggtacccccgactcaacaaaatggtcagacattagacggtacttaaaagagtttttatctgatagaagagttatagaagtt

SEQ ID NO: 288848 - DNA, 580 bp, Unknown
  Bacterial polypeptide expressing nucleotide sequence isolated from the Sargasso Sea
aatggaaaagataggcgtcctactaatgaatttaggggggcctgaacgcattactgatgttggcccattcttatataacttattttctgatcctgaaataattaggactccatttcctgcttttcagaaacctttggcatggctaataagtacactaagaagcactacttctcagcaggcttatctatctataggtggtggttctcctattagacggataactgaacagcaagctagagaattacaaagtaaattaagagaaagaggtttgaatgctacaacctatattgcaatgaggtattggcatccctttacagaatcagcgattgcggatatgaaagcagatgggataaatcaaattgttgtattacccttatacccacatttctctataagtaccagcggatcaagcttcagagaattaaaaaaactgcgagactccgatcctgactttaaaaaaattccaatgagatgtataagaagttggttcagtcaatctggatatttaaaatccatggttgaattgatttccgagcaaatttcactttgtgattcatctacaaatgcccatatatttttt

SEQ ID NO: 288849 - DNA, 632 bp, Unknown
  Bacterial polypeptide expressing nucleotide sequence isolated from the Sargasso Sea
gatgaacaaagaacacccaaaaataaactttggtaaaacaggagttctcctaattaacctcgggacaccagactctactagatggttagacataaggagatacttaaaagaatttttgtcagacaagagagttatcgaggtaaatccatttctgtggcaaataatattaaatttattcatcttaaacttcaggccttcaaaaactgcaaaagcttacaaagaaatatggatgaagaaagaaaatatgtcccccttgaggtattacacaattatgcagacaaaaaaattattggataaaattagcaatagcactttgatagttgattatgcgatgcgctacggaaaccccagtattaaaagcaaaatacaaaaattacaagaagctggttgtgaaagactcatcgttgtacctctctatcctcaatatgcagcagcaacaacagcaactgtctgtgatgaagtatacagagttttaatgggaatgagatggcaaccaagtttgaacataatacctcactacgaatctgaacccctttatattaaagctctttcaaatagtttaaaatccaaaatagcaaaattagattggaaccctgatctaatcatagcttcatatcatggaattccacaaa

SEQ ID NO: 288850 - DNA, 607 bp, Unknown
  Bacterial polypeptide expressing nucleotide sequence isolated from the Sargasso Sea
atgattgaagaacatccaaaagtacaatttggtaaaacaggagttttaattgtcaatcttggcacaccggactcaacaagttggtttgacataagaaaatatttaaaagaatttttatctgatagacgagttattgaggtaaacccaatattatggcagattattcttaatttatttatcttaaatttaaggccttctaaaacagcaaaagcttataaagagatttggatgaaagatgaaaacatgtcccctttaagatattatacattaaaacaggcagacaaacttaccaaagagataggaaataaaaatttattagttgattatgctatgcgttatggaaatcctagcattaagtctaaaattcatagcctcaaagaaaatggatgtgaaaatctaattgttttacctttatatcctcaatatgcagcggccactacagcaacagtgtgtgacgaagtttatagaactttaatgaagatgaggtggcaacccaacttacaaattatacctcattatgaatcagaaccactttatattgatgctttgattaacagtttgagaaaaaaaataaatgaaattagttggaaacccgacctggtaattg

SEQ ID NO: 288851 - DNA, 848 bp, Unknown
  Bacterial polypeptide expressing nucleotide sequence isolated from the Sargasso Sea
ttataaagaaatagggaacaaatctccaatccttgaattaacacaagaacaagcaaacagtttagaaaataacttaaaaaaaaaaggtgattataaatgttttgttgcaatgagatgttggcatcctagatcttctattgtaataaaaaaagtcagagaatataatccagaagaaataatacttttacctttatatccacaatactcagcctcgacctctggatcttcaataaatgaatggaaagatttatgtaaaaaagaaaattaccaaattaaaactaagactatttgttgctatccaacagaaaataactttatagaatctcatgtgacattaattaaaaaaacatttaaaaccttagaaaataataattttaaattaattttctcagcccatggattgcctgagaataaaataaaaaaaggtgatccttaccaatggcaaattgaggaaactgtaaataggataatgtctcaattatcaaatgagaatttagattatattataagctaccaaagtcgagtgggaccattaaaatggattggaccctctacagatgatgtaataattaagtatgctaaagaaaaaaaaggtattgtcatagtcccagtggcatttgtttcagaacactcagaaacattagtagaattagatattgaatatagaaaattagcagaaaaaaatggttgcagtttctataaaagagttccagcattaggtatagaggagaattttataaaaggacttacagagctagttttacaaaaagaaacaagaggaaattttgtatcatctgttatgtgtcctaataaatatgtaaaatgtgcatgtttagaaataaagtaaa

SEQ ID NO: 288852 - DNA, 249 bp, Unknown
  Bacterial polypeptide expressing nucleotide sequence isolated from the Sargasso Sea
aatgaaaaatgatcaagaacatccatctgtaaaatttggaaaaacaggagttttaatcgtaaatttgggaactcctgattcaacaagttggtttgatataagaaaatatctgaaagaatttttatctgacaggagagtgatagaggttaatccgatagtctggcagattatcttaaatgttttcatattaactttcaggccatctaaaacggcaaaagcttataaagaaatttggatgaaagacaaaaa

SEQ ID NO: 288853 - DNA, 856 bp, Unknown
  Bacterial polypeptide expressing nucleotide sequence isolated from the Sargasso Sea
ccagactcaacaaattggtgggatataagaaaatatttaaaagagtttctctcggatagaagagttatagaagtaaacccaattatttggcaaattatacttaatttatttatcttaacttttagaccttcaaaaactgcgcacgcatataaaaaaatttggagaaaagaaagcaatgagtctcctctactttattttacaaaaaatcaagcttctgatcttaataataaaattggtaatgaaaaaacatgtgtagattttgcaatgaggtatggaaacccaagtataaagtctaaacttaataaactgaaagatgtggggtgtgaaaatatcgttattcttcctttatatccgcaatatgcagccgcaacgacagcaacagtttgtgatgaagtttatagatcacttatgaaaatgagatggcaaccaagcttgcaaattgtacctcattatgaaagtgaacctctatacatagatgcaatcgtaaactctattgaaaaaaaagtaagagagataagttggaaacctgatttaataatttcatcttaccatggaatacccaaatcttactttgataaaggagacccttatcattgttattgtcacaaaactactagacttataaaagaaaaatttaaaagcatagaaatacaaacaacttttcagtctaggtttggaccacaagagtggcttactccatacactgataaaactatagaatctttacctagcaaagggattaaaaatttattggtagtatgtccagggtttgcctctgattgtgttgagacattagaggaaattaatatacaaggtagagagagttttttagagaaaggcggagtgaaattttgat

SEQ ID NO: 288854 - DNA, 865 bp, Unknown
  Bacterial polypeptide expressing nucleotide sequence isolated from the Sargasso Sea
gttatcgaagtaaatcctattatttggcaagtctttcttaacttattcatattaacctttagaccctctaaaacagcaaaagcatataaagaaatatggatgaaagaaaaaaatatgtcacctctcaggtattatacagagatgcaaactatgaagctatcaaagataattaataatgaaaatattattgttgattatgccatgcgttatggaaatcctagtataaatagtaggattagggtcttacatgaaaaaggatgcgaaaacctaatggttttacccctatatccacaatatgcagccgcaacaacagcgactgtgtgtgatgaagtttatagaaccttaatgaaaatgagatggcaaccaaatttaaaaatagttcctcactacgagtctgaaccattatatattagcgctttaaaaaatagtttagaaaataaaatctcaaacattgattggaagccagatctaatagtagcatcttatcacggcataccaaaaaaatattttgaaaaaggagatccttatcattgttattgtcataaaaccacaagactaatctcagaaagttttaacaaaattccaatacaaacaacttttcaatcaagatttgggccacaagaatggcttcaaccatatacagacaaaacactagaaaatcttcctaaagaagggaaaaaaaatgtactagtagtatgccctggtttctcatcggattgtgttgaaacactcgaagaaatttcaatacaaggaaaagaaagttttttaaaatctggtggaaataattttgatttggttccatgtctcaatgataatgaagatcacataaaattaataaaacatttagtaacaaaaaacttttaaa

SEQ ID NO: 288855 - DNA, 385 bp, Unknown
  Bacterial polypeptide expressing nucleotide sequence isolated from the Sargasso Sea
aatgaacgaagaacatcctcaagtaaactatggaaaaacgggagtgctactggttaatcttggaacaccagattcgactagttggttagatataagaaaatacttgaaagagtttttatctgatagaagagttatcgaagtaaaccctttaatatggcaaataatattaaacttacttattttaaatttaaggccatccaaaactgctgaagcgtataagaaaatttggatgaaaaaagaaaatatgtcccccttaaggtattatactataatgcaaaccaaaaaactcatggacaagattggaagcgacagtctcataatcgacttcgctatgagatacggaaaccctagtattaaaagtaagacactaaaattaaaaaatgca

SEQ ID NO: 288856 - DNA, 716 bp, Unknown
  Bacterial polypeptide expressing nucleotide sequence isolated from the Sargasso Sea
aatgattgaaaaaaatcacccacctataaaatatggcaatacaggtgtacttataattaatctaggtacacctgattctactaattggtttgatataagaaagtatctaagagaatttctttcggacagaagagttattgaagtaaatccaatagtttggcaaataattttaaatttgtttatcttaaattttaggccttttaaaactgctaaagcttataaagaaatttggatgaatgataagaatatgtcgcctcttctttattatacccaaaaacaagctgaaaaaatctcaagttcattttcaaaagaaaacatagttatagattttgcaatgagatatggaaatcctagtatcaagagcaagatttataaattgcataaaatgggttgtgaaaacttagttatacttcctctttatccccaatacgcagcagccacaaccgcaacagtttgtgatgaggtatacagaactttaatgaaaatgagatggcagccttcgttaaaaataattcctcattacgagtcggaccaactttacattgattcacttgttaattcgataaataaaaaaataaacgaaattggttggaaaccagatttaattatagcctcttatcatgggataccaaaaaaatactttgataaaggtgatccctaccattgctattgtcataaaacgacaagacttatcttagaaaaatttagttcaatta

SEQ ID NO: 288857 - DNA, 730 bp, Unknown
  Bacterial polypeptide expressing nucleotide sequence isolated from the Sargasso Sea
atgaccccagaccatccgaaaatcaattatggcaagacaggtattctaattattaatcttggtacacctgactcaactaactggctagatattcgtaaatatttaaaagaatttttatcagacagacgagtgatagaagtgaatcccataatttggcagataatacttaatttattcattcttactttcagaccttctaaaacagcaaaagcctataaagagatatggatgagagacaaagatatgtctcctctaagatattatactgagagccaagcacaaaaattgtctaaacaaattggcaatgaagatttaattgttgattttgctatgaggtatggaaatccaagtattaaaagcaaaattaacgaacttcagaaaaaaggttgtgaaagtttaattgttcttcccctttacccgcaatatgcagcagcaacaacagcaacggtttgtgatgaagtttatagaactttaatgaaaatgaggtggcaaccaaacctaaaaattatcccacactacgagtcagaacctctttatatagaagcaatcaaaaatagtattgaaaaaaaaattagtgaaattaattggaaaccagatttaataattgcatcttatcacggaataccaaaaaaatattttgataaaggtgatccctaccattgttattgtcataaaactaccagactgatttctgaaaaatattcagatatgaaattaagactacattcaa

SEQ ID NO: 288858 - DNA, 793 bp, Unknown
  Bacterial polypeptide expressing nucleotide sequence isolated from the Sargasso Sea
ttaacaacggatgagtcgccccttaggtttcatactcgtgcacagtcagaggctttatctcagcgtttcaaagagagcggggttcctgtcgagatagattgggcaatgcgatacgggacaccagctatcggcgatcgtctggaggaaatgcgggctaaaggttgtcgcaaaatacttctgctagctctttatccgcaatatagtgccactacgacggcaagcgcttatgataaagcttttcaggctttgcaaaagatgagatggcaacctgtaatcagaacatcaccggcatattttaacaacaaagattatataaggatcttagcaaagtcgattaatgaacatatagcattcctcgattgggaacccgatgtgctcttgacgtcgtttcatggtttacccaaacgttatttggacgcgggcgacccttaccactgtgagtgcgcacaaacatcccggcttttagctgaggaaattggctggactggtgacagggttagattagcttttcagtccaggtttggtagggaagaatggttgaagccatacatacaagaggtaataactgaattaccatcgcaaggcataaaaaaaatagcgataatctcgccggggtttatatccgactgcgttgaaactttggaagaagtcgcgataggtttgaaggagagttttcttgaagcgggtggggaaaaatttacttacgtgccttgcttaaactcctcagaagacagcattgaccttttgcaggaactcgctctacaggagttgcgtggttggattccagaataaa

SEQ ID NO: 288859 - DNA, 664 bp, Unknown
  Bacterial polypeptide expressing nucleotide sequence isolated from the Sargasso Sea
atgactccaaatcatccaaaagttaattatggtaaaactggtgctttaattattaatcttggtactcccgattctactagttggttagatataagaaaatacttaagggaatttttatcagacagaagagttatcgaagtaaaccctattatttggcaaataatactaaacttatttatacttaattttaggccatcaaagactgctaaagcgtacaaagaaatatggatgaaagataaaaatatgtcacctcttagatattttacacagaaccaagcagaaaaattatctaaacagattggtgatgaaaagttaattgttgattttgctatgagatatggaaatccaagtattaaaaataaaattcatggacttaaaaataaaggatgtgaaaatttaattattttaccactttaccctcaatatgcggctgcaacaacagctacagtttgtgatgagatttatagaactgtaatgaaaatgaggtggcaaccaaatttaaaaataatttcgcattatgagtcagaacctctttatatagaagcaatcaaaaatagtattttaaaaaaaattaatgaaattaattggaaaccagatttaatagttgcctcatatcatggaataccaaaaaaatattttgataaaggagatccatatcattgtt

SEQ ID NO: 288860 - DNA, 484 bp, Unknown
  Bacterial polypeptide expressing nucleotide sequence isolated from the Sargasso Sea
cctgtattccgcccacggcctgccgaaaaaaattgttgaagcgggcgatccctatgcccatcaggtcgaacggacagcagcggctgtgcacgcaaagttgggcgatcagacggccgaccatgtgatctgttatcaaagccgggtcggaccgatggaatggctgaaaccctataccgaagacgaaatccgtcgcgcgggcgcggacggtaaggcactggtggtggtgccggtcgccttcgttagcgaacactccgagaccctagtcgaactggatattgaatattcggagctggcggaaaagtccggcgtgccggcctatattcgtgcccccacggtcaacgacgaccccgcctttatcgaaagtctggccggtatcgtgcgcgcggcgcgcgacaccggaacggcgacgggcggtgagatatgccccgccggttttgccgactgcccctgcaatggtcgcgcttctacgcgggacttcgcctga

SEQ ID NO: 288861 - DNA, 592 bp, Unknown
  Bacterial polypeptide expressing nucleotide sequence isolated from the Sargasso Sea
aatagttcctctttacccccaatatgctgctgcaactacagcaaccgtttgtgatgaagtgtatagagttttgatgggaatgagatggcagcctagcttacaaatagtgcctcattatgagtctgagccattatatataaaagcattagtaaacagtttaaaacttaaaatatctcaattaagctggaaaccagatttaattctagcttcataccacggcataccccaaaaatattttgataaaggggacccgtaccactgttattgtcataaaactacaaggcttattttagagaaattcaatgaaattgaaattaaaacaactttccaatcaagatttggtccggaagcttggcttaaaccttatactgacaaaactcttgaggttttgccaaaagagggtaaaaaaaacatacttgtaatttgtcctggtttttcatcagattgtgttgaaactttagaagaaatttcaatacaagggaaagaaagttttttaaacgcaggaggaaaaaattttgatacagttccatgtttaaacgataacgttgatcatataaatttattagaacatcttgtaaaaaaaaatttgtaa

SEQ ID NO: 288862 - DNA, 658 bp, Unknown
  Bacterial polypeptide expressing nucleotide sequence isolated from the Sargasso Sea
atggttaaatatataggtgaaaaaaattatgagcatggcagtaaagaaaaaattggtgttttaattactaacctaggcactccagacgctccaaataaaaaagaactaaaagtttatttaaatcaatttttatcagatccaagagtaatcgaattacctaaaatcttatggcaaattatattgaagctagtaattttgcaaataagaccatcaaagtcagcagaagcatacaaacaaatttggactgataagggctctccacttttagatattgcaaacagacaactaaataaaattcaatcatctttttcttcaaaaaatgaaaatatagtttttgaagttgggatgcgttatggaaacccctctattccagatgctttatcaaaacttcaaaaaaaacaagtaagaagattattagtcttaccaatgtatccgcaatattgtgcagcaacaacaggtagtacatttgatgaagtaactaatgttttgcaaaaatggcgttggatacctgaaattcgttttattaatcaatactttgaagaaaaaaattatattgaagcattatcaaattctataaagacattttggaaaaaaactcctaaaccacaaaaaattatttttagttatcatggtataccaaaaaaggtatttgactaat

SEQ ID NO: 288863 - DNA, 709 bp, Unknown
  Bacterial polypeptide expressing nucleotide sequence isolated from the Sargasso Sea
aatgaaagttgcggtaatattatttaatttaggaggacccgataaactggaaaatgtcgagccttttttatttaatctttttaatgatcctgcaattttaaatttaccttcatttataagatatcctctagcaaaactaatctcaaaaaaaagagccccaatagcaaaagatatttataaagaaattggaggatcttctcccattttaaaattgacccaagatcaagccgaaagtttggaaaaatcccttaatagcaatgaaaaagcctttaattataaggtatttattacaatgagatgttggcacccaagagcatccgaaacaattaagcaggttaaggattttaatccatcggaaattattttacttcctttgtacccccagtactctgcggcaacctcaggctcttcaattttggaatggaaagaaattgcaaaaaaaaataatcttaatatagaaacaaatactatttgttgttacccagaagatgataaatttataaagtctcatatagaattaataagaaaaaaaataaaaggaataagtaactttaaactaattttttcagcacatggcttaccagaaaaaaatataaaaaaaggagatccttatcaatggcaggtagaacggggtgtaaaaaaaattattgagggaattaacgacccaagtattgattatattttaagttaccaaagcagagtcgggccc

SEQ ID NO: 288864 - DNA, 731 bp, Unknown
  Bacterial polypeptide expressing nucleotide sequence isolated from the Sargasso Sea
aatgattgaaaaagatcatcctccagtaaagtttggcaaaaccggcgttctgataattaatttaggaacacccgactctactagttggctcgatataagaaaatatttaagagaatttctttctgatagaagagttattgaagtaaaccctgttatttggcaaataattttaaatgtttttattttaaattttaggccttccaaaacagctaaagcttataaggaaatatggatgaaagataaaaatatgtctccactgctctattatacaaaaaagcaaagtgagaaaatttcaaacttaatttctaaagaaaatatcattatagattttgcaatgagatatggaaatcctggtattaaaaccaagattcataaattacatgaaatgggctgtgaaaatttagtcatacttcctctctatccacaatatgctgctgccacaacagcaacagtttgtgatgaagtttatagaactttaatgaaaatgagatggcaaccctctttaaaaataatatctcattacgaatctgatcctctttatattggggcactcgttaattctataaacaaaaaacttaacgaaataaattggaagccagagctaattatagcttcttatcacggcataccaaaaaaatattttgataaaggtgatccttatcattgctattgtcataaaacgacaagacttatttcagaaaaatttagtttcattaaaattaaaactacat

SEQ ID NO: 288865 - DNA, 453 bp, Unknown
  Bacterial polypeptide expressing nucleotide sequence isolated from the Sargasso Sea
atgcactcgttaattccattaacaaaaaacttaacgagataaattggaagccagatctaatcatagcctcttatcatggcataccaaaaaaatattttgataaaggtgatccttatcattgttattgtcataaaacgacaagacttatttcagaaaaatttagttcaattaaaattaaaactacatttcaatcaagatttggtccacaagaatggctccaaccatatactgataagactctagaaaacttgcctaaagaaggagtcaaaaatgttcttacaatttgcccgggcttttcatctgactgtgtcgagactttggaggaaattttaattcagggtaaagagagttttactagtgctggaggaggaaattttgatatggttccttgtctaaatgatagtgatgatcatatctttttattaaaatccttaattgaaaaaaacatttgat

SEQ ID NO: 288866 - DNA, 673 bp, Unknown
  Bacterial polypeptide expressing nucleotide sequence isolated from the Sargasso Sea
agtaatattacttccattatacccccaattttcagccgctacttctggatcatcaattatggagtggaaagcaatcgcaaagaaaaatagtttcaatgttaacacaagtacaatttgttgttaccctcaagaaagtaaatttataaaagctcattctgagttaataaaaaaaaaaattgaaggattaaaaaattttaagttaattttctctgctcatggacttccagaaaaaaatattaaaaatggggatccgtatcaatggcaagtagaacaaagtgtaaaaaaaattatggaaaacttaaataataaaaatatagattatgttttaagctatcagagtagagttggaccattaaaatggattggaccttctactgaagatataattattgagtattctaaaaaaaaaatgcatttagtaattgttccaatagcttttgtttcagaacattcagaaactttagtagaacttgatatagaatatgaaaaattagcaaaaataaatggttgtcaaaattataccaggatcgaagcactaggaattaatcattactttattgaaagtttatccaatataatacttaataaggaggaaaataaattcaaaaataatttatatccaccaaaagaaagatgtcccactaatttgactaagtgtccctgtcttaattaa

SEQ ID NO: 288867 - DNA, 272 bp, Unknown
  Bacterial polypeptide expressing nucleotide sequence isolated from the Sargasso Sea
aacctttcaatccagatttggcccacaagagtggcttcagccatatacagacaaaactttagaaaacctaccaaaggaaggaaaaaaaaatgttcttacgatatgcccaggcttttcctctgattgtgttgaaacattagaagaaatattaattcagggtaaaaaaagctttatggattcgggaggagagaattttgacatgataccatgtctaaatgataatgatgatcatataagtttactaaaaaatttaattcaaaaaaatatttaat

SEQ ID NO: 288868 - DNA, 840 bp, Unknown
  Bacterial polypeptide expressing nucleotide sequence isolated from the Sargasso Sea
aatgaaaaaagctgtaattttatttaatttgggtggtcctgataaattagaaaatgttgaacctttcttgttcaatttatttaatgatcctgcaattttaaatttacctagtttatttagatttccattagctaagataatagcaaatagaagagcaccaactgcgaaaaagatctatgaagaattagggggcagttctcctatcttaaagcttacttcagaacaagcgactgccctagaattaaaacttaacaaagatgatgattcagctaattacaagtgttttatagtaatgagatgttggcatccaagagcagaaaatgttgtaaaagaagtgatcaattataatccagatgaactaattttgatgccactttatccacaatattcagcagcaacatctggttcatctattaaagagtggaatgatatttgtataaagaataattttaaagtgaaaacaagcactatttgttgttatccaacagatgaatactttgttcaagcgcataggaacgagataatgaaaaaaatcgaaaatttgaagaggtttaagttaatattttccgctcatggtttgcctgaaaaaaatattattaaaggtgatccttatcagtggcaagtagaacaatctgtaagtaaaattgttgaatctttaaatataaaagatctagattggattttaagctatcaaagtcgggttggacctttaaaatggattggcccatctacagaggatataattgtagaaaactctaaactaggaaaacatattgttttggtccctattgcatttgtttcagaacattctgaaacgttggttgaattagatatagaata

SEQ ID NO: 288869 - DNA, 397 bp, Unknown
  Bacterial polypeptide expressing nucleotide sequence isolated from the Sargasso Sea
catgaaaacagcggtagttttatttaacttgggcggaccagacaaacaagaaagcgtaaaaccttttttatttaatctgtttaatgatcccaacatatttagacttccaaatcccttcaggtatttattggcaagacttatatcttcccttcgcaccaaagaggccactgaaatttatgcagaaatagggggtaaatcccctattcttgaaattacaaactcccaagcagaggcccttcagaaagagttagaaaacaaaggcatcgagaacaaagtatttgtttgcatgagatattggcatccaatgacagctgaggtagtttcaaaagtcaaagactataacccagacaaaatatttttactgcccctgtatccacagtactccaccacaacaaca

SEQ ID NO: 288870 - DNA, 464 bp, Unknown
  Bacterial polypeptide expressing nucleotide sequence isolated from the Sargasso Sea
ggccgagacagttaagaaaaatattataaataaaaataaattagacaaattaatcgtttcttttcatggcatccccaagagatattttatggctggagacccttatcattgccattgtataaagtcagctcgacttctaaaggaagagcttaaatggccagatgacaaaattttagtaacatttcaatctagatttggacctgaaccatggcttcaaccttatactgacgaaacaattatagacctagccaaacagggtcaaaaaaatattgctgttgttgctccgggatttatatcagattgtttggaaacgcttgaagaaattaatgttgaagcaagagagttatttattcaaaatggtggggaaagtttcgaatatattccctgtctaaatgataatgaatattcaataaaattcctggaatatattattaaacaaaaccttcttgggtggaactcttaaa

SEQ ID NO: 288871 - DNA, 685 bp, Unknown
  Bacterial polypeptide expressing nucleotide sequence isolated from the Sargasso Sea
gatgccgctctatcctcagttttcgacgacaacgacggaaagcttcacccgtatctggaaacagtcagcgtatacggctgagctagatgtgccgacggccgatatctgctgttggccggaagcggacggatttatcgatgcgatgacgcgcgccgccgaggctgccatcgaccgcttgcccaacggggtggcgtaccgcgttttgtattccgcccacggtttgccaaaaaaaattgttgaagccggcgatccctattcccatcaggtcgaacgaacgtcggtggctgtgcatgcaaagctacgcgatccggcggccgatcatgtgatctgttatcagagccgggtcgggccgatggaatggctcaaaccctataccgaagacgaaatccgccgcgcgggtgcggacggcaaggcgttggtggtggtaccggttgccttcgttagcgaacattctgagaccctagtcgaactggatatcgaatattcggaactggcggaagaggtcggcgtaccggcctttgttcgcgcgcccacagtgaacgacgatccagcctttatcgaaagcctggccagcatcgtgcgcgccgcccgtaacaggggaacggcggcgggcggcgagaaatgcgccaaaggttatgctaattgcccctgcaatggccaggattctgcggaggaggccgcttga

SEQ ID NO: 288872 - DNA, 661 bp, Unknown
  Bacterial polypeptide expressing nucleotide sequence isolated from the Sargasso Sea
aatggaaaatgataatcatccaaaagtaaattttggaaaaaacggtgttttgctagttaatctaggcactccagactcaacgtcatggtgggatattaggaaatatttgagagagtttctttcagataaaagggttattgaagtcaatccgatgctttggcaaataattttgaatctttttattctaaactttagaccgtctaaaactgcaaaagcttacaaagagatttggatgactgatataaatgagtccccattgagatattacacaaagcagcaaactcaaaaattaaaaaaaaaatttaacagtcaaaatataataattgattatgcgatgagatatggaaatccgagtataaaatctagacttcaaaagcttcaatccgaaggctgtgaaaatattatactttttccactttatcctcagtatgcagcagctacgacagctacagtgtgcgatgaggtttatagatgtttgattaaaatgagatggcaaccaagtctgcaagttattccacattatgagtctaatgaagattatattaatggactagttaatagtataaaaaaaaaattatccgaaatcccttggaagccagatttaatcgtggcttcatatcatggtattccacaaaaatattttgataaaggagatccttat

SEQ ID NO: 288873 - DNA, 790 bp, Unknown
  Bacterial polypeptide expressing nucleotide sequence isolated from the Sargasso Sea
gccaaggcttataaagaaatttggatgaaaaacgaaaatatgtctccccttctatattatacaaaaaaacaaagcgaaaaaatttctcagttattacaaaaagagaatgtcgttttggattttgcgatgaggtatggaaatccaagtattaaaaaaaagatacataaattgcatgaaatgggatgtgaaaatttagttatccttcctctttatcctcaatacgcagcagcaacaacagccacagtttgtgatgaagtttatagaacattgatgaaaatgagatggcaaccctctctaaaaataattccacattatgaatccaattccctttatattgatgcattagttaattcgataaataaaaaaattaatgaaattgattggaaaccagatttaattatagcttcataccatgggataccaaaaaaatattttgataaaggtgatccgtatcactgctattgtcacaaaacaacaagacttatttctgaaaagtttacttctattaaaattcaaactacttttcagtcaagatttggtccacaagaatggcttcagccatatactgacaaaactttagaaaatttacctaaagatggaattaaaaatattcttacaatttgtccaggtttttcatcagactgcgtagaaactttggaagaaatattaattcaaggaaaagaaagttttataaatgctggagggttaaattttgatatggtcccatgtttaaacgacaatgatgatcatatatttttgttaaagtctttaattgaaaacaatctctaat

SEQ ID NO: 288874 - DNA, 475 bp, Unknown
  Bacterial polypeptide expressing nucleotide sequence isolated from the Sargasso Sea
atgaataaagaacatccaatagttaattttggtaaaacaggcgtattactaatcaatttaggaacccccgactccacaaattggtgggacattagaaaatacctaaaagaatttttatctgacagaagggttattgaggtgaatcctttaatttggcagataattttaaatttatttattttaacctttagaccctccaaaacagcaaaagcctacaaggaaatatggatgaaggatataaacaaatcaccactaaggttctatacagagtcgcaaacagacaagcttaatgaaaaaattaaaaatgaaaatataataatagattatgcaatgagatatgggaatccgagcataagaagcaaaattgaaaaaatgcataataacgggtgtgaaaaattaattatcttacccttataccctcaatatgcctcgccaaccactgcaactgtttgtgatgaggtttttagagtattaa

SEQ ID NO: 288875 - DNA, 924 bp, Unknown
  Bacterial polypeptide expressing nucleotide sequence isolated from the Sargasso Sea
ccagaagggactgattactggtcaatgagaaaatatttaaaacaattcttaatggaccaaagggtcgtagatatttttagaccactttggtggttaatcttgaatggaccaattttgacttttagaccttcaaaatctgggaaggcatataaaaaaatatgggataaagataaccacggttccccacttaggaaattcaccataaatcagaccataaaattacaaaaatcttttaaaaataacaataatcttttagttgattatgcaatgagatatggcgtacctgaaatagataaaacacttaataaaatgattgtaaaaggatgctctagagttcttcttgttccattatatcctcagtatgcagcaagcacgactgcaacagttaaagatgaggtgtttaagtggatgttaaaacaaagatggcaaccagacatcaggactattgcaccttggtttgacgataaaaattatattaaatccttagcaaacacacttaaagatcatctaaaaaatccgaaaaaattagatatgttattagtttcatttcatggaataccaaagagatattttatggctggagatccatatcattgtcactgcatcaaaactgctcgattgctcaaggaagagcttaaatggcctgaagaaaaaattttagttacttttcaatctagatttggtcctgagccatggttagaaccctacacagataaaactattgaagaccttgcaaaaaaaggagcaaaaaatatagctgtaatagccccgggttttatttctgactgcttagaaacactcgaagagataaatgttgaagctagagaaatattttttgaaaatggtggaaaatcatttgaatatataccatatctgaatgataataagtactcaataaaatttttagatagcctaataaaaaaa

SEQ ID NO: 288876 - DNA, 517 bp, Unknown
  Bacterial polypeptide expressing nucleotide sequence isolated from the Sargasso Sea
aatgagatggcagcctagcttacagattgtacctcattatgaatctgaacccttatacatagatgcattagtaaacagtattaataagaaagttacagaattaaattggaaaccagatttaataatagcttcttaccatggaatacctaaaaaatattttgaaaaaggtgatccttatcattgttattgtcaaaaaacttcaagactaatgtcagaaaaatataaagaaattcctatcagaaccacgtttcaatctcgttttgggccacaggagtggctacagccttatactgataaaactttagagaatttaccaaaagagggtaaaaaaaacattttagttatttgtccaggattttcgtcagattgtgttgagacattggaagaaattgcaatacagggaaaggaaagttttatgaaatttggaggaaaaaactttgatgttattccttgtctaaatgataatgacgatcacataaatttaataaaaaaactcattagtaattttatcctataa

SEQ ID NO: 288877 - DNA, 275 bp, Unknown
  Bacterial polypeptide expressing nucleotide sequence isolated from the Sargasso Sea
catggcccgcgtcggcgtcctcttgctcaatttgggaggtccagagcgcattcaggacgttggtccgttcctttacaaccttttcgctgatccggagatcattcgtctgccgataccggcgctgcagaagccactcgcctggctgatcagcaccctgcgcagcagtaagtcccaggaggcctaccgctccattggtggcggttcaccacttcgccggatcaccgaacagcaagcccgtgacctccagagtctgttgcgtcagcgcggtgtagatg

SEQ ID NO: 288878 - DNA, 730 bp, Unknown
  Bacterial polypeptide expressing nucleotide sequence isolated from the Sargasso Sea
atgaaagacctcaataacagtcttattgaagatggatcgagagttacgacctctataggtcccacacctgaaaagcatcctcaggttaacccatcgaaggttggtgtgttagtagcaaatttgggtactccagactccactgactactgggcaattagaagatatttaagtgagttcctttctgacagaagagtaattgattataccccttggatttggcaaataatattacaaaccataatattaactaggagacctttctctagtggagcagcttataaatcaatttggaataatgagcgggacgaaagccctttgctcacaaatgttcgtgagcagactgacaagcttagaataagtttgcaaaagacctttggagactctgttgtagtagaattttgcatgaggtacggcaatccgtctacaaaaaaaacaatttttaaactgaaggaattgggttgcaataaaattgtatttttgcctctttatccacagtacagtgctccaacaaccgggacggcaaatgatgaggcttttagggctctaatgtctttgaattggcagcctgctataagaacaataccagcatattttgataatcctgactatatcaaatgtttagcaaattcaattttagaaaagtataaaactttaagtagagaacctgaccacctcgttgtatcgtaccatggagtacctgagaggtacctgttggctggtgatccctatc

SEQ ID NO: 288879 - DNA, 904 bp, Unknown
  Bacterial polypeptide expressing nucleotide sequence isolated from the Sargasso Sea
attagaaaatacttgaaagagtttttatctgacagaagagtaatagaggttaatcctataattgggcaaattatactgaatgttattatattaaatttaagaccttctaaaacagcaaaagcttataaagaaatatggatgaaagaagaaaatatttctccacttttatattatacaaaaaaacaagctgagaaattatcgagtcaaatatcaaaagagaatttgataatagactatgctatgagatatggtaaccctagcataaaaggtaaaattaagattcttcatgataaaggttgtgaaaatttaattgtacttccgttgtatccacaatacgctgcagccaccacagctactgtttgtgatgaggtatatagaactttgatgaaaatgagatggcaaccatcattaaagattattcctcattatgagtctgatcctttgtacgtagatgccttagtgaattctttaaataaaaagataaaagaactcaattggaaacctgacctaatattagcatcgtatcacggtattcctcaaaaatattttgataaaggagacccttatcattgctattgtcacaaaaccacaaggctcatttcggaaaaatttagttcgattgaaattaaaacaacattccagtctagatttgggcctcaaaaatggcttcagccttatactgacaagactttagaaagtctaccaagtgagggaaaaaagaacgttttagctatttgtccgggctttgcttcagattgtgtcgaaacattagaggaaatacttattcaaggcaaagagagcttcttagactctggaggagaaaattttgatatggtgccttgcttaaacgatagtgatgatcatataactttacttaaatctttaatccaaaaaagtatttaat

SEQ ID NO: 288880 - DNA, 751 bp, Unknown
  Bacterial polypeptide expressing nucleotide sequence isolated from the Sargasso Sea
atttccccgctcctttattatacaaaaaagcaaagtgagaaaatttcaaattcactattaaaagaaaacattattatagattttgctatgagatatggaaatccgagtattaagagcaagattcataaattgcataaaatgggttgtgaaaacttggtgatacttccgctttatcctcaatacgcagcggccacaacggcaacagtttgtgatgaagtatatagaactttaatgaaaatgaggtggcaaccttctttaagagtaattcctcactatgaatccgacccactttacattgacgcactcgttaattcgattaataaaaaaataaaagaaattaactggaaaccagacctaattatagcttcttatcacggaataccgaaaaaatattttgataaaggtgatccttatcactgttattgtcataaaactacaagacttatttcagaaaaatttagttcaattaaaattaaaactacatttcagtcaagatttggtccacaagaatggctccaaccatatactgacaagactttagaaaacctacccaaagaaggtgtcaaaaatgttcttataatctgtccaggctttgcgtctgattgtgtggaaactttagaagaaatacaaattcaagctaaagaaagttttttaaattcaggaggagaaaattttgatatggtctcttgtttaaatgataataatgatcatatcattttattaaagtccttaattgaaagaaatatctgat

SEQ ID NO: 288881 - DNA, 569 bp, Unknown
  Bacterial polypeptide expressing nucleotide sequence isolated from the Sargasso Sea
aatgacaccagagcacccaaaagtaaattacggtaaaaaagggattttaattataaatcttggtacaccagattctacaaaatggttagatataagaaaatatcttaaagaatttttatccgacagaagggttatcgaagtaaatcctttgatttggcaggtaatacttaacttatttatacttaactttagaccctctaaaacagcaaaagcttataaagagatatggatgaaagataaaaacatgtcaccacttagatattttacagaaagacaggcagaaaaattatctgaacaaattggaaacgaaaaaataatagttgatttcgccatgaggtatggaaatccaagcattaagagtaaaattcatagacttcataaagaaggttgtgaaaatttaatcatcttgcctctttatccacaatatgcagctgcaacaacagcaactgtgtgtgatgaagtatatagaactttaatgaaaatgagatggcaacctagtctaaaaataatcccgcactatgagtcggagccactttacattgaggcaattaaaaacagtattaaaaaaa

SEQ ID NO: 288882 - DNA, 760 bp, Unknown
  Bacterial polypeptide expressing nucleotide sequence isolated from the Sargasso Sea
tcagagaaaaccaattattccgttgaaatagctatgaggtatcagcatccatcaatcaaatatgcaatagaaaaactaatcaataagggatgcaaagagataattgccgttcccctttatccgcattacgcacaatcgacaatattaacaacagagaataaaattaaagagatatcaacttccttaggaggtaatctaaaagtatcatttattagacctttttataatgaagaaggctatatcgatgctttaacatctttgatcaaagaaagtttaccatctgattatgatcatttgcttttcagctatcatggtataccagaaagacatgtcaaaaatactgatccctctaaaacacattgcctgaaagtaaaagattgctgcaatataaaagcagatgcacatcagttttgctatagacaccaagttttagagacaacaaaactttgtgctaaaaagttaaatatagaaaaagaaaagtggagtgtttctttccaatctagaattggtccaggttggcttaaaccttttactgataaggtattagatgaattgcctaaaaagaatataaaaaagttggctgtagtatgccccgcttttgttgcggataatttagaaacattggaagaaattaatataagagctagagaacaatttattcataatggaggaattgaatttacctacattccttgtttaaatgataataataattgggtagactttttaagtaattatataattcaaaagggaggctaga

SEQ ID NO: 288883 - DNA, 649 bp, Unknown
  Bacterial polypeptide expressing nucleotide sequence isolated from the Sargasso Sea
ccgagtataaaaagtaaaataaaaaatttatatgaaaaaggttgtgaaaatttagttatactgccgctatatcctcaatatgcagcagcaacaacagcaactgtttgtgacgaagtatatagaacgcttatgaaaatgaggtggcaaccatcaataaaaataataccacactatgagtcacatcctttgtacatagatgcacttgtgaactcattaaataaaaaaattaaagaaataaactggaagccagatttaatattggtatcttatcatggtatacctcaaaaatactttgataaaggagatccatatcattgctattgtcaaaagactacaagattaatttcagaaaagtttaactcaatagagcttatgacaacttttcagtcaaggtttggaccccaaaaatggcttgaaccttatacagacaagactttagagaaattaccgagtgaaggtaaaaaaaatgttctagcaatatgtcctggcttttcttcagattgtgtagaaactttagaggaaatacttattcagggcaaagaaagctttttagagtctggaggagaaaatttcgatatggttccatgtttgaatgacagtgatgatcatatagctctattaaaatcattagttcaaaaaaatatataat

SEQ ID NO: 288884 - DNA, 567 bp, Unknown
  Bacterial polypeptide expressing nucleotide sequence isolated from the Sargasso Sea
cagctgctactacggcgacagtgtgtgacgaagtatatagaaccctaatgaaaatgagatggcaaccctctttaaaaatcattcctcattacgagtctaatccattatatattaaggctctggtaaattctattaataaaaaaatttcagaaattaattggaaaccagacctaattgttgcatcttatcatgggataccaaaaaaatattttgacaaaggtgatccttatcactgctattgttataaaacgtctagattaatttcagaaaaatttaactctgtagaaataaaaacaacatttcaatctagatttgggccccaagaatggcttcaaccttatacagataaaactttagaaagcctaccaaaagagggtaaaaaaaatattctcatgatttgccccggtttctcttcagattgtgttgaaactctcgaagagatattgatagaaggtaaagagagcttcattgaagctgggggggaaaattttgatatgatcccgtgtttaaatgataatgatgatcatatctttttactaaaatctttaatacaaaaaagcatttgat

SEQ ID NO: 288885 - DNA, 457 bp, Unknown
  Bacterial polypeptide expressing nucleotide sequence isolated from the Sargasso Sea
aatgacgccagaccatccaaaaattaattatggcaaaacaggtattttaattgttaatcttggtacacctgactcaacgagctggttagatataaggaaatatttaaaagaattcttgtcagacagacgagtaatcgaagttaatcctttaatttggcaggtaatacttaacttatttatacttacctttagaccttctaaaacagccaaagcttataaagaaatatggatggaagataaaaatatgtctcctttaagatattttacagaaagacaagcagaaaaactatctaatcaaattagcaatgaagattttattgttgatttcgctatgagatatggaaatccaagtattaaaggtaaaattcatggtcttcaaaaaaaaggttgtgaaaatttaattatactcccgctttatcctcagtatgctgccgcaacaacagcaacagtttgtgat

SEQ ID NO: 288886 - DNA, 154 bp, Unknown
  Bacterial polypeptide expressing nucleotide sequence isolated from the Sargasso Sea
aatgaaagatcatccaaaaataaatttcggaaaaactggcatattacttgtaaacctaggtaccccagactcaactagctggcttgacataagaaagtatttgaaagaatttttatctgatagaagagtaatcgagctaaatcctattgtctgg

SEQ ID NO: 288887 - DNA, 875 bp, Unknown
  Bacterial polypeptide expressing nucleotide sequence isolated from the Sargasso Sea
agacagaagagttatgaggtttaatcccttgatttggcaagtaatactcaacttatttatacttacttttaggccctctaaaactgcaaaagcttataaagaaatttggatgaaggataaaaacatgtcaccactaaggtattttacagaaaggcaagctgaaaaactatctgagcaaattggtaatgataaaatactagttgattttgctatgaggtatggaaacccaagtattaaaagtaaaatccataaacttcaaagagaaggttgtgaaaatttagttatattacctctttatcctcaatatgcagcagcaacaacagcaactgtatgtgatgaagtttacagaaccttaatgaaaatgaggtggcaaccaaacctaaaaataattcctcattatgagtcagaacctctttatatagaggcaataaaaaaaagcattgtaaataagttaagtgaaattgactggaaaccagatttattaatagcatcttatcatggtataccaaaaaaatattttgacaaaggtgatccgtatcactgttattgtcataaaactacaagactaatttcggaaaaatactcagatattgaaataaaaactacatttcaatcaagatttggtcctcaagagtggttaaaaccctatactgacaaaacttttgaagctcttccaaaagaaggaaagaaaaatattttagttatttgtccggggtttgcatctgattgtgtagaaactctagaagaaatatctattcaaggaaaagaaagttttattaattctggtggtaaaaacttcgaaatggtaccatgtttgaatgacaatgacgaccatattctccttctaaaaaatcttatcacaaaaaatatttaat

SEQ ID NO: 288888 - DNA, 582 bp, Unknown
  Bacterial polypeptide expressing nucleotide sequence isolated from the Sargasso Sea
gatggaagatcaccctaaaattaaatttggaaaaactggagttttaatcgtcaacttgggcaccccagactcaacaaaatggctagacataaggaggtatttgaaagaatttttatctgatagaagagttatagaagttaatccaattttatggcagctaatactaaaccttataattttaaacttaagaccctctaaaacagcaaaagcttacaaggaaatttggatgaaagatataaacatgtcaccattaatgtattatacaaaaaagcaagctgagaaagtctcaaattcaatatcgaatgaggaaatattagtggactttgcaatgagatacggaaatccgagtattaaaagtaaaattaaaaagttacacgataatggttgcgaaaatctcgtaattttacctttatatccacagtatgctgctgctactacagcaacagtatgtgatgaagtttacagaacattaatgtctatgaggtggcaaccatcacttaaaattattccgcattatgaatctgatcctttatacattgatgctttagtgaattctattaattctaaaatagaaaacataaa

SEQ ID NO: 288889 - DNA, 593 bp, Unknown
  Bacterial polypeptide expressing nucleotide sequence isolated from the Sargasso Sea
tgtgcttccattgtatccacaatatgcagccgcaaccacagcaacagtttgtgatgaggtttacagaactttgatgaaaatgaggtggcaaccaaaccttaagataattcctcattatgagtctgaacctctttatattgaggcaattaaaaatagtatattaaaaaaaattagtgaaattaattggcagccagatttaataattgcatcttatcatgggatacctaagaaatattttgataaaggggatccatatcattgttattgtcataaaactactaggctaatctctgaaaagttttcagatattgaaattaaaacaacgtttcaatcaagatttggccctcaagaatggttgcaaccttatacggataaaacttttgaagctttgcctaatgaaggcaaaagaagtattttagtagtttgccctggattttcttcggactgtgtagaaacgttggaggaaatttctattcagggaaaagagagttttattaaatcaggtggcgaaaattttgacatggttccatgcttaaatgataacgaagatcatatagttttattaaaacatcttatcatggaaaatatttaat

SEQ ID NO: 288890 - DNA, 864 bp, Unknown
  Bacterial polypeptide expressing nucleotide sequence isolated from the Sargasso Sea
taaagagagtgcaaaggcctatcaatctctgtggacagatagaggctctcctttactttaccatacagaagatttggcgaagggagctcaagagctcatgggtgaagaggctgatgtctattatgctatgcgctatcaaaagccttcgatagcttctgttttggaaaagatacgccaaaagcccatagaagagcttatcatacttcctctcttccctcagtatgcttcagcaaccacaggttctgttatgcaggaagttatgaagcacttgtcctcttgggagctttttaccaatgtcaaaatgatctcttcttttgcagagcaccctgcttttattgatgctttggcagaaaaggctagggacaaggatctagggaagtatgaccaccttttaatgagtttccacggacttcctgaatctcaaatcaagcggcaagatcgcttctcatggtgtggtaaagaggggtgctgtgataagatggttcctcagaactctctttgttataaagcacagtgcgtggcaacagctagagcgcttgccaaagcgttagagataccctcttctcgctatacaatctgctttcagtctcgtttaggtaagtctgtatggattcagccatacactgctgatgttttagaatctctggctaaaaagggagcaaaaaagctcttagtttactccccagcatttgtctgtgattgcttggaaacaaccatcgaaattggagaggaataccaagagctctttcaagaaatgggaggggagagcttaaccttagttgaagggcttaatagctcacctaggtggattgaggctctttgtgaaatagcctttaaccctgcttacgcgcagcatatgagcgc

SEQ ID NO: 288891 - DNA, 526 bp, Unknown
  Bacterial polypeptide expressing nucleotide sequence isolated from the Sargasso Sea
aatgaaaaaagcagttattttatttaatctaggaggcccagataaattagaaagtgtagagccatttctttttaatttatttaatgacccagcaataattagtattccttctattattagatatcccttagcaaaatttatttccaaaagaagagctccaattgcaaaaaatatttatcgtgaaattggaaacaaatcaccaatacttgaattaactcaaaagcaagctagtagtttagaaagtagtttaactcaaaaaggtgattacaaatgttttattataatgcgttgttggcacccaagagcccaagacgtaataaaaaaagtaaaagaatataaccctgatgaaataatactcttaccactctatccgcaatattcagcatcaacctcgggctcttcaattcaagaatggaacgatttatgcaaaaaagaaaattatatagttaaaacaaaagttgtttgttgttatcccactgaaaataattttatcaattctcatgtaagtcttattaaaatacaataa

SEQ ID NO: 288892 - DNA, 560 bp, Unknown
  Bacterial polypeptide expressing nucleotide sequence isolated from the Sargasso Sea
aatgtcacagtttaaaggcgagaaggattatcagcatggaagtcaggaaaaaattggaatcttaataacgaatctaggaacacctgacgctccaaatacaaaagcattaaaagtctatttaaaagaatttttatctgatccaagagtaattgaagtgccaaaaataatttggcaaataattttaaggattgttattttacaaacaagaccaagaaaatcagcgaaatcatacaaaagcatatggacagaaaaaggttctcctcttttagaaatctctaaaaaacaacttaattctattaaagctgaattagaattgcagggcaaaaatattgttgtagaattaggaatgcggtatggaaatccatcaattcaaaatggattagaagttttacaaaaaaaacagtgtagaaaattactagtgcttccattgtatcctcaatattgtggcgcaacaacaggaagtacattcgatgcaatttcaagtgttctacaaaaatggaggtggatacctgaaataagatttattaatcaatattttgaagaaaaaaattatattaaag

SEQ ID NO: 288893 - DNA, 457 bp, Unknown
  Bacterial polypeptide expressing nucleotide sequence isolated from the Sargasso Sea
aatgtataaaataggcgtcttattaatgaacttaggagggcctgaacgcattaccgatgtaggtccatttttatataatcttttttctgatccagagataatcagaaccccttttcctgcttttcaaaagcctttagcttggttaattagtacgcttagaagtactacttcacaacaggcttatctttcaataggtggaggatcaccaataagaaggataacagaacaacaagcaagagaattgcaatctaaattaagggataaagggttaaatgcaacaacatatatagcaatgaggtattggcatccttttactgaatcagcaattgctgatatgaaagcagatggtatagatcaaattgttgtactgcctttgtatccacacttttcgataagtactagtggttcaagctttagagaattaaaaaaattgcgagattccgataaagatttaaaa

SEQ ID NO: 288894 - DNA, 466 bp, Unknown
  Bacterial polypeptide expressing nucleotide sequence isolated from the Sargasso Sea
atgaaaacaggcttactgctgatcaatctcggcaccccggatagtccaagtacggcagatgtgaggagttatcttcgtgagtttctttcagatccgagagtgattgatttaccgtttctcggaagatggttgttgttgaacctaatcatccttcctttccgcccccgtcgttcggctaaggcttacaaatcaatctggggcgaggaaggttctcccttaaaagttgaaggaatgaagctggcttcaggactcaaccagtctcttaagcaggatcaagtaccggtggtgctggcaatgcgttatggcaatccatcgatagacaaaggtttgaaggaactgaaaaatctaggttgtgaccgtctgctgatccttcctcttttcccgcaatatgcttcgagtaccaacggatctgctctggaagcagtctaccgcatggcaggtcatgattggaatattcccatgctgg

SEQ ID NO: 288895 - DNA, 847 bp, Unknown
  Bacterial polypeptide expressing nucleotide sequence isolated from the Sargasso Sea
ccggtaatatggcaaattattttaaatatatttattcttacttttagaccttcaaaaacagctcatgcttataaaaaaatatggagacaagacactaatgagtcccctcttttatattttacgagaaatcaagctgaaaaacttaataataaaattggaaacgaaaaactaattgtcgattttgcaatgagatatggtaatccgagtatcaaatctaaactgagctctctaaaaaaattgggttgtgaaaatataataatcttacctttgtatccacaatatgcagctcctacaaccgcaactgtatgtgacgaagtttacagatcgttgatggatatgagatggcaacctagtttacaggtggtgcctcattatgaaagcaatccctcttacattgaagctcttacaaaaagcatagaaaagaaagtaaaatcaattaattggaaacctgatttaattatttcgtcttatcatggtattcctaaaaaatattttgacaaaggtgatccttatcactgctattgccataaaaccacaaggttaatgaaagaaaaatttaaatctataaacatcgaaacaacatttcaatcaaggtttggccctcaagagtggctaacaccttatacagacaaaactttagaaagtttgcctaagaaaggtataaaaaaaattttagttatctgtccaggtttcgcatctgactgcgtggagacactagaggaaattaatattcaaggaagagaaagtttcctaagtcaaggaggtgaaaatttcgatttaattccatgtcttaacgacaattcagatcacattgaattattcgaaagactggtaacaaaatatatct

SEQ ID NO: 288896 - DNA, 704 bp, Unknown
  Bacterial polypeptide expressing nucleotide sequence isolated from the Sargasso Sea
aattaaaaaagttagagaatataatccagatgaagtaatacttttacctttatatcctcaatattcagcttcaacttcaggatcttcaattaatgaatggaaagatttatgtaataaagaaaattatcaagttaaaacaaaaactatttgttgttatcctacagaaaataattttctagagtcccacgcggaccttattaaaaaaacactaaaaaccttagaaaataaaaactttaaattacttttttccgcacatgggttaccagaaaataaaattaaaaaaggcgacccttatcaatggcaagtagaaaaaactgttgaaggaataatgtctaaattagaaaatgaaaatttagattttttaataagttaccaaagccgagtaggtccattaaaatggattggaccatctacagatgaagtaataataaaatattctaaagaaaaaaaaggcattgttatagttccagtggcctttgtatcagaacactcagaaacgctggtagaattagatattgagtataaaaaattagcagaaaaaaatggttgtagtttctataaaagagtaccagcattagggattgaagaaaattttattaaagggcttacagaattggttttacaaaaagaaacaagaagtaattttgtatcatccttaatgtgtcctaacaaatatgttaaatgtccttgtttaggattatgaa

SEQ ID NO: 288897 - DNA, 823 bp, Unknown
  Bacterial polypeptide expressing nucleotide sequence isolated from the Sargasso Sea
atgaaaaaaaaaatagcaataattttatttaatttaggtgggccagataaattagagtctgttaaaccatttctttttaatctttttaatgatgaagctattattcaggcgcccaaaataattagatatttattagctaaactaatttctaataaaagagaaaaaacagcaaaagaaatatattctcgtatgggaggaaagtctccaatatatgacttaaccgttttgcaagctaatgaattagagagggttctttataaagaaaaacaaaattataaagtttttatttcaatgagatactggaagccttttgtatcagagacaattcaaagtgttaaaaaatggaaacctaataatattatattacttccattatatccacagtattcaacgactacaacagcatcgtctataaaatcttggtttagagagtcaaaaaatatttttgaaaaaaaagaaactaaaataatttgttgttatccagaaaataaacattttataaaagggcatgttaataaaataaaaaagaaactagaagaggttaaaaatattgacgctaactttagtaactcaattttgctatttagcgcacatggtttgccagaaaaaattattagaagcggagatccgtatcaacatcaagtagaacttactgtaaataatattatggaaaaattaaataaaaatattaagcatatagtttgttatcaaagcaaggtgggcccattgaaatggattgagccttcaacagaaaatataataattaaaaactctaaactcaaaaaaaatattattataattcctgttgcttttgtaagtgagc

SEQ ID NO: 288898 - DNA, 717 bp, Unknown
  Bacterial polypeptide expressing nucleotide sequence isolated from the Sargasso Sea
aatggaaattaataataatcacccacccattaactatggaaagacaggtgttcttattgttaatttaggtactccagactcaacagattggcttgatataagaaaatatctaaaagagtttttatctgacaatagagttatcgaggtaaaccctgtaatttggcaactcattttaaatttgttcatattaacttttaggccatctaaaactgcaaaagcttataaagaaatttggatgaaagatgaaaacatgtctccgcttttatattatactcaaaagcaaagtgaaaaaatttctaactcattattaagagagaatttgttaatagattttgctatgagatatggaaatccaagtatcaaaagtaaaatttataaacttcaagaacaaggttgtgaaaatctagttatacttccactttatccacaatacgcagcagcaacaaccgcaacagtatgcgatgaagtttatagaactttaatgcaaatgagatggcagccttctttaaaaattattcctcattacgagtccgattctctttatatacatgctttagttaaatctattaataaaaaaataaatgaaataaattggaaaccagatttaataatcgcttcataccacggcataccaaaaaaatattttgataagggtgatccctatcattgttattgtcataaaacgacaagactaatttctgaaaaatttaattctat

SEQ ID NO: 288899 - DNA, 523 bp, Unknown
  Bacterial polypeptide expressing nucleotide sequence isolated from the Sargasso Sea
aatggaaaaacatcctgaaataaaatttggaaagactggagttttaataattaatttaggaactccggattccacaaactggttagatgttagaagatatttaaaagagtttctatcagatagaagagtaattgaagtaaatccaataatttggcaagttatacttaatctttttattctcaactttaggccatcaaaaagtgctaaggcttataaagaaatatggatgaaagaagaaaatatatcaccattacttcattacactaaaaaacaagctgaaaaattatcaaaatctttttcaaacgaaaatctaattatagacttcgctatgagatatggaaacccaagtataaaaagtaaaataaaaaaattaaataaagaaggttgcgaaaatctcgtaattttacctctttacccacaatatgcagccgcaactacagcaactgtttgtgacgaagtatatagaactctaatgaatatgagatggcagccatctttaaaaattattccacactatgagtca

SEQ ID NO: 288900 - DNA, 769 bp, Unknown
  Bacterial polypeptide expressing nucleotide sequence isolated from the Sargasso Sea
atgaaaaaagcagttattttatttaatttaggaggcccagataaattagaaagtgttgaaccatttcttttcaatttgtttaatgatccaggcattatcagtattccgtcaatttttaggtatcctctggcaaaatttatttcaaaaaaaagggcccctattgcaaaaaatatttataaagaaataggaaataaatctcctattttggaattaacacaacaacaagcaaataatttagagaaaagccttagtgcaaaaggaaattataaatgctttgttgtaatgcgatgttggcatcctagagctaaagatgtgattaaagaaattaaagaatatgatccagatgagataattcttttacctctttatcctcaatactcagcatcaacttcgggttcttccattaaagaatggcatgatctatgtaaaaaagaaaattacaaagttaacacaaaaactatttgttgctacccaacacagaatagtttcatagagtctcatgctaatttaataaaaaacactatcaaaaatatagaaaataaaaattttaaactacttttttcagctcatggtttaccagaaagtaaaataaaaaaaggcgatccttaccagtggcaaatagaacaaaccgttgaaaaaatcatgactaaattagttaatgaaaacttagatcatataataagttatcaaagtcgtgttggtcccttaaaatggattggaccgtcaacggatgagataattataaaatattcacaagaaaaaaaaggta

SEQ ID NO: 288901 - DNA, 298 bp, Unknown
  Bacterial polypeptide expressing nucleotide sequence isolated from the Sargasso Sea
gcaggtgtgtttccaatcccgcttcggtaaagaagagtggttaacgccttatgccgatgagctgctggccgatttaccccgccaaggcgtaaaaagtgtcgatgtcatttgcccagcctttgccaccgattgtcttgaaaccttagaagaaatttccattggcggtaaagagactttcctgcatgcgggcggcgaggcctatcactttattccctgtttaaatgatgatgagctccatatcgagctgctcaggcaactggtgcaagaacaagctcaaccttggatacgcgcagagtga

SEQ ID NO: 288902 - DNA, 241 bp, Unknown
  Bacterial polypeptide expressing nucleotide sequence isolated from the Sargasso Sea
aatgattaaagaccatccaaaagtacaatttggtaaaacaggagttttaattgtcaatcttggcacaccggattcaacaagttggtttgacataagaaaatatttaaaagaatttttatctgatagacgagttattgaggtaaacccaatattatggcagattattcttaatttatttattttaaatttaaggccttctaaaacagcaaaggcttataaagagatttggatgaaaagatga

SEQ ID NO: 288903 - DNA, 616 bp, Unknown
  Bacterial polypeptide expressing nucleotide sequence isolated from the Sargasso Sea
atgtcaaattatattggagaaaaagattatcaacatggcagcaaggaaaaagtaggtattctaattactaatcttggaacacctgatgctcctaatacatcatctttaaaggtttatttaaaacaatttttatctgatccgagagtcattgaggttccaaaaattatttggcagataattttaaggctttttatattacaattaagaccaagaaaatctgcaaagacatataaaagcatatggactaaagaaggatctcctctgttaaacatatcaaaaaagcaacttgaagcaataagatccagattagaaaaaaaaagtaaaaacacttatattgaacttggaatgcgttatggaaatccatcaattaaaaatgctttagaagttttgcaaaaaaatcaagcaagaaaattacttatacttcctttgtatcctcaatattgtgctgcaacgacaggaagcacatttgattcagtttctgaagtacttcaaacttggagatggatacctgaaattaggtttattaatcagtattttgaagaaaaaaaatatattgaggctctttcatattctataagcaactttggaaaaaaaataaaaaacctcaaatgttagt

SEQ ID NO: 288904 - DNA, 764 bp, Unknown
  Bacterial polypeptide expressing nucleotide sequence isolated from the Sargasso Sea
aatgcctaaactgatatctgaaaaaaacttttctcatgggacaccaagttctgttggtattttgctaattaatttaggcacacctgaaaatactaagacatcatcagtcagaaagtatcttaggcaatttttatctgaccccagagtaatagaagttccaaaattgctatggtggtttattctaaatctctttattcttccgttcaggccctcaaaatctgctgaggcttacaaagagatatggacagaggaaggttcacctctcctcctctattcggaggaaattaccaaaaaaattcaggaagctttcgatgaacgtaacttcgatattgactttcatattgaacttgcaatgtcatatggccagccctcaataaaaagctcactaaataaattgaggaaaaaaaatgcaaggaggattcttttactgccaatgtatccccaatattccagcacaacgactggctctgtatttgaaaatgtgacaaaagagctttcaaaacagcgatggataccagaatttaggcatataaatcaatatcatgacaacaaaggttatattgagacaatttctgagagcatacgagaattctggaaattaaatggaccatgtgacaaattgctgttttcttttcatggcttaccaaaaaaaatgcttctggagggagatccttaccactgtcaatgtcacaaaacagcacgcttagtttctgaaaatctttcactctccagggatgattggtttgttagctttcaatcgcgtc

SEQ ID NO: 288905 - DNA, 845 bp, Unknown
  Bacterial polypeptide expressing nucleotide sequence isolated from the Sargasso Sea
tgtttggcaaattatattaaatgtttttatattaaattttagaccatctaaaactgctaaagcttataaagaaatttggatgaaagataaaaatatttctccccttctctattatacacaagaacaagccaagaaattatcaaacttactttctggaaaaaacctaattattgactatgccatgaggtatggaaatccgagtatcaaaagtaaaataaaaaaattacacgaaaaaggttgtgagaatttgattatacttcctttatatcctcaatatgctgctgcgacgacagcaaccgtttgtgatgaagtttacagaacgttaatgaatatgagatggcaaccatcaatcaaagtaataccacattatgagtcacatcccttgtatatagatgctttagtaaattcactaaataaaaaaataaaagaaataaattggaagccagatcttatattagcatcttatcatggtataccccaaaaatactttgataaaggagatccatatcattgctattgtcaaaaaacgacaagattgatttctgagaaatttaattcgatagaaattaaaacaacatttcaatctagatttggtcctcaaaaatggcttgaaccctacacagataaaactttagagaaattgcctaaagagggaaagaagaatgttctagcaatatgtcctggtttttcctcagattgtgttgagacattggaagaaattcttattcaaggtaaagaaagttttttagaatctggtggtgaaaatttcgatatggtaccatgtttaaatgataataatgatcatataaatttattaaaatcattaattcaacaaaacatataat

SEQ ID NO: 288906 - DNA, 724 bp, Unknown
  Bacterial polypeptide expressing nucleotide sequence isolated from the Sargasso Sea
atggataaaataggcgtcttactaatgaatttaggagggcctgaacgcattactgatgtaggcccattcttatacaatcttttttctgatccagaaatcatcaggaccccttttcctgtttttcaaaagccccttgcttggttaattagcacccttaggagtactacttcacaacaggcttacctttccataggtggaggttcacctatcagaaggataactgaacaacaagcaagagaattacaatctaaattaaggaataagggatttaatgctactacctatatcgctatgaggtattggcatccttttaccgaatcagcaatagctgatatgaaagcagacggcatagatcaagttgttgtaatacccttgtatccacatttttcgataagtactagtggttcgagctttagggaattaaaaaaattgcgagattctgatgatgaatttaagaaggttccaatgagatgtgtaaggagttggtttagtcaatcaggttacttaaagtctatggttgaattaatttctgaacaaatttcactttgtgaatcaccctcaaaagcccatatatttttcactgctcatggagttcctaagagttacgtagaagaagctggagacccttacaaacaacaaattgaagattgttctttgttaattataaatgagctggaaaaatgtttagggcatggaaatcctcatacactttcttatcaaagta

SEQ ID NO: 288907 - DNA, 725 bp, Unknown
  Bacterial polypeptide expressing nucleotide sequence isolated from the Sargasso Sea
gcatccaagagcctctgaggtgataggacaagtaaaaaaatataatccggatgaaataatattgttgcctctctacccacagtactcagcaacaacttctggatcttctattaatgagtggaaggagttatgtaaaaaagaaaattataatataaaaactaaaactatttgttgttatccaacagaaaattattttatagaatctcatgtttccttaataaaaaaaactatagaagaagttaaaaataaaaattttaaactaattttctcagcgcatggactaccagaaaacaaaataaaaaaaggtgatccttatcaatggcaggttgaggaaaccgtaaaagaaataatgtcaaaaataaaaaatgaaaatttagattatgtattgagctatcaaagtcgggtaggcccactcaaatggattggtccgtctacagatgaaattatcattaaatactccaaagaaaaaaaaggaattgttatagttcctgtagcgtttgtgtcagaacattcagaaacattggtagaactggatatcgagtataaaaaattagctgaaaaaaatgattgtagcttctacaaaagagtgccagcattgggtgttgaagaaaattttataagaggactagaagagttagttctgaaaaccaaaacaaaagacaattttgtttcgtcaataatgtgtcccaacaaacatgccaaatgtccttgtttaggattatgaa

SEQ ID NO: 288908 - DNA, 487 bp, Unknown
  Bacterial polypeptide expressing nucleotide sequence isolated from the Sargasso Sea
aatgaaaaaggccgtaatattatttaatttaggaggaccagacagccttgattctgttgaaccgtttttgtttaatttatttaatgatcctgcgattcttagtttgcctacaatttttagatatccattggcaaagctaatttcaaaaagaagagctcctattgctaaagcaatttataatgaaatgggtgggagttcacctattttacaacaaacagaaatgcaagcgaaagcaatagaagaaagtcttaaaacacaggaagataattataaatgttttatcgtaatgcgctgttggcacccaagagccgacttggttgtaaaaaaagttaaagaatttaatcctgaagagattattttgttgcctttgtatccacaatattctgctgccacttcgggttcgtcaatcgaagagtggtttaaaaaatgtgacgaaaataacgttaagattaaaacaaaaataatctgttgttacccaactgaagaa

SEQ ID NO: 288909 - DNA, 733 bp, Unknown
  Bacterial polypeptide expressing nucleotide sequence isolated from the Sargasso Sea
atgaacaaagatcatcccgatgtgcaatatggaaagacaggtgttttaataattaatctgggtactccggactcaacaagttggttcgatattagaaaatatttaaaagaatttttatcagataaaagagttatagaaataaacccttttctttggcaaatcattttaaacatatttattctaacttttaggccttctaaaaccgctcatgcttataaaaaaatttggttaaaagatagcaatgagtctcccttgctattctttactagaagtcaagcaaacaaacttaaagataagataggaaatgaaaaaacaatagttgattttgcaatgaggtatggaaatccaagcataaagtctaaattaaataaactaaaagaaaaaggatgtgaaaacatagtgattttacctttatatccacaatatgctgctgctaccaccgcgaccgtttgtgatgaagtctacagaagtttgatgactatgaggtggcaaccaagtcttcaaatcatacctcattatgaaagcgacccaaagtatatagactctttaataacaagtattgaaaaaaaaattacagagataaactggaaaccagatttaataatttcttcatatcatggaattccaaaatcctattttgataaaggagacccgtaccattgttattgtcacaaaacaacgagattgattaaagaaaagttcaataaagttaaaatgaaacaacattcaatct

SEQ ID NO: 288910 - DNA, 457 bp, Unknown
  Bacterial polypeptide expressing nucleotide sequence isolated from the Sargasso Sea
atggataaaataggcgtcttactaatgaatttaggagggcctgaacgcattactgatgtaggcccattcttatacaatctcttttctgatccagaaataataaggactccattccctgtttttcaaaaaccccttgcttggttaataagtacgcttaggagtactacttcacaacaggcttacctctccataggcggaggttctcctatcagaagaataactgaacaacaagcaagagaattgcaatctaaattaagggacaaagggctcaatgctactacttatatcgccatgagatattggcatccttttaccgaatcagcaattgctgatatgaaagcagatggcatagatcaagttgttgtaatacccttatatcctcatttttcgataagtactagtggttcgagctttagggaattaaaaaaattgcgggattctgatgacgaatttaaga

SEQ ID NO: 288911 - DNA, 149 bp, Unknown
  Bacterial polypeptide expressing nucleotide sequence isolated from the Sargasso Sea
catgtcccgcgtaggcgtcgtcctgctgaatctggggggacccgagcgcattcaggatgtcggaccatttctctacaacctgtttgctgatccggagatcatccggttacccagcccagcgctgcagaagccgcttgcctggttgatca

SEQ ID NO: 288912 - DNA, 799 bp, Unknown
  Bacterial polypeptide expressing nucleotide sequence isolated from the Sargasso Sea
ttgcagactaaaaacaatacatcagaaagcaatagcacgaacactgcagtcctgatgataaacctagggactccagatgctccaaaaacacctgaagtacggacttatttaagggaactgctctcttcagaccgtgtgctggatataaatcctatcttacgctggctgctgctcaatattttcattcttccctttagacccaaaaaaactgcaaaagcatataaaaaaatttggttggagggtggttcacctttgatggtctatagccaaaagctgaaaaaagctttgacagaacaatttacagcagaaaacattcatgttgaacttgcaatgcaatgcggcgaaccttcaataaaaaatactttggaccgtcttcgagtaaagggatacagtcgtataattgtgcttcccatgtatccacaatacgcatcaagtacttttggaggatcaatagaagctctttacagggaaattcttaaagactggaacatgcctcagctacagattgttcctccatttttttcagattcattatttattgaagcatgggctaaagtgggactgccatatctcgatcaagagactgaccatgtgctgttcagtttccatggacttccactaaggcatttgaaaaaaagcgacctctcaggaaactggtgccgaaataataaggaatgctgcctgaaattaacaaatcaaaataaatactgctacagcgcgcaatgttacgaaacttcaaaattaatggcagagcgcctgaacctgggtgcagataactggtcagtgagctttcagtcac

SEQ ID NO: 288913 - DNA, 790 bp, Unknown
  Bacterial polypeptide expressing nucleotide sequence isolated from the Sargasso Sea
gcaaaagcttacaaagaaatttggatgaaagatataaacatgtctccattaatgtattatacacaaaaacaatctgaaaaagtctcaaattcaatatcgaatgagaatatattggtcgactttgcaatgagatatggaaatccgagcataaaaagtaaaataaaaaaattacatgataatggttgtgaaaatcttgtaattttacctttatacccacagtatgctgctgcaacaacggcaacagtatgtgatgaagtatacagaacattaatgtcaatgagatggcagccttcacttaaaattattccccattatgagtccgatcctttgtacatcgatgctttggtgaattctattaattctaaaatagaaaacataaattggaaaccagatttaatattagcctcttaccacggaataccaaaaaaatattttgataaaggggatccataccactgttattgtcacaaaactacgagacttatttctgaaaagtttaaagaaatcgaaattaaaactacttttcaatcaaggtttggacctgatgaatggttacaaccttatacagataaaactttagaacgtttgccaaaagagggagtaaaaaacgttttagcaatttgcccaggtttttcttcagattgtgttgaaacattagaagaaatattaattcaaggaaaagaaagctttatggaagctggtggtgaaaattttgatatggtttcgtgtcttaatgataatgatgatcatatagaattacttaataatttgattaaaagaaatatctaat

SEQ ID NO: 288914 - DNA, 656 bp, Unknown
  Bacterial polypeptide expressing nucleotide sequence isolated from the Sargasso Sea
tatgaaaaaagcattacttttggtaaatttaggaacccctgataaaccatcttactttagtgtttttaaatatctaagacaattcttaatggatgggcgtgtaataaacatcaaccccatattaagattttttttagtaaattttatcatttgccccactagatcattttcatcaacaaaagtttataaagaagtttgggacaaagatacaggatcaccattacttcataacacaattgagttatcgaagaaattaactaccaaacaaaatgaatatgatgtttattttgcaatgcgctatcaaaacccatcaattgaaaaagtgatcgataatatattagaaaaaaatccagatgaaattattgtactacctctttttcctcactatgcttcggctacaacaggttcggtttatcaagagatatcaaggatagtctcaaaaaaatgggtagttcctaatataaaatttataaatcaattttatgataatgataaatttattgatgcatgggttgataaagcatctaaatttgacattaaatcttacgataagattgtatttagttatcatggaatacctaatagccatgtcgataatgtttatccagagtctctatgtagtgaccataattgcgaattaggaatttcagaatcaa

SEQ ID NO: 288915 - DNA, 385 bp, Unknown
  Bacterial polypeptide expressing nucleotide sequence isolated from the Sargasso Sea
tgttaatgatctgattgtggttcccataagtttcgttggagagcatattgaaacattgcaagaaattgatattgaatataaagaaatcgcggaaaaggctggtattaaaaactttcggagagttaaggctctaaatactcatcctacttttattgaaggtctaagtgatctcgtgatttcctgcttggaaggccctctagttgacatagaggaggcttctcagttgcctgaaaaagttaaactttatccccaagagaagtggcaatggggctggaataatagttcagaggtgtggaacggaagggttgcaatgattatttttcttgtgctttttattgaacttatttcaggctatggacccttacataagctaggaattttataa

SEQ ID NO: 288916 - DNA, 652 bp, Unknown
  Bacterial polypeptide expressing nucleotide sequence isolated from the Sargasso Sea
tcccagtattaaaagtaaaatgagtagtcttcaaaaaaagggttgtgaaaacataatagttttgcctttatacccacaatatgctgctgcaacaacagcaaccgtttgtgatgaagtttacaaaactttaatgggaatgagatggcaaccaagtcttcaaattattccccattatgaatctgaacctttatatattgaggcattaaagaatagtcttaataaaaaaatctctgaaataaattgggaacctgatcttatagtcgcatcatatcacgggataccccaaaaatattttgataaaggagacccataccattgttattgtcaaaaaactactagacttctatctgagaagtttaatcacattcctataaaaactactttccaatcaagatttggacctcaggagtggcttaagccctacactgacaaaactttagaggttttaccaaaagagggtaaaaaaaacgttttggttatttgcccaggattttcatccgattgcgtggaaacattagaggaaatatctttacaaggaaaagagagctttgttaagagcggtggaaataattttgatgttgttccatgtttaaatgacaatgatgatcacataactcttcttgaacatttagttaaaagattttttcgatga

SEQ ID NO: 288917 - DNA, 740 bp, Unknown
  Bacterial polypeptide expressing nucleotide sequence isolated from the Sargasso Sea
tactttaagaccatccaaaactgctcatgcttataaaaaaatatggagaaaagacacaaatgaatctccattattatatttcacaagaagtcagtcagcgaaacttaacaataaaattggaaaagaaaatttaattattgattttgctatgaggtacggaaatccaagtattaaattaaaattaagagaacttcatgaattaggatgtgaaaatataattattttgcctttatatccccaatacgccgcagccaccacagcaactgtttgtgatgaagtttacagaacttttatgaagatgagatggcaacctagtttacaaattataccacattatgagagtgaagatctgtacattaatgcacttgtaaaaagtattgagacaaaagttaaaacaattaattggaaaccagacttaattatcgcctcttatcatggaattcctaaaaaatattttgataaaggtgacccgtatcattgttattgtcagaaaactactaggctaatgaaagaaaaatacacatcatttgatattcaaactacttttcaatctagatttggccctcaagaatggctaacaccatatactgataaaactttggaaaatttacctaagaaaggggttaaaaatttattagtaatttgtccaggcttcgcttcagattgtgttgaaactttggaagaaattaatattcaagggagagagagttttttagacaatggtggaaaaaattttgatt

SEQ ID NO: 288918 - DNA, 722 bp, Unknown
  Bacterial polypeptide expressing nucleotide sequence isolated from the Sargasso Sea
cagaaaatgtgttaaggaagtaatcaattacgatcccgatgaagtaattttaatgcctctttatccccagtattcggcagcaacttctggttcttctataaaagaatggaaagatatttgtttaaaaaataatttcaaaataaaaacaagcacgatttgttgctaccctactgatgaaaattttatacaagcacataaaagtgaaataatgaaaaaaataaataatttaaaaaattttaaattgattttttctgcacatggattgcctgaaaaaaacattaaaaaaggagatccatatcaatggcaagtagaacaatcagttaataaaattgttaaacttttgaattttgaagatttagattgggtattaagctatcaaagtagagttgggcccttgaagtggattggtccatctacagaagacgtaattgtagaaaattcaaaattaggaaaacatattgttttagttcctgtagcatttgtatccgaacattcagaaactttagttgagttagatatcgaatataaagaattagcagataaaaatggatgcaaaaattattcaagagtatcagcacttggaattaatgaatactatataaaagcaatgtctaatctgataattaacaaacaagagtataattttaatggagagcttttccctccaaaaatacagtgtccaaatcaatttaaaaaatgcccatgtataaattatgaatagt

SEQ ID NO: 288919 - DNA, 553 bp, Unknown
  Bacterial polypeptide expressing nucleotide sequence isolated from the Sargasso Sea
aaaaaggctgtaatattatttaacctgggcggtccagacagtcttgaagctgttgaaccatttttatttaatttattcaatgatcctgcaatacttagtttgcccacaatacttagatatccattagcaaaattaatttcaaaaagaagagcgcctgttgctaaagcaatttataaggaaatgggcggaagctcacctattttacaacaaacagaaatgcaagcaaaagcaatagaagaaagtcttaaaacgcaaaaagatgattataaatgttttgtcgtaatgcgttgttggcaccccagggcagatcttgttataaaacaagtaaaaaaatttaaccccgatcaaattattttattgcctttatatcctcaatactcagcatctacttctggctcatctattaaagaatggattgaaaaatgcaaagaaaataacgttaatacagaaacaaaaataatttgttgttatccaacagaagataattttattttatctcatgttgactcaataaaaagaaaaataagttcaaaagatttatttgaaacaacaa

SEQ ID NO: 288920 - DNA, 631 bp, Unknown
  Bacterial polypeptide expressing nucleotide sequence isolated from the Sargasso Sea
aatggaacttgataataatcacccccctattaaatttggaaaaacaggtgttctcatagttaatttaggcactcctgactcaacagattggcttgatattagaaaatacttaaaggagtttttgtcggacaaaagagttatcgaagtaaatcccataatttggcagttcattttaaacgtatttattttgacttttaggccatccaagacagcaaaagcttataaggaaatttggatgaaagatgaaaacatgtctccacttttatattatactcaaaagcaaagtgaaaaaatcaccagtttaatatcaaaagagaatttattaatagattttgctatgagatatggaaatccaagtatcaaaagtaaaatttataaacttcagcaacaaggttgtgaaaatttagttatacttccactttatccacaatatgcagcagcaacaacagcaacagtatgtgatgaagtttatagaactttaatgcaaatgagatggcaaccttctttaaaaattattccacattatgagtctgactcgctctatatagatgctttggttaaatctattaataaaaaaataaatgaaataaattggaaaccagatgtaaataattgcctcatatcacggcat

SEQ ID NO: 288921 - DNA, 525 bp, Unknown
  Bacterial polypeptide expressing nucleotide sequence isolated from the Sargasso Sea
gatgaaggacaaaaacatttcaccgcttttacactatactcaaaagcaagcagaaaaactttcaaacttaatatctgaaaaaaacttaataatagattatgctatgagatatggaaatccaagcataagaagtaaaattgcaacacttcatgaaatgggctgtgaaaatttgataattctaccgctttatcctcaatatgcagcagcaactacagcaactgtctgtgatgaagtatataggactcttatgaaaatgagatggcaaccatcattaaaaatagtgccacattatgaatcggatcctttatatatagaagcgcttgtaaattctttgaacaaaaaaattaaagaaataaattggaagccagatttgatattggcttcttatcacggaataccacaaaaatattttgacaaaggtgacccttatcattgctattgtcataaaacaacgagactgatatcagaaaaatttacttcaattgagattaaaacaacattccagtctagatttggccctgagaa

SEQ ID NO: 288922 - DNA, 421 bp, Unknown
  Bacterial polypeptide expressing nucleotide sequence isolated from the Sargasso Sea
aagaatataaattggaaacctgatttaattctagcttcctatcatgggataccaaaaaagtattttgataaaggggatccatatcattgttattgtcacaaaactacaagactagtttcggaaaagtttaaatctattgaaattaaaacaaccttccaatctagatttggcccgcaagaatggcttcagccatatacagacaaaactttagaaaaattaccaaaggagggaaaaaaaaatgttcttacgatatgcccaggcttttcctctgattgtgttgaaacattagaagaaatattaattcagggtaaaaaaagctttatggattcagggggtgagaattttgatatgataccatgtctaaatgataatgatgatcatataaatttactaaaaaatttaatccaaaaaaatatttaat

SEQ ID NO: 288923 - DNA, 678 bp, Unknown
  Bacterial polypeptide expressing nucleotide sequence isolated from the Sargasso Sea
aagatgtcttagtgctcccactataccctcattatgcaatgtcatcatatgagaccgtagttgagaaagtaaaagaagaaaaagaaactaattttccgagtcttaatatagatattattcctccattctacaaggataaacaatacattgatatattaagtgcaaaaataaaagagtccattaagaatgtcgagtatgaccatttacttttctcatatcatggaattccagttagtcatcttaaaatatctgatccaacaaatactcattgttacaaagtaaatgattgttgtaatgtagattctcaagctcacagtacttgttataaacatcagtgtcttgaaactacaaaaaaagttatagaaaaacttaatattggagaagataagcatagtaactcatttcaatctagacttcccaatgaaccttggttaaaaccatatacagatagtgaacttgaaagacttgctaaagctggtaaaaagaaactagtcatagtaactccagcttttgttacagattgtcttgaaactcttgaagaaattgcaatggaaggaaaagaagaatttttagaagctgggggcgagcaatatacatatgttccttgtttaaatgaagatgataattgggctgaattaatatccaaatggacaaaggactatattaacttaaattagt

SEQ ID NO: 288924 - DNA, 496 bp, Unknown
  Bacterial polypeptide expressing nucleotide sequence isolated from the Sargasso Sea
gatgaacaaagatcatcccaagataaattttggaaaaactggagttttaataattaatttaggaaccccagacagtacaaattggcttgatataagaaaatatttaaaagaatttctttcagatagaagagtgatagaggtaaacccaattatttggcaaataattttaaatgtgtttattttaaatttaagaccttcaaaaaccgctaaagcttataaagaaatttggatgaaagataaagatatgtctcctctaagattttatacgcaacagcaagcaataaaattatctgataaaatttcaaatgaaaatttaatagttgattttgcaatgaggtatggaaaaccgagtattaagactaaaatacatgaccttcacgccaaaggatgtgaacacatagtaatatttcctctttaccctcaatatgcagcagcaacaaccgcaacagtttgtgatgaagtttatagaaccttaatgcaaatgagatggcaaccc

SEQ ID NO: 288925 - DNA, 627 bp, Unknown
  Bacterial polypeptide expressing nucleotide sequence isolated from the Sargasso Sea
ataaactacatgaggctggatgtgaaagattaataattcttcctctctatccgcaatacgctgccgcaacaacggctaccgtatgtgatgaagtatatcgagttttaatgaaaatgaggtggcaaccaagtcttcaaataattcctcattacgagtcagaccctttttatataaaagctctttccaatagtttaaatattaaaatttctgaattaaattggaagccagatttaattctagcatcctatcacggtattccacaaaaatattttgacaaaggagatccttaccactgttattgtcaaaagacatctagattactttcagaagaatttagagatattaagattataactacttttcaatcaaggttcggtcccgaggcttggctaaaaccttacactgataaaactttggaaagcttgcccaaggaaggtaaaaaaaatatccttgtaatatgtcccggcttttcatctgattgtgttgaaactttagaagagatatccatacaaggcaaagaaacctttttaaaatccggaggagttaattttgatgtggtcccatgtttaaatgacaacgacgatcacataaatttacttgaaaaattgacgaaaaaaaatttataaa

SEQ ID NO: 288926 - DNA, 562 bp, Unknown
  Bacterial polypeptide expressing nucleotide sequence isolated from the Sargasso Sea
agctacaacagctacagtttgtgatgaagtttataaaactcttatgggaatgagatggcagcctagtctacaaattatacctcattatgagtccgaacctttatatattaattctttaaaaaatagtcttgaaaaaaaaatatcagaattagcttggcaacctgatcttattgtagcatcgtaccatggaatacctaaaaaatattttagcaaaggagacccttaccattgctactgtcaaaaaacctcaaggttgttatctgaaaaatttaagaaaattccaattaaaactacatttcaatcaagatttggtccccaagaatggcttcaaccatataccgataaaacattagaaaatttaccaaaagagggtaaaaaaaatatattagtgatttgtcctgggttctcatcggattgtgtcgaaactttagaagaaatttccatccaaggcaaagaaagttttataaaaaatggtggaaaaaattttgatgttgtgccttgtttaaacgacaatgatgatcatatagttttgctacagcatttggcagaaaaatttatctaa

SEQ ID NO: 288927 - DNA, 782 bp, Unknown
  Bacterial polypeptide expressing nucleotide sequence isolated from the Sargasso Sea
ttggcaattaatattaaacatttttatattaaatttaagaccttctaaaacttccgaagcttataaaaaaatttggatgaaaaaagaaaatatgtctccccttagatattacacaatcaagcaagcagaaaatttaaagaaaaaaatcactgaagactcaattataattgactacgctatgaggtatggaaacccgggaattatggataaaatgaattatcttcaaaaatctggttgtgaaaatataataattctgccgctttaccctcagtatgcagcagcaacaacagccactgtatgtgatgaagtttatagatctcttatgaaaatgagatggcagcctagtctacaaattatacctcattacgaatcggaacctttatatattgctgccttaaaaaaaagtttagaaaaaaaagtttccgaaataaattggaaaccagatttaattatcgcctcataccatggtataccaaaaaaatattttgataaaggagatccataccattgctactgtcaaaagaccacgcgccttttgaaagaaagttttcaaagtaaaattcctattataactacttttcaatcaagatttggtccacaacaatggctacaaccatatacagataaaactttagaaaaagttccacaagagggaaaaaaaaatatattagttatatgtcctggcttttccagcgattgtgtagaaactttagaggaaattgcaatacaaggtaaagaaagtttttttaaaaatggtggaaaaaaatttgatattgttccat

SEQ ID NO: 288928 - DNA, 823 bp, Unknown
  Bacterial polypeptide expressing nucleotide sequence isolated from the Sargasso Sea
atgaaaaaagcagttatcttatttaacttaggaggaccagataagctggaaaatgttgaacctttcctttttaatctttttaatgatccagccatattaaatcttccaagctttataaggtatccacttgcaaaattaatttccaatagaagagcaccgacagcaaaaaaaatctatcaggagcttggtggttcttctccgatattaaaactaaccaatgatcaagcacgtactttagaaaataatctcaacaataataatcatcatcaatataaatgttttgttgtaatgagatgttggcatcctcgagctgaaaacgtatttaatgatgtttttgattatggaccagacgaggttattcttctgcctttatatccacaatattcagcagcaacctctggttcatctataaaagaatggcttgaagtttgtgataaaaataaatttaaagtaaaaacatctactatttgttgttatccaactgatgatttttttattaaaagtcacgctgaacaaataatggaaagaataaaagatttaactaattttaagctaattttctcggctcatggtttaccagaaaaaaatattaaaagaggtgatccttatcagtggcaagttgagcaatccgtcaagagtgttattaaaattttaaatataaacgatcttgactggatattaagttatcaaagcagagttggacctttaaaatggataggaccatctactgaagatataattattgaaaactcaaaattaggaaaaaaaattattttagttcctatcgcatttgtatcagaacactcagaaaaaacgagttgaa

SEQ ID NO: 288929 - DNA, 723 bp, Unknown
  Bacterial polypeptide expressing nucleotide sequence isolated from the Sargasso Sea
ctgaaaatgtaataaaagaagttaaagaatataatcctgaggaaataatacttttacctctctatccgcaatattcggcagcaacttccggctcttccatcaaagaatggaatgatttatgtaaaaaaaaaaattataaaataaaaactaaaactatttgttgttatccaacagaaaataattttttggagtcacatgcaaatctcattagaaaaacaataaaaaatttagaaaataaggattttaagctacttttctcagcccatggtttacctgaaatcaaaataaaaaaaggtgacccttaccaatggcaggtagagcaaactgttgagggaataatgtcaaaattaaagaatgaaaatccagaccatatcataagctaccaaagtcgtgtgggccctcttaaatggattggaccatctacagatgaaatgattataaaatattctaaagaaaaaaaaggaattgttgtagtccctgtagccttcgtttcagaacattcagaaactttagtagaattagatattgagtataaaaaattagcagaaaaaaatggttgcagtttttataaaagagtaccagcattagggatagaggagaattttatcagagggcttatggagctagttttaaaaacagaaacaaaagataattttgtttcgtctataatgtgtcctaataaatacgcaaaatgcccatgcttagagaaaaaaaatatttaaa

SEQ ID NO: 288930 - DNA, 352 bp, Unknown
  Bacterial polypeptide expressing nucleotide sequence isolated from the Sargasso Sea
ggtgatccttatcattgctactgtcaaaaaacttcaagactaatgtcagaaaaatataaagaaattccaatcaaaactacctttcaatctcgttttggtccacaagagtggttgcagccttatactgataaaatcttagagggtttgcctcaagaaggtaaaaaaaatattttggttatttgtccaggattttcctcagattgtgtggagacattggaagaaattgcaatacagggaaaggaaagttttatgaaatctggcggaaaaaattttgatgttatcccatgtttaaatgataatgatgatcacataaatttaataaaaaaactcattagcaattttattctataaa

SEQ ID NO: 288931 - DNA, 664 bp, Unknown
  Bacterial polypeptide expressing nucleotide sequence isolated from the Sargasso Sea
atggaaaccccaagtataaaaggtaaaatgaaaagtctacaaaagttaggatgtgaaaatatagtaattctacctttatatcctcagtatgccgcagctactacagcaactgtatgtgatgaagtttatagaactttaatggatatgaggtggcaaccaagtttacaaataataccgcattacgagtcagaacctttgtatatagaagctttaaaaagaagccttgaaaaaaaaatatcagaattaaattggaagcccgacacaatagttgcctcttatcatggaataccaaaaaaatattttgataaaggagatccttatcactgttattgccaaaaaaccactagattactgtctgagcaatttaaacaaatacctatacaaaccacgtttcaatcaagatttgggcctcaagaatggttacaaccttatactgacaaaactttagaaaacttaccagcggagggaaaaaaaaatgttttagtaatttgccctggcttttcatcagattgtgtagaaacattagaagaaatttcgatgcaaggcaaagaaagttttattaaaaatggaggaacaaaatttgatgttgtgccttgtctaaatgataacgacgatcatataaatttactgcagcatttagctaagaaatttattgtaaaatgaa

SEQ ID NO: 288932 - DNA, 433 bp, Unknown
  Bacterial polypeptide expressing nucleotide sequence isolated from the Sargasso Sea
atgaaaacagcagtagttttattaaatttaggggggcctgaccgaccagaaagtgtgaaaaggtttttattcaatctttttaatgaccctctgattataaggcttccgggcttttttagaacccccttggcttggttgatttcaaccaaaagaaacaaagaggcccaagccatttacagtgaaataggtggaaagtcgcccatattagaaattaccaacgctcaggccgacaccctaagcaacaaactaacagcccaaggtatggacaaccaggtgtttgtcagtatgcgctactggcatcccatgacagatgaggttgtccaaaaagtaaaaagttacaacccagaccaagtttttttattgccactatatccgcaatattcaaccaccaccaccaagtcttccctagacattggtttaaagaatcaaaaaa

SEQ ID NO: 288933 - DNA, 313 bp, Unknown
  Bacterial polypeptide expressing nucleotide sequence isolated from the Sargasso Sea
aaaagaaaaatttacagactttgagattcaaacaacttttcagtcaagatttggcccacgagagtggttaaaaccatacacagataaaacacttgagagtctaccggaacaaggaataaaaaatgttttagtaatttgcccgggatttgcctcagattgtttagagactttggaggagataaatattcaaggaaaagaaatttttttaaaaaatggaggaaaaaattttgatcttattccatgtttaaatgataatttagatcatattcaattatttgaaactctagtaaaaaggtatttggtacaagaataa

SEQ ID NO: 288934 - DNA, 655 bp, Unknown
  Bacterial polypeptide expressing nucleotide sequence isolated from the Sargasso Sea
cagcatcgatgggaagattaaagatcttaaggaaaaaggttgtgaaaatttaataatattacctctttatccccaatatgcagcacctacaaccgcgactgtttgtgatgaagtatttagatctttaatgaaattaagatggcagccgagccttcaaattgtatcccactatgaggaaaaccctctttacatagatgcaattgtcaattctattaaaaagaaaatttcagaaattaactggaaaccagatttaattattgcatcgtatcatggaataccaaaaaaatattttgacaaaggagacccttatcattgttattgtatgaaaactactagacttcttaaagaaaagtttaaaagtattgatattatgacaacatttcaatcaaggtttggtccacaggagtggttaacgccctatacagacaagactttagaagaaattccaaatcaaggtaaaaaaaatatattagttatttgccctggttttgcatcagactgtgtggaaacattagaggaaatagcaatacaaggaaaagagtcctttgttgatgcgggtggtgaaaatttcgatctgataccatgtttaaatgataatgaagatcatataaatttacttaaaaatttagtggactcatatctggtaagaaaatga

SEQ ID NO: 288935 - DNA, 789 bp, Unknown
  Bacterial polypeptide expressing nucleotide sequence isolated from the Sargasso Sea
aactttataaaaaaatctggaccgaagatggttcccctttaatggtattttcaaaaagtatcgtggacaaactaaaagttgattcagaaaaaaacattaccatattacttggtatgcgatatggaacaccatcaattgaaaatgcactaaaaacctttaaagaaaaaaatatatctaaaattttggtcttacctctatatccacaagctggatcaccaacaacatcaagtacatttgacgtagttaacgaacacttaaaaaattcacattggatgccgaacttgagattcgtttctggataccatgaccatgataaatacataaatgcattgatggagaacattgaaaagagttttaagaaaaatggaattccagacttactcttatttagctttcatggcatgccccaaaggtatttagagaaaggagatccatactactgcttttgtcataaaacagctcgactagtttcagaaggtttagatcttgatgataatttatatgaggtcgcgtttcaatctagatttggatcagaaaaatggctggagccacatatagataggcttttaatcgaaaaggcgaaaaatgggatagagcatatacagatcatatcaccaggattcagtgttgactgtttagagacattggaggagatcaacatccaatatagagaactatttatggaaaatggtggaaaacaatttgaatatattccatgtttaaatgacacagaaatgcacattgatctcatcaagacaatgattgatgagaatattaaaagttggtgag

SEQ ID NO: 288936 - DNA, 713 bp, Unknown
  Bacterial polypeptide expressing nucleotide sequence isolated from the Sargasso Sea
aaaactctcaagcacaatgtcagaaaaagacttgataatagattattctatgagatatggaaatcccagcataagaagtaaaattgtaactcttcatgaacaaggctgtgaaaatttaataatactccccctttatccccaatatgctgctgcaactaccgcaactgtttgtgacgaagtatatagaactcttatgaaaatgagatggcaaccatcactaaaaatagtgcctcattatgagtctgatcctctatatatagaggcacttgtaaactcattaaataaaaaaattaaagaaattaattggaagccagatttaatattagcttcttatcatggaatacctcaaaaatattttgataaaggagacccctatcattgctattgtcacaaaaccactagattaatgtcagaaaaatttacttcgatcgaaatcaagacaacgtttcaatcaaggtttggtcctgaaaaatggcttcaaccttatacagacaaaactctagaaaatttacctcgagaaggaaaaaaaaatattttagctatatgcccaggattttcttcagattgtgttgaaactttagaagaaatccaaattcaaggaaaagagagcttcctaaattctgggggagaaaactttgatatggtgccatgtttaaatgataatgatgatcatatagttttattaaaatctttaattcaaaaaaacatttagc

SEQ ID NO: 288937 - DNA, 606 bp, Unknown
  Bacterial polypeptide expressing nucleotide sequence isolated from the Sargasso Sea
catggaaaaaaaccaccctaaagtaaattttggtaaaacaggcgtgctactagtaaatctgggaacacccgattcaacaagttggttagatattagaagatatttaaaagaatttttgtctgacaaaagagtaattgaagtaaatccaataatttggaaaattattctaaatttgtttattttgaattttagaccttcaaaaacagcagaggcatataaaaaaatttggatgcaaaaagaaaatatgtctccattaagatattatacaattatgcaaacaaaaaagttgcaaaaaaaaattatcaaagaatcaataataattgattatgccatgagatatgggagtccaagtatagctagtaaaatgaatttgcttcgagaaaaagggtgtgaaaatataattatattacctctctatccacaatactcatcggcaacaaccgcaacagtttgtgatgaggtttacagaactattatgaaaatgagatggcaaccaagtttgcaaataatacctcattatgagtctgagccattatacatagagggtttaaaaaagagtattgaaaaaaaaatttcagaaataaattggaaaccagatttaataat

SEQ ID NO: 288938 - DNA, 556 bp, Unknown
  Bacterial polypeptide expressing nucleotide sequence isolated from the Sargasso Sea
aatgataaaagatcatccgccagtaaaatttggtaagacagctgtccttttagttaacctaggaacaccagattcaactagctggtttgatataagaaaatatttaaaagaatttttatcagacaaaagagttatagaagtcaatcctataatttggaaagttatacttaacgtctttatacttaactttcgtccatccaaaacagcgaaagcatataaagaaatttggatgaagaaagagaacatatcaccgctaagattttatacacaaaatcaaagcttaaaattaaaagaagaatttagcaaaactgacttaataattgattttgcaatgagatatgggaatccaagtattaaaagtaaaattaaacacttacatgaactagggtgtgaaaatttaattgttttgccattatatcctcagtatgcagcagcaactacagcaacagtttgtgatgaagtttataggactttgatgaaaatgagatggcaaccaaatttaaaaatagttcctcattatgagtctgagcctttatacattgaggctctaaaaaat

SEQ ID NO: 288939 - DNA, 465 bp, Unknown
  Bacterial polypeptide expressing nucleotide sequence isolated from the Sargasso Sea
ttagctatcacgggattccgaaaagacaagctaaaaagacagatattactggttctcattgtttttcatcggcagattgttgtgaaactatatgtccaggctcttcagattgttataaagcacacactgtacaagcgtcaaataaagtagctgaagaactaggccttagtgataatcaatgggaaatagcttaccaatcaaggttgggtccaggttggctaactccatttactgatagacgcttagctgaaatgcctactaaagatttaaaatcagtacttgttgtctgtccttcttttatttcggattgtttagaaactttggaagaaattgaaattagaggaagagatacttttttcaattcaggtggagaaaagatgacctacattccttgtttaaatgactcgaatgacacaataaatttgttggagtctcttgttcttgaaagcgaaattaaaaaataag

SEQ ID NO: 288940 - DNA, 637 bp, Unknown
  Bacterial polypeptide expressing nucleotide sequence isolated from the Sargasso Sea
cacagaaagacaagcagaaaaattatctgaacaaataggtaatgaaaaaataatagttgattttgccatgaggtatggaaacccaagtattaaaagtaaaatacataaactccataaagaaggatgtgaaaacttaatcatttttcctctttatcctcaatatgcagccgcaacaacagcaaccgtgtgtgatgaagtatatagaactttaatgaaaatgaggtggcaaccaaatttaaaaataattccacattatgaatctgagccactttacattgaggcaatcaaaaatagtattaaaaaaaaagtgaatgaaattgattggaaaccagatttaataattgcatcctatcatggcataccaaaaaaatattttgataaaggtgacccatatcactgttactgccataaaactaccagacttatttctgaaaaatattcagatatcgaaatcaaaactacatttcaatctagatttggcccgcaggaatggttgcaaccttatacagataaaacttttgagactctccctaaagaaggtaagaggaatatcttagttatttgtccaggattctcatctgattgtgttgaaactttagaggaaatatctatccaggggaaagaaagttttatttaa

SEQ ID NO: 288941 - DNA, 607 bp, Unknown
  Bacterial polypeptide expressing nucleotide sequence isolated from the Sargasso Sea
tgtgaaaatttagtaatcttacctttatatcctcaatatgctgcggccaccacagcaacagtttgcgatgaggtttatagaacactcatgaacatgagatggcagccttccttaaaaataataccgcactatgaatccaatcctctttacatagaggcattggtaaaatctataaataaaaaaatcagcgagattgattggaaaccagatttaatattagcttcttatcatggaattccgaaaaaatattttgataaaggtgatccataccattgttattgtcataaaacgacaaggctaattacagagaagttaaactcaattgaaatcaaaacaacatttcagtcaagatttgggccacagaaatggttacaaccttatacagacaaaactttagaagagctcccaaaagaaggaaaaaaaaatgtcctggctatatgtcctggcttttcttctgattgtgtagaaacattagaagaaatacttatacaaggaaaagagagctttatggagtccggtggagaaaattttgacatggtaccttgcctgaatgacagtgatgatcatatacttttgttaaaaaatttgattgaaaaaaatatataat

SEQ ID NO: 288942 - DNA, 561 bp, Unknown
  Bacterial polypeptide expressing nucleotide sequence isolated from the Sargasso Sea
aatggataaaaatcatcccgaagtaaaatttggaaaaactgggatattaattattaacctcggcacaccagacacgactggctggtgggatattagaaaatatttaaaagagtttttatctgatagaagagttatagaagtaaacccaattgtttggcaattaatactaaatttattcatattaacttttaggccttctaaaacagctcatgcttataaacaaatttggagaaaagaaagcaacgagtcacctctgctatattttacaaagagccaagctaaaaaactaaacgaaaaaattggcaatgataaaataatagtggactttgcaatgagatatggaaacccaagtattaattacaagttaaataatctcaaagagaaaggatgtgaaaatgttattgttttaccattatatccacaatacgctgctgcaacaactgcaacagtctgtgatgaggtttacagatcgctcatgaaaatgagatggcaaccaagcttacaaataattcctcactacgaaagcgataatctttacattgatgctttaattaaaagtat

SEQ ID NO: 288943 - DNA, 813 bp, Unknown
  Bacterial polypeptide expressing nucleotide sequence isolated from the Sargasso Sea
tatttcttgtgaatcttggcacgcccagtcagccaacagaaaaagaagtaagaatttatcttagagaatttctatctgataaagacgttattagacttcctaggatattttggttaccacttcttcatttaattattttaagggtcagacctaagaaaagcgctgaactctataaaaaggtttggaccaaatgggggtccccattactatataatacttttttgcaagcaggattattgcgtaagaaatttcaagatgaatttataattgatgttgctatgagatatggttcaccctctatagagagtatgatgctgaaatattataaacaggggtataataatttattatttttaccaatgtttccacaatattcaacaacaacaacaaagtctattgccaaccagattgcaagagtcataaaaaaaaataaaatatacacagatgaaaacactatcagtttcataaaagaatttcatgataatgatgattacattgattcctctgtgacccatattcagacctaccaaaaaatatatggtaagccagaaaaattacttctatcattccatgggatacccaaatcctatgttggtgatgatgagccttatcagtcgcaatgcttcaagactgcaaatctcatagctaaacagttaaagctctcagccaatcaatatgagattgtttttcaatcaaggtttgggaagtcagagtggatacagccttacttagcagaaaggcttgaaaatcttccatcggaaggtatcacgaatattcaagtttattgccctggattttcttcagatgtctaga

SEQ ID NO: 288944 - DNA, 196 bp, Unknown
  Bacterial polypeptide expressing nucleotide sequence isolated from the Sargasso Sea
aatgaaatccgatcacccaaaaataaactatggaaaaacaggtattcttcttgttaatcttggtacaccagattcaactagttggtgggatataagaaaatatttgaaggaatttttgtctgatagaagggttattgaagttaatcctattatttggcaagtaatccttaacttgtttatattaacttttagaccg

SEQ ID NO: 288945 - DNA, 687 bp, Unknown
  Bacterial polypeptide expressing nucleotide sequence isolated from the Sargasso Sea
gaatttacacaaacacaagcaaaaagtttagaaaataatttactaaaaaaaggagattataaatgttttgttattatgcgctgttggcatccaagagctgaaaatgtaataaaagaagttaaagaatataatccagaggagataattcttttgcctctctatccccaatactcggcgtcaacctcaggatcttccataaaagaatggaatgatttatgtaaaagggaaaattataaaattaaaaccaaaaccatttgttgttatccaacagaaaataactttttagaatcacatacaaaccttattaaaaaaacaataaaaaatttagaaaataaaaattttaaattacttttttctgcccatgggttgcccgagaataaaattaaaaaaggagatccttatcaatggcaagtagagaaaaccgtcgaaggaataatgaaaaaattaacgaatgaaaatccagattatataatatgctatcaaagtcgtgtgggtccccttaaatggattggtccatcaacagatgaaataattataaaatattctaaagaaaaaaaagggattgttatagttcctgtagcctttgtctcagaacactcagaaaccttagtagaattagatatagaatataaaaaattggcagaaaaaaatggttgcagtttttataaaagagtaccagcattgggt

SEQ ID NO: 288946 - DNA, 679 bp, Unknown
  Bacterial polypeptide expressing nucleotide sequence isolated from the Sargasso Sea
gttattttgatgccactttatcctcaatactcagcagcaacatcgggttcatcaattaatgagtggcaaaatatatgtaagaaaaataattttgaggtgaaaacatgtactttatgttgctatccaacagatgataattttattcaagcacacaaagatgaaattgagaaaaaaattaagaatttagacaatttcaaattaatattttcagcacatggtttacctgaaaaaaatattaaaaaaggagatccgtatcagtggcaagtagaacagtcagtagataaaatagtcaaatctcttaatattaaaaatttagattggattttaagttatcaaagtcgtgtcggtccgctaaaatggattggtccatctacagaggatataattgttgaaaattcaaaattgggcaaacaaattgtcttagttccaatagcctttgtgtctgaacattctgagactttggttgaactagatatagaatacaaagaattagctgataaaaatggatgtaaaaattatattagaataccagctcttggaaaaaatgaaaattatataaaagcaatgtctaatttgataattaataaacaagactataattttaatggcgaactttttcctccaaaaatacaatgtccaagtaaatttaaaaaatgcccttgtttaagtcatgaatagt

SEQ ID NO: 288947 - DNA, 508 bp, Unknown
  Bacterial polypeptide expressing nucleotide sequence isolated from the Sargasso Sea
aatgattgaaaataaccacccaccaacaaaatatggtaacacaggcgtactcataatcaatcttggtacacctgattccaccaattggtttgatataagaaaatatttaaaagaatttctttctgatagaagagttatcgaggtaaatccgttagtttggcaaataattttaaatttgtttattttaaattttagaccctctaaaactgctaaagcttataaagaaatctggatgaaaaatgaaaatatttctccacttctttattatacaaaaaagcaaagtgagaaaatttcaaatttactatcaaaagaaaacgttattatagattttgctatgagatacggaaacccaagcattaaaggcaagattcataaattacataaaatgggctgtgaaaacttagtgatacttcctctttatccacaatatgcggcagccacaacggcaacagtttgtgatgaggtatacagaactttaatgaaaatgaggtggcagccttctttaaaa

SEQ ID NO: 288948 - DNA, 564 bp, Unknown
  Bacterial polypeptide expressing nucleotide sequence isolated from the Sargasso Sea
cagcaacaactgcaacagtatgtgatgaagtttatagaactttaatgcaaatgagatggcaaccttctttaaaaattattccacattatgagtctgactcgctctatatagatgctttggttaaatctattaataaaaaaataaatgaaattaattggaaaccagatttaataatcgcctcatatcatggcatacctaaaaaatattttgacaaaggcgatccttatcattgttattgtcataaaacgacaagactaatttctgaaaaatttaattctatagaaatcaaaactacgttccaatccagatttggaccacaagagtggttgcagccttacacagataaaactttagaaagtctaccaaaagaaggaaaaaaaaatattcttacgatttgccctggtttcgcgtctgactgtgtagaaactttagaggaaattttaattcaaggtaaagaaagttttttaagttctggaggtgaaaactttgatatgatcccgtgtttaaatgataacaatgatcatataaatttattgaaatctttaattgaaaaaaatctttaaa

SEQ ID NO: 288949 - DNA, 810 bp, Unknown
  Bacterial polypeptide expressing nucleotide sequence isolated from the Sargasso Sea
tatgaagactaaaaaaggactgttacttataaaccttgggactcctgatgatccgggatatttatctgtctttaaatacttaagacagttcttaatggatccaaaagtaattactgttccatacattcttagatttattctagtttcactgatcatcgttcctttcagggcttttagttctggaaggatttacaaaaaaatatggaccgaaaatggttctcctctcatagtaaatacatctgctttagctgataaagttagtaaaaaagttcccaacatagaggttgaatttgccatgagatatcaatctccatctatcgaagataagttaaaaaagttaatctctcagaatcttgatgaaattataatacttcctttatttcctcaatatagcactgcaacaactggatcagtttttgatgaaatctctagagttcttaaaaaacaaagtgttacaccgtctataaagtttataaatcaattttatgaacaaaaatcatttatagattcttgggaagaaagattacagtcttttaatgttgaagaatatgatcatatattatttagttaccacggattacctactaaagctgtagatgatatttacgaagattcgttatgtgcggataataattgcgaaaatgaaataactaatgaaaataagttttgctataaagcaacgtgttatgaaacaactcggcttatcgcaaatagatttagtctttctccagataaatacacagtttcatttcagtcgagattaacaaaaaactggctggagccttttacagatgaagttctcgaaagttt

SEQ ID NO: 288950 - DNA, 277 bp, Unknown
  Bacterial polypeptide expressing nucleotide sequence isolated from the Sargasso Sea
ttccaatctagatttggcagagaggagtggcttcagccatatattgatgaagaaataataaaatttgctcaatctggtcttcgcaaccttcatgtaatatctccaggatttagcgtagactgcttggaaactctagaagaaattcagattcaatatgaggagctatttattagtaatggtggtcaaaatttctcttacataccatgtctgaatagtgatattgatcacataaatattttaaaaaatataataaatgaaaacataataggttggtaag

SEQ ID NO: 288951 - DNA, 762 bp, Unknown
  Bacterial polypeptide expressing nucleotide sequence isolated from the Sargasso Sea
ccctccgatttggcaaataattttaaatttattttttttaaacttcaggccctcaaaaacatctcacgcatataaacaaatttggagaaaagaaactaatgaatcgcctttattatattttacaaaaaatcaggccaaagaactaagcaaagaaatcggaagcgaaaaaattgttgtagattttgctatgagatatgggaacccaagcattaactcaaagttaaataagcttaaagaggaaggatgcgaaaatataattattctaccattatatcctcagtatgcagcagcaactaccgctacagtgtgtgatgaagtgtacagatctttaatgaggatgagatggcaaccaagtcttcaaattattcctcattatgaaagtgatcctctgtacattgatgcattagttaacagcatagagaggaaagttaatgaaattaaatggaagccagatttaataatttcttcttatcacggcattccaaaatcttatttcgaaaaaggtgacccgtatcattgttattgccacaaaactactagattaatgaaagaaaaatataaagagattgaaattcaaactacctttcaatctcgatttggaccacaagagtggttaacaccctacacagacaaaacaatcgagtctttgcctggtaaaggaataaagaatttgcttataatatgtcctggatttgcatcagattgtgttgaaactttagaagaaattaatattcaaggaagagaaagttttatcgaaaaagg

SEQ ID NO: 288952 - DNA, 619 bp, Unknown
  Bacterial polypeptide expressing nucleotide sequence isolated from the Sargasso Sea
aatgaaaaaagctgtaatattatttaatttaggaggaccagataaattggaaaatgtaaaaccttttttatttaatttatttaatgatcctgcaattttaaatttacctacatttttaagatatccattggctaaattaattgcgaatagaaggactcctattgcaaaaaaaatatatgaagaattaggaggatcatcgccaattttaaaactaacaaaagatcaatcaatagccttggaaaaaaaacttaaccaaaatgaaaaaagtgaggagtataaatgttttatagttatgagatgttggcacccaagagctgaagaaataattaaaagtgttaaattgtataatccagatgaaataatattgatgcccctttatccacaatattccgcagcaacttctggttcttcaattaaagagtggaatgatgtttgtaaaaaaaataattataaaataaaaacaagcattatttgctgttatccaatagataaaaattttattaatgcacacacaaaagaaataaataaaaaaataaaagatttaaaaaactttaaattaattttttctgcacatggattgccagaaaaaaatattaaaaaaggtgatccataccaatgg

SEQ ID NO: 288953 - DNA, 488 bp, Unknown
  Bacterial polypeptide expressing nucleotide sequence isolated from the Sargasso Sea
aatgattgaagatcatccaaaagtgcaattcggtaaaacaggagtcttaattgtcaatcttggtactcccgactcaacaagttggtttgacataagaaaatatttaaaagaatttttatctgatagacgggttattgaagtaaaccccatattatggcaaattattcttaatttatttattttaaatttaaggccttccaaaacagcaaaagcttataaagagatttggatgaaagatgaaaacatgtccccattaagatattatacactaaaacaggcagacaaacttaccaaagagataggaaataaaaatttactagttgattatgctatgcgttatggaaatcctagcattaagtctaaaattcatagtctcaaagaaaatggatgtgaaaaccttattgttttacctttatatcctccatatgcagcggctactacagcaacagtatgtgatgaagtttatagaactttaatgaagatgagat

SEQ ID NO: 288954 - DNA, 373 bp, Unknown
  Bacterial polypeptide expressing nucleotide sequence isolated from the Sargasso Sea
ataccaaaaaagtactttgataagggagatccatatcattgcttttgtcacaaaaccacaagattagtttcagaaaaatttaaatccattgaaattaaaacaacctttcaatctagatttggtccacaagagtggcttcaaccatacacagataaaactttagaaaacttaccaaaggaaggaaaaaaaaatatcctcacgatatgcccaggtttttcctctgattgtgttgaaacattagaagaaatattaatacagggcaaaaaaagctttatggattcagggggtgagaatttcgacatgataccatgtctaaatgataatgatgaccatataaatttactaaaaaacttaattcaaaaaaatatttaat

SEQ ID NO: 288955 - DNA, 486 bp, Unknown
  Bacterial polypeptide expressing nucleotide sequence isolated from the Sargasso Sea
ttccacactatgagtcagatccattatatgttgatgctttagtaaactcaataaatcttaaaataaaaaatataaattggaaaccagatttaattttagcttcgtaccacggaataccaaaaaagtactttgataaaggagatccatatcattgttattgtcataaaactacaaggcttgtttcggaaaaatttaaatctattgaaattaaaacaacttttcaatctagatttggcccacaagagtggcttcaaccatatacagataaagctttagaaaatttaccaaaggaaggaaaaaaaaatgtactcacgatatgcccaggtttttcctccgattgtgttgaaacattagaagaaatattaatacagggtaaaaaaagctttatggaatcgggaggtgagaattttgatatgataccatgtttaaatgataatgacgatcatataaatttactaaaaaatttaattcaaaaaaatatttaat

SEQ ID NO: 288956 - DNA, 650 bp, Unknown
  Bacterial polypeptide expressing nucleotide sequence isolated from the Sargasso Sea
aatgaaaaaagcagtaattttatttaatctaggaggaccagataaactagaaagtgtagagccattcctttttaatctatttaatgacccggcaataattagcattccatcaatttttaggtatcctttagcaaaactaatttccaaaagaagagctcctgtcgcaaaaaatatttatagagaaattggaaataagtctccaatacttgagcttacacagaaccaagcaaaaagtttagaaaatactctatcagcaaaaggggattataaatgttttgtcattatgcgttgttggcatccacgtgccgctgacgtaataaaagaagtcaaagaatatgatcctgatgaaataatacttttgcctctctaccctcaatattcagcatctacctccggttcttcaattaaagaatggaatcatttatgtagaaaagaaaattatgaagttaatactaaaactatttgttgttatccatcagagaataattttttacaatcacatgcaaatctcataaaaaaaacaataaaagatttagaaaacaaagattttaaattacttttctctgctcatggtttacctgaaaataaaataaaaaaaggtgatccttatcaatggcaagtagaacaaactgttgatggcataatggcaa

SEQ ID NO: 288957 - DNA, 400 bp, Unknown
  Bacterial polypeptide expressing nucleotide sequence isolated from the Sargasso Sea
tgatagttgcctcttatcacggtattccaaaaaatactttgagaaaggtgatccctatcattgttattgtcaaaaaaccacaaggctaatttcagagaagtttaaggaagttaaaataattactacttttcaatcaagatttggaccacaagaatggcttcaaccttatactgataaaactttggaagaactaccaagcaaaggaaacaaaaaagttttagttatatcacctggttttgcgtcagattgtgtcgaaacactcgaagaaatttcaatacaggggaaagaaagctttgaaaaatctggaggagaaaattttggatttataccatgtttaaatgataatgaagatcatattaaattattagagcatctaattaaaaaacatttaaatcaatga

SEQ ID NO: 288958 - DNA, 868 bp, Unknown
  Bacterial polypeptide expressing nucleotide sequence isolated from the Sargasso Sea
aatgaaaaaggctataattttatttaatttaggtgggcctgacaatttaaactcagtggaaccttttttatttaatttgtttaatgatccggcaattattaatttgcccaattttttaaggtacccacttgcaaaaataatatcaaaaagaagaacaccaatagcaaaaaaaatttatgaagaaatgggtggttcttctcctattttaaaattaacaaaggaacaagcacacgaactagaactatctcttaattttagtcaaaaagaaataaattataaaacatttatagcaatgagatgttggaagccccgtgcatcagaagttataaaagacattataaattttggacctaacgagatgattttattacctctttatcctcaattttcatactccacgtccggatcgtcaattaatgaatggaaagatgtttgtaaaaaaaataaatataatattaaaacaagcacaatatgttgttatccaactgaagaaaattttattaaagcacatgttgatgaaataagtaaaaaaatagggaaaaataaaaatgaaaaacttattttttcagcccatggactcccagaaaaaaacattaaaaatggcgacccttaccagtggcaaatcgaaagaactgttcaagagatagtaaaaaaaataaatattaaaaatcttgattatattttaagctaccaaagtagagttgggcctttaaaatggataggcccttctacagacgatgttatagtagaaaattctaaaataggaaaaagtataatattagtgcccatagcttttgtttctgaacattcagaaactcttgtagagctagatattgaatataaaaaattagcaaaggataatgggtgt

SEQ ID NO: 288959 - DNA, 647 bp, Unknown
  Bacterial polypeptide expressing nucleotide sequence isolated from the Sargasso Sea
aagcattaagagcaaaattcataaattgcataaaatgggttgcgaaaatctggtgatacttcctctttatccccaatatgcagcggccacaacagcaacagtttgtgatgaggtatacagaactttaatgaaaatgaggtggcaaccttctttaaaaataatcccacattacgaatctgattcactttatattgatgcgctcgttaattcaattgataagaagataaaaggaattaattggaaaccagacttaattatagcttcataccatgggataccaaaaaaatattttgataaaggtgatccttatcattgttattgtcataaaacgacaagacttatttcagaaaaatttacttcaattggaattaaaactacatttcagtctagatttggtccacaagaatggcttcaaccatatactgacaagactttagaaaatttgcctaaagaaggcgttaaaaatgtccttacaatctgtccagggtttgcttctgattgtgtagagactttagaggaaatacaaattcaagctaaagaaagttttttaaattctggaggagaaaattttgatatggttccctgtttaaacgataatagtgatcatataactttactaaaatctttaatcgaaagaaatatctgat

SEQ ID NO: 288960 - DNA, 280 bp, Unknown
  Bacterial polypeptide expressing nucleotide sequence isolated from the Sargasso Sea
aatggaaaatcatccaaaaattaacttcggtaaaaccggaataatgttagtaaatttaggaacaccggattcgacaagttggctagatataagaaaatatttaaaagaattcttatctgacagaagagttattgaagtaaacccgataatttggcaattaatactaaacatatttattttaacatttagaccatcaaagactgcaaaagcttataaagaaatatggatgaaagaagaaaatatgtctccattaagatattatactgaaaaacaagcttca

SEQ ID NO: 288961 - DNA, 565 bp, Unknown
  Bacterial polypeptide expressing nucleotide sequence isolated from the Sargasso Sea
tgctgctactaccgctactgtttgtgatgaagtttatagatcattaatgaatatgagatggcaaccatccttaaagataatcccacattatgagtctgatccattatatattaatgctttagttaactctatcaataaaaaaattaatgaaattaattggaaaccagatttaatacttgcatcataccatggtattccaaaaaaatattttgataaaggagatccttatcattgctactgtcataaaaccacaaggttaatctcagaaaaatttgactcgatagaaataaaaactacatttcaatcaagatttggacctcaagaatggctacaaccttatactgataaaactcttgaaaatttacccaaagaaggaaaaaaaaatgtgctagcgatatgcccaggcttttcatctgattgtgtagaaacactagaagaaatactaattcaaggtaaagaaagttttataaattcaggtggagaaaattttgatatgatcccgtgtttaaacgatagtgatgatcacattactttattaaaatctttaatccaaaaaagcatttag

SEQ ID NO: 288962 - DNA, 502 bp, Unknown
  Bacterial polypeptide expressing nucleotide sequence isolated from the Sargasso Sea
gcctagtttacaaattataccacattacgaatcggagcctctatatattaaggcactctcaaatagtttgaaaactaaaatctcagagttggaatggaaacctgatttaatcttagcatcttaccacggtattcctcaaaaatattttgataaaggagatccttatcattgttattgccataaaacatctagattactttcggaaaattttaaaactattgagattagaaccacattccaatctcgatttggtcctgaagcctggttgaagccttatactgatgtcactttagaaaaattaccaaaagaaggaaaaaaaaatatagttgtcatctgccctggcttttcttcagattgcgttgaaactcttgaagaaatatctattcaaggcaaagaaagcttcattagatctggaggaagaaattttgatgtagttccttgtttaaatgatagtgagggtcacatagacttacttgaacaattaacaaaaaaatttttataa

SEQ ID NO: 288963 - DNA, 450 bp, Unknown
  Bacterial polypeptide expressing nucleotide sequence isolated from the Sargasso Sea
ccctagtaaattctataaatactaaattagcaggtattaattggaagccagacctaatactagcctcttatcatggaataccaaaaaaatactttgataaaggagacccctatcattgttattgtcacaaaactactagattaatttcagaaaaatttacttctattaaaattaaaactacttttcaatcaaggttcggccccgaagaatggttaaaaccatatacagacaagacattagaaaatttacctaacgaaggagtaaagaatgttttagcaatatgccctggattttcttcagattgtgtagagacattagaggaaatattgattcaagggaaagaaagctttttagaggctggcggtcagaattttgatatgatctcgtgtcttaacgacaatgatgatcacataaaattgctaagtaatctgatcaaaaaaaatatttaat

SEQ ID NO: 288964 - DNA, 501 bp, Unknown
  Bacterial polypeptide expressing nucleotide sequence isolated from the Sargasso Sea
caaatttgaaaataattccacattatgagtctgaacccctttatatagatgctatcaataatagtattataaaaaaaattaacgaaatcaattggaaaccagatttaatagtagcttcgtaccacggaataccaaaaaaatattttgacaaaggagacccttatcattgctattgtcataaaactactagactaatttctgaaaaatattcagatactaaaattatgacaacatttcaatcaagatttggtcctcaagaatggctgcaaccttatacagacaaaacttttgaagccttgcccaaagaaggaaaaaaaaatattttagtcatatgtcctggtttttcgtctgattgtgttgagactttagaagaaatatctatccaaggcaaagaaagttttattaaatccggtggtgaaaactttgaaatgataccttgcttaaatgataatgaagatcatatttctttactcaaacatcttatttcaaaaaatttataat

SEQ ID NO: 288965 - DNA, 805 bp, Unknown
  Bacterial polypeptide expressing nucleotide sequence isolated from the Sargasso Sea
gcgttgcaaaaggtcttgggagatgcgtatcgagtcttcattgcgatgcggtactggcatccctttgccgaggaaacagcaaaggatgtcgccgcttggaaaccggatcgtgtggttcttatgccgctctatccgcagttttctacgacaacgacgaagagcttcactcgtatctggacaccggcggcgcaggcggcagaaatggacgtgccgacggccgatatctgctgctggccggaagcggctgggtttatcgatacgatgacgcgcgccgccgaggcctccatcgaccgcctgccgcatggggtggggtaccgcatcctgtattccgcccacggtctgccgaaaaaaattgtcgaagccggtgacccctatgcccatcaggttgaacggacggcggcggctgttcaaaaaaagctgcgcgacccctcggctgatcatgtgatctgttatcagagccgggtggggccgatggaatggctcaaaccctataccgaagatgaaatccgccgtgcaggggcggacggtaaggcgctggtggtagtgccggtcgccttcgttagcgaacattccgagaccctggtcgaactagatatcgaatattcggaactggcggaagaagccggcgtgccggcctatatccgcgcgcccacggtaaacgacgatcccgcctttatcgaaactttggccggtatcgtgcgcggggcgtgtaacaccggaacagcggcgggtggcgaaatatgcgtcgccggttttgccgactgcccctgcaatggtcaggactccacgcgagaggccacctgat

SEQ ID NO: 288966 - DNA, 523 bp, Unknown
  Bacterial polypeptide expressing nucleotide sequence isolated from the Sargasso Sea
atgaacaaagatcacccgcaagtaaactttggtaaaacaggagttcttctagtaaacctaggcacaccagactcaaccaaatggttagatattaggagatatttaaaagaatttttatcagataagagagtgatagaggtaaacccatttctttggaaaattattttaaatttatttattcttaacttaaggccatcgaaaaccgcgaaggcttacaaagaaatatggatgaaaaaagaagacatgtctccactaagatacttcacaataatgcaaactaaaaagctattggacagaattagcaataaagatgtaatcgttgattatgctatgcggtatggaaatccgagcataaaaagtaaaattcaaaaattacatgaggttggttgtgagagactaattgttttgccactttaccctcaatatgctgcagcaacaactgccactgtttgtgatgaggtgtacagagttttaatgggaatgaggtggcaaccaagtttgaatattgtaccccaattatgag

SEQ ID NO: 288967 - DNA, 511 bp, Unknown
  Bacterial polypeptide expressing nucleotide sequence isolated from the Sargasso Sea
aatggaacttgataataatcacccctctattaaatttggaaaaacaggtgttctcattgttaacctaggcactcctgactcaacaggttggcttgatattagaaaatatttaaaggagtttttgtcggacaaaagagttatcgaagtaaatcctataatttggcagttcattttaaacgtatttatattaactttcaggccatccaagacagcaaaggcttataaggaaatttggatgaaagatgaaaacatgtctccacttttatattatactcaaaagcaaagtgaaaaaatttccagttcaatatcaaaagagaatttattaatagattttgctatgagatatggaaatcctagtatcaaaagtaaaatttatagacttcagcaacaaggttgtgaaaatttagttatacttccactttatccacaatatgcggcagcaacaactgcaacagtatgtgatgaagtttatagaactttaatgcaaatgagatggcaaccttctttaaaa

SEQ ID NO: 288968 - DNA, 688 bp, Unknown
  Bacterial polypeptide expressing nucleotide sequence isolated from the Sargasso Sea
aatataatcctcggcgagataatacttttacctctttatcctcaatactcagcatcaacttctggttcttcaattgaagaatggaatgatttatgtattaaagaaaattataaagttaaaaccaaaactatttgctgctaccccacagaaaacaattttatagaatcccatgctaatcttattaaaaaaacactaaaaaatttagataataaaaattttaaattacttttttcagcacacggtttgccagaaattaaaattaaaaaaggcgatccttaccaatggcaggtagaacaaactgttgaaggaataatgtcaaaattaacggatgaaaacccagattatataataagctatcaaagtcgtgtgggacctcttaaatggattggaccatctaccgatgaaataattataaaatattctaaagaaaaaaaaggcattgttatagttcccgtagcttttgtatcagatcattcggaaacactagtagaattagatattgaatataaaaaattagcagaaaaaaatggttgcagtttttacaaaagagtaccagcattagctacagaggaaaattttatcaaagggcttgcggagttagttttgcaagaagaaacaagaagtaattttgtttcatcaataatgtgccctaataaatatgtaaaatgcccatgtctagcaaaataaa

SEQ ID NO: 288969 - DNA, 469 bp, Unknown
  Bacterial polypeptide expressing nucleotide sequence isolated from the Sargasso Sea
tatattgatgctttagttaaaagtattaataaaaagatttcagaattaagttggaaaccagatttaatagtagcttcttatcatggaatacccaaaaaatattttgataaaggagatccttatcattgttattgtcaaaaaacttctcgacttataatagaaaaatttaacaaaattccaatacaaacaacatttcagtcacgttttggtccacaggaatggcttcaaccatatactgataaaactcttgaaaatttaccaaaagaaggaaagaaaaacattttagttatttgccctggtttttcttcagactgcgtggaaactttagaagaaattgcaattcagggtaaaaatagtttttttaaaaatggtggaaaaaattttgatatagtgccctgccttaatgacgatgaagaacatattaatttattaaagcacttagtggatagatataatttaaaaaaatgaa

SEQ ID NO: 288970 - DNA, 463 bp, Unknown
  Bacterial polypeptide expressing nucleotide sequence isolated from the Sargasso Sea
tttatatgttgatgcgattaaaaatagtattataaaaaaagtaagtgaaattaattggaaaccagatttattaatagcctcatatcatggaataccaaaaaaatattttgataaaggggatccctatcattgctactgtcataaaaccacaaggttaatttccgaaaaatattctgatattaaaataatgacaacatttcaatcgagatttggtccccaagagtggttgcagccttatacagataaaacttttgaagttttacccaaagagggaaaaaaaaacattttagttatttgtcctggttttgcatctgattgtgtagaaaccttagaggaaatatctattcaaggaaaagaaagttttattaaatcaggtggagaaaattttgaaatggtaccatgtttgaatgacaatgatgatcatataagtttattcaaacatttaatttcaaagaatttataa

SEQ ID NO: 288971 - DNA, 1066 bp, Unknown
  Bacterial polypeptide expressing nucleotide sequence isolated from the Sargasso Sea
atgtttgatgaaacagcatcaatagcgatcccaaaacatgcgggaacggatcacccaaaaattccgaaaaagcgaataggaattcttctagccaatttgggtaccccagatcactatgactattggtcaatgagacgctatttatcagagtttttgtccgacagacgtgttatagattattctccttggttatggcagccattgttacaattagtaattttatcaattcgcccctctaggtctggtgcagcttataaatctatttggaataatgagggaaatgaaagtcctctaatgactataacgagaaatcaaaccctcaaaattaaaaaagtcatggaaaagaaatatggagaggaaatcaaagtagatttttgtatgcgttacggaaacccttcgacacagtctaaagtaagagaaatggttcaagaagggtgtacaaaaattttattttttcctctttatcctcattatgctggagcgacatcagcaacagcgaatgatcaattttttagagcgttaatgcaagaaaagtggcaaccagttattcgagttgttgagccatattttgaccaacctcaatatattgaagccttggcaagatctgtagaagcggcttatgcttcaaaaaaaaccagacctgaaattcttgtttgtagctatcatggagtccctaaaagatacctaatgcaaggtgacccgtatcattgccagtgtcaaaaaactactaggttattaaaggaacgtcttggctggaaggacacagaaattattaccacttttcaatctaaatttggaccagaggaatggttgaaaccttacaccgtcgaggaagtcgcaagacttgttgaagaagaaaagaaaaaatccatagccgtcattgcaccagctttttcttccgactgcattgaaactttggaagagataaatgaagaaattaaagaaagttttgaagaagctggaggagaagaatttacatatataccatgtctaaatgacagcacagcccacatcgatgcactttcttctttgattgataaaaatttaagaggttggatagactaac

SEQ ID NO: 288972 - DNA, 532 bp, Unknown
  Bacterial polypeptide expressing nucleotide sequence isolated from the Sargasso Sea
atgaatacagatcatccaaaagtgaagtttggaaaaactggtgttatgattataaatctaggaacaccagactctacaaactggtgggatataagaaaatatttaaaagagtttttatcggatagaagagttatagaagttaatccaattatttggaaggtaattttaaacttattcattcttactttcaggccatccaaaacagcgtatgcttataaaaaaatttggagaaaaaaaagcaatgagtcccctttactctattttacaaaagagcaagcaaacaagttaaatactaaaattggtaacgataaaataattgtagactttgcaatgagatatggaaatccaagtataaaatataaacttaacaaacttaaagaaaacggatgtgaaaacataattatactcccactatatccacaatatgctgcagctactacagcaactgtttgtgatgaggtttatagatcattaatgaaaatgagatggcaaccaagtttacaaattatccctcactatgaaagtgagcctt

SEQ ID NO: 288973 - DNA, 445 bp, Unknown
  Bacterial polypeptide expressing nucleotide sequence isolated from the Sargasso Sea
acatttaaaagatagagatgaaatagacaagttagttatatctttccatggtatacccaagagatatttcatggctggtgatccgtatcattgtcattgtattaaaactgccagattactaaaagaagaattaaaatggccacaaaataaagttttagttacttttcaatctagattcggccctgaaccatggcttcaaccttatactgaccaaacaattatagaattagctaaacaagggtctaaaaatattgctgtgattgctccaggtttcatttctgattgtttagaaacacttgaagaattaaatgttgaggcaagagaattttttatggagaatggtggaaaaacttttcaatatataccttgtttaaatgataacgaatattcaattaaatttttaaatgaaatagttaaacaaaatttattaggttggaataattaa

SEQ ID NO: 288974 - DNA, 832 bp, Unknown
  Bacterial polypeptide expressing nucleotide sequence isolated from the Sargasso Sea
ttggcaattattttgaatttgtttattttaaattttagaccttctaaaaacgctaaagcctataatgaaatctggatgaaggatgaaaatatatctccattactttattataccaaaaagcagagtgagaaaatttcaaacctactaacgaacgaaaatatcattacagattttgcgatgagatatggaaatcctagcattaagagcaagattcataaattgcataaaatgggctgtgaaaacttagtgatacttcctctctatccacaatatgcagcagctacaacagcaacagtttgtgacgaggtatacagaactttaatgaaaatgagatggcaaccttctttaaaaattattccccattatgaatctgacacactttacatagatgcacttgttaattcgatatataaaaaaataaatgaaattagttggaaaccagaattaattatagcctcataccacgggataccaaaaaaatattttgataaaggtgatccataccattgttattgccataaaacgactagacttatttcagaaaaatttacttcaatcgaaattaaaactacattccagtctagatttggtccacaagaatggcttcaaccatatactgacaagactttagaaaatttgcccaaagaaggtgttaaaaatgttcttacaatctgtccagggtttgcctctgattgtgtagagactttagaggaaatacaaattcaagctaaagaaagttttttaaattcaggtggagaaaattttgatatggtcccgtgtttaaatgataataatgatcatataactttactaaaatccttaattgaaaaaa

SEQ ID NO: 288975 - DNA, 1000 bp, Unknown
  Bacterial polypeptide expressing nucleotide sequence isolated from the Sargasso Sea
tatgaaaaaaactcttcttattgttaacttaggtaccccagataagccgaattactttagtgtttttaaatatctaagacagtttttaatggatggtagagtaataaacgtaaatccaattataagattttttttggtaaatttattaatagtacctttcagaactttttcatcatcaaagatctatcgacaagtttgggacaaagagacaggatcaccgcttctttacaataccaaaaaattagctgaaaaattgaactcaaaactaccagattatgatgttgagtatgctatgcgatatcaaaatccatctcttgaaaaagttataaataagattctattaaaaaatcctgatgaaattattatattacctctatttcctcattatgcagcagcaacaacaggctcggtatatgaggaggtttcaaggataatttcaaaaaaatgggttgttccaaaaataaaatttattaatcagttttatgacaatgaaaaatttataaatgcttggattgaaaaagctaataaattcgatatcaatgcatatgacaaaattatttttagttatcacggaattccaaatagccatgtagataatgtttatgaagattctgtgtgtagtgaccatgattgtgaaattaagattactgaaaaaaataaattttgttacaaagccacaacttatgaaacaactaagattttagctagtaaacttaatataaaagatgataattacatagttacatttcaatcaagattgactaataaatggttaactccatttactgatgaagttcttgaatctttagctaaagaaggaaagaaaaatattttaattttttcaccagcttttactgctgattgtttagaaacaatcattgaattaggtgatgaatacaaagaactatttatagaagctggaggggataatcttgattatgtagagtcattaaattattcagatacttgggcagatgctattatagatattattaaatag

SEQ ID NO: 288976 - DNA, 1024 bp, Unknown
  Bacterial polypeptide expressing nucleotide sequence isolated from the Sargasso Sea
atgtctcagaaaaatattttattaattaatcttgggtcaccaaaatcgttagatctaaaaaatgtaaaagaatatttacttgaatttttatctgatgattatgtgattgatttacctaagctaattcagcagttaattattcgaggaattattttaccatttagggctccaaaaacaaggaaagcttataaaactatctggggcgaaagtggttcgcccctaatagataacaccaaaaagattgctaattcattatcagaaagaatgggatggaacgttagaatagctatgagatatcagtatccatctattaaagaatcaattcttttctataaagaaaaagaaattaatgatgtagttgttgttcctctttatccacataatgcgatgtctacaacatattctacttctaaggaagtggacaggattgtaaagcaatattatccagaattaaactattcaataatcaaaccattttataatcatcccaaatatatatatgccttatctgaattgatcaggccgtatataaataataaaatggataaattaatttttagttatcatggtcttcctgagcgtcatattaaaaaatcagatagtagcggggagcattgtttgcagggcctcttatgttgtgaaactgattgccaattttctcagaattgttatcgatccaatactttgacaacttccaagttagtatcagataaattagatttaagtgaagacaaatggatgtccgcctttcaatcaagagttacacttattcaaagaaaatggttaaagccatatactgatatagaattaactaattttccaaaaaaagaaataaataatattgtgataatatgtccttcatttgttgcagactgtttggaaacattagaagaaatagatattagaggtagagagttgtttcttaaaaaaggtggaaaagaatttatttttataccctgcttaaataatgatataaactttattaaactcttagaagatttaataatcaattcttctgaatgaa

SEQ ID NO: 288977 - DNA, 589 bp, Unknown
  Bacterial polypeptide expressing nucleotide sequence isolated from the Sargasso Sea
aatgaattcagaacacccaaaagttaattttggaaaaactggtgttttaattgttaatcttggtaccccagactctactagttggttagacataagaaaatatttaagagaatttctatcagacagaagagttatcgaggtaaatcctattatttggcagataatacttaacttatttatactaaattttagaccttcaaaaactgctaaagcttacaaagaaatatggatgaaagataaaaatatgtcaccactcagatattttacggaggtacaagcagaaaaattatctcaacaaattagtaatgaaaaattaattgttgattttgctatgagatatggaaatccaagtattaaaagtaaaattcatgggcttcaaaacaaaggttgcgaaaatttaattattttacctctttatccacaatacgctgcagcaacaacagcaacagtttgtgatgaagtgtatagaactttgatgaaaatgagatggcagccaaatttaaaaataattccacattatgagtcagaaccgctttacatagaagcgctgaaaaatagcattttaaagaaaattaaagaaattaattga

SEQ ID NO: 288978 - DNA, 1015 bp, Unknown
  Bacterial polypeptide expressing nucleotide sequence isolated from the Sargasso Sea
tatgactacaattttagtattaaatcttggttctccaaaagatctcaagaaaaaaaatgttagagaatatttaagagagttcctatcagatgacttggtcattgatcttccaaagcctttacaacaatttattctaagatgcttcatcctcccctttcgacccaaggccaccaaagaagcgtatgaaaaaatatggacaaaagaaggctctccgcttcttattaatactgaaaatattgcaaagaaactcagcgcagcaatgaaattgccaacaatggttgcgatgcgttatcaagatccatcaactcgacaagcaataatgcagctaaaagaacaaggagaaacacatgtaattgtactccctctttaccctcacaatgcacgagcaactacattgacaaccgagctagatgttaaaaaacatatcaaagaagtatatccagaactgcaagcaacatacatcaaaccattttatcacgaagacatttacatagacgccttggctaaaaacatcaaatcacaaatcaacaaagaatacgatatgattctttttagttatcatggcataccaaaagcacaattaagaagaacagagatcggtaaaaaacattgcctggtcgtagaagattgttgcaatcaagtctgtgatgcttcagctgaatgttataaatcaaatttgacaacagcaacagaaaaagtagtacagaaacttaatatacctgacgaaaaatggaaaataactttccaatcaagaattggaccaggatggctacaaccttttactgataaagaactcattgctttaggcaagtctgataaaaaaagagttatggtagcatcaccttcatttgttgctgattgtcttgaaactctagaagagatcgcaattagagggaaagacagcttcatggatgcaggcggtagtgaatttactcaaataaaatgcctaaatgacagcgaagagtcaattgaatgcttaacatatgtgatcaacaaagcaatcaataaactctaa

SEQ ID NO: 288979 - DNA, 496 bp, Unknown
  Bacterial polypeptide expressing nucleotide sequence isolated from the Sargasso Sea
ataataccacattatgagtccgaacctttatatatagaagctttaaaaaacagtcttgaaaagaaattatcagaattaaattggaagcccgatgctattgtcgcttcttatcatggaatacctaaaaaatattttgataaaggagatccttaccactgttattgtcagaaaactacgagattgctatctgaggaatttaaacaaatacctatacaaactacgttccagtcaagatttggacctcaagaatggttgcaaccttatactgataaaactttagaaaatttgccggctgagggaaaaaaaaatgttttagtaatttgtcccggcttttcttcagattgtgtagaaacattagaagaaatttcgatgcaaggtaaagagagttttataaaaagcggtggcttaaattttgatgttgtaccttgtttaaatgataatgatgatcatataaatttactacaacatttagctaagaaatttattttaaaatgaa

SEQ ID NO: 288980 - DNA, 780 bp, Unknown
  Bacterial polypeptide expressing nucleotide sequence isolated from the Sargasso Sea
ttataaaaaaatctgaggaaagaaagcaacgagtctcctttattgtttttacaagaaatcaagcgaataaacttaaacaaaagattggtaatgaaaaaataattatagattttgctatgaggtatggaaacccaagcataagatcccgattaacaaaacttcaaaaagaaggatgtgaaaatataattattttgcctttgtacccccaatacgctgcagcgacaaccgcaacggtttgtgatgaagtctacagatctttaatgaaaatgagatggcaaccaagcctccaaattattcctcactatgaaagcgatcctttttatattagcgctttaataaatagcattgaaaaaaaaattaaggagataaattggaaacctgatttaataattgcttcatatcatggaattcctaagtcttattttgataaaggagatccttatcattgctattgtcacaaaacgactagactaattaaagaaaagtttaataaagtagaaatccaaacaacatttcaatcaagatttggcccacaagagtggttaactccatatactgataaaacattagagagtttaccatataaaggtataaaaaatttattagttatatgtccaggctttgcttcagactgtgtcgaaaccttagaggaaataaatattcaaggcaaagaaagttttataaaaaatggtggagtgaattttgatttaattccttgtttaaatgataatctagaccacattagattgtttgaaaaattagttaaaaaatatctgtaga

SEQ ID NO: 288981 - DNA, 1000 bp, Unknown
  Bacterial polypeptide expressing nucleotide sequence isolated from the Sargasso Sea
atgcaaaaagaattaaatcacccacctattaattttggtaaaacaggagctctgataataaatttggggacaccagattccacaagttggtttgacataagaaaatatttgaaagaatttttgtcagacaaaagagtaatagaagttaatcctattgtttggcaaattatattgaacgttttcatattaaattttagaccatctaaaactgctaaagcttataaagaaatttggatgaaagatgaaaacatttctcccctgctatattacacacaagaacaagccaagaaattatcaaactcactttctggaaaaaacctaattattgactatgccatgaggtatggaaatccgagtatcaaaagtaaaataaaaaaattacacgaaaaaggttgtgagaacttaattatacttcctttatatcctcaatatgctgctgcaacaacagcaaccgtttgtgatgaagtttatagaacattaatgaaaatgagatggcaaccatcaattaaaataataccacattatgagtcacatcctttgtacatagatgctttggtaaattcactaaataagaaaataaaagaaataaattggaagccagatctaatattagcatcttatcatggtataccccaaaaatactttgataaaggagacccatatcattgctattgtcaaaaaacgacaagattgatttcagagaaatttaattcgatagaaattaaaacatcatttcaatctagatttggtcctcaaaaatggcttgagccctatacagataaaactctggagaaattgcctaaagagggaaagaagaatgttctagcaatatgtcctggtttttcctcagattgtgtagagacattggaagaaattcttattcaaggtaaagaaagttttttagaatctggtggtgaaaatttcgatatggtaccatgtttaaatgataataatgatcatataaatttattaaaatcattaattcaacaaaacatataat

SEQ ID NO: 288982 - DNA, 652 bp, Unknown
  Bacterial polypeptide expressing nucleotide sequence isolated from the Sargasso Sea
atgaatatagatcatccaaatataaattatggaaaaactggaatattgttagtaaacctaggtaccccaaattctacgggctggtttgatatcagaaaatatttaaaggaatttttatctgatagaagagttatagaagtaaatccatttttatggaagattattttgaatcttttcattctaaattttagacctagtaaaacagcagaagcctataaaaaaatttggatgaagaatgaaaatgtgtcaccactaagatattatacacaaatgcaaactaaaaaattaaaagaaaaaataaaagataaaaaaattattattgattatgccatgagatatggagatccaagtataaatagtaaaatgagaagtcttcaaagtgaaggatgtgaaaacatagttattttacctttatatcctcaatatgctgcagcaacaacagcaacggtttgtgatgaagtttatagaaccttaatgaaaatgagatggcaaccaagtttacgaattattccacactacgagtcagaaccactatacatagaggcgcttgttaaaagtttaaacaaaaaaatatccgaaataaattggagaccaaatttaattgtagcttcataccatggaataccaaaaaaatattttgaaaaaaggtgat

SEQ ID NO: 288983 - DNA, 847 bp, Unknown
  Bacterial polypeptide expressing nucleotide sequence isolated from the Sargasso Sea
ttattttggaaggtaattttaaacttattcattcttactttcaggccatccaaaacagcgcatgcttataaaaaaatttggagaaaaaaaagcaatgagtcccctttactctattttacaaaagagcaagcaaacaagttaaatactaaaattggtaacgataaaataattgtagactttgcaatgagatatggaaatccaagtataaaatataaacttaacaaacttaaagaaaacggatgtgaaaacataattatactcccactatatccacaatatgctgcagctactacagcaactgtttgtgatgaggtttatagatcattaatgaaaatgagatggcaaccaagtttacaaattatccctcactatgaaagtgagccttcttatattgactcattgatcaagagcatagaaaaaaagcttaatgaaattaactggaaaccagatctgataatttcatcttatcatggaattcctaagtcttattttgataaaggtgatccttaccactgttattgtcacaaaactactagacttatgagagaaaagtttaaaaagattgaaattcaaactacctttcaatcgagattcgggccacaagaatggttaacaccttatactgataaaactttagaaagtttacccgataagggtgtaaaaaaactactagtaatatgtccgggcttcgcttcggattgcgttgagactttggaagaaataaacattcaaggtagagaaagctttttggagaatggtggagaaaagtttgatttaattccatgtctgaatgacagtgaagatcatattaatctttttgaaaaattgttgagtaaatatttataaa

SEQ ID NO: 288984 - DNA, 658 bp, Unknown
  Bacterial polypeptide expressing nucleotide sequence isolated from the Sargasso Sea
tatggaaatccaagtattaaaggtaaaattcatatgtcttcaaaaaaaaggttgtgaaaatttaattatactcccactttatcctcagtatgctgccgcaacaacggcaacagtttgtgatgaagtttatagaactttaatgaaaatgaggtggcaaccaaatcttaaaataatacctcattatgagtctgaaccattatacattgaggcgattaaaaatagtattttaaaaaagataagtgaaattaattggaagcccgatttaataattgcatcttatcatggaattccaaaaaaatattttgataaaggtgatccttatcattgttattgccataaaactaccagattaatttcagaacagtattcagatattgaaatcaagactacctttcaatctagatttggtcctcaagagtggttgcaaccttatacagataaaacttttgagacactacctaaagaaggtaaaaaaaatattttggttatttgccctggattttcatctgattgcgtagaaaccctagaagaaatatcgatccaaggaaaagaaagttttatcaaatcaggaggtgaaaattttgaaatggtaccatgtttgaatgatagtgaagatcatatttcattgttaaaacatctagttacaaaaaacttataa

SEQ ID NO: 288985 - DNA, 991 bp, Unknown
  Bacterial polypeptide expressing nucleotide sequence isolated from the Sargasso Sea
aatgaaaggaatactgctagtaaatctaggctctccaaaagacttagatagccactcaataaaggaatatcttacggaatttctttccgatgacttggtaattgactatcccaaatttcttcaacaaatattggttaactggataatagttcctaacagatataagaaaacgcaaagagcatatgcaaaaatttggacagagagtggctctcctcttataaataacactaaggaactcggtcttaaattagctaaagatagttgcttacatgttgaagtagctatgagatatcaagaaccttctataaaagatgcacttatcaaattaaaaagtaaaggatgcaacgaaataaaagcgatgcctctttatccacactacgccatttcaacaactctaactactcaggaaaaaataaaagatattgctgaaagtattgataaggagattaagattgaattcataaaatctttttacaatgaacctgaatatattgatgctttgtgttctttaatcaaaaaaaatagaatcgaagactcagacttacttctatttagttaccatggaattccattgaggcatctaaaaaaagcaaaaggaaagagtaataatggctattactgttctaacgcgtggtgcccatcaaaagaatattgttacagacatcaggtatatgaaacgtctagattgtgtgctgagaaactcaatattccaaaagaaaaatggcaagtttcttttcaatctaggataggtcctggttggctcaagccttttacagatgaagtgctgaaggaacttcccgataaaggtattaagaaggtagacgtaatatgtcctagttttgttattgataatttagaaacactggaggaaattagcatagaagggcgtcatgatttcttggctgctggaggagaaaagtttaattatattccttgtcttaattatgaagaagactgggtagaggttctgaaaaatatgtctaaaaagtga

SEQ ID NO: 288986 - DNA, 1006 bp, Unknown
  Bacterial polypeptide expressing nucleotide sequence isolated from the Sargasso Sea
tatgaagactaaaaaaggacttttacttataaaccttggaactccggatgatccaggatatttatctgtctttaaatacttaagacaattcttaatggatcccaaagttattactgttccatacattcttagatttattctagtcacacttattattgttcctttcagggcttttagttctggaagaatttataaaaaaatatggactggaaaaggctcgcctctcatagtaaatacatctgctttagttgataaagttagaaaaaaagttcccaacattgaggtggaatttgctatgagatatcaatctccatctatcgaagataaattaaaaaagttaatttctcaaaatcttgatgaaattataatacttcctttatttcctcaatatagcactgcaacaactggatccgtttttgatgaaatttctagagttttaaaaaaacagagtgttacaccgtctataaagtttataaatcaattttatgaacaagaatcatttatagattcttgggaggataagatgaaatcatttaatgttgataagtatgaccacatcttatttagttatcacggattaccaaccaaagcagttgatgatatttatgatgattctctttgtgctgataacaattgcgaaaatgaaataactaatgaaaataagttttgctataaagcaacgtgttatgaaactactaggcttattgcaagcagatttaatcttcctccagataaatacacagtttcattccagtcgagattaacaaaaaactggcttgaaccttttaccgatgaggttctagaaagttttccaaacaaagggatagaaaatatacttgttctttcaccagcttttacagcagataatttagaaacattatatgaaatagatgatgaatataaggagttatttatagaaaatggaggtaaatcattaactatggtaccttcattaaatgattcatctaaatgggcagattcaatagtagagataatagatgtatag

SEQ ID NO: 288987 - DNA, 380 bp, Unknown
  Bacterial polypeptide expressing nucleotide sequence isolated from the Sargasso Sea
tttaacaaatggtgatccataccactgtttttgtttaaaaacgactaggttggttaaggaaaaaatgaatcttgctgatgaagaaataatcaccacttttcaaagtcgttttggcagagcagaatggttaaaaccatatacagctgaaactcttaaagaattaccaagtaaaggcgttaaagatattcatattatatctcctggatttagtgctgactgtttagaaactcttgaagaactagaagaggaaaatcgagaatactttattgaagcaggtggtgaaaaatataaatatattccttgtctaaatgataatgaaaaacatttaaaatttatctctcatcttataataaaacatacacaaggttggaaagtctaat

SEQ ID NO: 288988 - DNA, 288 bp, Unknown
  Bacterial polypeptide expressing nucleotide sequence isolated from the Sargasso Sea
atagtcttgcatttcaatctagatttggtagagaagagtggctaaaaccctatgtggatgaagaaataattaaatttgcaaaaaatggagtaaaaaaattacatattatttccccaggttttagtgtggactgtttggagacactcgaagaaattcaaattcaatataaagatttgtttatcgaaaacggaggagaggatttggtatatataccttgtttaaatagcaatgaagatcagataaaaatgttacaatcgatggtgcaagaaaatataattggatggtaaa

SEQ ID NO: 288989 - DNA, 547 bp, Unknown
  Bacterial polypeptide expressing nucleotide sequence isolated from the Sargasso Sea
aatggttaaatattttggtgaaaaaaattatgaacacggtagtgacgataaaacaggtgtattaattactaatctaggaacaccagatgcgcctaaaagaaaagagttaaaaaaatatcttaatcaatttttatcagaccctagagtaattgaaatacctaaatttatttggcaattaatattacaacttgttattttacaaataagaccaagtaaatcagctgcggcatataaaaaaatttggacagaaaatgggtctcctcttttagatatttctattcgtcaattaaacgcaataaaaaacaagctatctaagtctgatccaaatatggttatcgcattaggtatgcgatatggaaacccgtcaattgaaaatgctttaaaaaaattacagtctcaacatgttagaagattactaattctcccactatatcctcaatactgcgccgctaccacaggaagtacttttgatgctgtaacaaatgttctgcagaaatggcgttggataccagaggttagatttattaatcaatatttgaagaaaaat

SEQ ID NO: 288990 - DNA, 1000 bp, Unknown
  Bacterial polypeptide expressing nucleotide sequence isolated from the Sargasso Sea
atgaaaaaagcattattattagttaacctagggacgcctgataagcctacatatttaagtgtctttaaatatttaagacaattcttaatggatggtcgtgtaataaatataaatccctttttaagatttatattagtaaattttataatttgtcctacaagatcattttcgtcaacaaaggtatataaggaggtatgggataaaaatactggatctcccttgcttcataacacaactaaattaactgaaaaattagctgataaaattgaagactatgatgttaattttgcaatgcgatatcaaaatccttcaattgagagtgtaataaataacatgcttgaaacaaatcctgatgaaattactgttttaccactttttcctcattatgctgctgctacaacaggatctgtttatcaagaaatatcaagaataatttcaaaaaaatgggttgttcctaacataagatttattaatcaattctatgataacgaaaagtttatagatgcttgggttgataaagcgtctaaatttgatctaaattcttatgataaagtaatttttagttaccatggtattcctaatagtcatgttgataatgtatatccagattctttatgttctgatcataattgtgaatctgaagttacaaatgaaaataagttttgttataaagctacaacatacgaaacaacaaaaattcttgccagcagactaaacttaagtcctgataaataccaggttacttttcaatcaaggctaacaaataaatggttaacaccatttactgacgaagtacttgaatcattacctggcaatggtaacaaaaatgtactagttttttcaccggcatttactgctgattgtttagaaacaatcattgaaattggtgacgaatataaagaactcttccttgaagctggaggagaaaagctcgattatgtagagtctttaaattattcagatttatgggctgatgctattattgatattattaagtagg

SEQ ID NO: 288991 - DNA, 397 bp, Unknown
  Bacterial polypeptide expressing nucleotide sequence isolated from the Sargasso Sea
cttgataattgcatcttatcacggaataccaaaaaaatattttgataaaggagatccctaccattgttattgccaaaaaacgactagattaatttctgaaaaattcaaaaaatttgaaattaaaacaacttttcaatctagatttggtccacaagaatggttgaagccttacactgataaagttattgaaaatttaccaaaagaaggaaaaaaaaatatattagtaatttgcccaggattttcatctgattgtgttgaaactcttgaagaaatttctattcaagggaaagaaatttttttaaaagcaggtggaataaattttgaagcggttccttgtctaaatgataataaagatcatatccaattatttaagtatttaataaacaaaaggttataa

SEQ ID NO: 288992 - DNA, 555 bp, Unknown
  Bacterial polypeptide expressing nucleotide sequence isolated from the Sargasso Sea
tcgatgcaattaacgcccacataaaagaccaaagctgggtgcctaatatcagatttatttctggataccatgacgatgagaattatataaactccctatcggtatcgatagaaaaaagtttttcaaaacatggtaggcctgataaacttatttttagttatcatggaatgcctgaacgctatcttcatgagggggacccttattactgcttctgtcataaaacaacacggttggttgcagaaaggttatcccttgatagtaaattttatgacatggctttccaatcacgttttggatatgaaaaatggcttcaaccatacatagacgatatgataccaaaagctgctgatgatggagttaggcatcttcagattatttctccaggctttagcgttgactgcctcgaaaccctggaagagatcaacatacaatacagagaattatttttagagcaaggcggggaaaaatttgaatatataccctgtttaaatgatggtgatgaccatataaaaatgatccaatcaatcattaataataatataaaagggtggtgac

SEQ ID NO: 288993 - DNA, 703 bp, Unknown
  Bacterial polypeptide expressing nucleotide sequence isolated from the Sargasso Sea
aaatttagttaaagaattcaatccctctgaagtagttcttcttcctttataccctcagtattcggccgcaacatcaggatcatctattcaagaatggaaaaaagttgctaaagaaaacaatctaaatacaaaaacaagtaccatttgttgttatccagaggataataaattcgtagaagcccacatagaattaataaaaaaaaaaattgaaggactaaaaaactttaaattaatattttctgcgcatggtttgccagaaaaaaatataaaaaaaggagatccttatcagtggcaagtagaacaaagtgtaaaaaaaattatggaaggaattaacaataataatattgattatgtcttgagttatcaaagtagagtcggacctctaaaatggattggtccatcaacggaagatataattatagaatattcaaaaaaaggaaaacatttggttattgtgccaatagcttttgtatccgaacattcagaaactttagtggaattagatattgaatatgaaaagttagctagaaataatggatgtaaaaattatacaagaatagaagctttgggtactaacaaaaattttatacaaagtttatcagatttaatagcaaataaagatctaaacaattttaaggaaaatttatatccaccaaaaaataggtgcccttccagtttcaccaaatgcccctgtctaaattaa

SEQ ID NO: 288994 - DNA, 139 bp, Unknown
  Bacterial polypeptide expressing nucleotide sequence isolated from the Sargasso Sea
aatgattgaaaaaaatcacccacctataaaatacggtaacacaggagttcttatagttaatttgggcacacctgattctactaattggtttgatataagaaaatatttaaaagaatttctctctgatagaagagtaatg

SEQ ID NO: 288995 - DNA, 538 bp, Unknown
  Bacterial polypeptide expressing nucleotide sequence isolated from the Sargasso Sea
aatggataaaataggcgtcttactaatgaatttaggagggcctgaacgcattactgatgtcggcccattcttatacaatcttttttctgatccagaaattatcaggacacctttccctgtttttcaaaagccgctagcttggttaattagcactcttaggagtactacttctcaacaggcttacctttctataggtggaggttcacctatcagaaggataactgaacaacaagcaagagaattacaatctaaattaaggaacaagggatttaatgctactacctacattgcaatgaggtattggcatccttttaccgaatcagcaattgctgatatgaaagcagatggcattgatcaagtagttgtaatacccttgtatccacatttttcgataagtacaagtggttcgagctttagggaattaaaaaaattgcgcgattctgatgatgaatttaagaaggtaccaatgagatgtgtaagaagttggttcagtcaagcaggttacttaaagtctatggttgaattaatttctgaacaa

SEQ ID NO: 288996 - DNA, 1003 bp, Unknown
  Bacterial polypeptide expressing nucleotide sequence isolated from the Sargasso Sea
ttggtaaatctggggtctccaaaagagcttaataaaaaaagtgtaaaagagtatttaaagtcttttttatctgatgatcttgtaattgatataccaaaattttttcaacagttaattttacatactttaattcttccatttagaccaagacaaacccttcatgcttataaacaaatatggaccgaagaaggctctcctttaattgtttcaacaaagaaaattgcgaaaaagttaaccaaaaaaacaaaatggagagtcgaaatagcaatgaggtatgaagatcctagtattgaagatgctctcaaaacccttaaagaagaagattgtaacaaacttttcgttgtccctctttatcctcataatgctatggctacaaccatgacaactgaagaagaggtcaaaagagttgctaaaaacttattttatgatgtagaacttatttttattaagcctttttacaataatacaaaatatttaaatgctctaaaaaagtctatagatccatatattgagggaggaaattttgataaattaatttttagctatcacgggattccaaaaagacaggctaaaaagactgatattactggaactcattgcttctcatcatcagattgttgtgaaactatatgtccaggctcctcaaattgctataaagcgcataccgtacaagcatcaaataaagtagctgaagaactaggccttagtgatgaccaatgggaaattgcttatcaatcaaggctaggtcctggctggctaactccatttacagacaaacgcttagctaaaatgcctagtaaagatttaaaatcagtacttgttgtctgcccctcttttatttcggattgtttagaaactttggaagaaattgaaatcaggggaagagatacttttttcaattcaggtggagaaaagatgacatacattccttgtttgaatgattcaaatgacactatagatttgttagagtctcttgttcttgaaagtgaaattaaaagataag

SEQ ID NO: 288997 - DNA, 394 bp, Unknown
  Bacterial polypeptide expressing nucleotide sequence isolated from the Sargasso Sea
attttagcatcttaccatgggataccaaaaaaatattttgataaaggagatccttatcattgttattgtcacaagacgaccagattaatttcggagaagtttaaatcagttaagattaaaactacgtttcaatcaagatttggaccacaagaatggctacaaccatacactgacaaaacactagaaaatttgccaaaagagggaaagaaaaatgtgcttgcgatatgccctgggttttcgtctgattgtgtagaaacattagaagaaatattgatccaaggaaaagagagctttatggaggcaggtggtgaaaattttgatatgataccatgtctaaatgacaacgatgatcatataaaactacttaatagtttgattaaaagtaatatctaat

SEQ ID NO: 288998 - DNA, 695 bp, Unknown
  Bacterial polypeptide expressing nucleotide sequence isolated from the Sargasso Sea
taataatgaaaaattaactgttgatttcgccatgagatatggaaatccaagtattaaaaataaaatttatgaactgcaaaacaaaggttgtgaaaatttaatcattttacctctttacccacaatacgcagcagctacaacagcaacagtttgtgatgaagtgtatagaactttgatgaagatgaggtggcaaccaaatctaaaaataataccacattatgagtcagagcctctttatatagaagcaataaaaaatagtattttaaaaaaaattaatgaaatcaattggaaaccagatttaatagttgcttcatatcacggaataccaaaaaaatatttttacaaaggtgatccttatcattgctactgttataaaactactagacttatttcagaaaagtattcagatattgaaattaaaacaacattccagtcaagatttggacctcaagaatggttacagccttacactgacaaaactcttgagagcttaccaaaagaaggaaaaaaaaatattttagttatttgtccaggattttcatctgattgtgtagaaactctagaagaaatatgtattcagggaaaagaaatttttattaaatcaggaggagaaaattttgaaatggtgccatgcttaaatgacaatgatgatcatattgctttattcgaacatctaattttaaaaaatacttagt

SEQ ID NO: 288999 - DNA, 1008 bp, Unknown
  Bacterial polypeptide expressing nucleotide sequence isolated from the Sargasso Sea
atatgaagactaaaaaaggactgttacttatcaaccttggaacaccggatgatccaggatatttatctgtctttaaatacttaagacaattcttaatggatccaaaagttattactgttccatacattcttagatttattctagtttctttaatcattgtccctttcagggctttcagctctggaaagatttataaaaaaatatggactgaaaatggctcgcctctcatagtaaatacatctgctttagctgataaagttagtaaaaaagtaccccatattgaggttgaatttgctatgagatatcaatctccatctatcgaagataaattaaaaaagttaatttctcaaaatcttgatgaaattataatacttcctttatttcctcaatatagcactgcaacaactggatccgtttttgatgaaatttctagagttcttaaaaaacagagtgttacaccttctataaaatttataaatcaattttatgaacaagaatcatttatagattcttgggaggataagctgaaatcatttgatgttgatgagtatgatcacatcttatttagttatcacggactaccaactaaggcagttgatgatatatatgaagattctctttgtgctgataacaattgcgaaaatgaaataactaatgaaaataagttttgttataaagcaacgtgttatgaaactactaggcttattgcaaacagatttaatctttctcaagataaatatacagtttcattccagtcgagattaacaaaaaactggcttgaaccctttaccgatgaggttcttgaaagtttcccaggcagaggcatagaaaatatacttgttctttcacccgcttttacagccgataatttagaaacattatatgaaattgatgatgaatataaggagttatttatagaaaatggaggtaaatctttaactatggtaccttcattaaatgattcatctaaatgggcagattcaatagtagaaataatagatgcatagg

SEQ ID NO: 289000 - DNA, 715 bp, Unknown
  Bacterial polypeptide expressing nucleotide sequence isolated from the Sargasso Sea
tctggaaaagcaggatccaaacttttcaatagagttagggatgagatatggtaacccatctataaagaatgctctaaaaatctttaaagaaaaaacaatttctaaaatcttggttttgccattatacccacaggctggatcacctactacaactagcaccttcgacgcaattaacgcccatataaaagaccaaagctgggtgcctaacctcagatttatttctggataccacgatgacgagaattatattaactccctatcagcgtcgatagaaaaaagtttttcaaaacatggtaggcctgataaacttatttttagttatcatgggatgcctgaacgctatcttcatgagggggacccttattactgcttctgtcataaaacaacacggttggttgtagaaaggttatcccttgatagtgaattttatgacatggccttccaatcacgttttggatatgaaaaatggcttcaaccatatatagacgatatgataccaaaagctgcggatgatggggttaggcatcttcaaatcatatctccaggctttagcgttgactgtctagaaaccttggaagagatcaacatacaatacagagaattatttttagagcacggcggggaaaaatttgagtatataccctgtttaaatgatggtgatgaccatataaaaatgatccaatcaatcattaataataatataaaagggtggtga

SEQ ID NO: 289001 - DNA, 607 bp, Unknown
  Bacterial polypeptide expressing nucleotide sequence isolated from the Sargasso Sea
aatgagaaaagcagttatattatttaacttgggtggtcccgacagcttaagttctgtagagccttttttatttaatttatttaatgatccagcgataattagtttaccaacaattttaaggtatccgttggctaaattaatttctaaaagacgcgctccaacagcaaaagctatttatagtgaaatgggagggagctcaccaattttaaaacaaactaaaatgcaagcattagcaattgaagaaagtctcaaagatgaaagcgatgattataaatgttttatagtcatgcgttgctggaagcctagagcaagttttgttattaaagaaattataaattacaaaccagaacaaataattttattgccattatatcctcaatattcagactcaacttctggttcttctataagagaatggcttggagaatgtaaaaaaaataatattacaacagaaacaaaaataatttgttgttatccaacagaagacaatttcatattatctcatgtaaatcttataaaagagaaggtttctttaacagagctagataatacaattattattttttcagctcatggtttgccagaaaataaaattaaaaaaggagat

SEQ ID NO: 289002 - DNA, 526 bp, Unknown
  Bacterial polypeptide expressing nucleotide sequence isolated from the Sargasso Sea
aatggaaaaaaaagcagaacatccaatagttaattttggaaaaaccggagttttaattgttaatcttggaactcctgattcaacaagttggtttgatataagaaaatatctaaaagaattcttatcggacaggagagtaatcgaagttaacccgataatctggcaaattgtattaaatcttattatattaacttttcggccatccaaaacagcaaaagcttataaagaaatttggatgaaggacaaaaacatttctcctcttttgtactatacacaaaggcaagcggagaagctttcaaacttaatatctgaaaaaaacttaataatagattatgctatgagatatggaaatcctagcataagaagtaaaattgcaaagctccatgaaataggttgtgaaaatttaataattctaccgctttatcctcaatacgccgcggcaactaccgctactgtctgtgatgaagtatatagaactcttatgaaaatgagatggcaaccatcgctaagaatagtgccacactag

SEQ ID NO: 289003 - DNA, 1015 bp, Unknown
  Bacterial polypeptide expressing nucleotide sequence isolated from the Sargasso Sea
tatgattatgaaagcagttcttctagtaaatttaggttcgccaaaagatcttaatttaagttctattaaagagtatttaatggagttcttaacagatgataatgtcgtcgatcttccgaaaattatccaaaaaattttagtaaaaaatattattgttccttttagatccaagaaaactcaagaggcatatagctctatatggaaaaaagatggatcaccattaataataaatacaaattctttagcaaaaaaactatcagagaaaaccaattattctgttgaaatagctatgaggtatcaatatccaactatcaatgaagcaatagaaaaattaattaataaaggatgtaaagaaattattgccgttcctctttatccgcattatgcacaatcaacaatattgacaacagagaataaaataaaagagatatcagaatctttgggtggaggcttaaagttatcatttataaagccattttataatcaagagggttatatcaattcattagcatctttaataaaagaaagcctaccatctgagtttgatcatttgcttttcagctatcatggtataccagaaagacatgttagaaatactgatccatcacaaaaacattgtctcaaagtgagagattgctgcaatattaaagccgatgcgcatcaattttgctataggcaccaggttttagaaactacaaaactttgcgcagcaaggttaaatatagaaaaagaaaaatggagtgtttcttttcaatcaagaattggaccgggatggcttaaaccttttaccgataagattttagatgaattacctaaaaaaaatataaaaaagttagcagttgtttgtcctgcatttgttgcggataacttagaaacattggaagaaataaatataagagctagagaacaatttttagaaaatggaggaattgaatttacttacattccttgtttaaatgacaacaataattgggtagaatttttaggtaattatataattcaagagggagaatag

SEQ ID NO: 289004 - DNA, 994 bp, Unknown
  Bacterial polypeptide expressing nucleotide sequence isolated from the Sargasso Sea
aatgaaaaatgaatatatagatagtaataagaaaataggtgtgcttatatccaacctaggtacacccgattcaccatctagaaaagatctgaaaaaatacttgaatcaatttttaatggataaacgggttattgatcttccaagactgctgtggattcctatactaaaaataattatactaaatattagaccaagaaaatcagcaaaactttacagatctatatggaccgataaaggctcaccgcttatggtcttttcaaaaaatattttaaaaaaactatcagatagtatcgatgatagaattaccgtagcgcttggaatgcgttatggctcgccatcaattaaagaagcaatggatatatttaaaaaagaaaaaatatccaaaatattagtttttccattatatccacaagcagggtcgccaactacatcaagcacatttgatgctgtcaccgactatctaaggaatatttcatggatgccagatctaagatttgtttcagggtaccatgatcacaacgcttatatcagtgcattggtaagatcggtaaagaatagttttagtgaacatggaaggccagataaactaatattcagttttcatggaatgccttatcgatacttagaaaaaggtgacccctactattgtttctgccataagaccgcacgtttaacggcggaaaaattagaccttgatgaatattcatatgatatcgcttttcagtctaggtttggatcagataaatggctagagccttatattgataggctattagttaatgaagcgaataatggtacaaaatatattcaggtcatttcgccaggctttgcagtagattgcctagaaacgctagaagaaataagtatacaatatcgtgaactatttatttcaaatggcggtaaaagatttgagtatataccttgtctaaatgatggtcaagatcaacttgatcttattagatcgatcatagatgatagtataagtggatggtga

SEQ ID NO: 289005 - DNA, 394 bp, Unknown
  Bacterial polypeptide expressing nucleotide sequence isolated from the Sargasso Sea
aatgacactagaccatccaaaaattaattatggcaaaacaggtattttaattgttaatcttggtacacccgactcaacgagctggttagatatcaggaaatatttaaaagaatttttgtcagacagacgagtaatcgaagttaatcccttaatttggcaagtaatacttaacttatttatacttacctttagaccttctaaaacagctaaagcttataaagaaatatggatggaagataaaaatatgtctcccttaagatattttacagaaaggcaagcggaaaaactatcttatcaaattagcgatgaagatttaattgttgattttgctatgagatatggaaatccaagtattaaaggtaaaattcatatgtcttcaaaaaaaaggttgtga

SEQ ID NO: 289006 - DNA, 1015 bp, Unknown
  Bacterial polypeptide expressing nucleotide sequence isolated from the Sargasso Sea
atgaaacaaaaacacatattattgatcaatcttggatcacctaaatcattggatatcaaagatgttcgatcttatttaaaagaatttctttctgatgatttggttgttgatttacctaaagtattacaacaaataatactacgtagttttatacttccatttagacctcaaaaaacaaaaaaagcatatgaagaaatatggcaagacgaatctcctttaattaaaaatacaagaaaaattgcaaaggcattacaatccaaaacaggttggaacgttgatatagcaatgagatatcaaagtccttcaataaaaaaatcaatattgcatttaaaggataagaaagttgatgaagtgattattgtccctctatatcctcaccatgccatgtcaactactctttcaacagagatctatgttgaaaaaatagtagaagagaattatcctacgttacaaatgaagtttattaaaccattttttgaacacccgaaatatatatctgcattatcaaaatcaatcgaaccatatttaaataatgaaattgataagatcatctttagttatcatggtatacctgaaagacatatacgaaagtcggatgtaaatgggaatcattgtttacaaagctcagattgttgtcaaattgattgtgaatcatcaaagaattgttaccgatcaaacgtatggaaaacttcaatgttaacagcaaaacaattaaatcttgatgataacaaatggatgatgagttttcagtctagggtttcaataattgaccctaaatggttgaatccatatacagataaagaaataattaatttttctaaaaagggaattaaaaatattgcgattttatgcccatcatttgttgcagattgtttagaaactttagaggaaataaatcttagagctagaaaatcatttttagaatctggaggagaaagctttacatttattccatgcttaaatgatgacaataattttattgagttgttaaatgatttaattctaaatatttagc

SEQ ID NO: 289007 - DNA, 994 bp, Unknown
  Bacterial polypeptide expressing nucleotide sequence isolated from the Sargasso Sea
atgaaatttaaaggagaacaaaactttcagcatgaaaatgagcaaaaaaaaggagtgcttattgcttacttaggaacgcctgactctccagatgtattaagcgtaagaaggtaccttaaagagtttctatctgatcctagaattattgaagtgccaaaaataatttggtggtttgttttaaacatttttattttaaattttagatcgttcaactcagctaggttatacaagtcaatctggactgatggaggatcgcctttattagtcaattgcatcaagataagagaaaaggttcaaaaatctctgccatcaaattatcaagtagcgcttgggatgaggtatggaaacccgagcattaaaagcgctctcaatgaattaaaagaagcaaactgtagagatattgaggtaatcactcttttccctcattactcagctacaactgttgggagtatttttgatgcagtatcgacagaaattaaatcatggagatgggtgccaagtgtaaaatttctaaatagctaccacgataatccattgctgattgaaatcttgtctaaaaggataaaaaaaagttttgaatctcagggtaaaccagacaaattagtattttcttatcactctataccgaagaaatattttgattcaggagatccctatcattgcctatgtcaaaaaacctctagattgattgcagaaaaactttctttggatgagaaagattacatcacagcttttcagtctagatttggtccatctgaatggttgaaaccttatacgagcgaaacaatgaaatctcttcccaaagagggcataaaatcagttcaggtagtatctccaggttttggtgtagacaacttagaaactttgcaggaaattgatatagagaataaagaatattttgaggatgctggtggagaaaattttcattacatcccttgcctcaatgacgatgatgatcacgttgaattccttatcagtttaattggtaaataaa

SEQ ID NO: 289008 - DNA, 436 bp, Unknown
  Bacterial polypeptide expressing nucleotide sequence isolated from the Sargasso Sea
tatcaataaaaaaatttcagaaattaattggaaaccagaccttattgttgcttcttatcacgggataccaaaaaaatattttgacaaaggtgatccttaccattgttattgttacaaaacctccagactagtttcagaaaaatttaattctgtaaaaataaaaacaacatttcaatctagatttgggccccaagaatggcttcaaccttatacagacaaaactttagaaagcctaccaaaagagggtaaaaaaaatattcttatgatttgtcccggattctcctcagattgtgttgaaactctagaagagatattgatagaaggtaaagagagcttcattgaagctggggggaaaaattttgatatgatcccttgcttaaatgataatgatgatcatatctttttactaaaatctttaatacaaaacagtatttaa

SEQ ID NO: 289009 - DNA, 559 bp, Unknown
  Bacterial polypeptide expressing nucleotide sequence isolated from the Sargasso Sea
aagtttattaaaccattttttgaacacccgaaatatatatctgcattatcaaaatcaatcgaaccatatttaaataatgaaattgataagatcatctttagttatcatggtatacctgaaagacatatacgaaagtcggatgtaaatgggaatcattgtttacaaagttcagattgttgtcaaattgattgtgaatcatcaaagaattgttaccgatcaaatgtatggaaaacttcaatgttaacagcaaaacaattaaatcttgatgataacaaatggatgatgagttttcagtctagggtttcaataattgaccctaaatggttgaatccatatacagataaagaaataattaatttttctaaaaagggaattaaaaatattgcgattttatgcccatcatttgttgcagattgtttagaaactttagaggaaataaatcttagagctagaaaatcatttttagaatctggaggagaaagctttacatttattccatgcttaaatgatgacaataattttattgagttgttaaatgatttaattctaaatatttagc

SEQ ID NO: 289010 - DNA, 967 bp, Unknown
  Bacterial polypeptide expressing nucleotide sequence isolated from the Sargasso Sea
atgaagactagaaaaggactgttacttataaatcttggaacacctgatgatccaagatatttatctgtctttaaatatctaaaacaatttcttatggatcctaaagttattactgttccatacattctcagatttattttagtttcaattattattgttcctttcagggctttcagttctggaaagatttataaaaaaatatggactgaaaatggttcacctctcattgtaaatacgtctgcattagctgataaagtgagtaaaaaagttcctcacatagaggttgaatttgctatgagatatcaatccccatctatcgaagataaattaaaaaagttaatctcaaaaaatcttgatgaaattataatacttcctttatttcctcaatatagtactgcaacaactggatccgtttttgatgaaatttctagagttctaaaaaaacaaagtgttacaccgtctataaagtttataaatcaattttatgaacaagaatcatttatagattcttgggaggataagctgaaatcatttgatgttgataagtatgatcatatcttatttagttatcacggattaccaactaaagcagttgatgatatatatgatgattctctctgtgctgacaacaattgcgaaaacaaaattactaatgagaataaattttgctacaaagcaacgtgctatgaaacaactagacttattgcaagtagatttaatcttccatcagaaaaatatactgtttcattccaatctaggttaacaaaaaactggattgagccttttacagatgagattcttgaggattttcctagtaaaggtataaaaaatatacttgttctgtctccagcttttacagccgataatttagaaacattatacgaaatagatgatgaatataaggagttgtttattgaaaatggaggtaaatcattaactatggtaccttcattaaatgattcgtcta

SEQ ID NO: 289011 - DNA, 472 bp, Unknown
  Bacterial polypeptide expressing nucleotide sequence isolated from the Sargasso Sea
atgaaaatcgatcataatcacccacctattaagtttggaaaaacaggtgttcttatagttaatttaggaacaccagactcaacaaattggcttgatatcagaaaatatttaaaagagtttttgtctgataaaagagttattgaagtcaatcctataatttggcaattagttttaaatgtatttatattaacatttaggccatcaaaaacagcaaaggcttataaagaaatttggatgaaagaagaaaatatgtctccacttttatattatactaaaatgcaaagtaaaaaaatttctagttctatatcgacagaaaatttaattatagattttgctatgagatatggaaatccaagtattaagagtaaaatttataaacttcaagatcagggatgtgaaaatttagttatactcccgctgtatccgcaatacgccgcagcaacaactgcaacagtatgtgatgaagtttata

SEQ ID NO: 289012 - DNA, 466 bp, Unknown
  Bacterial polypeptide expressing nucleotide sequence isolated from the Sargasso Sea
catgtcccgcgtcggcgtcgtcctgctgaatctggggggacccgaacgcattcaggatgtcggaccatttctctacaacctgtttgctgacccggagatcatccggctacccagcccagcgctgcagaagccgctggcctggttgatcagcacccttcgcagcggtaaatcccaggaggcctatcgctccatcggcggcgggtcacccctgcgccggatcaccgaacagcaggcccgggaattgcagagtctgctacggcagcgcggactggatgccaccacctacgtcgcgatgcggtactggcatccgttcacggaatccgccgtggctgacatgaaggcggatggcatggatgaggtggtggtgctgccgctctatccccacttctccatcagcaccagcggctccagcttccgggaactgcagcggctgcgtcagggcgatgcagccttcgaacagcttccg

SEQ ID NO: 289013 - DNA, 652 bp, Unknown
  Bacterial polypeptide expressing nucleotide sequence isolated from the Sargasso Sea
gatggaagatcacccgcaaattaaatttggtaaaactggagttttaatcgttaacttaggcactcctgactcaacaaaatggttagatattagaagatatctaaaagagtttttgtctgataggagagtaatagaggttaacccaattttatggcaactgatattaaatcttataattctaaatttaagaccatctaaaacggcaaaagcttataaagaaatttggatgcatgatataaatatgtctcctttaatgtattatacaaaaaaacaagccgaaaaagtctcaaattcaatatcgaatgaaaacataatagtagactttgcaatgagatatggaaacccgagtattaaaagtaaaataaaaaaattacatgataatggttgtgaaaaccttataattttacctctatacccacagtattctgcagcaactacagcaacagtgtgcgatgaagtttacagaacattgatgtctatgagatggcagccttcactcaaaattattccacattatgagtcagatcctttgtatattgatgctttggtgaattccattaattctaaaatagagaaaataaattggaaaccagatttaatattagcttcttatcatggaataccaaaaaaatattttgataaaggggaccca

SEQ ID NO: 289014 - DNA, 458 bp, Unknown
  Bacterial polypeptide expressing nucleotide sequence isolated from the Sargasso Sea
ttctataaaagaattttggaaaaaaaatgaaaaacctcaaaaaataatttttagttatcatggtatacctaaaagatatttgactaatggagatccctatcattgcttttgcctcaaaacgacaagacttgttaaagaatatatgggactttctgatgatgagataatgacaacttttcaaagtaggtttggacgtgaagaatggttaaagccatatacaagtgaaacattaaaagaattaccaaaacaaggaataaaaaatatacacataatatcacctggttttagtagtgattgtttggaaactttagaggagcttgaagaagaaaataaagaatattttctggaatctggtggtgaaaattacagttacataccatgtttgaatgatagtgaagatcacatagatatgtttgtcaatcttattaaaaaacatattcaaggttggccattatgat

SEQ ID NO: 289015 - DNA, 910 bp, Unknown
  Bacterial polypeptide expressing nucleotide sequence isolated from the Sargasso Sea
cttgctggtcaatctgggtaccccagccgcgcccaccacggccgccgtcaaggcgtttctcagccagtttctgcacgatcagcgggtcgtcgacctgccgcgctacctctggtgtcctctgctccacttcatcatcctgccgacccgctcccccaaggtggccaagctctatcagcaggtgtggaccgagcagggctcgccgctgatggtgataagcaagcagcagcgcgcggcgctggagcaggagctcaagcgcgaaggggtcgaggtgccggtggagctggcgatgacctacggctccccttcgctggatgagggctggcaggcgctcaaggccaagggcgtcaaccgggtgatcctgttgccgctctatccccagtattcggtcagcaccaccgcctcggtgttcgatggctgggccaaggcgatgaaaaaagagcgcaacctgccggtggtgcggctcattcgtgattaccatgctcaccccgaatatatccaggcgctggccatgagcgtgcgtcgccactgggaacagcacggccagggcgagcacctgctgatgtcgttccacggcattcccgagcgctacgagcgggaaggggatccctatggtcaccagtgccggcgcaccgccgccttgctggccgaggcgctcgggctggaggccagccagtggaccgccagcttccagtctcgctttggcaaggaggagtggctcaagccctacaccgacgtgaccatcggcggcctgccggcaaccgggatcaagcggctcgatgtgatctgccccgcctttgccgccgactgcctcgaaaccttggaggagatccaggtgcagaaccgggagatcttcatggccgccggtggcgagcagtttgaatacattccggccctcaacagcgatcaggcc

SEQ ID NO: 289016 - DNA, 926 bp, Unknown
  Bacterial polypeptide expressing nucleotide sequence isolated from the Sargasso Sea
ttcacaacaggcctaccttcccataggtggaggatcacctatcagaaggataactgaacaacaagcaagagaattacaatctaaattaagggataaggggtttaatgctactacctacatcgctatgaggtattggcatccttttaccgaatcagcaattgctgatatgaaggcagatggcatagatcaagttgttgtaatacccttgtatccgcatttttcgataagtactagtggttcgagctttagagaattaaaaaaattgcgcgattctgataatgaatttaagaaggttccaatgagatgtgtaaggagttggttcagtcaatcaggttatttaaagtctatggtcgaattaatttctgaacagatttcactttgtgaatcaccttcaaaagctcatatatttttcactgctcatggagttcctaagagttacgtagaggaagctggagacccttacaaacaacaaattgaagattgttctttattaattataaatgagctggaaaaatgtttaggtcatagtaaccctcatacactttcttatcaaagtagagttggtcctgttgaatggttgaagccttatacagaagaagtgttagctgatcttggaaggtcaaatgttaatgatctgattgtggtccctataagtttcgttggagagcatattgaaacattgcaagaaattgatattgaatataaagaaattgctgaaaatgctggtattaaaaactttcggagagttagggctctaaatactcatcctacttttattgaaggtcttagtgatttagtgatttcctgtttagaaggacctcttgttaatatagaggaggcttcaaagttgcctgaaaaagttaaactctatccccaagagaagtggcaatggggttggaataatagctcagaggtgtggaacggaa

SEQ ID NO: 289017 - DNA, 847 bp, Unknown
  Bacterial polypeptide expressing nucleotide sequence isolated from the Sargasso Sea
atgaaaaaagatatagaacatccccctataaattttggaaaaactggagttttaataataaatctaggaaccccggactcaacaagctggttagacataagaaaatatttaaaagaatttttatctgacagaagagtaatagaagtaaatcctataatatggcaagttatattaaatatttttattttaaatttaagaccctcaaaaacagcaaaagcttataaagaaatatggatgaaggaagaaaatatctctccccttttgtattatacaaaaaaacaagcagaaaaattatcaatctcaatatctaaagaaaatttagtagtagattatgccatgaggtatggaaatccaagcattagaagcaagataaaaaatcttcacgaaatgggttgtgaaaatttagtaatacttccgttatatcctcaatatgctgctgccactacagccactgtttgtgacgaagtatatagaacacttatgaaaatgaggtggcaaccgtcgcttaaaataattcctcattatgagtctgatcctttatatatagaagcattagttaactccttgaacaagaagattaaagaaatcaattggaaaccagatctaatattagcttcctatcatggaattcctcaaaaatattttgataaaggagatccctatcattgctactgtcataaaaccacgagactaatatctgaaaaatttaactcaattgaaatcaagactacatttcagtctagatttggcccacaaaaatggcttcaaccttatactgataaggctttagaaaaattgccagctgaaggaaaaaaaaatgttttagctatatgtcctggctttcttc

SEQ ID NO: 289018 - DNA, 884 bp, Unknown
  Bacterial polypeptide expressing nucleotide sequence isolated from the Sargasso Sea
tcgccgtgtaatagataataatcgatttttatggtggctaattttaaactgtataatactaacattccgaccaaaaaaaactggaaaggcatataaagaaatctggaattacgataaaaatgagtcccctttaaaaacatacacaagatcacaagctcaattattatcagagagactcaagaatgttgaggtcgattggtgtatgcgttatggtaatccttcaatccgagatggtctgaaatcgatgcgagaaaagggggtcgatagactattaatttgccctttatatccgcaatactcagcagcaacgactgcaactgtaaatgataaagtctttgctgaactatctcatatgcgatggcaaccagcaataagaacattaccaccattctacgataataacgagtacatagccaaattaaataaatcaatgaaccaacacctagaaaaattagattggcagccggatataattttaacatcatatcatgggcttcctagaaggtacctcgacttaggtgatccgtatcattgccattgtcacaagacgacgcgtcttttaaaagagatgaataaaaaatattccaaaaaaatcatactatcgtttcaatcgagatttggaagagaggaatggctgaagccatacactgaagaaacagttattaaacttgcaaatgatggtgtaaagaaacttgctgttttgtcgcctgcgttcttttctgattgtgtagaaacattagaggagctcaatataggtatccaagaagtatttactgaaaatggcggggaggaatttaccctaattccatgtttaaatgatagccaaaatggtattgacctattagactatctggtaaaaaatgagttacaaggttgggtataat

SEQ ID NO: 289019 - DNA, 508 bp, Unknown
  Bacterial polypeptide expressing nucleotide sequence isolated from the Sargasso Sea
tgagttggaaaaatgtttgggtcatagtaaccctcatacactttcttatcaaagtagagttggtcctgttgaatggttgaagccttatacggaagaagtgttagctgatcttggaaggtcaaatgttaatgatctgattgtggtccctataagtttcgttggagagcatatcgaaacattgcaagaaattgatattgaatataaagaaattgctgaaaaggctggtattaaaaactttcggagagttaaggctctaaatactcatcctacttttattgaaggtcttagtgatctagtgatttcctgcttggaaggacctctaattaatatagaggaggcttctcagttacctgaaaaagttaaactttatcctcaagagaaatggcaatggggttggaataatagttcagaggtttggaacggaagggttgcaatgattatttttcttgtgctttttattgaacttatttcaggctctggacccttacataaattaggcatcttataa

SEQ ID NO: 289020 - DNA, 854 bp, Unknown
  Bacterial polypeptide expressing nucleotide sequence isolated from the Sargasso Sea
aaatcccattatttggcaacttattctaaatttgttcatattaacctttagaccatcaaaaactgcaaaggcttataagaaaatttggatgaaagatgaaaacatgtctccacttttatattatactcaaaagcaaagtgaaaaaatctctagctcaatatcaaaagagaatttattaatagattttgctatgagatatggaaatccaagtatcaaaagtaaaatttataaacttcagcaacaaggttgtgaaaatttagttatactcccactttatccacaatatgcagcagcaacaacggcaacagtgtgtgatgaggtttacagaactttaatgcaaatgagatggcaaccttctttaaaaatcgttcctcattacgagtctgattcgctctatatagatgcattggttaaatctattaataaaaaaataaatgaaattaattggaaaccagatgtaataattgcctcatatcacggcatacccaaaaaatattttgataaaggtgacccctatcattgctattgtcataaaacgacaagattaatttctgaaaaacttaattctataaaaatcaaaactacttttcaatctcgatttggaccacaagagtggttgcagccttacacagataaaactttagaaagtctaccaaaagaaggaaaaaaaaatgttcttacaatttgccctggctttgcctctgactgtgtcgaaactttggaagaaattttaattcaaggtaaagaaagttttttaaattctggaggtgaaaattttgacatgattccatgtttaaatgataacgatgatcatataattttattaaaatctttaattgaaaaaaacatttaga

SEQ ID NO: 289021 - DNA, 859 bp, Unknown
  Bacterial polypeptide expressing nucleotide sequence isolated from the Sargasso Sea
atggttaaatacattggtgagaaagattataaacacggaagtaaagaaaaaattggagttttaattactaatttaggcactccagatgccccaaatagaaaagaattaaaagtttatcttaatcaatttttatctgatccaagagtagttgaattaccaaaaattctatggcaaattttattgaagcttgtaattttacaaataagaccatcaagatctgcagaagcatataaacaaatttggactaaaaatggttctccacttttaaatatagccaataaacaattaaataaaatccaatcatctttttcattcaaagatgggaatatagtttttgaacttggaatgcgttatggaaatccatctatttcagatgctctatcaaaacttcaaaaaaaacaagttagaagactattggttttgccaatgtacccacagtattgtgcggcaacaactggtagtacctttgatgaagtaactaatgttttacaaaaatggcgttggataccagaaatgcgtttcattaatcaatattttgaggaaaaagattatattgaagctttatcaaactctataaaaactttttgggaaaaaaatcaaaagcctcaaaaaataatttttagttatcatggtataccaaaaagatatttaactaatggtgatccgtatcactgtttttgtcttaaaactacaagacttgtaaaagaacatataggattatctgatgaggaaatcatgactacttttcagagtaggtttggacgtgaagaatggttaaagccttatacaagtgacacattgaaggaattaccaaaaaaaggcataaaaaatatacatattatatctcctgggttttagt

SEQ ID NO: 289022 - DNA, 821 bp, Unknown
  Bacterial polypeptide expressing nucleotide sequence isolated from the Sargasso Sea
tatgagtgttaaacctattcctaatgatcatccaaagtggaaaaatctttcagatacaggagttttattaataaatctaggaactccagatgctactgacaaaaaatctatgcgacgatatttgaaggaatttttatcagatacaagagttattgaatatccaaaatttatttggtggtttattctaaacttaataatattaaatgttcgtccaaaaaaatctggaaaagcttacaataaaatttggattccaaacgatccagatggatcacctttaagaaaatttactagattacaatctgaaaaattacaaaaattgtttaaaaaaaataagcatttaattgttgattgggccatgcgttacggaaacccatctattaatgagaagttaaataattttaaggaaaatggaattaaaaaaattgtaattcttcctctatatccacaatactctgctgcaactactgctacagtttgtgatgaggtatatcgttgggctttaaaagaaagatggcaaccgtcatttcgtattgtacctccatggtttgaccacccagattatataaacgctattgctagacaaattaaaaaaagtctaaataacaagaaaaattttcatttgatgctttcatttcatggaattcccaaaagatattttataaatggtgatccatatcactgtcattgtatgaaaacagcaagacttataaaagaaaaaataaatttcaaagattctttgtttcacgtcacttttcaatcaagatttggatcagaaacatggttacaaccatatactgatgaaacaattcagagcttggcta

SEQ ID NO: 289023 - DNA, 885 bp, Unknown
  Bacterial polypeptide expressing nucleotide sequence isolated from the Sargasso Sea
tggttggttagatataaggaggtatttaagagaatttctatcagacagaagggttatcgaggtaaaccctattatttggcagataatactaaacttatttatactcaattttagaccttcaaaaactgctaaagcttacaaagaaatatggatgaaagataaaaatatgtcaccactcaggtattttacagagatccaagcggaaaaattatctcaacaaatcagtaatgaaaatttaattgttgattttgctatgagatatgggaacccaagtatcaaaagtaaaatttatgggcttcaaaacaaaggttgtgaaaatttaattattttacctctctacccgcagtatgccgcagcaacaacagcaacagtttgtgacgaggtgtatagaactttgatgaaaatgagatggcaaccaaatttaaaaataattccacattatgagtcagaacctctttacatagaagcactgaaaaatagcatcttaaaaaaaattgaagaaattaattggaaacctgatttaatagttgcctcatatcatggaatacctaaaaaatattttgataaaggtgatccataccattgttactgtcataaaactactagacttatttcagaaaaatattcagatattgaaattaaaacaacatttcagtcaagatttggtcctcaagaatggttacagccttacaccgataaaacttttgagactctacccaaagaaggtaagagaaatattctagttatttgcccaggattctcatctgattgtgtagaaaccctagaagaaatatgtattcagggaaaagaaagttttatcaaatcaggaggtaaaaattttgagatggtgccgtgtttaaatgacaatgatgatcatattgcttt

SEQ ID NO: 289024 - DNA, 874 bp, Unknown
  Bacterial polypeptide expressing nucleotide sequence isolated from the Sargasso Sea
tacaacctgtttgctgacccggagatcatccggctccccagcccagcgctgcagaagccgctggcctggttgatcagcacctttcgcagcggtaaatcccaggaggcctatcgctccatcggcggcggatcacctctgcgccggatcaccgaacagcaggcccgggaattgcagagtctgctgcggcagcgcggactggatgccaccacctacgtcgcgatgcggtactggcatccgttcacggaatccgccgtggctgacatgaaggcggatggcatggacgaggtggtggtgctgccgctctatccccacttctccatcagcaccagcggctccagcttccgggaactgcagcggctgcgtcagggcgatgcagccttcgaacagcttccgatccgctgcatccgcagttggtttgatcaccccggctacatcaaggcgatggccgagctgatcgcggaagaggtgcgcaacagcgacgacccggaaaaggcccatgtcttcttcagtgcccacggcgtgcccaagagctacgtggaagaagccggcgatccctatcagcagcagatcgaagcctgcaccgatctgatcatgaaatccctggcggaccacatgggccatgccaacccccacaccctcgcgtatcagagccgagtgggtccggtggaatggctgaagccctacaccgaggaggcgctcgagcaactgggggaggccaagaccaacgatctggtggtggtgcccatcagtttcgtcagcgagcacatcgaaacactcgaggagatcgacatcgaataccgggagctggccaccgaagccggtgtcgtcaatttccgccgggtgcgggccctcgatacctacccccctttcatcg

SEQ ID NO: 289025 - DNA, 868 bp, Unknown
  Bacterial polypeptide expressing nucleotide sequence isolated from the Sargasso Sea
agcactcttaggagtactacttcacaacaggcctacctttccataggtggaggttcacctatcagaaggataactgaacaacaagcaagagaattacaatctaaattaagggacaaggggtttaatgctactacctacatcgctatgaggtattggcatccttttacagaatctgcaattgctgatatgaaagcagatggcatagatcaagttgttgtaatacccttgtatccgcatttttcgataagtactagtggttcgagctttagagaattaaaaaaattgcgagattctgatgatgaatttaaaaaggttccaatgagatgtgtaaggagttggttcagtcaatcaggttatttaaagtctatggtcgaattaatttctgaacaaatttcactttgtgaatcaccttcaaaagcccatatatttttcactgctcatggagttcctaagagttacgtagaggaagctggagacccttacaagcaacagattgaagattgttctttattaattataaatgagttggaaaaatgtttaggtcatagtaaccctcatacactttcttatcaaagtagagttggtcctgttgaatggttgaagccttatacagaagaagtgttagctgatcttggaaagtcaaatgttaatgatctgattgtggtccctataagtttcgttggagagcatatcgaaacattgcaagaaattgatattgaatataaagaaattgctgaaaaggctggtattaaaaactttcggagagttaaggctctaaatactcatcctacttttattgaaggtctcagtgatctagtaatttcctgcttggaaggtcctctaattaatatagaggaggcttctcagt

SEQ ID NO: 289026 - DNA, 795 bp, Unknown
  Bacterial polypeptide expressing nucleotide sequence isolated from the Sargasso Sea
aataattctcaatttaattattttaacttttagaccatctaaaacagcgaaagcttataagaaaatatggatgaaagataaaaacatgtctcccttaagatattatacacaagttcaatctcttaaattaaacaaaaaaattggcaatgataaattaattgttgattacgctatgagatatggtcaaccaagcataaaaagtaaaattaaagatctaaaagaaaaaggttgtgaaaacctagttatcttacctttgtatccacagtacgcggccgcaacgacagctaccgtttgtgacgaagtttatagatctttaattaaaatgagatggcagcctagtctacaaattatacctcattatgaatctgaacctctttatataaacgcaattagtaaatctattgaaactaaaattagtcagataaattggaaaccagatataatcatggcttcataccacggaattcctaaaaaatattttgagaaaggcgacccttatcattgctattgtcacaaaactactaggctaataaatgaaaaaatcaagtcgagcataccgataatgactacctttcaatctaggtttggtccccaagaatggttacaaccctacactgataaaacactggagaaattacccaaagaaggcaaaaaaaatatactcttaatatgccctggttttgcttcggattgtgttgaaacacttgaggaaatatcaatagagggaaagaaaagctttatggaggcagggggagaaaatttcgattttatcccttgtctaaatgatagtgaggg

SEQ ID NO: 289027 - DNA, 445 bp, Unknown
  Bacterial polypeptide expressing nucleotide sequence isolated from the Sargasso Sea
ttttggaaaagataacaaacctcaaaaaattgtatttagttatcatggttttcctaaaagatacctcacaaatggtgacccatatcattgtttttgtttaaaaacgactaggttggttaaagaaaaaatgaaactcaatgatgatgaaataattacaacttttcaaagtcgatttggaagagaagaatggttaaaaccatatacgtctgaaactctaaaagaactacctggtcaaggtgtaaaaaatatacatattatctctcctggttttagtgcagattgtttggaaactcttgaagaacttgaagaagaaaatagagaatattttatggaggcaggtggcgaacaatataaatatatcccatgtctaaatgatgatcaaaaacatttaaattttatttctaatctggtgttaaaacatacccaaggttggaatatctcatga

SEQ ID NO: 289028 - DNA, 808 bp, Unknown
  Bacterial polypeptide expressing nucleotide sequence isolated from the Sargasso Sea
gatgactagtaacaataatcatccttctattaaatttggaaaaacaggtgtgcttattgtaaatttgggtactccagactccacaaactggctcgatattagaaaatatttaaaagaatttttgtctgataaaagagtcattgaaatcaaccctttggtttggcgggtcattttaaacttatttatattaacttttagaccatccaaaacagcaaaagcttataaagaaatttggatgaaggaggaaaatatgtctcctcttttatattatacgcaaaagcaaagcgagaagatttcagaactcatagctagagaagatttaattattgattttgctatgagatatgggaatccaagtattaaaagtaaaatttatagactacaagaagatggttgtgaaaatttagttgtactaccgctttacccacaatatgcagcagcaacaaccgcaacagtttgtgatgaggtttatagaactttgatgaagatgagatggcaaccctcactaaaaatcattcctcattatgagtctgatccgctttatatagatgcattagttaagtctataaataaaaaaattaatgaaataaaatggaaaccagatttgataattgcttcatatcatggaatacctaaaaagtattttgatcaaggtgacccttaccattgctattgccacaaaacaactagattaatttcagaaaaatttaatgcaatagaaatcaaaactacatttcagtccaggtttggaccacaagagtggttgcaaccatatactgataaaattttagaaaatttaccgcgcgaa

SEQ ID NO: 289029 - DNA, 709 bp, Unknown
  Bacterial polypeptide expressing nucleotide sequence isolated from the Sargasso Sea
aatgaattcagatcacccagcagtaaaatttggaaaaacaggattattgttagtcaatcttggaacgccagactcaactaattggtttgatataagaaagtatttaaaagaatttttatccgaccgaagagttatagaagtcaatccgatcttgtggaaaataatactgaatttatttattttaaaccttagaccatctaaaactgcaaaagcatataaagaaatttggatgcaaaaagaaaatatgtcgccgcttagatattacacaattatgcaaacaaaaaaattatcagaaaaaataggaaatgaagatcttatcatagattttgctatgagatatggtaaccctagtattaaaagcaagttgaaaaatttgcaaaaatctggatgtgagaatattatagttttgcctttgtatcctcagtatgctgcagccacaacagctacggtttgtgacgaagtttataaaactcttatgggaatgagatggcagcccagtttgcaaattataccacactatgagtccgagcctttatatattaattctttaaaaaatagtcttgaaaaaaaaatattagaattaagttgggaaccagaccttattgtagcgtcgtatcatggcataccaaaaaaatattttagcaaaggagacccttatcattgctactgccaaaaaacctcaagattgctatccgaaaaatttaagaaa

SEQ ID NO: 289030 - DNA, 868 bp, Unknown
  Bacterial polypeptide expressing nucleotide sequence isolated from the Sargasso Sea
ttagcaaaattgatatcgactttgaggactaaagaggcaagtgaaatatactctgaaattggaggtaaatcaccaattctggacatcacaaatgatcaggcggccgcacttgaaggggccttagcaaagcaaggcatgtcccccaaggtatttgtttgcatgcgttactggcatccaatgacagccgaaattgtcaaaaaggtaaaagattatgatccagataatatctttctgcttccactttatccacagtactcaactacaactactaaatcatccttggatctttggtttaaagaagcaaggaaacaaaatttatcagccccaacaaaatatacatgctgctatccaataaataagaagtttattgagtcccatcagcaattaatacaagagaaaatagatcgcattatagataaaaagataagagttttattttctgctcatagcctacctgtctcaattattaaaggtggtgatccgtatcaatggcaggttgagcaaactgtaagcgctgttatggctgggctcaaagggcacaacgatcatgtattggcctatcagagtaaagtgacgccagtgaagtggcttgagccatctactccgagtgagattgaaaaagcaattaaagaagatgtagctattattattgttccgattgcttttgtttcagatcattccgaaactttagtagagctagatattgaatataaagaaatggcagatgaaatggggtataaacattattttcgatcagagtccttaaacattgactctgtatttatagatagcttagctgagatagttactaactcagaccagacgagtaatgtaaatattgctgaaaaaatttgtccaacaacattta

SEQ ID NO: 289031 - DNA, 802 bp, Unknown
  Bacterial polypeptide expressing nucleotide sequence isolated from the Sargasso Sea
aatgaaaacggcggttatcttgtttaatttgggtggaccagataaacaagaaagcgtaaaaccttttttgtttaatttgtttaatgatccgaatattttcagacttccaaatccctttaggtatctacttgccagacttatctcctcccgccgcaccaaagaggccagtgaaatttatgctgaaataggcggtaaatcacctatccttgaaataaccaaggatcaagcaaaagctctccaaaaagcattagaaaacaaaggcatcgaaaacgaagtgtttgtttgtatgagatattggcatccaatgacccccgaagtcgttgcaaaagtaaaagactataacccagacaagatatttttattgcctttgtacccacagtactccaccacaacaactaagtcatctttggacgcctggtttaaagaagctaaagttcagaaattaaatacgataacaaaatatacctgttgttatccaaatgactcaaaattaattaaagctcaccaaaaactgattcaagataaaatcaatcaagttaaagataagaaagtcagagttttgttttctgctcacagcttacctgtatcaataattaaaaaaggagatccttatcagtggcaagtggagcaaacagtaaatgcggtcattaagggtattcgtggtcacgaagaccatgtattggcttatcaaagtaaggtgacaccagtcaagtggctggaacctacaacgccaagtgaaatagaaaaagcaattcgtgaagataaagcactagtcattgttccaattgcttttgtctcagac

SEQ ID NO: 289032 - DNA, 661 bp, Unknown
  Bacterial polypeptide expressing nucleotide sequence isolated from the Sargasso Sea
atgaaagcagaccacccaaaaattagttatggtaagacaggaattttacttgtaaatctaggtacacctgactcaactaattggctagatataagaaaatatttaaaagaattcttgtcagatagaagagtaattgaggtaaatcccttaatttggcaagtaatacttaacttattcatacttacttttaggccatctaaaactgctaaggcttataaagagatatggatgcaagataaagatatgtctcctttaagatattacacagaaagccaatcagaaaaattatctaaacaaatcggcaacgaaaatttgattgtagattttgctatgaggtatggaaacccaagtattaaaagcaaaatttacagtcttcaaaataaaggttgtgagaatttaattgtgcttcctttgtatccacaatatgcagcagcgactacagcaacagtttgtgatgaggtttacagaactctaatgaaaatgaggtggcaaccaaatcttaagataattcctcattatgagtctgaacctctttatattcaggcaattaaaaatagtattataaaaaaagttagtgaaattaattggcagcctgatttaataatcgcttcttatcatggaattcctaagaaatattttgataaaggagatccatatcatt

SEQ ID NO: 289033 - DNA, 759 bp, Unknown
  Bacterial polypeptide expressing nucleotide sequence isolated from the Sargasso Sea
atatctctaaaaaacaaattaaaggagttaaaaaaataacttcacttaagtattccaatatcgaatttgctctaggaatgcgttatggcaacccttctatagaaagtgctctaaaagatttacaaaatagacaagtaagacgcttattagttcttcctttatatcctcaatattgtggtgctacgacaggcagtacttttgatgaagttacaaatattttacaaacatggagatggattcctgaattaagattcatcaatcaatactttgaagaagaggaatatattgatgctctagcaacatctattaaaaatttttgggaaaaaaatgaaaaaccacaaaagattgttttcagttatcatggtataccaaagaaatatttaacaaatggtgatccataccactgtttttgtttaaaaacgacgaggttggttaaagaaaaaatgaatcttactgatgaagaaacaattaccacttttcaaagtcggtttggaagatccgaatggttaaaaccatatacagctgaaactcttaaagaatttcctgcacaaggcgttaaagatattcatattatatccccaggatttagcgctgactgtctagaaactcttgaggagctagaagaagaaaatcgagcatattttattgaggcaggtggtgaaaaatacaaatatattccatgtctcaatgataatgaaaaacatttaaaacttatctctcaacttgtaataaaacatacacaaggttggaaaatttaat

SEQ ID NO: 289034 - DNA, 829 bp, Unknown
  Bacterial polypeptide expressing nucleotide sequence isolated from the Sargasso Sea
gaaaatgaaaaaagatcacccaacaattaattatggaaaaaaaggtttgcttttgattaatctcggaacaccggactcgacaagttggtgggatattagaagataccttaaagaatttttatcagataaaagagttatcgaagtaaacccctttttgtggaagataatactaaatctttttatactcaattttcgaccttccaaaacagctagggcctataaagaaatttggatgaagaaagaagacatgtcgcctcttagatattttactataatgcagacaaaaaagttggcccaaaatattggaaataaaaatcttttggtagattatgcaatgagatatggtaaccccagtattaaaagcaaaataaaaaaacttcaaaaagaaggttgtgaaaatattgtaatcttccccctttacccccagtatgctgctccaacaactgcaaccgtatgtgatgaggtatacaaaactcttatgaaaatgagatggcaaccaagtttgcaaattattcctcattatgagtcggaacctttgtacattgctgctctggttaatagtttaaataaaaaaatttctgaaataagttggaagccagatttaataatagcctcttatcatgggatacctaagaaatattttgaaaaaggtgatccataccattgctattgtcaaaaaacgacaagacttttaagtgagaaattcaccaatattgatatcaaaactaccttccaatcaaggtttggccctcaggattggttaaaaccatatactgataaaactttagaaggtctgccaaaagaaggtaaaaaaaatgttcttgttata

SEQ ID NO: 289035 - DNA, 790 bp, Unknown
  Bacterial polypeptide expressing nucleotide sequence isolated from the Sargasso Sea
gattaattttggaaaaactggtgttctgattgtaaatcttggaacccctgactcaacgaattggtttgatataagaaaatacttgagagagttcttatctgacagaagagtgatagaggttaaccctataatttggcagattattctgaatgttattattttaaattttagaccttccaagacagcaaaagcttataaagaaatatggatgaaagaacaaaatatttctccacttttatattatacccaaaaacaagctgagaaattatcaagtcaaatatcaaaagaaaatttgatagtagattatgctatgagatatggaaatcctagcataagaagtaaaattaaaactcttcatgataaaggttgtgaaaatttaattgtacttccattgtatccacaatacgccgcagccaccacagccactgtttgtgatgaagtatatagatctctaatgaaaatgaggtggcaaccatcattaagtataattcctcattatgagtctgatcctttatatatagatgccatagtgaattctttaaacaaaaagataaaagagctcaattggaaacccgacttaatattagcatcgtatcatggtattcctcaaaaatactttgataaaggagatccatatcattgttattgtcacaaaaccacaagactcatttcggaaaaatttaattcgattgaaattaaaacaacatttcagtctagatttgggcctcaaaaatggcttcaaccttatactgacaagacaaagaaagcctccctagcgagggaaaaaaaa

SEQ ID NO: 289036 - DNA, 811 bp, Unknown
  Bacterial polypeptide expressing nucleotide sequence isolated from the Sargasso Sea
actttcaggccatccaagacagcaaaagcttataaggaaatttggatgaaagatgaaaacatgtctccacttttatattatactcaaaagcaaagtgaaaaaatctccagcttaatatcaaaagagaatttattaatagattttgctatgagatatggaaatccaagtatcaaaagtaaaatttataaacttcagcaacaaggttgtgaaaatttagttatacttccactttatccacaatatgcagcagcaacaactgcaacagtatgtgatgaagtttatagaactttaatgaaaatgagatggcaaccttctttaaaaattattccacattatgagtctgactcgctctatatagatgctttggttaaatctattaataaaaaaataaatgaaataaattggaaaccagatgtaataatagcctcatatcacggcatacccaaaaaatattttgataaaggtgacccctatcattgttactgccacaaaacgacaagactaatttctgaaaaatttaattctatagaaatcaaaacaaccttccaatccagatttggaccacaagagtggttgcagccttacacagataaaactttagaaagtctaccaaaagaaggaaaaaaaaatatccttacaatttgccctggttttgcgtctgactgtgtagaaactttagaggaaattttaattcaaggtaaagaaagttttttaagttctgggggtgaaaactttgatatgatcccatgtttaaatgataacgatgatcatataactttattgaaatctttaattgaaaaaaatctttaaa

SEQ ID NO: 289037 - DNA, 448 bp, Unknown
  Bacterial polypeptide expressing nucleotide sequence isolated from the Sargasso Sea
gaagttttggataaaaaacaaaaaacctgaaaaaataatatttagctttcacggaattccaaaaagatatctgattaatggcgatccgtatcattgcttttgtttaaaaacaacgcgtttagtaaaagaatatatgcagttaaatgatgaagatattatgacaacttttcaaagtcgatttggtagagaagaatggttgcagccttacaccagtgaaactttaaaagaattacctaaacaaaatattaaaaatattcatattatttcacctggttttagtgcagattgtctggaaactttagaagaattggaagaagaaaacaaagaatattttcttaaagcaggaggcgtttcttataattatataccttgtctcaatgatagtcaggagcatatagattttattagtgaattaattactaaacatactcaaggttggaaaaaatga

SEQ ID NO: 289038 - DNA, 352 bp, Unknown
  Bacterial polypeptide expressing nucleotide sequence isolated from the Sargasso Sea
tatgtctcgcgtcggtgtcgtcctgctgaacttgggtggcccggagcggatccaggacgttggcccgtttctttacaacctgttcgccgatccggagatcattcggcttcctagtccggccctgcagaagccgctggcttggttgattagcaccctgcgcagtggtaaatcgcaggaggcctatcgctccatcggtggcggatcaccgctgcggcgcatcaccgagcagcaggcccgtgaactccagagcttgctgcgtcagcgcggcatcgatgccaccagctacgtggccatgcgctactggcatccgttcaccgaatccgctgtggcggacatcaaggccgatggcatg

SEQ ID NO: 289039 - DNA, 874 bp, Unknown
  Bacterial polypeptide expressing nucleotide sequence isolated from the Sargasso Sea
atggttaaatatattggtgaaaaagactatcaacacggcagtcaagaaaagaccggagttttaattacaaatctaggaacgcctgatgcaccaacaagaaaagctttaaaaccatatttaaaagaatttctttctgatccaagagtaatagagatcccaaaacttatttggcaaatcattttaaatttagttatattacaaatacgcccacgacgctctgcagtaaattataaaaagatatggactgatgagggatctccattactttatatatcaaaagaacaagtaagattagttgaagaaaaattaaaaaaagaattcccaaacacagtattttctttagcaatgcggtatggcaacccatctattcatagcgctttagataaattacaaaaacaacaagtaaggcgccttttggttttgccactttatccgcaatattgtgctgctacatcagggagcacatttgatgcagtttcatccattttgcagaaatggagatggattccagaattacgatttattaatcaatattttgaggaaagtctttttataaaagctataggtgattctattaaaaaagcagaaaaaaacaaaggaaaaccccaaaaaattatttttagttatcatggaataccaaaaaaatatcttcttgaaggcgatccataccactgcttttgtttgaaaactacacgtttagttcgtgaataccttaattataaagaagaagatattattactacttttcaaagtcgttttggaacgcaggaatggcttcaaccatataccgatgaaactctaaaaaaattacccaaagaaggaataaaaaatattcatatactatcgcctggatttagtgctgattgcttagaga

SEQ ID NO: 289040 - DNA, 880 bp, Unknown
  Bacterial polypeptide expressing nucleotide sequence isolated from the Sargasso Sea
accgttccctgttttcaaaagcccctagcttggttaattagcactcttaggagtactacttcacaacaggcctacctttccataggtggaggttcacccatcagaaggataactgaacaacaagcaagagaattacaatctaaattaagggacaagggatttaatgccactacctacatcgctatgaggtattggcatccttttacagaatctgcaattgctgatatgaaagcagatggcatagatcaagttgttgtaatacccttgtatccgcatttttcgataagtactagtggttcgagctttagagaattaaaaaaattgcgagattctgatgaggaatttaagaaggttccaatgagatgtgtaaggagttggttcagtcaatcaggttatttaaagtctatggtcgaattaatttctgaacagatttcactttgtgaatcaccttcaaaagcccatatatttttcacagctcatggagttcctaagagttacgtagaggaagctggagacccttacaagcaacagattgaagattgttctttattaattataaacgagttggaaaaatgtttaggtcatagtaaccctcatacactttcttatcaaagtagagttggtcctgttgaatggttgaagccttatacagaagaagtgttagctgatcttggaaggtcaaatgttaatgatctgattgtggtccccataagtttcgttggagagcatatcgaaacattgcaagaaattgatattgaatataaagaaattgctgaaaaggctggcattaaaaactttcggagagttaaggctctaaatactcatcctacttttaatgaaggtcttagtgatctagtgatttcctgcttggaaggacctc

SEQ ID NO: 289041 - DNA, 808 bp, Unknown
  Bacterial polypeptide expressing nucleotide sequence isolated from the Sargasso Sea
atgaaagaagatcatccaaaagttaattatgggaaaaccggcttacttttggttaaccttggaacacctgactctacaagttggtggggaataagaaaatatctaaaagagtttttgtcggatcaaagagttatagaagttaatcctcttctgtggcaagtgattttaaatctttttatacttaatttacgcccctctaaaactgccaaagcatacaaagaaatttggatgaaagaagagaacatgtccccactaagatattatactattatgcaaacaaaaaaattaaaagaaaaaataaaaaataaaaatattattatagattttgcaatgagatatggaaatccaggcataaaaaatcaattaaaaaaacttcaacaaaacggatgtgaaaatattatagttttacctttgtatccacaatatgcctcagcaacaacagcaacagtttgtgatgaagtttatagaaccttaatgaaaatgagatggcaacccagtctgcaaattatttcccattacgaatcagaaccactatacatcaaggctttggaaaacagtctaaataaaaaaatttctgaaataaattggaagccggatataatcatagcttcctatcacgggataccaaaaaaatattttgaaaaaggtgatccatatcattgttattgtcaaaaaacctcaagactcttatctgagcaatttacaaaaattaatataaaaactacatttcaatcaagatttgggccacaagaatggttgcaaccgtatacagataaaaccttagaaagtttaccacaagaaggaaaaa

SEQ ID NO: 289042 - DNA, 412 bp, Unknown
  Bacterial polypeptide expressing nucleotide sequence isolated from the Sargasso Sea
aatttttagttatcatggtataccaaaaagatatttaactaacggtgatccgtatcactgtttttgtcttaaaactacaagacttgtaaaagaacatatgggattatctgatgaagaaataatgactacttttcagagtagatttggacgtgaagaatggctcaaaccttatactagtgacacattaaaagaattgccaaaaaaaggtgtaaaaaatatccatattatatctcctggttttagtagtgattgtcttgagacaatagaggagcttgaagaagaaaataaagaatatttcatgcagtctggtggtgaacattaccaatatattccttgtttaaatgataatcataaacacatagaagtttttgttaatcttataaaaaaacatttgcaaggctggcctctatga

SEQ ID NO: 289043 - DNA, 898 bp, Unknown
  Bacterial polypeptide expressing nucleotide sequence isolated from the Sargasso Sea
atgaaaaaagctgtaattttatttaatttagggggacctgacaatttagaaaatgttgagccttttttattcaatttatttaacgatccagcaatcttaaatttacctagtttctttagatatccagtggcaaaattaattgcaaacagaagggctccaacagcaaaaaaaatctatgaagaattaggaggatcgtctcctatcttaaagcttaccaaagagcaagctaatgctttagaattaaaattaaataaaaacgatagatcgtctcattataaatgttttgtagttatgaggtgttggcacccaagagcagaaaacgttattaaggatgtaattaactataatccgggggaaataactcttatgccgctctatccacaatactcagccgcaacatctggttcgtctattaaagaatggaacgatatttgtaagaaaaatagttttaaagtgaaaacgagtacaatttgctgttatccaaccgacaaaagttttattcaagctcacaaggaagaaataattaaaaaaatcaatgatattaaaaattttaaattaatattttctgcgcacggtttgcctgaaaaaaacattaaaaaaggtgacccctatcaatggcaagtagagcagtcagtatttgaaattgttaagtctttaaatatcaaagatcttgattgggtattaagttatcaaagtcgagttggacctttaaagtggattggtccatcaacagaagatataattgtagaaaattcaaaattagaaaaacacattattcttgtccctattgcatttgtatcagaacattcagaaactttagtagaattagatatagagtataaagaattagcagaaaaaaatggttgtaaaaactattcaagagtaccagcactggaat

SEQ ID NO: 289044 - DNA, 901 bp, Unknown
  Bacterial polypeptide expressing nucleotide sequence isolated from the Sargasso Sea
tactacctacatcgctatgaggtattggcatccttttaccgaatcagcaattgctgatatgaaagccgatggcatagatcaagtagttgtaatacccttgtatccacatttttcaataagtacaagtggttcgagctttagggaattaaaaaaattgcgagattctgatgatgaatttaagaaggttccaatgagatgtgtaaggagttggttcagtcaagcaggttacttaaagtctatggttgaattaatttctgaacaaatctcactttgtgaatcaccttcaaaggctcatatattttttactgctcatggagttcctaagagttatgtagaggaagctggagacccttataaacaacagattgaagattgttctttattaataataaatgagctagaaaaatttttagggcatactaacccgtatacactttcttatcaaagtagagttggtcctgttgaatggttgaagccttacactgaagaagtgttagctgatcttggaaggtcaaatgttaatgacttgattgtggttcccataagtttcgttggagagcatatcgaaacattgcaagaaattgatattgaatataaagaaattgctgaacaggctggtattaagaactttaggagagttagagctctaaatactcaccctacttttattgaaggacttagtgatctagtgatttcctgcttggaaggacctctagttaacatagaggatgcttctaagttgcctgaaaaggttaaactttatccccaagagaaatggcaatggggttggaataatagttcagaggtttggaacggaagggttgcaatgattatttttcttatactttttattgaacttatttcaggatctggcccattacataggctgggaattctatga

SEQ ID NO: 289045 - DNA, 587 bp, Unknown
  Bacterial polypeptide expressing nucleotide sequence isolated from the Sargasso Sea
agttcctaagagttatgtagaggaagctggagacccctataaacaacaaattgaagattgttctttgttaattataaatgagctggaaaaatgtttagggcatagtaaccctcacacactttcttatcaaagtagagttggtcctgttgagtggttgaagccttatacagaagaagttttagctgatcttggaaggtcaaatgttaatgatctgattgtggtccctataagtttcgttggagagcatatcgaaacattgcaagaaattgatattgaatataaagaaattgctgaaaaggctggtataaaaaactttcggagagtcaaggctttaaatactcatcctacttttattgaaggtcttagtgatctagtgatttcctgtttggaaggacctcctgtgaatatagaggaggcttctcagttgcctgaaaaagttaaactttatccccaagagaagtggcaatggggttggaacaatagttcagaagtctggaatggaagggttgcaatgattatttttcttgtgctttttattgaacttatttcaggctctggacctctacatagattaggtattctataaa

SEQ ID NO: 289046 - DNA, 637 bp, Unknown
  Bacterial polypeptide expressing nucleotide sequence isolated from the Sargasso Sea
caaaaaaagcaagtagaaagattattaatcttacctatgtatccgcaatattgtgctgcaacaacaggtagtacatttgatgaagtaactaatgttttgcaaaagtggcgttggatacctgaaatgcgttttatcaatcaatactttgaagaaaaaaattatattgaagcattgtcaaattccataaagttattttggaaaaaaaatcctaaaccacaaaaaattatttttagttatcatggtataccaaaacggtatttaactaatggtgatccgtatcattgcttttgtattaaaactacaagattggtcaaagaacatatgggattatcagatgatgagataatgactactttccaaagtagatttggaagggaagaatggttaaagccatatacaagtgaaactttaaaagaattaccaaaacaaggaattaaaaatatacatataatatcacctggtttcagtagtgattgtcttgaaacacttgaagagcttgaggaagaaaataaagaatattttatggagtcgggtggagaaaattaccattatataccatgcttgaatgatcatgatgatcacatagacgtttttgtaaatctaataaaaaaacatattcaaggttggccattatgat

SEQ ID NO: 289047 - DNA, 847 bp, Unknown
  Bacterial polypeptide expressing nucleotide sequence isolated from the Sargasso Sea
atggaaataaatcatcctaaaattaattatggtaagacgggagtattaattgtaaaccttggcactccaaattctacaaattggtttgatattagaaagtatttaaaagaatttctatctgaccgtagagtaatagaagtcaatccaatactttggcaattaatattaaatttgtttatacttaatttcaggccatccaaaaccgctaaagcctacaaagaaatttggatgaaggatcagaatatgtctcccctaagatactttacgcaaaatcaatctgcaaagttgtctagagtttttaaagatgaacaaattataatagattttgccatgagatatggcgatccaagtatactttcgaaaatgaatgaattacaaaaaaaaggatgtgaaaatataattgtattgccactttacccacagtatgctgcggccacaaccgctactgtatgtgatgaagtttatagatcgttaatgaaaatgaggtggcaaccgagtcttcaaattatttctcattatgaatccgaggatttatacatagatgcattggtaaaaactattaaaaataaaatctccgaaataaactggaagccagatattattttagcctcatatcatggaataccaaaaaaatattttgataaaggggatccttatcattgctactgtcaaaaaacttcaagattaatctcagaaaaatttaaagatattaagatattaacgacttttcaatcaagatttggccctcaagaatggctgcagccatacaccgacaaaactttagaaaagcttccttcatctggaactaaaaatattcttgttatatgtcccaggttttgcatctgat

SEQ ID NO: 289048 - DNA, 616 bp, Unknown
  Bacterial polypeptide expressing nucleotide sequence isolated from the Sargasso Sea
gaaaaaggttgtgagaatttaattatacttccgctttatcctcaatatgctgctgcaacgaccgcaactgtatgcgacgaggtttatagaactcttatgaacatgagatggcaaccaaatttaaaaataattccacattatgaatccgaacctttatatatagaagctattaaaaatagtattataaaaaaaattaacgaaattaattggaaaccagacttaatagtagcctcatatcacggaataccaaaaaaatattttgataagggagatccttatcattgttattgtcataaaactactagactaatttctgaaaaatattcagatactaaaattatgacaacatttcaatcaagatttggtccccaagaatggctacaaccttatacagataaaacttttgaagccttgcccaaagagggaaaaaaaaatattttagttatatgtcctggattttcatctgattgcgttgagaccttagaagaaatatccatccaagggaaagaaagttttatcaaatcaggaggtgaaaactttgaaatgataccttgcttaaatgataatgaagatcatatttctttatttaaacatcttatctcaaaaaatttataat

SEQ ID NO: 289049 - DNA, 963 bp, Unknown
  Bacterial polypeptide expressing nucleotide sequence isolated from the Sargasso Sea
aggaggataactgagcaacaagcaagagaattacagtctaaattaggggataagggatttaatgctactacctatatcgcgatgagatattggcatccttttacagaatcagctattgctgatatgaaagcagatggcatagatcaagttgttgtaatacccttgtatccacatttttcaataagtacaagtggttcgagctttagagaattaaaaaaattacgagattctgatgatgaatttaaaaaggttccaatgagatgtgtaaggagttggttcagtcaatcaggttatttaaagtctatggtcgaattaatttctgaacaaatttcactttgtgaatcaccatcaaaagcccatatatttttcactgctcacggggttcctaagagttatgtagaggaagctggagacccttataaacaacaaattgaagattgttctctattaataataaatgagctagaaaaatgtttagggcatagtaaccctcatactctttcttatcaaagtagagtaggtcctgttgaatggttgaagccttatacagaagaagttttagaggatcttggaaggtcaaacgttaatgatttgattgtggttcctatcagttttgttggagagcatatcgaaacattgcaagaaattgatattgaatataaagaaattgctgaaaaggctgggattaaaaactttcggagagttaaggctctaaatactcatcctacttttattgaaggccttagtgatctagttatttcctgcttggaaggacctctagttaatatagaggaggcttcacagttgcctgaaaaagttaaactttatccccaagagaagtggcaatggggttggaataatagttcagaagtgtggaacggaagggttgcaatgattatttttcttgtgctttttattgaacttatttcaggctctggacctctacataaattaggcatttta

SEQ ID NO: 289050 - DNA, 592 bp, Unknown
  Bacterial polypeptide expressing nucleotide sequence isolated from the Sargasso Sea
catgaaaacagcggtcgttttatttaacttgggcggaccagataaacaagaaagtgtaaaaccttttttatttaatctatttaatgatcctaacatattcagacttccaaaccccttcaggtatttattggcaaggcttatatcttctcgtcgcaccaaagaggccactgaaatttatgcagaaataggtggtaaatcccccattcttgaaattaccaactcccaagctgaggcccttcagaaagagttaaaaaacaaaggcatcgagaacaaggtatttgtttgtatgagatattggcatccaatgacagccgaggtcgtttcaagtgtcaaagactataacccagacaaaatttttttactgcccctgtatccacagtactccacaacaacaacaaaatcttctctggacgcctggtttaaagaagcccaaaaccaggaattaaacacaaaaacaaaatacacttgttgttatccatatgacgcgaaactaataaaagcccatcaaaaactgattcaagacaaaataaaccacgtcaaagataagaaagtaagagttttgttttccgctcacagtttacccgtatcaatc

SEQ ID NO: 289051 - DNA, 573 bp, Unknown
  Bacterial polypeptide expressing nucleotide sequence isolated from the Sargasso Sea
aaaccgttcaccgaggacgccatcgaagccatcaaacgagacggcgtcaatcgactcgtggtgttacctctgtacccgcaattctccatcagtacgtcgggatcgagtctgcgtctgttggagcagtacttcagcgatgatgaagagttggcgagggtgcgtcacacggttattccgtcgtggtatcagcgtcccggatacgtcaaagccatggcggcgatgatcgccaagacgttgcgagaacaattcgacgatgaaaaggaaccgatcatcttcttctcggcgcacggcgtgccgacatcgtacgtcgaggaggctggggatccgtacaaggatgagatggaggcgtgcgtcagactcatcgtcgacgagttgcgcgacgccggcgtggataacgaacacgtcttggcgtaccaatcgcgcgtcggaccggtggagtggctcaagccgtacacggacgacaccatacgcgaactcgggagaaaaggaacgaaagcgctgtgcgcggtgcccatctccttcgtcagcgaacacatcgaaaccttggaagagattgacatggagtatcgccag

SEQ ID NO: 289052 - DNA, 508 bp, Unknown
  Bacterial polypeptide expressing nucleotide sequence isolated from the Sargasso Sea
atgaaaaaagaacacccagaagttaactttggcaaaactggagttctgttagtaaatctagggacaccagattctactagttggtgggacataagaaaatatctcaaagaattcttatctgacagaagagtgatagaagtaaacccaattttatggaaaataattcttaaccttttcattttaaatttacgcccatctaaaaccgctaaagcctacaaagaaatatggatgaacaaagaagacatgtcacctcttagatactttacaattatgcaaacgaagaaacttcttgatcgaatagggacagaaaaatgtatcgtcgattatgcaatgagatatggtaatcctagtataaaaaataaaatacacaagcttcatcatgcagggtgcgaaagattagttgtactgccattatatccacaatatgctgcagcaactaccgcaacagtttgtgatgaagtttatagagttcttatgaggatgaggtggcaaccaagcctacaaatat

SEQ ID NO: 289053 - DNA, 493 bp, Unknown
  Bacterial polypeptide expressing nucleotide sequence isolated from the Sargasso Sea
tttagggcatagtaaccctcatacactttcttatcaaagtagagttggtcctgttgaatggttgaagccttatacagaagaagtgttagctgatcttggaaggtcaaatgttaatgatctaattgtggtccctataagtttcgttggagagcatattgaaacattgcaagaaattgatattgaatataaagaaattgctgaaaaggctggtattaaaaactttcttagagttaaggctttaaatactcatcctacttttattgaaggccttagtgatctagtaatttcctgcttggaaggacctcttgttaatatagaggaggcttctcagttgcctgaaaaagttaaactttatccccaagagaagtggcaatggggttggaataatagttcagaagtttggaacggaagggttgcaatgattatttttcttgtgctttttattgaacttattgcaggctctggacctctacataaactaggaattttataa

SEQ ID NO: 289054 - DNA, 627 bp, Unknown
  Bacterial polypeptide expressing nucleotide sequence isolated from the Sargasso Sea
aaaaattaaatgaaaaaggttgtgaaagtcttgtaattttacccctttatccccaatatgcagccgcaactacggcaaccgtttgtgacgaagtatataaaactttaatgaatatgaggtggcagccatctttgaaaattattccacactatgagtcagatccattatacattgatgccttagtaaactcaataaatgttaaaataaataatataaattggaaaccagatctgattttagcctcttatcatggaataccaaaaaagtactttgataaaggggatccctatcattgttattgtcacaaaacaacaagactagtttcggaaaaatttaaatctgttgaaattaaaacaacatttcaatctagatttggaccgcaagagtggcttaagccatatacagataaaactttagaaaatttaccaaaggaaggaaaaaaaaatatcctcatgatatgcccgggcttttcctctgattgcgttgaaacactagaagaaatattaattcagggcaaaaaaagctttatggattcgggtggcgagaattttgatatgataccatgtttgaatgataatgatgatcatataaatttactaaaaaacttaattcaaaaaaatatttaat

SEQ ID NO: 289055 - DNA, 781 bp, Unknown
  Bacterial polypeptide expressing nucleotide sequence isolated from the Sargasso Sea
aatgaaaacagcggtcgttttatttaacttgggcggaccagataaacaagaaagtgtaaaaccttttttgtttaatctgtttaatgatcccaatatatttagactcccaaatcccttcaggtatttattggctagacttatatcttctcgtcgcaccaaagaggccactgaaatttatgcggaaataggcggtaaatcccccattcttgaaattaccaactcccaagctgaggcccttcataaaaagttaaaaaacaaaggcatcgagaacaaggtatttgtttgtatgagatattggcatccaatgacagctgaagtggtttcaaaagtcaaagactataacccagacaaaatatttttactgcccctgtatccacagtactccacaacaacaacaaaatcttctctggacgcatggttcaaagaagcccaaaaccaggaattaaatacaaaaacaaaatacacctgttgttatccatatgacgcgaaactaataaaagcccaccaaaaactgatccaagacaaaataaaccacatcaaagataagaaagtaagagttctgttttccgctcacagtttacccgtgtcaatcattaaaaaaggcgacccatatcagtggcaagtggagcaaacagtcaaggcggtcatgcagggcattcatggttatgaagatcatgttttggcttaccaaagtaaagttaccccagttaaatggcttgaaccaacaacaccaggtgaaattgaaaatgcaattaacgaagatagggcgcttgttattgtc

SEQ ID NO: 289056 - DNA, 835 bp, Unknown
  Bacterial polypeptide expressing nucleotide sequence isolated from the Sargasso Sea
ttggctagattttcaggattagataaagacaccggtcataaagcacgcggtaaaactggcgtgttgatcatgaatctaggcacgccagatgcaccaaccgcatctgcagtacgcacttatttagcggagtttttgtcagatccacgagtagttgaaattccaaagttagtgtggatgttaattctccatggcattattttacgtattcgcccagccaaatctgcagcgttatatcaacaagtgtggactgaagccggctcaccattgcttgatatcagccaacgtcaacaaaccaaattagcaaaccagctgcaggcacaagggcatgatgtgagtgtgcatttagccatgcgttatggttcaccgtctgtggcgaccactttgcaaactatgcacaagcaaggtattgataatcttgtggtactgcctttgtatccgcaatacgcagccccaacaaccggctccgcttttgatgctctagccaaagagatgatgaagtggcgttatttacccgcgcttcatttcattaatacttatcatgataaccccgactttatcgatgcgattgccgcttcaattcaaaaagactttgaattaaatggcaagccgcaaaaattagtgatgtcgtaccatggaatgccagaacgtaacttgcatcttggcgacccatattattgcttctgcatgaaaaccacgcgtttagttgtcgaaaagcttggcttaagtgaagatgaatatgtggctaccttccaatcacgttttggtaaagctaaatggctacaaccctatacagatatgaccatcggcagcctgccagaaaaaggcattaccgata

SEQ ID NO: 289057 - DNA, 830 bp, Unknown
  Bacterial polypeptide expressing nucleotide sequence isolated from the Sargasso Sea
tgagcacggcagtaaagaaaaaactggagttcttataacaaatctagggactccagatgctccagaaagaagagaattaaaagtatatcttaaccaattcttatcagatcctagggtaattgaacttcctaaatttttatggctagctttattaaagctggtaattttacaaataagaccatcaaaatctgcaaaatcttataaaaaaatctggactaataatggttcacctttattggatatttcaaaaagacaattagttaaaattcaatcatctttctcaaattctaataaaaatttggttttcgaattaggtatgagatatggaaatccatcaattcaagatgcattaaataaattccaaaaaaatcaagtacgaagattattagttttaccaatgtatcctcaatattgtgctgctacgacaggaagtacatttgatgaagtaactaatgtcttacaaaaatggcgatggattccagaaattcgttttattaaccaatattttgatgaaaaaaattatattgaagcactttcaaattctataaaatcattttggaaaaaaaattcaaaacctcaaaagattatttttagttatcatggaatacctaaaagatatttgattaatggtgatccatatcattgtttttgccttaaaactactcgacttgtaaaagaactaatgagattatctgataatgaaattattacaacattccaaagtagatttggacgtgaagaatggctcaagccatacacaagtgaaacattaaaagaattaccaaaaaaaggaattaaaaatgtccatattatctctcccaggttttagt

SEQ ID NO: 289058 - DNA, 526 bp, Unknown
  Bacterial polypeptide expressing nucleotide sequence isolated from the Sargasso Sea
catgtcccgcgtcggtgtcgtcctgctgaatctcgggggacccgaacgcattcaggatgtcggaccgtttctctacaacctgtttgctgatcctgagatcatccggctgcccagcccagctctgcagaagccgctggcctggttgatcagcacccttcgcagcggtaaatctcaggaggcctatcgctccatcggcggcggatcacctctgcgccggatcaccgaacagcaggcccgggaattgcagagtctgcttcggcagcgcggactggatgccaccacctacgtcgcgatgcggtactggcatccgttcacggaatccgccgtggctgacatgaaggcggatggcatggatgaggtggtggtgcttccgctctatcccacttctccatcagcaccagcggctccagcttccgggaactgcagcggctgcgtcagggcgatgcagcctttcgacagcttcccgatcgctgcattcgcagttggtttggacaccccggctacatcaaggcgatggccgagctga

SEQ ID NO: 289059 - DNA, 850 bp, Unknown
  Bacterial polypeptide expressing nucleotide sequence isolated from the Sargasso Sea
gaccgaagatggctctcctctaatcatttactctaagaaagtattggaaaaagtaaaacagaaaacatcagttccgacttacttagcgatgcgctacggaaaaccatccatcgagcatacacttttagatatcgtgaaaaaccatccaaagatggaaaaactattcattattccactttacccacaatatgccatgtccactacaaaaacagttatcgaaaaagtaaaagaacagttaatcaaacataatataacgaccaaaacagacacatttccagccttctacaacgaaccaaactatctaaagaacctagagacctccatgaaagaatatctcaatgccccctatgatcacctaatcttcagtttccatggactacctgaacgacatttaaaaaaaacagacccaacccaatcacattgcctaaaaaaagcaaactgctgtgagatgcccagccctgcccatgaaacctgttactgtcaccaatgcaaatgggttgctaacactatgatcgatcgacttaacatcccaccagaaaaaacaaccatcgccttccaatctcgattagggatcgatccttggctaaaaccagccactaaaaatgttattttggagctagccaaacaaaacaaaaagcggttattagtcgcatgtcctgcctttgtaagtgattgtcttgaaacattagaagagatccaaatcgggttagaagaagaattcatagaagcaggtggcgaaaaattgcagctcatcccatgtttaaacgataacgatgattggtgtcagactgttgccaactggatcactgattacaaaaatggccgtttagaagtaacaaatatccaatga

SEQ ID NO: 289060 - DNA, 766 bp, Unknown
  Bacterial polypeptide expressing nucleotide sequence isolated from the Sargasso Sea
tactccagacgctccaaataaaaaagaacttaaagtttatcttaatcaattcctatcagatccaagagtaattgaattacctaaaattttatggcaaattttattaaagttagtgattttacaaataagaccctcaaaatcagcagaagcatacaaacaaatttggaccgataaaggttctccacttttagatattgcaaacagacaactaaataaaattcaagcgtctttttcatctaaaaatgacaaaatagtatttgaagtcggaatgcgttatggcaatccatctattccagatgctctatctaaactacaaaagaaacaagttagaaaattattagtcttaccaatgtacccacaatattgtgctgcaacaacaggtagtacatttgatgaagtaactaatgttttgcaaaaatggcgctggatacctgaaatgcgttttattaatcaatattttgaagaaaaaaattatattgaagctttatcaaattctataaaatcattttggaaagaaaatcaaaaaccacaaaaaattatttttagttaccatggtataccaaaaagatatttaactaatggcgacccatatcattgtttttgccttaaaaccacaagactagtcaaagaacatatgggattgtcagacgatgagataatgacaactttccagagtagatttggaagagaagaatggttaaaaccatatacaagtgaaactttaaaagaattaccaaaacaagggattaaaaatattcatattata

SEQ ID NO: 289061 - DNA, 862 bp, Unknown
  Bacterial polypeptide expressing nucleotide sequence isolated from the Sargasso Sea
gaagctagtgaaatttacgcagaaattgggggtaaatctcccatccttgaaattactaacaaccaagcagaagcgctccaaaaagaactagaaaataaaggaatcgaaaacaaagtgtttgtctgtatgagatattggcacccaatgaccccagaggtcgtggcgaaagtaaaaaaatataacccagataagatatttttattacctctgtacccacagtactcgaccacaacaaccaaatcatctttggacgcctggtttaaagaagcccaagttcaggaattaaattcaaaaacgaaatatacttgttgttatccatatgacacaaaattaatcaaagcccatcaaaaactgattcaagacaaaatcaaccaagttaaggataagaaagtcagagttttgttttctgctcacagcttacctgtatcaataataaaaaaaggagatccttatcagtggcaagtggagcaaacggtaaacgctgtcatgcaaggtattcacggttatgaagatcatgtgttggcttaccaaagtaaagtgacaccagtcaagtggcttgagcccacaactccaagtgaaattgaaaatgcaattcacaaagatcgagccctagtaatcgttccaattgcttttgtttctgatcactctgaaacacttgttgaattggatattgagtatcaggaacttgctagtgaattgggttgtaagcattattatagatctgagtctttaaatattgaccgaacctttatagaaagtttatccgagatagtgagtgaatcagacaaaattgagagcggtaatatcagacaaaaaatatgtccagcaacattcaaacaatgtgatcaagaattaagatgaa

SEQ ID NO: 289062 - DNA, 811 bp, Unknown
  Bacterial polypeptide expressing nucleotide sequence isolated from the Sargasso Sea
atgaaaaaagatcatccgaaggttaattatggaaaaacaggtttgcttttggtcaatcttggaacaccggactcgactaattggtgggatataagaaaatatcttaaagaatttttgtcagatagaagagttatagaagttaatccttttttatggcaaataatattaaatctttttattcttaatttaagaccctctaaaacagcaaaagcttataaggagatctggatgcaaaaagaaaacatgtctccacttagatattacacaatcatgcaaacaaaaaaattatcagagagaatgggggataaaaaaactattatagattttgcaatgaggtatggtaatccgagtatcaaaattaaaatgcaaaaacttcaaaaagaagggtgtgaaaatataattgttttacctttatatccacagtatgcagcagctacaacagcaacagtttgcgatgaagtttacaggactttaactaaaatgagatggcaacctagtctacaaattattccacattatgaatctgagcctatttacataaaagctttagaaagcagccttaacaaaaaaattgatgaattaaattggagacctgatttaattttagcttcttaccacggtatacctaaaaaatattttgagaaaggtgacccatatcattgttactgtcagaaaacatcaagactgttatcggaaagatttactaaaattccaattacaacaactttccaatctagatttggtccccaggaatggttacaaccttatactgataaaactttagaaagattaccaaaagaaggaaaaaaaa

SEQ ID NO: 289063 - DNA, 835 bp, Unknown
  Bacterial polypeptide expressing nucleotide sequence isolated from the Sargasso Sea
agacgggatcgatgaggtcgtcgtcctccccctttatccccacttctcaatcagcacgagtggatcaagttttcgcgagctgcaacgtttgcgtcagtcggattcctcgttcgagaagttgccgattcgttgcatccgaagctggtttgatcatcccggttatgtgcgggcgatggcccagttaatcgctgaagaggtgcgaagcagtgacggcccagagcaggcccacatctttttcagtgcccacggagttccgaaaagttacgtggaggaagctggcgatccctatcaaaaagagatcgagtcctgcacggcgctgatcatgaatcagctcgaagagctgctcggatacagcaatccgcacacgttggcctaccagagtcgtgttggccccgtggagtggctaaagccctacacggaggaagctcttgaggaactcggtgaggccaaaacccgtgatctcgtcgtggttccgatcagctttgtcagcgaacacatcgaaacactcgaagagatcgatatcgaatacagggaactcgccacagaagctggtgttgtgaatttccgacgcgtgcgggcgctcgatacctatccgcccttcatcgaaggtcttgcggatttggtcaccacgagccttgaaggccccgaagtgacccttgatgcggcggctgagctgcccaccaaggtcaagctctatccccaggagaaatgggaatggggatggaacaacagttctgaggtgtggaacggcaggttggccatgctcggattttcagcattcctgctcgagctgatcagtggtcaaggccccttgcacgcattgggtcttctctga

SEQ ID NO: 289064 - DNA, 625 bp, Unknown
  Bacterial polypeptide expressing nucleotide sequence isolated from the Sargasso Sea
attacaagctaatggatgtgaaaagctaatagttttaccgttatacccacaatacgccgctgcaactactgcaacagtatgtgacgaagtttacagatgcctcatgaaaatgcgatggcagccaagtcttcaaattatacctcattatgagtcaaacccattatatattaacgcattagcaaacagtattgaaaaaaaaatttctgaaattaattggcaaccagatttaattattgcctcatatcacggtattccaaaaaaatattttgaaaaaggagacccttatcattgctactgtcacaagactacaagattaatgagagaaaaatttgataaggtaccaatcgaaacaacatttcaatcacgatttggccctcaagaatggttacaaccatacacggataaaaccttagaaaatcttccaaaaacaggtaagaaaaaaatactagttatttgtccaggattctcctcagattgtgtagagacattagaggaaatatcaattcaaggaaaagaaagttttttaaattcagggggcttaaacttcgatgtaattccatgtcttaatgacaatgaagaccacattaaattgttaaataatttggttcagaggcatatttcataa

SEQ ID NO: 289065 - DNA, 614 bp, Unknown
  Bacterial polypeptide expressing nucleotide sequence isolated from the Sargasso Sea
gatgaataatgagcaccctaaaataaatttcggcaagacaggtgtcttattggtaaatctaggaacaccagattctactaaatggattgatataagaaaatatttaaaagaatttttgtctgacagaagagttatagaagttaacccttttgtttggcagattattcttaatttatttatattgaacttgagaccatctaaaaccgctaaggcatataaagaaatatggatgcaaaaagagaacatgtcaccattaagatattacacaattatgcaaacaaaaaagttattagacaaaattggtaacaagaatttgattgttgattatgctatgcgatatggaaacccaagtataaaaagtaaaatatacaaattacacgaagcgggctgtgaaaaacttgtagttctacctctttatcctcaatatgcagctgcaacaaccgccactgtttgtgacgaagtttatcgagttttaatgagcatgagatggcaacctagtttacaaataatacctcattacgagtcagatccgctttatataaaagcccttataaatagtttaaattttcaaatatccaaattaagttggaaaccagatcttgttctagcatcat

SEQ ID NO: 289066 - DNA, 635 bp, Unknown
  Bacterial polypeptide expressing nucleotide sequence isolated from the Sargasso Sea
aatggacaaacaagaacatcctcctgtaaaatttggaaaaactggagttttaatagtaaatctgggtactccggactcaacaagctggtttgatataagaaaatatttaaaagaatttttgtcggatagaagagtaattgaagttaaccccataatttggcagtttattttaaatgtttttatattaactttccgaccttcaaaaacagcaaaagcttataaagaaatttggatgaaggacaaaaatatttcacctcttttgcactatactcaaaaacaagcagaaaaactctcaaaccaaatgtcagaatcaaacttgttagtggactatgccatgagatatggaaatcccagcataaggagtaaaattgcaacccttcatgaaatgggctgtgaaaacttgataatacttccactttatccccagtatgctgctgcaactaccgcaacagtttgcgatgaagtatatagaactcttatgaaaatgagatggcaaccatcactcaaaatagtgccgcattacgaatctgatcctttatatattgaagcacttgtaaattctttgaacaaaaaaattaaagaaattaattggaagccagatttaatattggcttcttatcacggaataccacaaa

SEQ ID NO: 289067 - DNA, 797 bp, Unknown
  Bacterial polypeptide expressing nucleotide sequence isolated from the Sargasso Sea
aatgattaataagccagaagatcacccagaaataaaagctaataaaattggaatactattagtaaatttaggaactccagaaagtaccgatacaaaatctattagaaaatacttaaaagagtttttatctgatagaagagtaatagatgttccaagagtattatggtggataattttaaattttataattcttaatacacgcccaaaaaaaactggtgcggcatataaaaaaatttggataaataatgatatagatggaagtcctcttagaaaaattacaagacttcaatctgaaaaattatctaaaatgcttaaaaatgaaaatataatagttgattacgctatgcgttatggcaatccagcaatccattctaaattaaatcaatttaaacaaaaaggctgtgacagaataataatttttagtttatatccacaatactctgggccaactactgcaacagtaaatgatgaagtgtgcaaatggatggtcaagcaaaaatggcaaccttcaataagaattattccaccttactttgataaccctgaatatatttcctcaatttcaaaaagtattttgaagtcttttaaggaaaatgggaaacctgatttattgcttttatcatttcatggagccccaaaaaggtacctcattgagggtgatccatatcattgtcaatgtgttaaaagtgggcgactaattaaagaatatttaaagcttaataatggagattttatgatgagttttcaatcaagattcggaagcgaaccatggcttcaaccatatacagatgaaacac

SEQ ID NO: 289068 - DNA, 634 bp, Unknown
  Bacterial polypeptide expressing nucleotide sequence isolated from the Sargasso Sea
aaaaatggatgttcaaaaattcttttggttccactttatcctcagtatgcagccagcactactgcaactgtaaaagatgaagtctttaaatggttgttaaaacaaaggtggcagccagacatacgaacagttcctccttggtttgataataaaaattatataaaagcactaacttcaactataacaaaacatatgaaaaatagaaataaagtcgataaattagtgatatcttttcatggtataccaaagagatatttcatggctggtgatccgtatcattgccattgtataaaaactgctagattacttaaagaagaattaaaatggccagaaaataaaattttagttacttttcagtctagatttggccctgaaccatggcttcaaccttatactgacgaaacaattatagaactagctaaacaaggatctaaaaatattgctttgatcgctccaggttttatttctgattgtttagaaacacttgaagaattaaatgttgaggcaagagagttgtttttagagaatggtggacaaacttttcaatatataccttgtttaaatgataacgaatattcaattaaatttttaaataatttagtcaaacaaaacctattaggttgggataattaaa

SEQ ID NO: 289069 - DNA, 880 bp, Unknown
  Bacterial polypeptide expressing nucleotide sequence isolated from the Sargasso Sea
aatgattgaaaaaagtcacccacccataaaatacggtaacacaggtgtacttataattaatctaggcacgcccgattctaccaattggtttgatataagaaaatatttaaaagagtttctttctgacagaagggttatcgaggtaaatccattagtttggcaaatcattttgaatttgttcattttaaactttagaccttctaaaactgcaaaagcttataaagaaatttggatgaaggatgaaaatatatcaccacttctttattatacgaaaaaacaaagtgagaaaatttcaaatttactagcaaaaaaaaacattattacagattttgcgatgagatatggaaacccaagcattaaaagcaagattcataaattgcatgaaatgggttgtgaaaacttggtgatacttcctctttatccacaatatgcagcagcaacaacagcaacagtttgtgacgaggtatacagaactttaatgaaaatgaggtggcaaccttctttaaaaataattcctcattatgagtctgatgcactttacattgatgcacttgttaattcagttaataaaaaaataaatgaaattagctggaaaccagatctaattatagcttcttatcatgggataccgaaaaaatattttgataaaggtgacccttatcattgttattgccataaaacgacaagactgatttcagaaaaatttagttcaattaaaattaaaaccacatttcaatcaaggtttggcccacaagaatggcttcaaccatatactgataagaccctggaaaacttacctaaggaaggagtcaaaaatgttcttacaatttgtccaggcttttcatctgactgcgttgagactctggaggaatttttattc

SEQ ID NO: 289070 - DNA, 965 bp, Unknown
  Bacterial polypeptide expressing nucleotide sequence isolated from the Sargasso Sea
gaatttaggagggcctgaacgcattaccgatgtaggcccattcttatattatcttttttctgatccagaaataattaggacgcctttccctttctttcaaaagcccttggcttggttaattagtacgcttaggagtactacttctcaacaagcttatctttctataggtggtggatcacctattagaagaataactgaacaacaagcaagagaattacaatcaaaattaagggacaaggggtttaatgctactacctatatcgctatgcggtattggcatccttttacagaatcagctattgctgatatgaaagcagatgggatagatcaagttgttgtaatacccttgtatccacatttttctataagtactagtggttcgagctttagagaattaaaaaaattgcgagattctgatgatgaatttaagaaggttccaatgagatgtgttaggagttggttcagtcaatcaggttatttaaagtctatggttgaattaatttctgaacaaatttcactttgtgaatcaccttcaaaagctcatatatttttcactgctcatggagttcctaagagttacgtagaagaagctggagacccatacaaacaacaaattgaagattgttcattattaataataaatgagttggaaaaatgtttaggacatagtaaccctcatacactttcttatcaaagtagagttggccctgttgaatggttgaaaccttatacagaagaagtattggcggatcttggaaggtcaaatgttaatgatctagttgtggttcctataagtttcgttggagagcatatcgaaacgttgcaagaaattgatattgaatataaagaaattgctgaaaaggcgggtattaaaaactttcggagagttaaggctcttaatactcatcctacttttattgaaggtctcagtgatctagtaatttcctgcttggaggggcttctag

SEQ ID NO: 289071 - DNA, 607 bp, Unknown
  Bacterial polypeptide expressing nucleotide sequence isolated from the Sargasso Sea
ttgccactttatccacaatattgcgctgctacaacaggtagcacatttgatgcagtttcatccattttgcagaaatggagatggattccagaattgcgatttattaatcaatattttgaggaaaatctttttataaaagctattggcgattcaattaaaaaagctgaaaaacataaaggaaaaccgcaaaaaattatttttagttaccatggaataccaaaaaaatatcttcttgaaggtgatccctatcactgcttttgtttgaaaacttcacgcttagttcgtgaatatcttaattataaagaagaagatattattagtacttttcaaagccgttttggatcacaggaatggttacaaccttatactgatgaaaccttgaaaaaattacccaaagagggaataaaaaatattcatatattatctccaggatttagtgctgattgcttagagacacttgaagaacttcaagaagaaaataaagaatattttatgaaagcgggcggagagtcttattattatattccctgcttaaatgctaatccggaacatattgaagtgataagctatttagttagaaaacatacgcagggatgggaagtttaat

SEQ ID NO: 289072 - DNA, 658 bp, Unknown
  Bacterial polypeptide expressing nucleotide sequence isolated from the Sargasso Sea
atgacaccagaccatccaaaaattaattatggcaagacaggtattttaattgttaatcttggtacacctgactcaacaagctggttagatatcaggaaatatttgaaagaattcttgtcagacagacgagtaattgaagttaatcccttaatttggaaggtaatacttaacttatttatacttacctttagaccttctaaaacagcaaaagcctacaaagaaatttggatggaagaaaaaaatatgtctcctctaagatatttcactgaaagccaagcaaaaaaattgtctaaagaaattggtaatgaaaatttaattgttgactttgctatgagatatggaaatccaagtattaaaagcaaaattcttggtctccaagaaaagggatgtgaaaatttaattatacttcctctatatccacaatatgcagcagcaacaacagctacagtttgtgatgaagtttatagaactttgatgaaaatgagatggcagccaaatcttcagataattcctcattatgaatctgagccgctttatattgaggcaattaaaaatagtattgtaaaaaaaattagtgaaattaattggaagcctgatttaataattgcatcttatcatggtattcctaagaaatattttgataaaggagatccctatc

SEQ ID NO: 289073 - DNA, 595 bp, Unknown
  Bacterial polypeptide expressing nucleotide sequence isolated from the Sargasso Sea
aatgaaaacagcgataatattatttaatttgggtggacccgacaaacaagaaagcgtgagacctttcctattcaatctctttaatgatcctaatatttttaagttacccaatccgttccgtttcttattagcaaaactgatatcgactttgaggacaaaggaagcaactgaaatatattctgaaattggtggtaaatcacccattttagacatcacaaacgatcaggccactgcacttgaaggggctctagcaatacaaggtataccctccaaagtgtttgtgtgtatgcgttactggcatcctatgacagccgaaatcgttaaagaggtgaaaaattacaatccagacaatatttttttacttcccctttatcctcaatactcaactacaaccactaaatcttctttagatctctggtttaaagaagcaaagaaacaaaacttactagccccaacaaaatacacttgctgttatccaatgaataagaaattcattgagtctcatcagcgtttaatacaaaagaaaatagatcaaattaaagataaaaagatcaggattttattttctgctcacagtttgcctgtctcaattatt

SEQ ID NO: 289074 - DNA, 670 bp, Unknown
  Bacterial polypeptide expressing nucleotide sequence isolated from the Sargasso Sea
cacccatctattcctaatgctctatctaaacttcaaaaaaagcaagttagaagactattggttttgccaatgtatcctcagtattgtgcagcaacaacaggcagtacttttgatgaagtaacaaatgttttacaaaaatggcgttggatacctgaaatgcgtttcattaaccaatattttgaagaaaaattatatattgaagctttgtcaaattctataaaaaatttttggaaaaaaaatcagaaacctcaaaaaataattttcagttatcatgggatacctaaaagatatttaactaatggcgatccttatcattgcttttgtcttaaaactacaagacttgtcaaagagcatatgggattatctgatgatgaaataatgactaccttccagagcaggtttggacgtgaagaatggctaaagccttatactagtgacacattgaaagaattaccaaaagaaggcataaaaaatattcatattatatctcctggctttagtagtgattgccttgagacattagaggagcttgaagaagagaataaagaatattttatggagtccggtggtgaacattacaaatatattccctgcctaaatgataatcatgatcatatagacgtttttgttaatcttataaaaaaacattctcaaggttggccaatatgat

SEQ ID NO: 289075 - DNA, 856 bp, Unknown
  Bacterial polypeptide expressing nucleotide sequence isolated from the Sargasso Sea
aatcttggcaccccaaattctacgagctggtttgatattagaaaatatctaaaggaatttttatctgatagaagagttatagaagtaaacccatttttgtggaagattatattgaatcttttcatactaaattttagacctagcaaaacagcaaaagcctataaaaaaatttggatgaagaacaaaaatatgtcgccacttagatactatacgcaaatgcaaaccaaaaaattaaatgaaaaaataaaagataaaaaaattattattgattatgccatgagatatggagatccaagtataaatagtaaaatgagaaatcttcaaagcgaaggatgtgaaaacatagttattttacctttataccctcaatatgccgcagccacaacagcaacagtttgcgatgaggtttatagaaccttaatgaaaatgagatggcaaccaagtctgcaaattattccacactatgaatcagaacctttatatatagaggcgcttgtaaaaagtttaaataagaaaatatccgaaataagttggagaccagatttaattattgcttcataccatggaataccaaaaaaatattttgaaaaaggtgacccgtatcattgttactgtcaaaaaactacacgtcttttaagtgaaaaatttacaagcattgaaattaaaacaacttttcaatcaagatttggtccacaagagtggttacaaccatatacagacaaaacatttgtatctttagctaaagaagggaaaaagaaaattttggttatttgtccaggtttttcatcagattgcgttgaaacactagaggagattttaatccagggaaaagaaacttttataaattgtggaggag

SEQ ID NO: 289076 - DNA, 643 bp, Unknown
  Bacterial polypeptide expressing nucleotide sequence isolated from the Sargasso Sea
attaaaagtaaaataaaaaaattacatgataatggatgtgaaaatcttgtaatattacctttatatccacagtatgctgccgccaccacagcaacagtatgtgatgaggtttatagaacactaatgtctatgagatggcaaccatcactaaaaattattccgcattatgaatctgatcctttatacattgatgctttggtgaattctattaactctaaaatagaaaacataaattggaaaccagatttaatattagcttcttatcatggaataccaaaaaaatattttgataaaggagacccataccattgttattgtcacaaaacaactagactcatttctgaaaaatttaatgaaataaaaattaaaactacatttcaatcaagatttggacctgaggaatggttacaaccttatacagataaaactttagaacatttaccaaaagagggagtaaaaaatgtgctagcaatttgtccaggtttctcatcagattgtgttgaaacattagaagaaatattaattcaaggaaaagaaagttttatagaagctggtggtgaaaattttgatatggtttcgtgtcttaatgataacgatgatcatataaaattacttaataatttgataaaaagaaatatttaat

SEQ ID NO: 289077 - DNA, 871 bp, Unknown
  Bacterial polypeptide expressing nucleotide sequence isolated from the Sargasso Sea
aatgaataaggatcatccagaagtaaattttggtaagactggagtattactgataaatcttggaacaccagactcaacaaattggtgggatataaggaagtaccttaaacaatttctttcagacaggagggttatagaagtaaacccttttttatggcaaatcatattaaacttatttattttaacttttagaccatcaaaaacagcccatgcctataaaaaaatttggcggaaagacactaacgagtcacctttgttatactttacaagaaatcaagcgttaaaactgaaagagagaattcaaaacgataagacattcgttgatttcgcaatgaggtatggcaacccaagtattaactataaactaaatatattaaaagaaaaaggttgtgaaaatttgataattttaccattgtaccctcaatacgcagccgcaactacagcaacagtttgtgatgaagtttacagatcgcttatgaaaatgagatggcaaccaagtattcaaatcgtacctcactatgaaagtgagcaaatgtatattaaagctttggttactagtataaaaaagaaaattgaaaaaattgactggaaacctgatctcatattatcttcataccatgggattcctaaatcttactttgaaaaaggagacccttatcattgttattgccacaaaactactaggctgatcaaagaaaaatttgatcaaatagaactccaaaccacatttcagtccaggtttggtccgcaagagtggttaacaccgtacactgataagactattgaacatttaccagaaaaagggataaaaaatttattagtgatttgtcctggatttgcctctgattgtgtagagacattagaagaaatt

SEQ ID NO: 289078 - DNA, 863 bp, Unknown
  Bacterial polypeptide expressing nucleotide sequence isolated from the Sargasso Sea
aatggaaaaaaatcaccctgaaattaaatttggaaaaactggagttctattaataaatctggggacaccaaattctactagttggcttgatataagaagatatttaaaagaatttttatcggacagaagagttatcgaagtaaatcctataatatggaaaattatcctaaatgtttttatactaacttttaggccatcgaaaaccgctaaagcttacaaggagatttggatgaatgatatcaacatgtctcctttaagatattatactaaacaacaagcagaaaagttatcacaaaaattaaataatagcgatatcatcgttgattatgcaatgcgatatggagatccaagtatattcagcaaaatgaaattgttacaaaaaaatggatgtgaaaatattgtagtcttgccactttacccgcaatatgcagcagcaacaacagcaacagtttgtgatgaagtttatagatcattaatgcaaatgagatggcaaccgagccttcagataattccacattatgagtctgagccgatgtatataaatgctttaataaatagtattaaaaaaaaaatttctgaaattaaatggaaacccgacttaattcttgcatcttaccacgggataccaaagaaatatttcgaaaaaggtgatccataccattgttattgtcaaaagacttctagattgatttcagaacaattcaaagatgttgaattaattacaacttttcaatctagatttggaccacaagaatggttacaaccttatacagatagaactttagaaaaattaccctcggacgggaaaaaaaatattttggttatatgtcctggtttctcttcagattgtgtggaaactcttg

SEQ ID NO: 289079 - DNA, 796 bp, Unknown
  Bacterial polypeptide expressing nucleotide sequence isolated from the Sargasso Sea
tattcgaagatatttaaaagagtttctgtctgatcgaagagtaattgaggtaaatcccttcctttggcaaattattcttaatctcttcatattaacttttagaccatcaaaaacagcaaaagcctataaagaaatctggatgaaaaaagaaaacatgtctccattaagatattacacgcaaaagcaagctgtgaagcttagtgaaaaaataagtctagataatttaaaagtagattttgcaatgagatacggcaatccaagcatcaaaagcgtaattgaaaagatgcaagcagatggttgtgaaaacttaatcattcttccgctttatcctcagtacgctgccgcaacaaccgcaactgtatgtgatgaagtatatagggccttaatgaatgcaagatggcaacctagtttacaaattataccacattacgaatctgagccattatatatagatgctttagtaaatagcattgaaaaaaaaattaaagagatagattggattccagatttaattattgcctcataccacggtattccaaaaaagtattttgataaaggcgatccatatcattgttattgtcacaagaccacaagactaatgaaagaaaaattcaataaagttccaatcgaaactacttttcaatcaagatttgggccccaggaatggttacaaccatacactgataaaacgcttgaaaaattacctaactctgggaaaaaaaacgtattggttatttgtcctggattttcatctgattgtgttgaaactcttgaagaaatagccattcaaggaaga

SEQ ID NO: 289080 - DNA, 814 bp, Unknown
  Bacterial polypeptide expressing nucleotide sequence isolated from the Sargasso Sea
atgattgaaaaaaaccacccacctataaaatatggcaaaataggtgtacttataattaaccttggaactccagataccactaattggttcgatataagaaagtatttaagagagttcctttctgacagaagagtaattgaggtaaatccgttagtttggcaaataattttgaatttgttcattttaaattttagaccttctaaaactgctaaagcttataaagagatttggatgaagaatgagaatatatcgccacttctttattatacaaaaaagcaaagtgagaaaatttcaaattcactatcaaaagaaaatattgtcatagactttgctatgagatatggaaatccaagtattaaaagcaaaattcacaaattgcataaaatgggctgtgaaaatctagtgatacttccgctttatcctcaatatgcagcagccacaacagcaacagtttgtgatgaggtatacagaactttaatgaaaatgaggtggcaaccttctttaaaaataattcctcactatgagtctgaaccactttacattgaggcgcttgttaattcgattaataaaaaaataaaagaaattaactggaaaccagacttaattatagcctcttatcacgggataccaaaaaaatattttgataaaggagacccttatcattgctattgtcataaaacgacaagacttatttcagaaaaattttcttcaattgaaattaaaactacatttcagtcaagatttggtccacaagaatggcttcaaccatatactgacaagaccctagaaaatctacccaaagagggtatcaaaa

SEQ ID NO: 289081 - DNA, 603 bp, Unknown
  Bacterial polypeptide expressing nucleotide sequence isolated from the Sargasso Sea
aaaatcttgtaattttacccctttatcctcaatatgcaggcgcaactacagcaactgtttgtgacgaagtatatcgaactttaatgaagatgaggtggcagccatctttaaaaattattccacactatgagtcagatccattatacgttgatgctttagtaaattcaataaatgttaaaataaaaaatataaattggaaaccagatttgattttagcatcctaccatggaataccaaaaaagtatttcgataaaggagatccgtatcattgttattgtcacaaaaccacaagattagtttcagaaaaatttaaatctattgaaattaaaacaacctttcaatctagatttggccctcaagagtggcttcagccatatacagataaaactttagaaaacttaccaaaggaaggaaaaaaaaatgtcctcacgatatgcccaggtttttcttctgattgtgttgaaacattagaagaaatattaatacaaggcaaaaaaagttttatggattcgggaggtgagaatttcgacatgataccatgtctaaatgataatgatgaccatataaatttattaaaaaacttagttcaaaaaaatatttaat

SEQ ID NO: 289082 - DNA, 920 bp, Unknown
  Bacterial polypeptide expressing nucleotide sequence isolated from the Sargasso Sea
tactagttggctggatatagaaaaatatttgagagagtttctttctgatagaagggttatcgaggtaaatcctgtgatttggcaaataattttgaatgtttttattttaaattttaggccttccaaaacagccaaagcttataaggaaatatggattaaagacaaaaatatgtccccacttctttattatacaaaaatgcaaagcgagaaaatttcaaattcaatttctaaagaaaatatcattatagattttgcaatgagatatggaaaccccagtattaaaagcaagattcataaattacatgaaatgggctgtgaaaatttagtcatacttcctctttatccacagtatgctgctgccacaacagcaacagtttgtgatgaagtttatagaactttaatgaaaatgagatggcaaccctctttaaaaataataccacattacgaatctgatcctttttatatcgatgcacttgttaattctattaacaaaaaacttaacgaaataaattggaagccagatctaattgtagcctcttatcatggtataccgaaaaaatattttgataaaggtgatccttaccattgttattgtcataaaacgacaagacttatttcagaaaaatttacttcaattgaaattaaaactacatttcagtcaagatttggtccacaagaatggcttcaaccatatactgataagacacttgaaaacttacctaaagaaggagtcaaaaatgttcttacaatttgcccaggtttttcatctgactgcgttgagacgttggaggaaattttaattcagggtaaagaaagttttattagtgctggaggagaaaattttgatatggttccttgcttaaatgataatgatgatcatatccttttattaaaatccttaattgaaagaaatatttgat

SEQ ID NO: 289083 - DNA, 616 bp, Unknown
  Bacterial polypeptide expressing nucleotide sequence isolated from the Sargasso Sea
atgaccgatcacgcattgttgctggttaacctgggttcgcccgcgtctaccgaagtagccgatgtccgccgctacctgaaccagttcctgatggacccctatgtggtcgatctgccctggccgctgcgtcgcctgctggtgtcgctgatcctgatcaagcgcccggcggcctcggcgcatgcctatgcctcgatctggtgggatgagggttcgccgctgatcgtgctcagccgtcgcctgcaggaagcgatgaaggcgcactggacgcacggcccggtcgaactggccatgcgttatggccagccgtccatcgagtcgaccctgcagcgcctggctgcgcagggcattcgccaggtcaccctggcgccgctgtacccgcagttcgccgacagcaccaccaccacggtgatcgaagaggtccggcgggtggtgcgcgagcgcggtctcgacctgcgcctgtccagcctgccgccgttctatgaccagcccgagtacctcgatgccctggtcgccagcgccaagccgcatctgcagcagggcttcgatcacctgctgctgagtttccacggtctgcccgagcgtcacctgcacaagctcgacccgagtggtcactgcc

SEQ ID NO: 289084 - DNA, 916 bp, Unknown
  Bacterial polypeptide expressing nucleotide sequence isolated from the Sargasso Sea
atgaatccagatcacccggctgtaaaatttggaaaaacaggattactactagttaaccttgggacaccagactcaactaattggtttgacataagaaaatatttaaaagaatttttatctgaccgaagagttatagaagttaatccaattttgtggcaaataatactgaatttatttattttaaacttaagaccatctaaaactgctaaagcctataaagaaatctggatgcaaaaagaaaatatgtcaccgctaagatattacacaatcatgcaaacaaaaaaattatcagaaaaaatgggaaacgaaaatctaattgtagactttgctatgagatatggcaatcctagtattaaaagcaaactgaaaaatttacaaaaatctggatgtgagaatattgtagttttacctttgtatccccagtatgctgcagctacaacagctacagtttgtgatgaagtttataaaactcttatgggaatgagatggcagcctagtctacaaattatacctcattatgagtccgaacctttatatattaattctttaaaaaatagtcttgaaaaaaaaatatcagaattagcttggcaacctgatcttattgtagcatcgtaccatggaatacctaaaaaatattttagcaaaggagacccttaccattgctactgtcaaaaaacctcaaggttgttatctgaaaaatttaagaaaattccaattaaaactacatttcaatcaagatttggtccccaagaatggcttcaaccatataccgataaaacattagaaaatttaccaaaagagggtaaaaaaaatatattagtgatttgtcctgggttctcatcggattgtgtcgaaactttagaagaaatttccatccaaggcaaagaaagttttataaaaaatggggaaaaaattt

SEQ ID NO: 289085 - DNA, 823 bp, Unknown
  Bacterial polypeptide expressing nucleotide sequence isolated from the Sargasso Sea
atgcaaaaagaattaaatcacccacccattaattttggtaaaacaggagttctaatagtaaatttaggtacaccagattcgactagttggtttgacattagaaaatatttgaaagaatttttgtctgacaaaagagtaatagaagtaaaccctttcatttggcaaattatattaaatgtttttatattaaatttaagaccatccaaaaccgctaaggcctataaggaaatttggatgaaggatgaaaatatttctcctctccttcattatacacgacaacaagctaaaaaattatcaaactcgatatcagaaaaaaaaataattattgattatgctatgagatatggaaatccgagtattaaaagcaaaattaagaaactacacgaaaaaggttgtgagaacttgattatacttcctttataccctcaatatgctgcagcgacaacagcaactgtctgcgatgaagtatatagaacacttatgaaaatgagatggcaaccatccatcaaaataatcccacattatgagtcacatcctttgtatatcgatgctttagtaaattctttaaataagaaaataaaagaaatagattggaagccagatttaatattggtatcttatcatggtattccccaaaaatattttgataaaggagacccatatcattgttattgtcaaaaaacgacaaggcttatatcagaaaaatttaattcaatcgaacttaaaacaacttttcagtcaagatttggacctcaaaaatggcttaaaccttatacagacaagactttagagaaactgcctaaagaaggaaagaaaaatgttc

SEQ ID NO: 289086 - DNA, 727 bp, Unknown
  Bacterial polypeptide expressing nucleotide sequence isolated from the Sargasso Sea
gcagaaaagataaaatccattttatctaatcaaaatttaattgttgattatgcaatgaggtatggaaatccaagcattaaaagtaaaatgcttgatttacaagaaagtggatgtgaaaacataataatacttcctttgtatccacaatatgcggcagcaacaaccgccacagtttgtgatgaagtttatagagctttaatgaagatgagatggcagcccagtcttcaaattatacctcactacgagtctgaacctctttatattcaggcgattgtaaattcaattaatcataaacttgctaacatcaactggaaacctgatttgatattagcttcttaccatggaataccaaaaaaatattttgaaaaaggtgacccataccactgttattgtcataaaacttccagattaattaaagaaaagtttagcaaagaaatacccattttgacgacttttcaatcaagatttgggccacaagaatggcttcagccttatacagacaaaactttagaaaatttacctaaagaaggaaaaaaaaatgttttggtaatttctcccggattttcttctgattgtgttgaaactcttgaggaaatttctattcagggcaaagaaagctttttagaggctggaggggaaaaatttgatacaattccttgcttaaatgatagcgatgatcatattaaattattagtgcatttaatcaataaaagcataaaaaaatgaa

SEQ ID NO: 289087 - DNA, 813 bp, Unknown
  Bacterial polypeptide expressing nucleotide sequence isolated from the Sargasso Sea
gtattacccttatacccacatttttctataagtacaagtggttctagctttagagaattaaaaaaattacgtgactctgattcagattttaaaaaaataccaatgagatgtgtaagaagctggtttagtcaatcaggttatttaaaatctatggtcgagctcatttcagagcagatttccctttgtgaatctcccgctgaagcacatattttttttacagctcatggtgtacctaaaagttatgtagaggaggcaggagatccatataaagaacaaattgaagattgttcactattaattattgatgagcttgagaaatatttaggtcatagtaatgcgtatactctttcctatcaaagcagagtgggcccagttgaatggttaaaaccttatacagaagaagttttgacagatcttgggaaatctaaaataaatgatttaattgtagtacctataagttttgtaggagaacatatcgaaactctacaggaaattgatattgaatataaagaaattgctgagaaagcaggtatagttaacttcagaagagtaaaagctttaaatacgcatcctacctttattgagggtctaagtgatctagttatttctagcctggaaggaccgattattaatatagagaaagcttctgagttacctgaaaaagttaaactttatcctcaggaaaaatggcaatggggttggaataatagttcagaagtttggaatggaagggttgcaatgattgtttttctgatactttttattgaacttatttcaggctctggacctcttcataaattaggaattttataa

SEQ ID NO: 289088 - DNA, 602 bp, Unknown
  Bacterial polypeptide expressing nucleotide sequence isolated from the Sargasso Sea
cttcagcgcccacggtgtccccaagagttatgtggaggaggccggcgatccttatcagaaggaaatcgaggcctgcacgggattgatcatggaccagctggccagggaactgggccatgccaatccccacacgctggcctaccagagccgtgttggccccgtggagtggctcaagccttatacggaggaggccctcgaggagctcggtcaagccaaaaccaaggaccttgtggtcgtcccgatcagctttgtgagcgaacacatcgaaacccttgaagagatcgacatcgagtaccgggagcttgccaccgaggctggtgtggtcaacttccgcagggtgcgtgctctcgacacctatccacccttcatcgaaggccttgccgatctggtgaccaccagtcttgaaggtccggaggtgaccctcgatgcagcggccgaacttccgaccaaagtgaagctctatccccaggagaaatgggagtggggttggaacaacagttccgaggtctggaatggacgactggcgatgctgggcttttccgcattcctgctggagctgctcagtggccgaggtccattgcactcccttggcctgctctgaa

SEQ ID NO: 289089 - DNA, 822 bp, Unknown
  Bacterial polypeptide expressing nucleotide sequence isolated from the Sargasso Sea
tttgggaacaccagattcaactaattggtgggatattagaaaatatctaaaagagtttttatctgatagaagagtgatagaagttaacccctttctttggcaaataatcttaaatctttttattttaaccttcagaccatcaaaaaccgcaaaggcttataaaaagatatggatgaaagacaaaaacatgtctcctctaagatattataccgaaatgcaatcctctaaattacataacaaaatttcgaatgaaaatactgttgtagatttcgcgatgaggtatggaaatccaagcataagatcaaagataagctctttaaaagatttagggtgcgagaatttaattgtactacctctttacccgcagtatgcagcagcgacaacagcaacagtgtgtgatgaagtttatagatcgttatcaaaaatgagatggcaacctagtcttcaaataataccgcattatgaatctgatcctctatacattaaagcaatatgtaaatctattgaagatagaattagtaaaataaattggaagcctgatattatcatggcctcttatcatggaattccaaaaaaatattttgacaaaggagacccatatcattgctattgtcataaaacgacgagattaatttctgaaaacataaagactagtattccaattatgacgacttttcagtcaagatttggaccacaggaatggttgcaaccttacactgataaaactctagaaaagttacctaaagaggataagaaaaatatattagttatttgtccaggttttgcttctgattgtgttgaaacactagaagaaatatcaat

SEQ ID NO: 289090 - DNA, 823 bp, Unknown
  Bacterial polypeptide expressing nucleotide sequence isolated from the Sargasso Sea
atgaatccagatcacccggctgtaaaatttggaaaaacaggactgctattagttaatcttgggacaccagactcaactaattggtttgatataagaaaatacttaaaagaatttttatctgaccgaagagttatagaagttaatccaattttgtggcaaattatactgaatttatttattttaaatttaagaccatctaaaactgctaaagcctataaagaaatctggatgcaaaaagaaaacatgtcaccgttaagatattacacaatcatgcaaacaaaaaaattatcagaaaaaatgggaaacgaaaatctaattgtagactttgctatgagatacggtaatcctagcattaaaagtaaattgaaaaatttacaaaaatccggatgtgagaatattgtagttttacttttgtatccccagtatgctgcagctacaacagctacagtttgtgatgaagtttataaaactcttatgggaatgagatggcagcctagtttacaaatcatacctcattatgagtccgaacctttatatattaattctctaaaaaatagtcttgaaaaaaaaatatcagaattagcttgggaacctgatcttattgtagcatcgtaccatggaataccaaaaaaatattttagcaaaggagacccttaccattgctactgtcaaaaaacctcaaggttgttatatgaaaaatttaagaaaattccaattaaaactacatttcaatcaagatttggtccccaagaatggcttcaaccatataccgacaaaacattagaaaatttaccaaaagagggtaaaaaaaatatattagtga

SEQ ID NO: 289091 - DNA, 892 bp, Unknown
  Bacterial polypeptide expressing nucleotide sequence isolated from the Sargasso Sea
tttgagagatttttatctgacagaagagtaatagaagtaaaccctataatttggcaaattatactaaatttattcattttaacttttagaccttcaaaaactgcacatgcttataagcaaatttggagaaaagacagcaatgagtctccactattatactttaccaaaaaacaagcagccaaacttagtgaaaaaattggcagtgataacattattgtagactttgcaatgagatatggaaacccaagtattaaatctaaacttaaatatttaaaggaagaggggtgtgaaaatataataattttaccattatatcctcagtatgcttcagctacaacagcaacagtttgtgatgaagtatataaatctctgattaaaatgagatggcaaccaagccttcaaattatacctcattatgaaagcaacccactgtacataaatgcactgattaaaagcattgaaaaaaaaatatatgaaattaattggaaacctgatttgataatatcttcctaccacggtattcccaaatcttattttgataaaggtgatccatatcattgctattgtcataaaacgactaggctaatgagagaaaaatttaaaaaagtcgaaattagaaccacttttcaatcgagattcgggcctcaagagtggttaaaaccatatactgatcaaactttagaaactcttcccaaagagggcattaaaaacctattagtaatttgtcctggatttgcttcggattgtgttgaaactttagaagaaattaatattcaaggtagagatagctttattgaaaaaggaggggaaaactttgatttaattccctgtttaaatgacagccctgaccacatagatttattcgaaaaactagtaagtaaatatttataga

SEQ ID NO: 289092 - DNA, 943 bp, Unknown
  Bacterial polypeptide expressing nucleotide sequence isolated from the Sargasso Sea
gatggaaaaagaaataaaacacccaccgataaattttggaaaaacaggagttataataattaatttaggaacaccagactcaacaagctggttcgatattagaaaatatctgagagaatttttatctgatagaagagtaatagaagtcaatccttttatttggcaaattatactaaatgtttttatattaaatctaagaccatctaaaactgcaaaagcctataaagaaatttggatgaagcatgaaaacatttcccctcttctttattatacacgacagcaagctaaaaaattatcaaattcaatatccgaaaaaaatataattattgattttgccatgaggtatggaaatcccagtattaaaagtaaaataaaaaaattacatgaagatggttgtgaaaatttaataatactccctttatatcctcaatatgctgcagcaacaacagcaactgtttgtgatgaagtatatagaacacttatgaaaatgagatggcaaccatcgatcaaaataatcccacattatgagtcacatcctttatacatagatgctttagtaaattccttagataagaaaataaaagaaataaattggaagccagatttaatattagcatcttatcatggtataccccaaaaatactttgataaaggagatccatatcactgttattgtcaaaaaacgacaaggctcatctcagaaaaatttaattctatagagcttaaaacaacttttcagtcaagatttggccctcaaaaatggcttgaaccttatacagataagacattagaaaagctgcccaaagaaggaaaaaagaatgttcttgcaatatgtcctggaatttcctcggattgtgttgagacattagaagaaatccttattcaaggtaaagagagctttttagagtccggtgggagaaatttgatatggtgccctgtctaa

SEQ ID NO: 289093 - DNA, 740 bp, Unknown
  Bacterial polypeptide expressing nucleotide sequence isolated from the Sargasso Sea
gcgcaggatcaccgagcagcaggcacgggaactgcagagtttgctgcgtcagcggggactcgacgccaccacctacgtcgcgatgcggtactggcatcccttcacggaatccgccgtggcggacatgaaggcggatggcatggatgaggtggtggtgctgcctctttatccccacttctccatcagcaccagcggatccagcttccgggaactgcagcggctgcgtcagggagacgctgccttcgagcagctgccgattcgctgcatccgcagctggttcgatcactccggctacatcaaggcgatggctgagctgattgcggaagaagtgcgcaacagcgatgacccggaaaaggcccatgtctttttcagtgcccacggcgtccccaagagttatgtggaggaagccggagacccctatcagcagcagatcgaggcctgcacggacctgatcatgaaatctctggcggagcacatgggccacgccaacccccacaccctggcttaccagagccgagtgggtccggtggagtggctgaagccctacaccgaggaggcgctcgagcagctgggagaggccaagacgaacgatctggtggtggtgccgatcagcttcgtcagcgagcacatcgagacgcttgaggaaatcgacatcgaataccgggagctggcgaccgaagccggggtggtcaatttccgccgggtgcgagccctcgatacctatccccccttcattgagg

SEQ ID NO: 289094 - DNA, 925 bp, Unknown
  Bacterial polypeptide expressing nucleotide sequence isolated from the Sargasso Sea
aaggtcaacatgaaaacagcggtcgttttatttaacttgggcggaccagacaaacaagaaagcgtaaaaccttttttatttaatttatttaatgatcccaacatatttagacttccaaatcccttcagatattttttggcaagatttatatcttcccgtcgtaccaaagaggccactgaaatttatgccgaaataggcggcaaatctcctattcttgaaattacaaactcccaagcaaatgcccttcagaaagagttaaaaaataaaggcatcgagaataaagtatttgtttgcatgagatattggcatccaatgacagccgaggtagtttcaaaagtcaaagactataacccagacaaaatatttttattgcccctgtatccacagtactccaccacaacaacaaaatcttctctggatgcatggttcaacgaagcacaaaaccaggaattaaatgcaaaaacaaaatacacctgttgttatccctatgacgcaaaattaattaaagcccatcagaaactgatccaggacaaaataaaccacatcaaagataaaaaagtaagagttctgttttccgctcacagtttacctgtatcaataattaaaaaaggtgatccatatcagtggcaagtggagcaaacagtaaaggcagtcatgcagggcattcatggtcatgaagatcatgttttggcataccaaagtaaagttaccccagttaaatggcttgaaccaacaacaccaagtgaaattgaaaatgcaattagcgaagatcgggcgctggttattgttccaattgcgtttgtctcggatcactctgaaacacttgttgaattagatatcgagtatcaagaacttgcaagcgaactaggctgtaagcattattatagatctgagtctttaaatattgatcaaacatttatagaaa

SEQ ID NO: 289095 - DNA, 685 bp, Unknown
  Bacterial polypeptide expressing nucleotide sequence isolated from the Sargasso Sea
ttggaatgcgctacggtaatccaagtattttctaaaggtttaaataacttacgtaatcaaaattgtgatcgtataattgtcctacctttatatcctcaatattgtgcagctacaacaggatcaacatttgatgcagttgcagaggaattacaaaattggcgttgggtaccttctcttcgttttatcggtggctattacgaacatgaactttacattaacgctcttaaaaatagtattgaagagttctggactaaaaacgataaaccacaaaaaatcttatttagttatcatggtgtaccaaaaaaatatttagataaaggtgacccgtatcattgtttttgtagaaaaaccactagattggtagctgaggccatgggcttaccagaagaaaattatatgacaacattccaatctagatttgggccagcagagtggcttcaaccatacacagataaaacaattgagagcttggcaaaaaatggcacagaccacatacatgttattagtccagctttttcctcagactgtctagaaactatagaagagcttaatgaagaaaatagagaaatatttatggaaaatggtggaaaggaatttggatatattccttgtctaaatgatcgagaagatcatatactcctactcacttcgttgttagaaaacgaattacatgggtgggtatgag

SEQ ID NO: 289096 - DNA, 744 bp, Unknown
  Bacterial polypeptide expressing nucleotide sequence isolated from the Sargasso Sea
accttaaagaatttctttcagaccctagggttatagaagtaccgaaatttttatggcaggtaattttaagaggcataatattaaatttgagaccaaaaaaagtagcaaaattatataaatctatatggagaaaggaaggcggtccccttttagtaatgctagaaaagcaaaaaaaaggaataatgagaattttaaaaaataaaaaaaaaaaagtaaaatttgaaattggaatgaggtacggcaacccaagcataaaactaggtctagaaaaattaagaaaacaaaaatgccgcagaattttaatactccccctctatcctcaatattgtgccgcaactactggaagtacgttcgataaagtaaccgaggttttaagaaaatggaggtggataccagagataagatttataaataattattttgaagaacctttatatatagattgtttaataaaaagtattaaagaaaattggaaaaaattcggcaagccacaaaaactaatatttagttaccacggcatacccaaaaaatatttattgaaaggagatccataccattgtttttgccagaaaacaacaagactcgtggcagaaaaaatgaaattaaaagaaaaggaatatatgacaacatttcagtccaggtttggaccagacgagtggttgcaaccttatacagataaaacacttgaagagttgccttccaaaaatgtaaaaaaaattaatattatatcccccagggtttagt

SEQ ID NO: 289097 - DNA, 944 bp, Unknown
  Bacterial polypeptide expressing nucleotide sequence isolated from the Sargasso Sea
tctgggtggaccagataaacaagagagcgtaaagccgtttttatttaatctatttaatgaccctaatatttttagactcccaaatcccttcaggtacttattggcaaggcttatatcttcccgccgaacaaaagaggccagtgaaatttatgcagaaataggtggcaaatcgcctattctcgaaattaccaacaaccaagctgaagctctccagagagacctagaaaacaaaggcatcaaaaacaaagtgtttgtttgcatgagatattggcatccgatgaccccggaggttgttgcgaaggtaaaagactataatccagataaaatatttttgttgcctctgtatccacaatactctaccacgacaaccaagtcttccctggatgtttggtttaaggaagctcaacttcaagaattaaattcaaaaacaaaatatacttgttgttatccttatgacacaaagttaatcaaagctcatcaaaaactgattcaagataaaatcaatcaagttaaagacaagaaagtcagagttttgttttctgctcacagtttacccgtatcaataattaaaaagggagacccttatcagtggcaagtggagcaaacagttgaggcagtcatgcagggcattcatggatatgaagaccatgttttggcttaccaaagtaaagttacccccgttaaatggcttgaaccaacaacgccaagtgaaattgaaaatgcaattagcgaagatagggcgctggttattgttccaattgcgtttgtctcggatcactctgaaacacttgttgaattagatatcgagtaccaagaacttgcaagcgaactaggctgtaagcattattatagatctgagtctttaaatattgatcaaacatttatagaaagcttatctgaaatagttagtgagtcagagaaaagtgagagtggaaacatcaggc

SEQ ID NO: 289098 - DNA, 813 bp, Unknown
  Bacterial polypeptide expressing nucleotide sequence isolated from the Sargasso Sea
ttttaattgtcaatttaggaaccccggattcaacaaaatggttagatattagacgttacttaaaagagtttttatctgatagaagagttatagaagttaatccttttatatggcagttaatattaaatcttataattttaaatttaagaccatctaaaaccgcaaaagcttataaagaaatttggatgaaggatataaacatgtcccctttaatgtattatacacaaaaacaatctgaaaaagtctcaaattcaatatcgaatgagaatatattggtcgactttgcaatgagatatggaaatccgagcataaaaagtaaaataaaaaaattacatgataatggttgtgaaaatcttgtaattttacctttatatccacagtatgctgcggcaacaacggcaacagtatgtgatgaagtttacagaacattaatgtctatgagatggcagccttcacttaaaattattccccattatgagtctgaccctttgtacatcgatgctttggtgaattctattaattctaaaatagaaaacataaattggaaaccagatttaatactagcctcttatcatggaataccaaaaaaatattttgataaaggagacccataccattgttattgtcacaaaacgacgagacttatttctgaaaagttcagagaaatcgaaattaaaactacttttcaatcaaggtttggacctgaggaatggttacaaccttatactgataaaactttagaacgtttaccaaaagagggggtaaaaaacgttttagcaatttgtccaggattctcttcagatttgtgttgaa

SEQ ID NO: 289099 - DNA, 812 bp, Unknown
  Bacterial polypeptide expressing nucleotide sequence isolated from the Sargasso Sea
aatggataaaaatcacccagcagtaaattacggaaagaagggggttctactaataaacttaggcactcccgactcaactggctggtgggatattcgtaaatacttaaaagaatttttatctgataggagagttatagaagtaaaccctataatttggcagataatcttaaatttgttcatcttaacctttagaccttctaaaacagcccatgcatataagcagatttggagaaaagatacgaacgagtcccctttgctatactttactaaaaaacagtctgatgaacttaatagaaaaattggtagtgaaaatattgttgtggacttcgctatgagatatggaaatccgagcattaaatctaagcttcacaagcttaaagataaagggtgtgaaaatatcataatttttcctttatatcctcaatacgctgcagcaactaccgcaacagtttgtgatgaagtctataggtctttaatgaaaatgagatggcaacctagcttacagattatacctcactatgaaagtgaacctttatatattgacgctctcgttagtagcattgaaagaaaaataaaaacgctaaaatggacgccagatttgataatttcctcttatcacggcattcccaaaacatactttgacaaaggggacccttatcattgttactgtcacaaaaccacgagattaataaaagaaaaaattaaaaaagtagaaattaaaacaacttttcaatctaggtttggccctcaagagtggctaactccttacacagataaaaccttagaaaatttacccaaagaaggtgttaaaa

SEQ ID NO: 289100 - DNA, 952 bp, Unknown
  Bacterial polypeptide expressing nucleotide sequence isolated from the Sargasso Sea
aatggaagaccacccaaaaattaactttggaaaaactggagttttattgattaatcttggaactcctgaatccacaagttggtttgatataagaagttatcttaaggaatttctctctgataggagagttattgaagttaatcctatattatggaaatttatcctgaatgttttcattttaacatttagaccatcaaaaactgcaaaagcatataaagaaatttggatggaaaaagaaaatatgtctcctctaagatactacacaaaattacaggccgaaaaaattgacaaattgattgaaaatgaaaacgttatagtcgattatgcaatgagatatggaaacccaagtataaaaagcaagataaacaaacttcacgaagctggttgtgagcaccttttaattattcctctatacccacaatatgctgcagcaacaacagcaacagtatgtgatgaagtatatagatctcttatgaaaatgagatggcaaccaagtttaaagattgttccacattatgagtcagaggaactttatattgatgcattagtaaattcattaaataaaaaaatttcagaaattaattggaaaccagaccttataattgcttcttaccatggaattccacaaaaatattttgataaaggtgatccctatcattgttactgtcataaaaccacaagattaatctcagaaaagtttaaagatgttaagataagaacaactttccaatcaagattcggtccagaacaatggttaaaaccttatactgataaaactttagaagaattgccgagcgacaatataaataatatcttagtaatttgtcctggttttgcgtcagattgtgttgagactttagaagaaatcgcaattcaagggcaagagagttttttaaaatctggggggaaaaactttgatatgataccttgtttgaatgacaatgaagatcat

SEQ ID NO: 289101 - DNA, 805 bp, Unknown
  Bacterial polypeptide expressing nucleotide sequence isolated from the Sargasso Sea
atgacgccagaccacccaaaagttaattatggcaaaacaggggttttaattataaatctcggtacaccagattccactagttggatggatataaggaaatatttaaaagaatttttatcagatagaagagttatcgaggtaaatccttttatttggagagtaatccttaacttatttatacttactttcaggccatcaaaaaccgctaaagcctacaaagaaatatggatggaagacaagaacatgtcaccacttaggttttttacagaaagccaagctcataaattatctgacaaaatcggtaatgaaaacttgattgttgattttgctatgaggtatggcaatccaagtattaaaagcaaaataaatgatcttcatgaaaaaggttgtgaaaatttaattgtgctacctctttatcctcaatatgccgctgcaacgactgcaactgtatgtgacgaggtatatagaaccctcatgaaaatgagatggcaaccaaatctaaaaataattcctcattatgaatctgaacctctttacatagatgctatcaaaaatagtattataaaaaaaatcaacgaaattaattggaaaccagatttattaatagcctcatatcacggaataccaaagaaatatttcgataaaggggatccctatcattgctactgtcataaaaccacaaggttaatttctgaaaagtattccgatattaagataatgacaacatttcaatcaagatttggtcctcaagagtggttgcagccttacacagataaaacttttgaagttttacgaaagagggaaa

SEQ ID NO: 289102 - DNA, 1165 bp, Unknown
  Bacterial polypeptide expressing nucleotide sequence isolated from the Sargasso Sea
ttgtcccgtgtcggaatcgtcctcctcaaccttggggggccagaacgaattcaggacgtcggcccgttcctttacaaccttttttctgatccggagatcattcggctgccgattccggcattccaaaagccactggcctggttgatcagcactctgcgcagcaataagtcccaagaggcctaccgctccattggggggggttcacccctgaggcgcatcaccgaccagcaagcgcgcgagcttcagagcctgttgaggcagagggaagtggatgccaccacctacgtggccatgcgctactggcatccgtttacagagtccgctgtagcggacatgaaggccgatggcatcgagcaagtggtggtgctgccgctctatccacacttctcgatcagcaccagtggctcgagcttccgtgaattgcagcgcctgcgccaaggggacgagcatttcgcccaactgcctctgcgcgccatccgcagctggcatgaccacccgggctacctgcaagccatggcccaattgatggctcgggagatcgacgcttgcgttgatcccagcagcgcccatgtgttcttcagcgctcacggggtacccaagagctatgtggaagaggctggcgatccttaccagaaggagatcgaaagctgtgctgagctgatcatgaaaactttgggcagagacaatccctggaccttggcctaccagagccgtgtcggtccggtggaatggctccagccctacaccgaagaagctcttgaggagttaggcgagcagggcgtcaaagagctggtcgttgtgcccatcagcttcgtcagcgagcacattgaaaccctggaagaaattgatatcgaatacagggagatcgcgaccgaagctggcgtcagcaatttccgccgcgttccggccctcgataccgatccaacattcatcgcctcgttggctgatctggtcgagacttcgctggcaggtcctgaggtggatctcgaagaggccgcagcgctgcctgcgcgaaccaaactgtatccacaagagaaatggtcttggggatggaacaacagctctgaagtttggaatggtcgactagcaatgctgggcttctcagcattcctgatggaactgctcagcggtcacggccccttgcacgcactcgggttgctctgat

SEQ ID NO: 289103 - DNA, 769 bp, Unknown
  Bacterial polypeptide expressing nucleotide sequence isolated from the Sargasso Sea
atgaaaccagaccatccaaaaattaattacgggaagacgggtattttaattgtaaatcttggtacacctgattcaacaagttggttagacataagaaaatatttaaaagaattcttatcagacagacgagtaattgaggttaatcctttaatttggcaggtaatacttaacttatttatacttacttttagaccttctaaaacagcaaaagcttataaagaaatatggatgaaagataaagacatgtctccattaagatactttacagaaagccaagcagaaaagttatcttatcaaattggtgatgaaaatttaatcgtcgattttgcaatgagatatggaaatccaagtattaaaagcaaaatctatggactccaaaaaaaaggttgtgaaaatttaattgttcttcccttatatccacaatacgcagcggcaacgacagcaacagtttgcgatgaagtttataggactttaatgaaaatgaggtggcaaccaaatctaaaaataattcctcattatgagtctgagccattatacattgaggcgatcaaaaatagtattttaaaaaagataagtgaaattaattggaagcccgatttaataattgcatcttatcacggaatcccaaaaaaatattttgataaaggagatccttatcattgttattgtcataaaactaccaggttaatctctgaaaagtttacagatatagaaattaaaactacttttcaatcaagatttggcccccaagaatggttacagccttata

SEQ ID NO: 289104 - DNA, 1003 bp, Unknown
  Bacterial polypeptide expressing nucleotide sequence isolated from the Sargasso Sea
atgaacaacaatcacccaaaaataaaccatggcaaaacaggcgttttgctggttaacctgggcacaccagattctacaagttggcttgatattagaaaatatttaaaggaatttttatcagataatagagtaattgaagttaaccctattttatggaaagtaatattaaatctttttatattaaattttagaccatccaagacagcaaaggcatataaagaaatatggatgaaaaaagaagatatgtcacctttgagatattatactttgatgcagtcaaaaaaattatcagaaaaattaacaggagaaaagttaatagttgattatgcaatgagatatgggaacccaagtataaaaagtaaaataaaaaaacttcatgaattgggctgtgaaaatatgatagttttacctctatacccacaatacgcagccgctacaacagctacagtttgtgatgaagtttataaaactttaattagtatgaggtggcagccaagtttacagattattcctcattacgagtcagaaccattatacattgatgctcttgtaaacagtttaaacaaaaaaatttctgaaattaaatggagacctgatttgatcttggcttcctaccatggaataccaaaaaaatactttgaaaaaggtgatccttaccattgttattgccaaaaaacatctcgtcttttaacagaaaaatttaataagatcccaataaagacatgttttcaatctagatttggaccccaggagtggctccaaccatatactgataaaactttagaaagtcttcctaaagaaggtaaaaaaaatatactagtaatttgtcccggattttcatcagattgcgttgaaactttagaggaaatactaattcaaggaaaaaaaagtttcttaaataatggaggggagaattttgatttggttccctgtttaaattataacgaagatcatattattttacttcaatacctagtaaaaaaatatttagtagaaaaatgaa

SEQ ID NO: 289105 - DNA, 691 bp, Unknown
  Bacterial polypeptide expressing nucleotide sequence isolated from the Sargasso Sea
tttgattgttgattatgcaatgagatatggaaatccaagcataaagagcaaaatgctagatttacaagaaagtggatgtgaaaacattataatacttcctctgtatccacagtatgcagcagcaacaacagctacagtttgtgatgaagtgtacaggacgctaatgaaaatgagatggcagcccagtcttcaaattatacctcactatgaatctgaaccactttatattcaagcaattgtgaattctataaataacaaactgagcagcattaattggaaacctgatttaatattagcatcctatcacggtataccaaaaaaatattttgacaaaggtgacccataccattgctattgtcacaaaacttctagattgattaaagaaaagtttaataaagacatacccattttaacaacttttcaatcaagatttggtccacaagaatggcttcagccttatacagataaaactttggaaaatttacccaaagaggggaaaaaaaatattttagtaatttctcctggtttttcctctgattgcgttgaaacccttgaggaaatttctattcaaggaaaagaaagctttttagagtctggcggtgaaaaatttgatacaattccttgcttaaatgataatgaggatcatataaaattattggtgcacttaatcaacaagagcataagaaaatga

SEQ ID NO: 289106 - DNA, 633 bp, Unknown
  Bacterial polypeptide expressing nucleotide sequence isolated from the Sargasso Sea
gattaaacaaactaaaagaattaggttgtgaaaatatagttgttcttccattataccctcaatatgcagcggctaccacagcaacagtttgtgacgaagtatatagatctctaatgaaaatgagatggcaacctagtcttcagattattcctcattatgaaagtgaaccactatacattcaagctttaattaaaagtatagaaaacaaaattagagaaatagactggaaacctgagcttataatttcttcatatcacggtattcccaaatcttattttgacaagggagatccttatcattgttattgtcacaaaaccacaagattaatcaaagaaaagtttaataaaattgaaattcaaacaacatttcaatctagatttggaccccaagaatggttaactccatacacagatagaacactcgagtctttgccgggaaaaggagttaagaatttattagtaatatgccctggttttgcatctgattgcgttgaaactctagaagaaattaacatacaaggcagagaaagctttttacaaaatggtggagaaaaatttgatttaattccatgtttaaatgatagttctgatcacattgaattatttgaagaattaataaaaagatatatataat

SEQ ID NO: 289107 - DNA, 986 bp, Unknown
  Bacterial polypeptide expressing nucleotide sequence isolated from the Sargasso Sea
ggagcaccctcctgttaagcacggaaagaccggcgttttaattgttaatttaggtaccccagattcaactagctggtttgatatcagaaaatatttaaaagaatttctctcagacaaacgcgtaatagaagtaaaccctttaatttggcaagtaatcttgaatatttttattttaaatttaagaccatccaaaacagctaaagcatataaagaaatatggatgaaaaatgaaaacatgtcaccacttttgtattatacaaaaaaacaggcagaaaaattatcaagttctatcttagaaaaagacattattataaattttgcaatgaggtatgggaacccaagtataaaagatagaattaaccaattacatgctgaaggctgtgaaaatttaacaattttaccattatatcctcaatatgctgcagcaacaacagcgacagtatgtgatgaggtttatagggttttaatgaagatgaggtggcaaccgtcactaaaaataataccacattacgaatcagatccattatacattgatgctttggtaaactctttaaatagaaaaattaaagaaataaattggacaccagatttgataattgcttcctatcacggaataccaaaaaagtattttgataaaggtgacccctaccattgttattgtcacaaaactacaagacttatctcagaaaaatttaattcaataaaaataaaaacaacatttcaatcaagatttggaccacaagaatggcttcaaccttatacagacaaaacattggaaaacttgcctaaagaaggtttcaaaaatgttcttacaatatgtccaggttttgcttcggattgtgtagaaactcttgaagaaatattaattcaaggaaaagagagctttattgagtctggaggagaaaattttgatatggttccttgtttgaatgataatgatgaccacatctctttattcgaatctttaattagaaaaaatatttaaa

SEQ ID NO: 289108 - DNA, 1024 bp, Unknown
  Bacterial polypeptide expressing nucleotide sequence isolated from the Sargasso Sea
atgatattaaaaccaactgatcatcctaaaacgcatcatgataagaatattggagtactccttgttaatctagggacacctgaaaatactgaaactaaatctattagaatttatttgaaggaatttttgtctgatcgacgtgtaatcgacgttcctaaaattctttggtggttgatacttaatctaattattctaaataccaggccgaaaaaaacagctgcagcatataaaaaaatttggttaaaaaatgatcctgatggaagcccacttagaaagataactaggttacaatctgaaaaattgcaaaagaaaattaataaaaaaaatgtaattgttgattatgctatgcgttatggcagtccatcaattaagtcaaaattatcagaattaaaagaaaaaggctgtgatagaataattatactaagtttatatccacaatactctggtcctacaacagctactgtgaatgatgaagtgtgcaaatggatgttaagtcaaaaatggcagccctctattaggattgcatcaccctattttgatacacctgaatatattaattcaatatctaagagtattttaaattcatttaaaaaagatggaaccccagatttattacttttatcttttcatggtgcccctaaaagatatttaattgaaggagacccttatcattgtcaatgtgctaagacaggtaggcttataaaagaaaaattaaagatacatgataataaattcatgataagttttcagtctcgatttggaagtgagccatggctccaaccatatacagatgaaactttagaaaaacttggaaataaaaatattaaacatctttctgttataactcctggtttttcagctgataatattgaaacattagaggaaattaatatggaaggcagagaagaatttttggaatccggaggaaaaaagtttacttatattccttgtttgaatgatacaaaagaaggcatggaccttttacataaacttgctttaaaagaacttgcaggatggatataaa

SEQ ID NO: 289109 - DNA, 1024 bp, Unknown
  Bacterial polypeptide expressing nucleotide sequence isolated from the Sargasso Sea
atggcttcatttaaaggtaataaactctacgttcatggctctggtcttaagacaggtattttgatcacaaatttaggaacaccagatgaaccaactaagtcgtctttaaagacttatctaaaacaatttctatcagatgaacgtgtcatagaaacaccaaaagctatttggtggcctattctcaatggaatagttttaaatactcgaccagcgaagtcagctaaaaattacaaatctgtttggacagaggaaggttcacctcttctattccacacaaaaaaccaattatcgaaaataaaagaatttattaataagaaatatcaaaatatcgtatttgatattggaatgcgttatgggaatcctagcatctctaagggtttaaataatcttagaaatcaaaattgtgatcgtattattattttacctttataccctcaatattgtgcggctacaacaggctcaacgtttgatgctgttgcagaagaattaaaaagttggcgttgggtaccatctcttcgttttattggaggatattacgaaaatgaactttatattaaagctctaaaaaatagcattgaagaattttggactaaaaattcaaaaccaaaaaaaatcatatttagctatcatggtgttccaaaaaaatatttagataaaggggatccgtatcattgtttttgcagaaaaactactaggctggtggcagagaccatgggcttaccagaggaaagttatatgaccacatttcaatctagatttggaccagcagaatggcttcaaccttacacagataaaactatagagagcttagcaaaaaatggtacagaccacattcatgttataagtcctgctttttcctcagattgtctcgagacaatagaagaacttaacgaggaaaatagagaaatattcatggaaaatggtggaaaggaatttggatatattccttgtctaaatgatcgagaagatcatatactcctactcacttcgttgatagaaaacgaactgcatgggtgggtatgag

SEQ ID NO: 289110 - DNA, 1003 bp, Unknown
  Bacterial polypeptide expressing nucleotide sequence isolated from the Sargasso Sea
atggatagcaaccatcccaaagtaaattttggtaaaactggtgttttattggtcaaccttggaacaccagactctacaggatggtgggatattagaaaatatttaaatgagtttttgtcagatagaagagtaatagaggtaaatccttttttatggaaaattattttaaatttattcattcttacttttagaccatctaaaacggcgaaagcatataaagagatatggatgaaagaggagaatatatcgcccctacggtattacactattaagcaagccgaaaaagtgagatctattatatccaatgaaaacttgattgttgattatgcgatgagatatggaaacccaagtattaagagtaaaatgttagacttacaagagagcggatgtgaaaatataatcatacttccgttgtatccacaatatgctgcagcaacaacggccacagtttgtgatgaagtttataggacgttaatgaaaatgagatggcagccaagtcttcaaattatacctcactatgagtctgaaccgctttatattagagcaattgtaaattctataaatcataaactgaacaacattagctggaaacctgatctaatattggcttcttatcatggcataccaaaaaaatattttgataaaggtgatccataccactgttattgtcacaaaacctctagattaattaaggaatctttcaataaagacatccctattttaacaacttttcaatcaagatttggtccccaagaatggcttcagccttatacagataaaactttagaaagcttacccaaagaaggaaaaaaaaatattttagtaatttctcccggcttctcttctgattgcgtcgaaacacttgaagaaatttctattcagggaaaggaaagctttttagacgccggaggagaaaaattcgatacaattccgtgcttaaatgacaacgaagatcacataaaattattagtgcacttagttaataaaaacataggaaaatgaa

SEQ ID NO: 289111 - DNA, 637 bp, Unknown
  Bacterial polypeptide expressing nucleotide sequence isolated from the Sargasso Sea
taaaattaaaaagatgcaaaataaaggatgtgaaaatttaataattttccctttatatccacaatatgcatcaccaaccacggctacagtttgtgacgaggtttttagagttttgatgaaaatgaggtggcaaccagcgcttaaaatagttccacactatgagtcggaacctatgtacattgatgctattgttaaaagtattaataaaaaaataaatgaaatagattggaaaccagacttaatcgttgcgtcttaccatggtataccaaaaaaatactttgaaaaaggtgacccttaccactgttattgtcaaaaaactacaagactgatttctgaaaagttgaaacaaatcaaaataattactacttttcaatcccgttttgggccccaagaatggttgcaaccttataccgataagacacttgaaaaattacccaaagaaggtgcaaaaaagatactggtaatttcaccaggttttgcctccgattgtgttgaaactcttgaagaaatttcaattcaaggcaaagagagcttcgaaaaatctggaggagaaaaatttggatctataccatgtcttaatgataatgatgatcatatagaattattggagcatcttgtaagaaaaaatataggttaa

SEQ ID NO: 289112 - DNA, 846 bp, Unknown
  Bacterial polypeptide expressing nucleotide sequence isolated from the Sargasso Sea
gatgtcggcccattccttatacaatcttttttctgatacagaaattatcaggacaccattccctgtttttcaaaagccactagcttggttaattagcactcttaggagtactacttcacaacaggcctacctttccataggtggaggttcacccatcagaaggataactgaacaacaagcaagagaattacaatctaaattaagggacaaggggtttaatgccactacctacatcgctatgaggtattggcatccttttacagaatctgcaattgctgatatgaaagcagatggcatagatcaagttgttgtaatacccttgtatccgcatttttcgataagtactagtggttcgagctttagagaattaaaaaaattgcgagattctgatgatgaatttaagaaggttccaatgagatgtgtaaggagttggttcagtcaatcaggttatttaaagtctatggtcgaattaatttctgaacagatttcactttgtgaatcaccttcaaaagcccatatatttttcacagctcatggagttcctaagagttacgtagaggaagctggagacccttacaagcaacagattgaagattgttctttattaattataaatgagttggaaaaatgtttaggtcatagtaaccctcatacactttcttatcaaagtagagttggtcctgttgaatggttgaagccttatacagaagaagtgttagctgatcttggaaggtcaaatgttaatgatctgattgtggtccccataagtttcgttggagagcatatcgaaacattgcaagaaattgatattgaatataaagaaattgctgaaaaggctggtattaa

SEQ ID NO: 289113 - DNA, 991 bp, Unknown
  Bacterial polypeptide expressing nucleotide sequence isolated from the Sargasso Sea
aatggaaaaacatcctgaaataaagtacgggaagactggagttttaataattaatttaggaacgccagattccacaaaatggttagatgttagaagatatttaaaagagtttctatcagacagaagagtaattgaggtaaacccaataatttggcaagtaatacttaatctttttattctcaattttagaccatcaagaagtgccaaggcttacaaagaaatatggatgaaagaagaaaatatatctccattactgtattatactaaaaaacaagcagaaaaattatcaaaatctttttcaaatgaaaatctgtttatagattttgctatgagatatggaaacccaagtattaaaggtaaaataaaaaaattaaatgaagaaggttgtgaaaatcttataattttacctctttatcctcaatatgctgccgcaactacagcaactgtatgtgacgaagtatacagaactttaatgaatatgagatggcagccgtctttgaaaattattccacactatgagtcacatccattatacgttgatgctttagtaaactcaataaatgccaaaataaaaaatataaagtggaagccagatttaattttagcttcctatcatggaataccaaaaaaatattttgataagggagacccatatcattgttattgtcataaaactacaagactgatttcagaaaaatttaaagctattgaaattaaaacaacctttcaatctagatttggcccacaagagtggcttcagccatatacagataaaactttagaaatcttgccaaaggaaggaaaaaagaatgtccttactatatgcccgggcttttcctctgattgtgttgaaactttagaggaaatattaatccagggtaaaaaaagctttatggattcgggaggtgagaattttgatatgataccatgtttaaatgataatgatgatcatataaatctattaaaaaacttaattcaaaaaaatatttaa

SEQ ID NO: 289114 - DNA, 844 bp, Unknown
  Bacterial polypeptide expressing nucleotide sequence isolated from the Sargasso Sea
ttttgtggcattaatattgaatgttttcatacttaacttaagaccgtctaaaactgcgaaggcttacaaagaaatatggatgaaaaaagaaaatatgtcgcctcttttatattatactcagaaacaagcagagaaggtaggaaatctaatatcaaatgaaaatttaattatagattttgcaatgagatatgggaacccgagtataaaaagtaaaatcagaaagttacatgatgatggttgcgaaaatctcgtaattttacctctatacccgcaatatgcagcagcaaccactgcaacggtgtgtgacgaggtttatagaactttgatgtctatgagatggcagccttctttaaaaataataccacattatgagtcagatcctttgtatatcgatgcacttgtaaattctattaattctaaaataagtgaattaaattggaagcctgatctaattttagcatcttatcatggaataccaaagaaatactttgacaaaggcgatccatatcattgttattgtcataaaactacaaggttaatatctgaaaaatttaaatcaattgaaattaaaacaacttttcaatctagatttgggccacaagaatggcttcagccatatactgataaaactttagaaaatttaccaaaagaaggaaaaaaaaatgttttagctatatgccctgggtttgcatcggattgtgttgaaactttagaagaaatattaattcaaggaagagaaagctttatggaatctggtggggagaattttgatatgataccttgtctcaatgatagtgaagatcacataaatttaataaatcatttaattaaaagaaacatttaa

SEQ ID NO: 289115 - DNA, 688 bp, Unknown
  Bacterial polypeptide expressing nucleotide sequence isolated from the Sargasso Sea
agaaaatacagtaattgattttgcaatgagatatggaaacccaagtattaatagtaaaatctcaaaattacacgaacaaggttgtgaaaatttagtaattttaccgttatatcctcaatatgctgctgcaacaacagcaactgtttgtgacgaagtgtacagagtgttaatgaaaatgaggtggcaaccatctcttaaaataattcctcattatgagtctgattctttgtatatcgatgcacttgtaaattccattaacaaaaaaattagtgagataaattggaaaccagatttaataattgcttcttatcacggtattccaaaaaaatattttgataaaggtgatccttatcattgttattgtcataaaacgaccagactcatttcagaaaagtttcattctatagaaataaaaacaacgtttcaatctaggtttggaccacaagagtggctacagccttatacagacaaaactttagaaaatttacccaaagaaggtaaaaaaaatattcttacaatatgtcctggtttttcttcagattgtgttgaaactttagaagaaatattaatacaaggcaaagaaagtttcattaattctggtggcaaaaattttgatataataccttgcttaaatgatagcgatgatcatattcttttactaaaatctttaattgaaagaagtatttaa

SEQ ID NO: 289116 - DNA, 1036 bp, Unknown
  Bacterial polypeptide expressing nucleotide sequence isolated from the Sargasso Sea
aatgaaaaaagctgtaattttatttaatctaggtggaccagataaattagaaaacgttgagccttttctttttaatttatttaatgatcctgcaattttaaacttacctggtttttttagatatccattagcaaaattaatagcaaacagaagagctccaacagcaaaaaaaatttatgaagaattgggtggttcttcgccaatcttaaagcttacagaagagcaagcatctgctttagagtcaaaattaaatcatgatgatgatttatctgaatataaatgttttattgttatgaggtgttggcacccaagagcaacaaatgttgttaaagatgtaattaattacaatccaaacgaagtgattttaatgccactgtatcctcaatattccgcagcaacctccggctcatcaataaaagaatggcatgatatttgtgcacaaaataattttaaagtgaaaacctctacaatctgttgttatcctactgatgaaaattttgttcaagcacacaaagatgaaatagtgaaaaaaatttccaatttagaaaactttaaattaatattttccgcacacggattgccagaaaaaaatattaaaaaaggtgacccatatcaatggcaagtagaacaatctgttgaaaaaattgttaagtctctaaatattaaaaatttagattggatattaagttatcaaagtcgagttggaccattaaaatggattggtccatcgacagaagatataattatagaaaattcaaaactaggaaaacacattgttttagttcctatagcatttgtatcagaacattccgaaactttagttgagctagatatagaatataaagaattagcagatcgaaatggttgtaaaaattattcaagagtaccggcacttggtacaaatgaaaattatataaaatcaatttctaatttaataattaaaaaacaaaattataattttaatggagatctttttcctccgaagatacaatgtccaaatcaatttaaaaaatgtccttgtttaagttatgaatag

SEQ ID NO: 289117 - DNA, 732 bp, Unknown
  Bacterial polypeptide expressing nucleotide sequence isolated from the Sargasso Sea
ttactgaaatgcaggctcacagattatcagaccaaattaaagaagaaaaaataataattgattatgccatgaggtatggaaatccaagcattaaaactaaaatacatgatttacaaaagttaggttgtgaaaacttagttatctttcctctttacccacaatatgcagccgcaacaactgctacagtttgtgatgaagtatacagaactttaatgaagatgaggtggcaaccaaatctaaagattattcctcattatgagtctgaaccactttatattgaagcaattaaaaatagtatattaaaaaaagtagatgaaataaattggaaaccagatctattagtggcttcatatcacgggatacctaaaaaatattttgacaaaggggatccctatcattgctattgtcataaaacaacaagactaatttccgaaaagtattcaaacactaaaattattactacatttcaatctaggtttggtccacaagaatggctacaaccatatacagacaaaacactcgagagtcttccaaaagaaggaaagaaaaatattctggttatttgtccaggtttctcatctgactgcgtagaaactctagaagaaatttcaatacaaggtaaggaaagttttatgaaatctggtggtgaaaattttgagatgataccatgtttgaatgatagtgatgatcatatatcattaataaaacatttagttttagaaaatatttaaa

SEQ ID NO: 289118 - DNA, 1027 bp, Unknown
  Bacterial polypeptide expressing nucleotide sequence isolated from the Sargasso Sea
tatgaaatattttggtgaaaaaaattatgagcatggaagtaaggataaaactggcgttttaatcacaaacttaggaactcctgatgcacctgatgcaaaatctctaagggtttatttaaatcaatttctttcagatccaagagtaatagaaatacccaaatttttgtggcaaattattcttaaaggcataatacttcaagtaagaccaagaaaatctgcagctaactataaaaaaatttggactgataacggctctccactactagacatatctaataaacaactaagcggaattaaaaaaatactgtcatcaaaataccctaatattgaatttgctctaggaatgcgttacggcaatccttcaattgatagtgcccttaaggatttgcaaagtagacaagtaagacggctcttagttcttcctttatatcctcaatattgcgctgctactacgggcagtacatttgatgaggttacaaatatcttacaaaaatggagatggattccagaactaagaattattaatcaatattttgaagaagaagaatatttggatgctctagttagctccattgaaactttttggaaaaagaataacaaacctcaaaaaattgtgtttagttatcatggtattcctaaaagatacctcacaaatggtgatccgtatcattgcttttgtctaaaaacgactaggttagttaaggaaaaaatgaaactcaatgatgatgaaattatcacaacttttcaaagtcgatttggaagagaagagtggttaaaaccatatacttctgaaactctaaaagaactgccaggccaaggtgtaaaaaatatacatatcatctcccctggttttagcgcagattgtttggaaactcttgaagaacttgaagaggaaaacagagaatattttatggaggctggtggtgaacaatatgaatatattccatgtctaaatgataatgataagcatttaagttttatttctaatcttgtgttaaaacatacccaaggctggaatatttcatga

SEQ ID NO: 289119 - DNA, 967 bp, Unknown
  Bacterial polypeptide expressing nucleotide sequence isolated from the Sargasso Sea
aaaacaggtttattactagtaaatttaggaacaccagattccacaagctggtgggatataagaaaatatttaaaagaatttttatctgacaaaagagttatagaagtgaatccaattttatggaagatcattttgaatgtttttattttaaacctccgtccctcaaaaacagccaaagcctacaaagaaatatggatgagggacaaaaatatatctccacttagacattataccgagatgcaaacaaaaaaacttagcgaaaaattagacaacgacaaggtcataacagattttgccatgagatatggttcaccaagcataagaagcaagatgaaaaagcttcaaaacaatggctgtgaaagaataatcgttattcctttgtacccacagtatgcagctgcaacgaccgctactgtttgtgatgaagtttttagatctttgattgacatgaggtggcaacctagtttgcaaattataccccattatgagtcagagcctctttacattagcgctcttgagaaaagtttaaataagaaaatttctgatataaattggaaaccagatttaatagtggcctcctaccatggtattcccaaaaaatattttgacaaaggagacccttatcactgttactgccaaaaaacatcaaggcttctatcagagaaatttactaaaattcctatccaaacaacgtttcagtctcgatttggacctcaggaatggttgaagccttatactgataaaaccttggaaagtttaccgaaagaaggaaagaaaaatattttagtaatatgtccaggtttttcatctgactgcgttgaaactttagaggaaatatctatacagggcagggaaagttttttaaacaatggtggaaagaattttgatgttgtgccatgtctaaacgatggtaaagatcatattgacctacttgaacacttggcaaaaaaatatttggtaaaatgaa

SEQ ID NO: 289120 - DNA, 994 bp, Unknown
  Bacterial polypeptide expressing nucleotide sequence isolated from the Sargasso Sea
atgacatcagaccacccaaaagttaattatggaaaaacaggggttttaattataaatcttggtacacccgattccacaagttggctggatatacgaaaatatttaaaggaatttttatcagatagaagagttatcgaggtaaatcctcttatttggcaagtaattcttaacttatttatacttactttcaggccatcaaaaacagctaaagcctacaaggaaatatggatgaaagacaagaacatgtcaccacttaggttttttacagaaagccaagcccataaattatctgagaaaattggcaatgaaaagttgattgttgattttgctatgaggtatggaaatccaagtattaaaaacaaaataaatgatcttcatgaaaaaggttgcgaaaatttaattgtgctacctctttatcctcaatatgctgcagcaacgactgcaactgtatgtgatgaggtttatagaacccttatgaaaatgaggtggcaaccaaatttaaaaataattcctcattatgagtctgaacctctttatatagatgctattaaaaatagtattgtaaaaaaaattaacgaaattaattggaaaccagacttaatagtagcttcgtatcatggaataccaaaaaaatattttgaaaagggagacccttatcattgctattgtcataaaaccactagacttatctctgaaaaatattcagatattaaaattatgacaacatttcaatcaagatttggtcctcaagaatggctacaaccatatacagacaaaacttttgaagccttgcccaaagagggaaaaaaaaatattctagttatatgtcctggtttttcatctgattgtgtagagactttagaagaaatatccatccaagggaaagaaagttttatcaaatcaggtggtgaaaactttgaaatggtaccttgcttaaatgataatgaagatcatatttctttattcaaacatcttatttcaaaaaatttataat

SEQ ID NO: 289121 - DNA, 1072 bp, Unknown
  Bacterial polypeptide expressing nucleotide sequence isolated from the Sargasso Sea
tatgcgcttcgacctcgagcggccttcacagaatgctacgtcacaccgtgtcgccgtgctgctgatcaatctcggcacgcccgacgcgccgacgccgcgtgcagtccgtcgctatcttgcgcagttcctgtccgatccccgcgtggtcgaaattccggcgctgctctggcaagtgatcttgcggttgttgattctgccgttccgcagccgcgcgtcggcaaagaagtacgcggccgtgtggatgccggagggctcgccgctgcgtgtcttcacggagaagcaggtggagggtttgcgccacctgttgcaattgaacgactacacggtgctggtcgactacgccatgcgctacggcacgcccggtattccggccatgctgaaccagttgaagctggctggcgcggagcgcgtgctgctggtgcccatgtatccgcaatactcgtcgtcgaccacggccacggctttcgacgacgctttttcggccctcaagcgcatgcgcaatcagccggaaatccgcacggtgcggcagtacgcggatcatccggcgtatatcgccgcgcttgccgcccaagtgcatcaatactggcatcagcacggccggccggatttcgcggcgggagacaagctggtgctgagctttcacggcgtgcccaagcgcacgatggatctcggcgatccgtaccacgagcaatgtcagcagaccggcgcgttgttgatgcaggcgctgggactgacgcaggtggagtgccgcgttacgtttcagtcgcgcttcggcaaggccgaatggctgcaaccgtacactgcgcccaccctgaaggaactcggtttggcaggcgtgcgccgagccgacgtgttctgtccgggctttaccgccgattgccttgaaacgattgaagaaatcggcatggaagtacgcgacgagttcctgcatgcgggtggcaaggagtttcatcggattccctgcgtgaatgcctcgcagccatggatcgccgcgctaggcgaaatcgtcgcccagaacctgcagggctggcccgtgcaagcggtgccggtgccgcatacgacaggggcttaa

SEQ ID NO: 289122 - DNA, 770 bp, Unknown
  Bacterial polypeptide expressing nucleotide sequence isolated from the Sargasso Sea
ttggatgaaaaacgagaacatgtcaccccttctctattatacccaaaaacaaagcgaaaagatttctcaattattatctaaagaaaatttaattttagattttgctatgagatatggaaatccaagtattaagagtaaaatttataagcttcaaaaggaaggttgtgaaaatttaataatattacctttatatccacaatatgctgcagcaactactgcaactgtttgtgatgaagtttatagaactttgatgcaaatgagatggcaaccatctttaaaaattatccctcattatgagtctgatccgctctacatagatgcattagttaaatctattaataaaaaaataaacgaaatatcctggaagccagatgtaataattgcctcatatcacggcataccaaaaaaatattttgataaaggtgacccttatcattgctactgtcataaaacgaccagactaatttctgaaaaattaaattctatagaaatcaaaacaacctttcaatccagatttggaccacaagagtggttgcaaccttacacggataaaaccttagaaagtttaccaaaagaaggaaaaaaaaatattctcacaatttgtcctggttttgcctctgattgtgtagaaactttagaggaaattttaattcaaggtaaagaaagctttttaaattctggaggtgaaaactttgatatgatcccatgtttaaatgacaatgatgatcacataaatttattaaaatctttgattgaaaaaaatatttaaa

SEQ ID NO: 289123 - DNA, 1000 bp, Unknown
  Bacterial polypeptide expressing nucleotide sequence isolated from the Sargasso Sea
atggaatttgataataatcacccacctattaaatttggaaagactggcgttcttatcattaatttaggaaccccggactctacaagctggctagatattagaaaatatttaaaagagtttttatctgacaaaagagttattgaagtaaatcccataatttggcaattaattttaaatatattcatattaacttttaggccatccaaaacagcaaaagcttataaggaaatttggatgaagaatgaaaacatgtctccacttttatattatactcaaaaacaaagtgaaaaaatttccagatctatatcaaaagaaaatttaataataaattttgctatgagatatggaaacccaagtattaaaagtaaaatacacaaacttaaggaagaaggttgtgaaaatttagtgattctgccactttatccacaatacgcagcagcaaccacagcaacggtgtgtgacgaagtttatagaactttaatgcaaatgagatggcaaccttctttaaaaatcattcctcattacgagtctgattcactctatatagatgcattggttaaatctattaataaaaaaataaatgaaattaattggaaaccagatttaataatcgcctcatatcacggcatacctaaaaaatattttgataaaggtgacccttatcattgttactgtcataaaacgacaagactaatttctgaaaaatttaattctatagaaatcaaaacaacgttccaatccagatttggaccacaagagtggttgcagccttacacagataaaactttagaaagtctaccaaaagaaggaaaaaaaaatatccttacaatttgccctggttttgcgtctgactgtgtagaaactttagaggaaattttaattcaaggtaaagaaagttttttaaattctgggggtgaaaactttgatatgatcccgtgtttaaatgataacgatgatcatataactttattgaaatctttaattgaaaaaaatatttaaa

SEQ ID NO: 289124 - DNA, 1066 bp, Unknown
  Bacterial polypeptide expressing nucleotide sequence isolated from the Sargasso Sea
catgcgtttcgatcttgagccgccttcgagcaccgcggctgcccatcgcatcggcgtgctgctgatcaatctcggcacgcccgacgcacccacgccgcgcgcggtacggcgctacctggccgaattcctgtcggatccgcgggtcgtcgagattccgcaggctatctggcaggtgctgctgcgcacggtgatcctgccgctgcgcggccgcgcgtctgcaaagaaatacgcagccgtctggatgcccgagggctcgccgctgcgcgtgtacacggaacgccagaccgacagcgtgcgacatctgctcgtgtcgaacggctatcaagtgcaggtcgactacgcgatgcgctacggcagcccgaacatttcgcacgcgctcgcgcagttcaagcgcgcgggcgtcgagcgcgtgctgctgatgccgatgtacccgcaatattcggcgtcgaccacggccacggccttcgacgccgccttcgaagcgctcgcgcgcatgcgcaaccagcccgaggtgcgcacggtgcggcactacgccgaccatccggcctatatccatgcgctggccgagcaggtgcgccagtattgggcgcagcacggccggcccgacttcgcggccggcgacaagctcgtgctgagctttcacggcgtgccgaagcgcacgctcgacctcggcgacccctatcacgaccagtgccagcaaacgggcgcgctgctgatggccgcgctcgggctgtcgaccaccgaatgccgcgtcacgttccagtcgcgcttcggcaaggccgaatggctgcagccttacaccgcgccgacgctgcgcgagttcggcgaggccggcgtgcggcgggccgacgtgttctgtcccggtttcacggccgactgcctggagacgatcgaggagatcggcatggaagtgcgtgacgagttcctcgccggcggtggcaaggtgttccaccgcattccatgcctgaatggcgcgcccgcgtggatcggtgcgctcggcgagatcgtcgccgagaatctgcagggctggccggtcggggccgcgcagcccgaaaccgtgggttga

SEQ ID NO: 289125 - DNA, 1027 bp, Unknown
  Bacterial polypeptide expressing nucleotide sequence isolated from the Sargasso Sea
tatggttaaatatataggtgaaaaagattatgagcacgggagtaaagaaaaaattggtgttttaattactaacctaggcactccagatgctccaaataaaaaagaactaaaagtttatcttaatcaatttttgtcagaccctagagtaatcgaattacctaaaatcttatggcaaattatattgaagctagtaattttacaaataagaccatcaaagtcagcagaagcatataaacaaatttggactgataagggttctccacttttagatatcgcaaacagacaactaaataaaatccaatcatctttttcttcaaaaaatgaaaatatagtttttgaagttgggatgcgttatggcaatccatctattccagatgctttgttaaaacttcaaaaaaaacaagtaagaagattattagttctacctatgtatccgcaatattgtgctgcaacaacaggtagtacatttgatgaagtaacaaatgtattgcaaaaatggcgttggatacctgaaatgcgttttatcaatcagtactttgaagaaaaaaattatattgaagcattgtcaaattcaataaagtcattttggaaaaaaacttcaaaaccacaaaaaattatttttagttatcatggtataccaaaacggtatttgactaatggtgatccgtatcattgcttttgtcttaaaaccacaagactggtcaaagaacatatgggattatccgatgatgagataatgactactttccaaagtagatttggaagagaggaatggttaaagccatatacaagtgaaacattaaaagaattaccaaaacaagggattaaaaatatacatataatatctcctggttttagtagtgattgtcttgaaacacttgaagaacttgaagaagaaaataaagaatattttatggagtcaggtggagaaaattatcattatataccttgcttgaatgatcacgatgatcacatagacttttttgtaaatctgataaaaaaacatactaaaggttggtcattatga

SEQ ID NO: 289126 - DNA, 997 bp, Unknown
  Bacterial polypeptide expressing nucleotide sequence isolated from the Sargasso Sea
atgattaaagatcatccaaaagtgcaattcggtaaaacaggagtcttaattgtcaatcttggtactccagattcaacaagttggtttgacataagaaaatatttaaaagaatttttatctgatagacgagttattgaagtaaaccccatattatggcaaattattcttaatttatttattttaaatttaaggccttccaaaacagcaaaagcttataaagagatttggatgaaagatgaaaacatgtcccccttaaggtattatacactaaaacaggcagacaaacttactaaagagataggaaataaaaatttactagttgattatgctatgcgttatggaagtcctagcattaagtctaaaattcatagtctcaaagaaaatggatgtgaaaacctaattgttttacccttatatcctcaatatgcagcggctactacagcaacagtatgtgacgaagtttatagaactttaatgaagatgagatggcaaccaaacttacaaattatacctcactatgaatcagaaccactttatattgatgctttaattaacagtttgagaaaaaaaataaatgaaattagctggaaacccgacctggtaattgcatcttatcacggtattccaaaaaaatattttgataaaggagatccttaccattgttattgtcataaaactactaggttgttatctgaaaaattcaaagaaataccaataaaaactacttttcaatctagatttggcccacaggaatggttgcaaccttacaccgataaaacaattgaaaaattgccagaggaagggaaaaaaaatattttagttataagtccggggttttcatctgattgtgtagaaacattggaagaaatatctattcaagctaaagatacttttttaaaatcaggtggattaaattttgaaatggtgccttgtcttaatgacagtgatgatcatataaaactattaaaatttttaattaccagaaaaaatctttaat

SEQ ID NO: 289127 - DNA, 994 bp, Unknown
  Bacterial polypeptide expressing nucleotide sequence isolated from the Sargasso Sea
aatgacaccagatcatccaaaaattagttatggcaagactggtattttaattattaatcttggtacacctgactctacgagttggtttgatataaggaaatatttaaaagaattcttatcagacagacgagtaattgaagttaatcctttaatttggcaggtaattcttaacttgtttatacttacctttagaccttctaaaacagctaaagcctataaagaaatatggatgaatgataaaaatatgtctcctttaagatattttacagaaagacaagcagaaaaactatcgaatcaaattggcaaagaggatttaattgtagatttcgctatgagatatggaaatccaagcattaaaagtaaaattcatggtcttcaaaaaaagggttgtgaaaacttaattgtgcttccattgtatccacaatatgcagcagcaacaacagcaacagtttgtgatgaagtttatagaactttaatgaaaatgaggtggcaaccaaatattaaaataatccctcattatgaatctgaaccattatacattgaggcgattaaaaatagtattttaaaaaagataagtgaaattaattggaagcccgatttaataattgcatcatatcatggaattccaaaaaaatattttgataaaggtgatccttatcattgttattgtcataaaactactagattgatttcagagcagtattcagatattgaaataaagaccacttttcaatctagatttggaccacaagagtggctgcaaccttacacagataaaacttttgaagctctacctaaagaaggtaaaaaaaatattctggttatttgccctggattttcatctgattgtgtagaaaccctagaagaaatatcgatacaaggaaaagaaagttttattaaatcaggaggtgaaaattttgaaatggtaccatgtctgaacgatagtgaagatcatatttcattgttaaaacatctagttacaaaaaacttataa

SEQ ID NO: 289128 - DNA, 991 bp, Unknown
  Bacterial polypeptide expressing nucleotide sequence isolated from the Sargasso Sea
aatggaaaatcatcctgaaattaaatatggtaagactggagttttaattattaatctagggaccccagactccacaaattggttagatgttagaagatatttaaaagaatttctatcagacagaagagtaattgaggtaaatccaataatttggcaagttatacttaatctttttattcttaattttaggccatcaaaaagtgctaaggcttataaagaaatatggatgaaagaagaaaatatatctccattattgtattacactaaaaaacaagccgaaaaattatcaaaatctttttcaaaagaaaatctgattatagatttcgctatgagatacggaaatccaagtattaaaagtaaaataaaaaaattaaatgaagaaggttgtgaaaatcttgtaattttacccctttatccacaatatgcggcagccactacagcaactgtttgtgacgaagtatataggactttaatgaatatgagatggcagccatctttaaaaattattccacattatgagtcagatccattatacgttgatgctttggtaaactcaataaatgttaaaataaataatataaattggaaaccagatttgattttagcttcatatcacgggataccaaaaaagtactttgacaaaggtgatccatatcattgttattgtcataaaactacaagactagtttcggaaaaatttaaagatattgaaattaaaacaaccttccaatctagatttggcccacaagagtggcttcaaccttatacggataaaaccttagaaaacctaccaaaggaagggaaaaaaaatgttcttacaatttgcccaggcttttcctctgattgtgttgaaacattagaagaaatattaatccaaggcaaaaaaagctttatggactcgggaggcgaaaattttgatatgataccatgtctaaatgacaatgatgatcatataaatttactaaaaaatttaattcaaaaaaatatttaa

SEQ ID NO: 289129 - DNA, 1114 bp, Unknown
  Bacterial polypeptide expressing nucleotide sequence isolated from the Sargasso Sea
tatgaactataaaggtaatccagaatatactcatgatagcccatcttgcacgggtattcttattacaaatttggggacaccagatgagccgaccgtaacatcggttagaaaatatttagctgaatttctatctgaccctcgtgtgattgagctacctagatatatatggtggttagtgctgcatggaataattttaagaattcgtccatctcgttcggctaaagcatacaaaaaaatttggacagaggatgggtcgcctttgttatcaatatcaaaaaaacaggctttgggattagaaaagatactaactaaaaaaattcaaggacctattaaaattgaattatcaatgaggtatggaaacccctcgatcaaatcgggacttaaaaaattgcaagaatcaaatgcgagcagaattctgatattgccgttgtatccacaatattcagctgctactactggctcaacgtttgacgcaattagtaatgaacttaagaaatggcgatggttaccggaaataagaatggtaaatcattaccatgattatcccgattatattgatgcactgaaaaatagtattcaagaatactggaaacataacggtcgccctcagaaactaatattttcatttcatggcttacccaaacattattttcttgcgggcgacccatatcactgtgagtgtcacaaaacagcgcgtttagtagctgaaaaattaaaattagatcaagatgagtggttagttacatttcagtcccgttttggcccacgagagtggttaaaaccctatactgacgagacgctaatatcgcttgctgaaagtggtgtaaaaaatatcaatattgtttgccctggattttctgctgattgtttagaaacattagaagaaatcgatatacaaaaccgtgaattcttcataaaagcaggaggcgaaaaatttaattatattcctgcgctaaatgaccacggtaatcatattgaattgctctctaacattattttaaaacatacaaatggatggtcagaattttcaaaaaattgggatcaagaaaaaatcgaaacggaattatctaaaagtaaagaacgcgcagaaaaatctatatataacaaaaattaa

SEQ ID NO: 289130 - DNA, 1177 bp, Unknown
  Bacterial polypeptide expressing nucleotide sequence isolated from the Sargasso Sea
atggataaaataggcgtcttactaatgaatttaggagggcctgaacgcattactgatgtcggcccattcttatacaatcttttttctgatccagaaattatcaggacacctttccctgtttttcagaagcccttagcttggttaataagcacgcttaggagtactacttcacaacaggcctacctttccataggtggaggttcacctatcagaaggataactgaacaacaagcaagagaattacaatctaaattaagggacaaggggtttaatgccactacctacattgctatgaggtattggcatccttttaccgaatcagcaattgctgatatgaaagcagatggcatagatcaagttgttgtaatacctttgtatccgcatttttcgataagtactagtggttcgagctttagagaattaaaaaaattgcgagattctgatgatgaatttaaaaaggttccaatgagatgtgtaaggagttggttcagtcaatcaggttatttaaagtctatggttgaattaatttctgaacaaatttcactttgtgaatcaccttcaaaagctcatatatttttcactgctcatggagttcctaagagttacgtagaggaagctggggatccttacaaacaacaaattgaagattgttctttattaataataaatgagttggaaaaatgtttagggcatagtaatcctcatacactttcttatcagagtagagttggtcctgttgaatggttgaaaccttatacagaagaagtattggcggatcttggaagatcaaatgttaatgatctagttgtggttcctataagttttgttggagagcatatcgaaacgctgcaagaaattgatattgaatacaaagaaattgctgaaaaggctggtattaaaaactttcggagagttaaggctctaaatactcatcctacttttattgaaggtcttagtgatctagtgatttcctgcttggaagggcctctagttaatatagaggaggcttctcagttgcctgaaaaagttaaactttatcctcaggagaagtggcaatggggttggaataatagttcagaagtgtggaatggaagggttgcaatgattatttttcttgtgctttttattgaacttatttcaggctctggacccctacataaattaggaatcttataaa

SEQ ID NO: 289131 - DNA, 994 bp, Unknown
  Bacterial polypeptide expressing nucleotide sequence isolated from the Sargasso Sea
aatgacgtccgaacatcctaaaattaattacggaaagacaggaattttaattgtaaatcttgggactccagattcaactgactggttagatattaggaaatatttaaaagaatttctatctgatagaagagtaatagaagtgaacccttttatttggcagataatacttaacttatttatacttactttaagaccatcaaagactgcaaaagcttataaagaaatatggatgaaagataaaaatatgtctcctctaagattttttacagaaagtcaggcagagaaattgtcaaaacaaattggtaacgaaaatttaattgtcaattttgctatgagatatgggaatccaagtatcaaaagtaaaattcattcccttcaaaaaaaaggctgtgagaacttaatagtgttaccactttatccacaatatgcagcagcaactacagcaacagtttgtgatgaggtttatagaactctaatgaaaatgaggtggcaaccaaatcttaaaataattcctcattatgaatctgaacctctttatatcggagcaattaaaaatagtattgtaaaaaaaattactgaaattaattggcgacctgatttaattattgcatcttatcatggcattccaaaaaagtatttcgataaaggagatccttatcactgctattgtcataaaaccaccaggttaatttctgaacagttttcagacattgaaattaaaactacgtttcaatcaagatttgggcctcaagaatggttacagccttacaccgataaaacttttgaagctttacctaaagaaggtaaaaaaaatattctagttatttgccctggattttcatcagattgtgtagaaactttagaggaaatatcaattcaaggaaaagaaagttttattaaatcaggtggtgaaaattttgagatggttccatgtttaaatgataatgatgatcatattaatttattaaaacatctgatttcaaaaaatttataa

SEQ ID NO: 289132 - DNA, 994 bp, Unknown
  Bacterial polypeptide expressing nucleotide sequence isolated from the Sargasso Sea
aatgagatcagaccacccaaaagttaattatggtaaaacaggggttttaattataaaccttggcacacctgattccactagttggctggatataaggaaatatttaaaggaatttttatcagatagaagagttatcgaagtaaatcctcttatttggcaagtaattcttaacttatttatacttacttttagaccatcaaaaaccgctagagcctacaaagaaatatggatgaaagacaagaacatgtcaccactcaggttttttacagaaagccaagctcaaaaattatctgagaaaattggcaacgaaaagttgattgttgattttgctatgaggtatggcaatccaagtattaaaagtaaaataaatgaacttcatgaaaaaggttgtgagaatttaataatactacctctttatccgcaatatgctgctgcaacaactgcaactgtatgtgacgaggtatatagaacccttatgaaaatgagatggcaaccgaatttaaaaataattcctcattatgagtccgaacctctttatatagatgctattaaaaatagtattgtaaaaaaaattaatgaaattaattggaaaccagacttaatagtagcttcgtatcatggaataccaaaaaaatattttgacaagggagatccttatcattgctattgtcataaaaccactagacttatttctgaaaaatattcagatataaaaattatgacaacatttcaatcaagatttggtcctcaagaatggctgcaaccttatacagacaaaaccttagaagccttgcccaaagagggaaaaaaaaatattttagttatatgtcctggtttttcatctgattgtgttgagactttagaagaaatatccatccaagggaaagaaagttttatcaaatcaggcggtgaaaattttgaaatgataccttgcttaaatgataatgaagatcatatttctttattcaatcatcttatttcaaagaatttataa

SEQ ID NO: 289133 - DNA, 781 bp, Unknown
  Bacterial polypeptide expressing nucleotide sequence isolated from the Sargasso Sea
aatggaaaagcatcctgaggtaaaacatggaaagacaggagctctaataattaatttaggaaccccagattctacgaaatggttagacattagaaaatatttaaaggagtttttatctgatagaagagtaattgaagtaaacccaataatttggcaaataatacttaatgtttttattctcaatttaaggccatctaaaaccgcaaaagcttataaggaaatatggatgaaagaagaaaatatgtctcctttactgtattacacaaaaaaacaggctgaaaaattatcaaaatctatttcaaatgaaaatctgattatagactttgctatgagatatggaaatccaagtattaaaagtaaaataataaaattgcatgaagaaggttgtgaaaatataataatattacctctttatcctcagtacgcggccgcaacaacagcaactgtttgtgatgaggtatatagaaccttgatgaatatgagatggcagccttctttaaaaattattcctcattatgagtcagatccactatacgttgacgctttggtaaactcaataaatgacaaattaaaaagcataaattggaaaccagatttgattttagcttcctatcatggaataccaaaaaaatactttgataaaggtgatccatatcattgttattgtcacaaaaccacaagactaatttcagaaaaatttaaatctatcgagattaaaacaactttccaatctaggtttggcccacaagaatggcttaaaccatatacagacaaaacacta

SEQ ID NO: 289134 - DNA, 375 bp, Unknown
  Bacterial polypeptide expressing nucleotide sequence isolated from the Sargasso Sea
gggtgacccatatcactggcttttgtctaaagacgactagattagttaaagaaaaaatgagacttagtgatgatcaaatcatgacaacttttcaaagtagatttggaagagaagaatggctacaaccttatacaagtgaaacattaaaagagttgcctgacaaaggcataaaagatattcatattatatcccccgggttcagtgcagattgtcttgaaacacttgaagaacttgaggaagaaaatagagaatactttattgagtcaggaggagaaaaatacaaatatatcccttgtcttaatgataataagcaacatttagattttatttcacatctaattataaaaaatactcatgggtggaataaagaatgac

SEQ ID NO: 289135 - DNA, 1177 bp, Unknown
  Bacterial polypeptide expressing nucleotide sequence isolated from the Sargasso Sea
atggctaaaataggcgtcttattaatgaatttaggagggcctgaacgcattgccgatgttggcccattcttatataatcttttttctgatccggagataatcaggacaccttttcccgcttttcaaaagcctttagcttggttaattagtacgcttagaagtactacttcacaacaggcttatctttctataggtggaggatcacctatcagaaggataactgaacaacaagcaagagaattgcaatctaaattaagggataatggtgtaaatgctactacttacatagctatgaggtattggcatccttttaccgaatcagcaattgcagatatgaaagcagatgatgtagatcaaattgttgtattacctttatatcctcatttttcaataagtacaagtggttcaagctttagggaattaaaaaaattgcgagattcagataatgactttaagaaaatcccaatgagatgtgtaagaagttggttcagtcaatcaggatatttaaagtcaatggttgaattgatttccgaacaagtctcactttgtgaatctcctttaaatgcgcatatattttttactgctcatggagttcctaagagttatgtagaggaagctggagacccttataaacaacaaattgaagattgttctttattgataataaatgagttggaaaaatatttagggcacagtaatccgcatacactctcttatcaaagtagagttggtccggttgaatggttgaagccttatacagaagaagtgttagctgatcttgggatgtcgaacgttaatgatttgattgtggtccccataagttttgttggagagcatattgaaacattgcaagaaattgacattgaatataaggaaattgccgaaaaagctggtatcaaaaactttcgaagagtaaaggctctaaatactcaccctacttttattgagggtctaagtgatctagtagtttcatgcttggaagggcctctagttaatattgaagaggcttcacagttgcctgaaaaagttaaactttatccccaagagaaatggcaatggggttggaataatagttcagaggtttggaatggaagggttgctatgattgtttttctagtactttttattgaacttatttcaggctttggaccattacataggctagggattttataaa

SEQ ID NO: 289136 - DNA, 1027 bp, Unknown
  Bacterial polypeptide expressing nucleotide sequence isolated from the Sargasso Sea
tatgactaaatatattggagaaaataattatgaacatggaagtgtcgaaagaactggaattttattaactaatttaggaacccctgatgagcctaattctaaagctgtaaaaatatatctagcagaatttttgtctgatactcgagtaattgagtttccaaaatttatttggaaaataatactacatggaattattttacgaatcagaccaaaaagatcagctaaaacttataaaactatttggacagatgaaggttcacccttactaaatatagctaaaaaacaaattgaactagtaaaagaaaaatttgaaggcaaataccctaacactgtttttgctttagggatgagatatggaaacccatcaattgaaagtgctttattggaactgcaaagtaaaaaagtaagacgtttgattatttttcctctttatcctcaatattgtgcagcaacaacagcaagtacatttgatgcagttacaaatgttttacaaaagtggcgatggatccctgaactgaggttcattaatcaatattttgaagaagaaagctatattaaagcccttgcaaactctattgaagttttttggaaaaaaaatggaaaacctcaaaaacttatttttagctaccatgggattccaaaaaaatatcatacaaaaggtgatccgtatcattgcttttgtttaaaaactacaaggctggttaaagaatatatgaaccttgatgataatgaagtgttaactacttttcaaagccgctttggaagagatgagtggctccaaccctatacaagtgaaactttgaaaaaacttcctagcgaaggaataaaagatattcatattatatctcctggctttagtgcagattgtctagaaacattagaagaacttgaagctgagaatagagaatattttgaaaatgcaggtggcaaaaattatttgtatattccttgtttaaatacaaacccaatgcatattgatatgatgtcaactattattgaaaagcacactcaaggatggtcagtataa

SEQ ID NO: 289137 - DNA, 1036 bp, Unknown
  Bacterial polypeptide expressing nucleotide sequence isolated from the Sargasso Sea
gctgggatttcgcatgaccgatcacgcattgttgctggttaacctgggttcgcccgcgtccaccgaagtagccgatgtccgccgttacctcaatcagttcctgatggatccctacgtgatcgacctgccctggccgctgcgtcgattgctggtgtcgctgattctgatcaagcgtcctgccgcatcggcgcacgcctatgcctcgatctggtgggacgatggctcgccgctggtggtgatcagtcgccgtttgcaggaagcgatgaaggctcattggactcagggcccggtggagttggccatgcgttatggcgagccttccatcgagtcgactctgcagcgtctggctgcgcagggcatccgtgaagtgaccctggcgccgctgtatccgcagttcgccgacagcaccaccaccacggtgatcgaagaggtcaagcgggtggtgcgcgagcgcggcctggacatgcgtctgtccactctgccgccgttctacgatcagccggaatacctcgacgccctggtggccagcgccaaaccgtatctggagcaggatttcgaccacctgctgctgagctttcacggcctgccggagcgccacctgcacaagctcgaccccagcggtcattgcctgaaaggcgaagattgctgccgcagcgcctcgcccgaggtgctggccaactgttaccgcgcgcaatgcctgcgcagtgccgaactgttcgcccagcgcatgggcttgcgccccgagcaatggtcggtgagcttccagtcgcgtctgggacgtgccaagtggattgagccctataccgagagccgtctcgacgagctggccgcgcagggcgtgaagaaattgctggtgatgtgtccggccttcgtcgccgactgcatcgagaccctggaggaaatcggcgaccgcggtcgcgagcagttcgtcgaggctggtggcgagagcctgcaactggtgccctgcctgaacgatcatcccgactgggcggcggccttgaaggtgttgtgcgagcgggcgccactgatgatctga

SEQ ID NO: 289138 - DNA, 923 bp, Unknown
  Bacterial polypeptide expressing nucleotide sequence isolated from the Sargasso Sea
aatggataataaacacccagaagtaaaatttggaaaaaaaggtgttctaatcgttaatcttgggactccagactcaactaattggtgggatattagaaaatatttaaaagaatttttatctgatagaagagtaatagacgttaatccaatagtttggcaaataatcctcaatttatttattttgacttttagaccctcaaaaactgctcacgcttataagcaaatttggagaaaagatacaaatgagtctccattattgtattttaccaaaagacaaagcgaagagttaggaaaaaagatagggaatgaaaaaatcatcgtagattttgctatgcgatatggaaatccttccattcaatttaaattaaatcagcttaaagaaaaaggttgtgaaaatattataattctccctctttatcctcagtatgcagccgcaacaacagcaactgtttgtgatgaagtttacagaagtttaatgaagatgagatggcagcctagcttacaaataatacctcattatgaaagcgaaccaatgtacataatagcattaataaaaagtattaaaaaaaaattagcaaatattaattggaaacccgatctaataatttcttcatatcacggtattcccaaatcttactttaaaaaaggagatccatatcattgctattgtcaaaaaaccacaagattaataaaagaacagtttgatgaaatcgagattcaaactacctttcaatcacgatttggaccgcaagaatggttaacaccatatacagataaaacgattgaagatttaccttctagaggaataaaaaatttactagttatctgcccagggtttgcatcagattgcgttgaaacactcgaagaaattaatattcaagccaaagaggcttttattgaaaaaggcggaaaaaattttgatt

SEQ ID NO: 289139 - DNA, 1048 bp, Unknown
  Bacterial polypeptide expressing nucleotide sequence isolated from the Sargasso Sea
aatgttagcctgccgaggtatttggctgataaaaggtaacacattgacttctccctctcctgcgtttggcgtgttattggtcaatctcggcacgcccgatgaacccactcccaaagcggttaagcgattcctcaaacagtttttaagtgatcctcgggtcgtcgatttgtccccttggctgtggcagccaattttgcaggggattattcttaacacccgacccgccaaggtggccaaactttatcagagcgtatggacggagcagggctcgccgctgatggtgataagcgagcagcaggcgcaaaagttagccacggacctgagcgcgacctttaatcaaaccattccggtagaactcggcatgagctatggcaatccttcgattgagagcggctttgccaaactcaaggcccaaggcgccgaacgtatcgtggtactgccgctgtatccgcaatattcctgctcaaccgtcgccagtgtgttcgatgcggtggcgcagtattttactcaagtgcgtgacattcctgagctgcgtttcagcaaacagtatttcgaccatgaagcctatatcgcggccttagcgcattcggttaagcggcattggaaaacccacgggcaggccgataagttgattttatccttccatggaattccactgcggtatgccaccgaaggcgatccctatcctgagcagtgccgcgcgacggccaagttactggcgcaggcgctggaattaaccgacggacaatggcaggtgtgttttcaatcccgcttcggtaaagaagagtggttaaccccctatgccgatgagttgctggccgatttaccccgccaaggcgtaaaaagtgtcgatgtgatttgcccagcctttgccaccgattgccttgaaaccttagaagaaatttccattggcggtaaagagactttcctacatgcgggcggcgaggcctatcactttattccctgtttaaatgatgatgagctccatatcgaactgctcaggcaactggtgcaagaacaagctcaaccttggatacgcgcggattga

SEQ ID NO: 289140 - DNA, 1003 bp, Unknown
  Bacterial polypeptide expressing nucleotide sequence isolated from the Sargasso Sea
catggaaataaatcatccgaaaattaattatggtaagacgggggtattaattgtaaatcttggaactccaaattctacaaattggtttgatattagaaaatacctaaaagaatttctatcggatagaagagtaatagaggttaatccaataatttggcaattaattttaaatttgtttatacttaattttaggccatccaaaaccgctaaagcatacaaggaaatctggatgaaagatcaaaacatgtctccccttagatactatacccaaaatcaatctaaaaaattgtctagagtttttaaaaatgaaaattttataatagattttgctatgagatatggagatccaagcatattttctaaaatgaatgaactacaaaaaaaaggatgtgaaaatataatcatattgccgctctacccgcaatatgcagcagctacaactgccactgtctgtgatgaagtttatagatcgttaatgaaaatgaggtggcaaccaagtcttcaaattattcctcattacgaatctgaggatctatatatagatgcattagtgaaaactattaaaaataaaatttctgaaataaattggaaaccagatattattttggcctcatatcatggaattccaaaaaaatattttgataaaggcgatccctaccattgttattgtcagaaaacttcaagattaattatggaaaaatttaaagatataaaaatattgacgacttttcaatcaagatttggtccccaagagtggcttcagccttacactgataaaaccttagaagaacttccttcgactggaactaaaaatatcctggttatatgcccgggttttgcagctgattgtgttgaaacattagaagagatttcgatacaagggaaagaaagttttatgaaatcagggggaaataatttcgatatgatcccttgccttaacgatagtgaggatcatataaatttattaagtttattgattaagagacatattatcaaaaaatga

SEQ ID NO: 289141 - DNA, 985 bp, Unknown
  Bacterial polypeptide expressing nucleotide sequence isolated from the Sargasso Sea
atgggccacgcaacgcgtggcaaagtgggtgtgttgttacttaaccttggcacgccagatgcgccaacggcatcggccgtaaggcgttaccttgcagagtttttatccgaccctcgggtggtagaaattccaaaactcctctggatgctgattttacatggcatagtgctgcgcgttcgcccagcaaagtccgcggcactttatcaaaaggtgtggacagaagctgggtcgccactgatggatatcagtttgcggcaaacggctaaattgtccgataaattaaccgccgatggttatccagtgtcggttcacttagctatgcgctatggaaacccttcagtggcaaacacgttaaaggatatgcataagcaagggattgataagatagttgttttacccttatatccccaatatgctgcgccgacaacgggttccgcttttgacgctattgccaaggaactttgtcaatggcgctatttgccctcgctgcattttattcatacttatcacgataaccctgagtttattgctgcattagtcaattcgattcgtgccgattttgacaaacatggcaagccacaaaagttagtgctgtcttaccatggtatgcctgagcgtaatcttcatctgggtgacccctattattgtttttgcatgaagaccactcgtcttgtggctgagcaattgggtttggccaaagatgaatttgcgattacattccagtcacgttttggtaaagctaagtggttacagccttatacggatgcgacgatggcggctctgccgagtcaaggtgtgcgtgatgttgcgattgtgtgtccagcatttagtgccgattgtttagagacgttagaagagatcgtgggcgaaaatggccatatctttactcatgctgggggggagaagttccgttatattccagcgctaaatgataatgatgaccatatcagcatgatggcgagcttggttaaaccctatctgtaag

SEQ ID NO: 289142 - DNA, 1000 bp, Unknown
  Bacterial polypeptide expressing nucleotide sequence isolated from the Sargasso Sea
aatggataaaataggcgtcttgctaatgaatttaggagggcctgaacgcattactgatgttggcccgttcttatacaatcttttttctgatccagaaatcatcagaacacctttccctgtttttcaaaagccccttgcttggttaattagcacgcttaggagtactacttcacaacaggcttacctttctataggtggaggttcacctatcagaaggataactgaacaacaagcaagagaattacaatctaaattaagaaacaagggatttaatgctacaacctacatcgctatgaggtattggcatccttttaccgaatctgcaatagctgatatgaaagcagatggcatagatcaagttgttgtaatacccttgtatccacatttttcgataagtactagtggttctagctttagggaattaaaaaaattgcgagattctgatgatgaatttaagaaggttccaatgagatgtgtaaggagttggttcagtcaatcaggttacttaaagtctatggttgaattaatttctgaacaaatttcactttgtgaatctccttcaaaagctcatatatttttcactgctcatggagttcctaagagttacgtagaggaagctggagacccttacaaacaacaaattgaggattgttctttattaattataaatgagttggaaaaatgtttagggcatggtaaccctcatacactttcttatcaaagtagagttggtcctgttgaatggttgaagccttatacagaagaagtgttagctgatcttggaaagtcaaatgttaatgatctgatcgtggtccccataagtttcgttggagagcatatagaaacattgcaagaaatcgatattgaatataaagaaattgctgaaaaggctggaattaaaaactttcggagagttaaggctttaaatactcatcctactttcatcgaaggacttagtgatctagtgatttcctgcttggaaggacctctcgttaataat

SEQ ID NO: 289143 - DNA, 1024 bp, Unknown
  Bacterial polypeptide expressing nucleotide sequence isolated from the Sargasso Sea
aatgggaaaagcagttattttatttaatctaggtggacctgataaattagaaagcgtagaaccttttctttttaatttatttaacgatccggccataatcagcattccttccatcattagatacccgctagcaaaatttatttctaaaagaagagctccaatagcaaaaaatatttacaaagaaattggaaacaagtctccaatacttgaacttactcaaaaccaagcaaaaagtttagaaaatagtttattaaaaaaaggagattataaatgttttattattatgcgttgctggcatccaagagctgaaaatgtaataaaagaagttaaacaatataatccagaggaaataatactcttacctctatatccacagtattcagcatcaacttctggttcttctattaaagagtggaatgatttatgcaaaaaagaaaattataaggttaaaaccaaaacggtctgttgctatcctactgaagataattttttagagtcgcatgcaaatctcattaaaaaaacaataaaaaatttagaaaataaagattttaaattacttttctcggctcatggtttacctgaaattaaaataaaaaaaggtgatccttatcaatggcaggtagaacaaaccgtcgaaggcataatgtcaaaattaacagacgaaaatccagattatattataagctatcaaagtcgtgtcgggcctcttaaatggattggtccatcgacagatgacataattattaaatattctaaagaaaaaaaaggaattgtaatagttcccgtagcgtttgtttctgaacattcagaaactttagtggaattagacattgaatataaaaaattagcagaaaaaaatggttgcagtttttataaaagagtaccagcattagggatagaggaggattttattaaaggacttacagagttagttttgcaacaagaaacaaaaggaaattttgtttcgtctataatgtgtcctaataaatataaaaaatgtccatgcttagcgataaagagctaa

SEQ ID NO: 289144 - DNA, 1177 bp, Unknown
  Bacterial polypeptide expressing nucleotide sequence isolated from the Sargasso Sea
atggataaagtaggcgtcttactaatgaatttaggagggcctgaacgtattaatgatgtaggtccattcttatataatcttttttctgatccagagataatcaggacacctttccctgctttccaaaagcctttggcttggttaattagtacgcttagaagtactacttctcaacaggcttatctttctataggtggaggatctccaataagaaggataactgaacaacaagcaagagaattgcaatctaaattaagggataaaggtttgaatgctactacctatatcgctatgaggtattggcatccttttacagaatcagcaatagctgatatgaaagcagatggtatagatcaaattgttgtattacctttatatcctcatttctcaatcagtacaagtggttcaagcttcagggaattgaaaaaattgcgagattctgataatgattttaagaaaatcccaatgagatgtataagaagttggttcagccaatcaggttatttaaaatcaatggttgaattaatttccgaacaaattttactttgtgaatcaccttccaatgcccatatattttttactgcccatggagttcctaagagttatgtagaggaggctggagacccatataaacaacaaattgaagattgttctttattgataataaatgagttggaaaaatatttaggtcacggcaacccttatacactttcatatcaaagtagagttggtccagtagaatggttgaagccttacacagaagaagtattagaagatcttgggagatctaaagttaatgatctaattgtggtccccataagttttgttggagagcatatcgaaacattgcaagaaattgatattgaatataaagaaattgctgaaaaagctggtattaaaaactttcgcagggttaaggctttaaatactcatcctacttttattgagggtcttagtgatctagtagtttcttgcttggaaggacctctagttaatattgaagatgcttcgaagttgcctgaaaaagttaaactttatccccaagagaaatggcaatggggctggaataatagttctgaggtttggaatggaagagttgcgatgatagttttccttatactttttattgaacttatttcaggatctggacccttacataggctaggaattttataaa

SEQ ID NO: 289145 - DNA, 1036 bp, Unknown
  Bacterial polypeptide expressing nucleotide sequence isolated from the Sargasso Sea
actgtcgccacatattccggacggtcacccaagtattccaaaagaaaagattggcgtcttgcttttgaacttaggtacgcccgacgcgacggacttttggagtataagacgttacttaaaggaatttctctcggatcctcgcgttatagaagtaaaccggatcctgtggagcgtgattttaaatctcattattttaaatatcaggcctaagatatccgcaaaagcgtataaggagatttggctagaagctgcagatgagtcccctctgaggtattatactcgcgcgcagtcagaagcattatctcgccgttttacagaaatgggggtttccgttgaggttgactgggcaatgcggtatggaacgccagccatcggtgatcgcttggaagaaatgcgggcaaaaggttgtcgtaaaatattattattggcattgtatccgcaatatagtgcgactacgacagcaagcgcgcatgataaagcatttcaggccttgcagtctatgcgatggcagcctgttattagaacatccccagcctattacaacaacgagcaatatattaaggttctaggaaaatcgatacgggaacatatcaaagttcttgactgggagccggatgttctacttacgtcttttcacgggctaccaaaacgttatctggatgctggagacccttaccactgccaatgcgcccaaacctcgcgacttatagcagaagaacttggctggaatgctgaaaaggttagactagctttccagtcgcggttcggtagagaagagtggttaaaaccatacattcaggaggtaattacagaactccccgcaaaaggcataaaaaaaatagccattatctctccagggtttatatccgactgcgttgaaactctggaagaagttgctataggtttgaaagagagcttttttgaagctggcggggaaaaatttacttatgtcccttgcctaaactcttcggaagacagcattgatcttttgcagaaacttgttctaaatgagttgggtggctgggtgccagagtag

SEQ ID NO: 289146 - DNA, 991 bp, Unknown
  Bacterial polypeptide expressing nucleotide sequence isolated from the Sargasso Sea
atgaaaaatcatcctaaaataaattttggaaaaaatggagttttgctagttaacttgggaactccagatagcacaagttggtgggatataagaaaatacttaaaagagtttttatcagacaagcgtgttatcgaagtaaacccattcatttggcaaataattttaaactttattatattaaattttaggccttctaagactgcaaaggcttataaagaaatatggatgaaagaagaaaatatgtctcctcttagatattttactattaaacaatcagaaaaactcaaatctaagataggctcagaaaatgtaatagttgaatatgcaatgagatacggaaatccaagtattaaaaatacaattataaaacttcaaaaagctggttgcgaaaatttaatagttctaccattatatccacaatacgccgcagcaacaaccgctacagtatgtgatgaagtttatagaacgttgatgcaaatgagatggcagccaaatttacaaataatacctcactacgaatctgaaccattgtatattaacgctttagtaaatagtttgaacaataaagtagaaaacattaaatggacaccagacttagtaattgcttcatatcatggcatacctaaaaaatattttgaaaaaggtgacccctatcattgctattgtttaaagacaacaagattactttcagagaaatttaaaagtatacccataacaactacttttcagtctagatttggaccacaagaatggttgcaaccttatactgacaaaacactagagagcttacccaaagaaggaaaaaagaatatattagtaatttgtccaggtttttcttctgattgtgttgaaactcttgaagaaatatcaatacagggaaaagatagtttcataaaatcaggtggtcttaactttgatactgtgccatgtcttaacgataatgctgatcaaattaatttattagaacatttagtttcaaaatatttataat

SEQ ID NO: 289147 - DNA, 1000 bp, Unknown
  Bacterial polypeptide expressing nucleotide sequence isolated from the Sargasso Sea
atggaaaacaaaaacgaacacccaccagtaaattttggcaaaactggagttttaataataaatttgggaacgcccgactcaacaagttggctagatataagaaaatatcttaaagaatttttatcggacagaagagtaattgaagttaacccgataatttggcagtttatcttaaatgtttttatattaacttttcgaccctctaaaacagcaaaagcttacaaagaaatttggatgaaagataaaaacatctcaccacttttgcattatacccaaaaacaagcggagaagctttcaagcataatatcagaagaaaacttgatagtagattacgcaatgagatatggaaatccaagcataagaagtaaaattgcaactcttcatgaaatgggttgtgaaaatttaataattctcccgctttatcctcaatatgcagcagcaactaccgcaaccgtctgtgatgaagtatacagaactcttatgaaaatgagatggcaaccttcactaaaaatagtgccacattatgaatctgaccctttatacatagaggcgcttgtaaactctttgaataagaaaattaaagaaataaattggaagccggatttaatattggcttcttatcatggaataccacaaaaatattttgataaaggtgacccttatcattgctattgtcataaaacaacgagactgatatcagaaaaatttacttcagttgagattaagacaacattccagtctagatttggccctgagaagtggcttcaaccttacacagacaaaactttagaaagtttacctaaagagggtaaaaaaaatgttttagctatatgtccaggattttcctcagattgtgtagaaactttagaagaaatacaaattcaaggaaaagagagttttttagaatctggtggagaaaattttgatatggtgccatgtttaaatgataatgaggatcacataattttattaaaatcattaattcaaaaaaatatctgat

SEQ ID NO: 289148 - DNA, 940 bp, Unknown
  Bacterial polypeptide expressing nucleotide sequence isolated from the Sargasso Sea
aaatcttggcacaccagattctacaaaatggctagatataagaaaatatctcaaagaatttttatctgacagaagagttatcgaagttaatcctataatttggcagttaatacttaacatattcatacttaccttcaggccctctaaaacagcaaaagcttataaagagatatggatgaaagataaagacatgtcaccacttagatattttacagaaagacaagcaaaaaaattatctgaacaaattggtaatgaaaaaataatagttgattttgccatgaggtatggaaatccaagtataaaaagtaaaatacataaacttcataaagaaggatgtgaaaacttaatcattttgcccctttatccacaatatgcagccgcaacaacagcaacagtatgcgatgaagtatatagaactttaatgaaaatgaggtggcaaccaaatttaaaaataataccgcactatgaatctgagccactttacattgaggcaatcaaaaatagtattaaaaaaaaaataaatgaaattaattggaaaccagatttaataattgcatcttaccatgggataccaaaaaaatattttgataagggtgatccatatcattgttactgccataaaactactagactaatttctgaaaaatattcagatatagaaattaaaactacatttcaatctagatttggcccacaggaatggttacaaccatatacagataaaacttttgaggctcttccaaaagaaggtaagaaaaatatcttagttatttgtccaggattcgcatctgattgtgttgaaactttagaggaaatatctatccagggaaaagaaagttttattaaatcaggcggtgagaattttgaaatgataccttgtttaaatgacagtgaagatcatatagcattatttaaatatcttttaatgaaaaatatttaa

SEQ ID NO: 289149 - DNA, 985 bp, Unknown
  Bacterial polypeptide expressing nucleotide sequence isolated from the Sargasso Sea
aatgggtcacgcaaagcgtggcaaagtgggcgtgttgctactcaaccttggcactcccgatgcgccaacggcatcggcggtaaggcgttaccttgctgagtttttatccgaccctcgggtggtcgaaattccaagactcctgtggatgctgattttacatggcatagtgctgcgcgttcgtccggccaagtctgcggcgctctatcagaaggtctggactgaagcgggttcaccgctgatggatatcagcttgcgccaaaccgctaaattatcggacaagttaacagccgatggacatcaagtatcggtgcatttagccatgcgttatggcaatccttcggtggcgaacaccttacaaactatgcatcagcaggggattgataagctggtcgtattaccgctctatccgcaatatgcggcgccgacaacgggctcggcttttgacgctattgcaagggaattaacccagtggcgctatctgccatcgctgcattttattcactcttatcatgataaccccgactttattaccgcattggtgaactcaattcgtgccgactttgagcaacagggtaagccgcaaaagttagtgctttcttaccatggtatgccggagcgtaatctgcatttaggcgatccttattattgcttttgcatgaagacgacccgtctggtggctgagcaattagggcttacagcggatgagtttgtgatgaccttccaatctcgctttggtaaggctaaatggttacaaccttatacggatgccaccatgcaggcgcttccaagcgaaggtgtacgtgatgtggcgattgtgtgcccagcatttagcgccgattgcttagagaccttagaagagattgtgggtgaaaatggtcatatttttgccaatgccggcggggagaagttccgttacattcctgcgctgaacgataatgatgaccatatcagcatgatggccaacttggttaagccccatctgtaa

SEQ ID NO: 289150 - DNA, 1111 bp, Unknown
  Bacterial polypeptide expressing nucleotide sequence isolated from the Sargasso Sea
catgtcccgcgtcggcgtcgtcctgctgaatctggggggacccgaacgcattcaggatgtcggaccgtttctctacaacctgtttgctgatccggagatcatccggctaccaagcccagcgctgcagaagcccctggcctggttgatcagcacccttcgcagcggtaaatcccaggaggcctatcgctccatcggcggcggatcaccccttcgccgcatcaccgaacagcaggcccgggaactgcagagtctgctgcggcagcgcggattagatgccaccacctacgtcgcgatgcggtactggcatccattcacggagtccgccgtggctgatatgaaggcggatggcatggatgaagtggtggtgctgcccctctatccccacttctccatcagcaccagcggttccagcttcagggaactacagcggctacgtcagggcgatgcagccttcgaacagcttccgatccgctgcatccgcagttggtttgaccaccccggctacatcaaggcgatggctgagctgatcgctgaagaggtgcgcaatagcgacgacccggaaaaggctcatgtctttttcagtgcccatggcgtgcccaagagctacgtggaggaagccggcgatccatatcagcagcagatcgaggcctgcaccgatctgatcatgaaatccctggcggaccacatgggccattccaacccccacaccctcgcgtatcagagccgagtgggtcctgtggaatggctgaagccctacaccgaggaggcgctcgagcaactgggggaggccaagaccaacgatctagtggtggtgcccatcagctttgtcagcgagcacatcgaaaccctcgaggagatcgacatcgaataccgggagctggccaccgaagccggtgtggtcaatttccgcagggtgcgtgcccttgatacctaccctcccttcatcgaggggttggcggatctggtgaccaccagcctggaggggcctgaagtgagcctcgacgcagcagcagaactgcccaccaaagtgaagctctacccccaggaaaagtgggaatggggttggaacaacagttccgaggtctggaacggacgcctggccatgctcggt

SEQ ID NO: 289151 - DNA, 1048 bp, Unknown
  Bacterial polypeptide expressing nucleotide sequence isolated from the Sargasso Sea
atgttagcctgccgaggtattaggctgataaaaggtaacacattgacttctccctctcctgcgtttggcgtgttattggtcaatctcggcacgcccgatgaacccactcccaaagcggttaagcgattcctcaaacagtttttaagtgatcctcgggtcgtcgattggtccccttggctgtggcagccgattttgcaggggataatccttaatacccgacccgccaaggtggccaaactatatcagagtgtgtggacagagcagggctcgccgctgatggtgataagtgagcagcaggcacaaaagttagccacggatctgagcgcgacctttaatcaaactattcccgttgaactcggcatgagctatggcaatccttcgattgatagcggctttgccaaactcaaagcccaaggcgcagagcgtatcgtcgtactgccgttatatccgcaatattcctgctcaactgtcgccagcgtgttcgatgcggtggcgcagtattttgctaaagtgcgcgatattcctgagctgcgctttagcaaacagtattttgaccatgaagcctatatcgcggctttagcgcattcggttaagcgccattggaaaacccatggccaggccgacaagttgattttatccttccacggtattccgctgcggtatgccactgaaggcgatccctatcctgagcagtgtcgcactaccgccaagttactggcacaggctctgggattaaccgatggacaatggcaggtgtgtttccaatcccgcttcggcaaagaagagtggttaaccccttatgctgatgaactgctggccgatttaccccgccaaggcgtgaaaagcgttgatataatttgcccagcctttgccactgattgcctcgaaaccttagaggaaatttcgattggtggtaaagagactttcctgcatgcgggtggtgaggcctatcactttattccctgtttaaatgatgatgagctccatatcgagctgctcaggcaattggtacaagaacaagctcaaccttggatacgcgcagagtgac

SEQ ID NO: 289152 - DNA, 730 bp, Unknown
  Bacterial polypeptide expressing nucleotide sequence isolated from the Sargasso Sea
catgcaggcactgcgcaagcagggcgtcgaacgcatcctcgtgctgccgatgtatccgcaatattccggcaccaccaccgcgacggccttcgatgaggttttccgtgtgctgggcgaaatgcgcaatcagccggagttgcggctggtcaagcattttcacgatgaccccgcttacatcaatgcgctgcaccagcaggtgggtgcgtattgggcacagcatggggcacccgacttcgcgcacggcgacaagctggtgctgtcgtttcatggtgtgccgcgacggacgctggaattgggcgatccgtatcactgtgaatgcctgaagaccggccgcttgctgggtgaggcgctcggcctgcagccgggtcagtacctggtcacgttccagtcacgctttggccgcgccgaatggcttcagccgtacaccgcgcccacgctggaagagcttggccgcgtcggcacccatcgcgtggacgtgttctgcccgggttttccggccgattgcctggaaacgctggaagagatcgccatggaagggcagtcgaccttccgtgtcgccggcggcaaggagttccactacatcccgtgcctgaacgacagcgaagcgtggattgccggcattgccgacatcgcgctggcgcatctgcagggctggccgctcacccttacgcatccgcatgtactggaggcgagccgtatgcgtgcgcagagcaagggggccgccgcatga

SEQ ID NO: 289153 - DNA, 538 bp, Unknown
  Bacterial polypeptide expressing nucleotide sequence isolated from the Sargasso Sea
attgaagattgttcttttattaattattaatgagttggaaaaatgtttagggcatagtaacccgcatacactttcttatcaaagtagagttggcccagttgaatggttgaagccttatacagaagaagtgttagctgatcttggacggtcaaatgttaatgatctgattgtggtccctataagtttcgttggagagcatatcgaaacattgcaagaaattgatattgaatataaagaaattgctgaaaaggctggtattaaaaactttcggagagttaaggctttaaatactcaccctacttttattgaaggtcttagtgatcttgtgatttcctgcttggaaggacctcttgttaatttagaagaggcatcacagttgcctgaaaaagttaagctttatccccaagagaagtggcaatggggttggaataatagttcagaagtgtggaacggaagggtcgcaatgattatttttcttgtgctttttattgaacttatttcaggctctggacctctacataaattaggcattttataa

SEQ ID NO: 289154 - DNA, 601 bp, Unknown
  Bacterial polypeptide expressing nucleotide sequence isolated from the Sargasso Sea
tatgtatccgcaatattgtgctgcaacaacaggtagtacatttgatgaagtaacaaatgtattgcaaaaatggcgttggatacctgaaatgcgttttatcaatcagtactttgaagaaaaaaattatattgaagcattgtcaaattcaataaagtcattttggaaaaaaacttcaaaaccacaaaaaattatttttagttatcatggtataccaaaacggtatttgactaatggtgatccatatcattgcttttgtcttaaaaccacaagattggtcaaagaacatatgggattatccgatgatgagataatgactactttccaaagtagatttggaagagaggaatggttaaagccatatacaagtgaaacattaaaagaattaccaaaacaagggattaaaaatatacatataatatctcctggtttcagtagtgattgtcttgaaacacttgaagaacttgaagaagaaaataaagaatattttatggagtcaggtggagaaaattatcattatataccttgcttgaatgatcacgatgatcacatagacgtttttgtaaatctgataaaaaaacatattcaaggttggccattatga

SEQ ID NO: 289155 - DNA, 1177 bp, Unknown
  Bacterial polypeptide expressing nucleotide sequence isolated from the Sargasso Sea
aatggataaaataggcgtcttactaatgaatttaggagggcctgaacgcattactgatgtaggcccattcttatataatcttttttctgatccagaaattatcaggacacctttccctgtttttcaaaagcccctggcttggttaattagcacgcttaggagcactacttcacaacaggcctacctttctataggtggaggttcacctatcagaaggataacagaacaacaagcaagagaattacaatctaaattaagggacaagggatttaatgctactacctatatcgctatgaggtattggcatccttttaccgaatctgcaattgctgatatgaaagcagatggcatagatcaagttgttgtaatacccttgtatccacatttttctataagtactagtggttcgagctttagggaattaaaaaaattgcgagatgctgatgacgaatttaagaaggttccaatgagatgtgtaaggagttggttcagtcaatcaggttatttaaagtctatggtcgaattaatttctgaacaaatttcactttgtgaattaccttcaaaagcccatatatttttcactgctcatggagttcctaaaagttacgtagaggaagctggagacccctacaagcaacagattgaagattgttctttactaattataaatgagttggaaaaatgtttgggtcatagtaaccctcatacactttcttatcaaagtagagttggtcctgttgaatggttgaagccttatacggaagaagtgttagctgatcttggaaggtcaaatgttaatgatctgattgtggtccctataagtttcgttggagagcatatcgaaacattgcaagaaattgatattgaatataaagaaattgctgaaaaggctggtattaaaaactttcggagagttaaggctctaaatactcatcctacttttattgaaggtcttagtgatctagtgatttcctgcttggaaggacctctaattaatatagaggaggcttctcagttacctgaaaaagttaaactttatcctcaagagaaatggcaatggggttggaataatagttcagaggtgtggaacggaagggttgcaatgattatttttcttgtgctttttattgaacttatttcaggctctggacccttacataaattaggcatcttataa

SEQ ID NO: 289156 - DNA, 385 bp, Unknown
  Bacterial polypeptide expressing nucleotide sequence isolated from the Sargasso Sea
gcatatcttcgagattgatggccgccgtctatacgcctggtgcgcattggacactctgatgtttccggccctcattggccagacggcgcgcgtgtcgtcgcattgcgctgcaaccggagcaccagtttcactcacggtttcgccgaacgaaatccgggatatcgcaccgaccgacgccgcagtgtcgttggtcctgccgcaggaaacagcggacattcgtcagtcattctgttgccacgtccatttctttgcatcggtcgtgacggcgaaagattgggcctccaagcatcaaggcgtggagatcgtaagcgtccaagatgccttccgcttgggccaagagcttaatcgacatatgctgcagaccattccatcgagaaaatcgtga

SEQ ID NO: 289157 - DNA, 640 bp, Unknown
  Bacterial polypeptide expressing nucleotide sequence isolated from the Sargasso Sea
atgaagctcgccccatatattttagaacgtctcacttcggtcaatcgtaccaatggtactgcggatctcttggtcccgctactgcgggaactcgccaaggggcgtccggtttcacgaacgacacttgccgggattctcgactggcccgctgagcgagtggccgccgtactcgaacaggccaccagtaccgaatatgacaaagatgggaacatcatcggctacggcctcaccttgcgcgagacttcgtatgtctttgaaattgacgaccgccgtctgtatgcctggtgcgcgctggacaccttgatatttccggcgctgatcggccgtacagctcgcgtctcatcgcattgcgctgcaaccggagcacccgtttcactcacggtttcacccagcgagatacaggctgtcgaacctgccggcatggcggtgtccttggtattgccgcaggaagcagccgacgttcgtcagtccttctgttgccatgtacatttctttgcatctgtcccgacggcggaagactgggcctccaagcatcaaggattggaaggattggcgatcgtcagtgtccacgaggctttcggcttgggccaggagtttaatcgacatctgttgcagaccatgtcatctaggacaccgtgat

SEQ ID NO: 289158 - DNA, 959 bp, Unknown
  Bacterial polypeptide expressing nucleotide sequence isolated from the Sargasso Sea
catgagaccgtcattaattgaagttgatctgaataccctaaaacataatctcatattgattagagaacacatcgataaccgtcctgtgatggcagtattgaaatcaaacgcatatggtcacggattagttagagttgctcatctttatgagcaacttggtgttaattctataggtgttgccttacctgaagaagggattatcttgcgaaagtcaggagttttgcttcctattttggtattcgggggtatacttaaggaacagatcccagaattaatggaatggaatttagaattttttataccatctaaagaattacttaaatatacagaaaagttttgtaaagcccaaaatatgtttgcaaaaattcatctaaaaatagatagcggtatgggaagaatcggagcaattgcagaaaattctaaggattttatagcattagctttggattcagatcacataaatattaaaggagtatgctctcattttgcttgtgcagatgatcctgaagatccttatacacttgagcagatagatagattcttagaagctgtatcaacttttgacaaattaggagctggtaccccattaaggcatatagcaaattctggaggagttctttatttcccagagtctcaccttgatattgtccgtccaggcataattctatttggcgtatatccagaatctgcgtgtcccagaatacttgaacttaaacctgcacttactttaaaatcaaaagtttcttttcacaaatctatcccctcaaaattctcaataagttatggtgctacttggacttcagaaaattctgcagaaatttccactattccgcttggctatggagatggatatcctaggtgtctttcaaaccgtggcgaagtgcttataaacggtaagcgtcgtccaatagttggtagagtttgcatggatcaatttatggttaactgtgaatatgaga

SEQ ID NO: 289159 - DNA, 809 bp, Unknown
  Bacterial polypeptide expressing nucleotide sequence isolated from the Sargasso Sea
aggtatttatacagagcacgaaataaatatagctagagaaaataacattcaagtagttattcacaaaatgagccaatttaaatttattggcaaggatgataatgagcttggcctttgggtaaagataaatactggtatgaatagattagggctctcacatgaagaattaaaagaagtctacgaaaatggggtcataagttctgattctgtgcttatgacacatatggcatgtgcagataatccggatgatccaattaataagatgcaaataaataactttgaaaaagcttttaacttagttgagaggaaaacgaagagaagtatttgcaatagtgcatgcttaataaatttccctgaactttcatttgattgggttaggtcaggtatagccgcttacggcggagaatctaaaaatttaaatttaaaaacagcaatgacattcagagctccaataatttcgataagaagcataagaaaaggagaaagagttggatatggtggaagaaagaaagcatctaaggatatgagaattgcgatagtctatgctgggtatgctgacggaatccctcagacaacaactgatgggaccaaagttttggtaaatgacaaacaggcagagatttttgggagagtgagtatggatttagtatcaatagatatcacaaaccttcctcaagtctcagaaaatgatcttgtttcattctggtctgaagaacttccaatcaatgaattttcaaacaataatggattgatttcatatgagcttatgactagaatcagtagcagagtaaaagtaacagtaacttaaa

SEQ ID NO: 289160 - DNA, 832 bp, Unknown
  Bacterial polypeptide expressing nucleotide sequence isolated from the Sargasso Sea
atcttactaatgcagggcatttattctaatgatgaatttcttgaggcacatgatagcaatcttgatgttgttattcataatctagaacaatttcaaattgttaaagaaaataatatttttgataatttgtggctcaaaattaatacgggaatgaatagacttggctttgaaataaatgattttatgaaaatttataatgaatatttttctaataaaaaatttactcttatgactcatttagctgcgtcaaataataaaaattctatttcaaaccagcatcaaatagatttatttgaagatttgtcaaaaaagatgcataaagatgtgtataaaagtattgcaaataccggatgtattatgaattttccagatcacttatatgattgggtaagatgtggaattggaatatatggaggctattttaaagacagtaaaatcaaaaccgctatgacgcttagatcaccaattgtaaacataagaaaaataaagaaaaatgataaagttggttatgatggaagagctgttgccaaaaatgacatgctaattgctacggtatatcttggttatgctgatggactacctttaaatataaaagatggaacagatgtaattatcaatgatcaaagggcaaaagtttttggaagagttagcatggatttaaccacaatagatataacaaatatcaataattgtgttttaggtaattggtgtgagttcttttcaagagatttacccatatcgaatattgcagaatcaaatgatttaatttcttattatttaatgactggagttaagtcaagggttaaaaaaatatataaaagagcagattaat

SEQ ID NO: 289161 - DNA, 646 bp, Unknown
  Bacterial polypeptide expressing nucleotide sequence isolated from the Sargasso Sea
aatgaatcaccctaaggcaatagttcatttagatcgtttagctagaaattataaaattataagtaattctgttaatggcaaaagacttatggctgtagttaaagctaatgcttatggccatggagctattgaatgttcaaaaaaattggaagaccaaggttgcgactttttctcagtttttactgttgaagaggctgaagagttgcgcaatgcagatttgaaatctgatatactaatactaagtaaattggagaaagaatcaattcaaacagcaatcgataatgatttaattgtcaatatttcatctattgatgatcttgatagcattattttttatttggaaaaaaatggtttgtctccaagatttcatatgaagattgaaaccggtatgaacagactagggtttgatataggtgatatctctttagcgataggcaaattattagattataaaaatttaaattgcgaaggtatctatacgcactatgcaacttctgatgaaggagatctatcttatgcccacctacaacgagagaggtttgaacaagctcttgaaatagctaatgaaatggggtatacttttaaatacaaacatatatctaacagtggaggcttattgaatgacttatgtagcaatacaaattgt

SEQ ID NO: 289162 - DNA, 923 bp, Unknown
  Bacterial polypeptide expressing nucleotide sequence isolated from the Sargasso Sea
tgatctcaaaatagcaactaatgcaatcaaggatgttgttgatggctttggagtagtaagggtagatgaagcattggtgataagagaaaactcttttaaaccaattttagctatgcagggtgtttattcaactgatgcatataacttattgaagcagaataatatatggtccgtaatacactcaactttacaattgccattagctaagcaatataaagataatctaattttttggatcaaactaaataccggaatgaatagattgggcatcaaattaaatgagctcaatcaactcgaatcattttttaaagatcagaacgttttaatgactcatttagcatgtgctgataatccgagtgatgagttaaataaaatacaacttaaaaattttgaaaattcgtttagtcaaactacaaatgaaatgaaaagaagtgtgttgaactcggctggagtattcaattttccagaatattcctatgattgggtaagggttggaattgccatgtatggagggcttgacttaccaaatctaaaaacagcaatgaaatttagaagtcaaattatttcaatccaatcattggatactggacaaagaataggttatggaggaagagtgaaaacaaaaaaaccatcaaaaattggcattgtctattgtggatatgctgatgggtttcctcaaactgcgcaagatgggacttctgtaattgtgaatgatcggcttactgaaattattggaagagtaagtatggatcttatatctatagatgtttcagatattcctgattgtaaaattggtgattggtgcgaattatggtcttctgatttaccaatcagtgaaaatgcaaaaaaaaataatttgatttcttatgaacttatgacgaaaatgagcaatcgagttaaaagacaatatttaaatatatgaa

SEQ ID NO: 289163 - DNA, 725 bp, Unknown
  Bacterial polypeptide expressing nucleotide sequence isolated from the Sargasso Sea
tatgaaatcttgtctaaaagtatgtctagaagatattaaatcaaattggaaattgataaacaaagcatctaatggaaaagctgcagcagtaataaaagctaatgcttatggtttgggtatgatagaggtagctggagcattattagaagttggttgcaattacttttatgttgcgaatattaatgaggcaatacaactaagaaaaaaatataattctaatcaaatttctattgcaatttttgaaggatatcttgaaggttatcaaaaattttatagtgaatataatctaattcctgtaattaatagtcttgatcaattgataagattaaatgattacgcattaggagaaaattatcctaaggcaattcttaatattgatacaggaatgaatagattgggattggataatgaagaatcaagttttttacttaaaaacaaagatattttaaattatattcaattagattacataatgtctcatcttgcaaacgcacaagaatataaagataataaaaatttaatacaactatataaaatcaaaaatttttctactaacttcccagatattaaacttagccttgcgaacagtgctggaattaagctaggatcaaaattttgtcttgatcaaaccagacctggtattgctctatatggaatagataattttggtaaaagtttttatttaaattcaaaaaagttaaaattgcctctaaaattatatgctg

SEQ ID NO: 289164 - DNA, 793 bp, Unknown
  Bacterial polypeptide expressing nucleotide sequence isolated from the Sargasso Sea
ttagatgatgctatcaagctgagagaaaattttaagaatataaatatttacctgttatcaggtgtgatttcaaacaatgatttaaaagaaataaaaaaatataaaataattcctattattaataatgtcgatcaattatccttattaaaaacttcacaaaaacttaagtacgttttgcatattgatactggaatgaaccgtcttggattgcagtcaagcgaacttgaaaaatattcaaatttaatcgataaaaagaatattatttttttaatgtctcacctgtcttctgcagatgatttaaaaaaaaatgagtcaagtaaacaattaaataaacttattgacctaaataaaaattttaatttacctttaagtatagctaattcatctggaatttttttaggaaagcaatatcatttaaattatgtaagacctggaaaaagcctatacggaattaatcctttctataaaaaaagatttaacttaagacaggttatgagtatttactcacctatattacaagttcaaaatgttagaaaaggaaattcaattggctacagccaaacttataaacttaaaagagacttaaaagttgctaccatagattttggttactctgatggatttcttagaagcggaagtaataaagcatctgtttatatagataaatttcaatgtagaattttaggaagagtttcaatggacttgatcacgattgatgtgtctaaagttcccaataacaaattgtatctgggcaaacctgtcgaaataattggaagtaatcaacgatatgaga

SEQ ID NO: 289165 - DNA, 541 bp, Unknown
  Bacterial polypeptide expressing nucleotide sequence isolated from the Sargasso Sea
aaacttataaaaaaattacctcctagcaaatatagtatagctaattctgcagcatctttacaaacaaaaaaaactcattatgatatggttagattaggtgcggcactatatggtataaatcggcttgaaaataaaagtctgaatttaaagcaagctgttaaattacaatctgaaataatccaaataagatgggtaaagactaattccacagttggttatggagcaacctacaaaactactgagaaaactaaattagcaacaattccagtaggttatgcagatggttatcctagagcacttggcaatatagccagtgtttacgtagaaaatgattttgctccaattgtgggtagaatttcaatggatttaattgtaataaatataacaaaaatatctgctaaaattggaagtaaagtaattttatttggagggccaattgatatagactctcttgctaaatcagcaggaacaataagttatgaacttataactcggttaagttcaaggtatccaagaatatactttaactcagagaaataat

SEQ ID NO: 289166 - DNA, 265 bp, Unknown
  Bacterial polypeptide expressing nucleotide sequence isolated from the Sargasso Sea
ggcagtgggctatggcgatggctacccacgccacgcgcccagcgggacgccggtagcggtgaacggggtcgttacgacgctggtggggcgagtttccatggatatgatcaccatcgatgtgaccggcttgagtgccagcgtgggggatgaggtggagttgtggggtgacgtggtcgatgtggatgacgtggcccgtgcctgtgggacaatcagctatgagctgttctgccagatcacgcaaagaccggaacgcactatcgtctga

SEQ ID NO: 289167 - DNA, 916 bp, Unknown
  Bacterial polypeptide expressing nucleotide sequence isolated from the Sargasso Sea
aatttaactgcagctacaattaaagccaatgcatatggattaggggatatagaaacatttaaaatgctttataatgcaggttgtaaacattttttcttagcaacatttcatgaagcgataagaataagaaaaaaatacagtcatggttttttatatattttaaatggcatcaataaagaaaatattaaaaaaattttgaaagaaaaaaatataattcctattataaattctattgatcaattgaaattattaaataaacataaattaaacaattataaaaaatttaattttgggatacatatagacactggtatcaatagattaggtataaatataagtgatttacaaaaaataacatctactcataaaataaagataataatgagtcatttatcaagcgcagatgaaagtaataattattataataaattacaaaacagtagatttaaagcagctatatcaaagtttaaaaatattgaaattttaagttttgccaactcagctggaattaaacttggtaaagaatatttatataatctaacaagaccaggtatagcattatatggtggccataataataccgagttaagaaaaaaaattaaacctgtggtaaaattaaaagctgaaataattcaaattaaaaagatcaataaaaatcaatatgttggttataatcaaacttttaaaacaaaaaaaaatactgtgattgcaataataggtataggatatggtgatggtttgccaagaagtttgagtaataacggttatgtttattataagaaaaaaaaatttaaaattataggaagagtttccatggatacttgcacgattgatatcactagatatcataaattcttaaaaattggaaaatttgtagatataataaactatcaatatgatgtagaaaaatcgcaaa

SEQ ID NO: 289168 - DNA, 530 bp, Unknown
  Bacterial polypeptide expressing nucleotide sequence isolated from the Sargasso Sea
taaaagcgagcagcattgccttgcaaactcagctggcattattgcttggccaaaaggtcatggcgagtgggtacgcccggggttgatgctctatggcgtatcgccaatgcttaatggtgttggtcaacagcatgggcttgaacctgttatgcgtttaacgactcgcgttattgcgattcgtgatgttgaggctaatcaatgtgttggctatggtggccgttggtgtagtgataaagccactaagcttgccgtagttgcgatgggctatggtgatggttatccgcgtcatgccgagcagggcacaccggttattattaagtcgcagcgctatggtattgtcggcagtgtggcgatggatatgatcacggtcgatattggtgataaccacgacaatatcaaagtaggagatgaggtgatcatgtgggggcctgagcttcctgttgaagagattgcccagtgtgcgaccaccattccttacgagttactgtgtaatatcaccccgcgagtaagctacgagtatcaagaataac

SEQ ID NO: 289169 - DNA, 709 bp, Unknown
  Bacterial polypeptide expressing nucleotide sequence isolated from the Sargasso Sea
aatgttttggtacaaggtaaatactggaatgaataggttgggatttgagatatctgactttattaaaatttatgaaaaatatttaaaagaaaagaaatttactctaatgagtcatttagcatcttcaaatgacaaagaaagttcttccaacgaaagtcaatttaaattatttaatgacttgtcaaatcaattaaataaaaacattctaaaaagtattgcaaatactggctgcatcatgaattttccagaattctccttggattgggttagatgcggtatcggtatctacgggggctatctaaatgacgatcaattaaaaacagcaatgacattaaggtcaccaataataaatatcagatcaataaaaaaaggcgataaagttggttatgacggaagagcagtagctaaaaatgatatgaaaattgcatcggtatatttaggttatgctgatggtttgcctgtaacaattaaagacggtacatcggttatggttcgtgaccaaattgcaaaagtttttggaagagtgagtatggatttaaccactattgatgtaacacaaatttcaaattgtagaattggtgactggtgtgaatttttttcacctaaacttccaatttcaaacatatctaaatcaaatgatctcatatcatattattttatgactaatattaaatctcgagtaaaaaaagtatataaaagcatagattaa

SEQ ID NO: 289170 - DNA, 910 bp, Unknown
  Bacterial polypeptide expressing nucleotide sequence isolated from the Sargasso Sea
agccaatgcttatgggccatggtgttgaatggggcagtaaattgcgcaactaaagcaggaattgcatggtttgcggtagcttcagtagatgaggggattcaagtaaaagaacatgcaaaagaagcaagagtgctagtgttgtctgaaccttcaatcagtcaaatagaaaagataagaatcaataatttagaccttactgtatacaatgaaagttttatcaatgcgcttattgataatggaagtactttcaatgttcatcttaaaattgatactggaatgcatagattaggttgttctcctgagaattttaatgatttttttagaagaatagaagattcaaacttgaatttagttggtgtttgtacccacttcccattggcagacacagatgaaatagagactaaaagatcaattaaattatttgaaaatacaatcgcagatattgactcaagtaacttacttttacatatagacaactcggcatcatctttttacaatcttgataattcttttaatatggcaagagttgggattgcagcatatggtgttcaaaagacagcagttgataatgaaaataaacttaaaccaactttggaaataaaaactagaatttctaatttacaaaatagaaaaaaaggtgaagcagtttcttatggaaaagcacaaacactatctagagactcaattattgcgaccgcacctattgggtatggtgatggctatccatggaattcatttcctgatggaaaagtcattgtaaataatcaattttgtaatttaattggccgggtcacaatggatcaaatattatttgatgttacggatgtaaatgttcaaattgatgatgaagtaactgttttaggtaattctatggatgggaagcttaatatttctgtatctgatattgccc

SEQ ID NO: 289171 - DNA, 673 bp, Unknown
  Bacterial polypeptide expressing nucleotide sequence isolated from the Sargasso Sea
atggataagcgtgcttatataaccatcaacctgtctgctctgcgtcacaatttttcacaaatcagaaagtatgttcatgctgccagggttatggcagtaataaaagacgatgcttatggtcatggtgccgttcttgttgctaagcatttgacaggcgcagatgcatttgcagtggcaactcttgctgaagccatcgcattgcgtaaagcaggcattacaaaacaaatacttttgttgtccggtgtatacaccactcaagaattaacgcaggcatcacagtatgcattgtctattgttgtgcaccatcaggagcagattcgcttgttgcagcgagctgctgtgatgcgtccagtttgtgtatgggttaaaatcaatgccgggatgaatcgcttgggtttttctttggatggcttgcctgctgtgcttactcaactgaaggatttggttatcgtacatcagccatgcgtgttgatgtcacatttctcagtggctgacgatctggaaagtcaggagaccatggcgcagtttgagcgtgtgcaccgcggcgtcaagggcttggcgttgccatgcagtcacgcaaactcagctgcagtcatggcttggccaggcacacatggtgattgggtaaggcccggggttgatgttgtacggtctgtcaccattacgacagaac

SEQ ID NO: 289172 - DNA, 573 bp, Unknown
  Bacterial polypeptide expressing nucleotide sequence isolated from the Sargasso Sea
aaaaaaatcatcaacagcttagagaatttgttaaaattagtaaattttttccaaatataccacttagcttatcaaactctgcaggtcttttactaggaaagcagtttcactttgatatggtaaggccaggaatttctttatacggtggacattgccaaaatagagagaagaaaatttataaaaatgttgtctcgttaaaagctaaattaatacaaataagaaatattaagaagggtgatacgataggctatggagcaacctttgtggcaaaaaaaaatatgagggttggcactcttgcatttggttatgctgatggatttaatagaatgttttcaaataattatcatgtactttttaaaggaaaaaaaatcaaacttgttggcagagtatcaatggacttaattacagtagacctttcaaacattaaagatgaaaagaatatctataatgcagattttgaaatactaggagaaaactattcaattaatgataccgcaaaattaataaaaactataccttatgaaatactaacaaatctaggcaaaagatatgaaagaagatatatttcataat

SEQ ID NO: 289173 - DNA, 790 bp, Unknown
  Bacterial polypeptide expressing nucleotide sequence isolated from the Sargasso Sea
gctgaatgatctggaacaaatctcacgttggcggctctttgccggaaaagccgacacatcactttcggcattgttgcattttgatacaggcatgacccgacttgggctggatgctgatcagacagattggctgatccaaaaccgacagctgctagagggactggaacttgcctatgtgatgagccatcttgtgtctggtgaattggtcgacgatccagtaaatgcccaacaattgactaaatttaataagcttcgcagctggtttcccaacactcctgccagccttgccaacagtgctggcaccctccttgacactggctatcattttgcgatgacccggcccggcatagcgctttatggcgttcacccgtgcaacgttttagatagccctcttcagcccacttttgattggcaggctcgtattcttcagattcgtgatgcctttgccggtgataaggttgggtatggcggtacccacgagttggatcgcgactctcgaattgcgacccttggtgttggttatgcagatggctattgtcgccagcttgggggtattgccagcgtttcaatcagcgggcggaccgtacctgttattggccgcgtttcaatggacagcatcaccgttgatgtgaccgggtttgatcaggaaagcctcagcactgatacagcctcacttattcactctggttaccgggtcgaacagatggcaagtgacgtcggcacgattgcctatgagattataaccaatcttggccaccgtgcagaacggcattatcggggagttagttaa

SEQ ID NO: 289174 - DNA, 369 bp, Unknown
  Bacterial polypeptide expressing nucleotide sequence isolated from the Sargasso Sea
taagatcaaaaataacaatgttaaaaaatattaaagctggagatagtgttggctatgatggatcatgggtagcagattcagattgcattattgccggcataccaataggttatgcagatggatatccttattcttctcaatcaagggaagtcagcataaatgggaaaaaatttaaaacagctggaaagataaatatggatttaataacaatcaatcttgaacaagattctagtattaaaataggtgattgggttgaattgtgggggtttgatacaaatttaactagtttttcacaagaactcgattcaatttcttatcaattattaacgaatatctcgggtagagttaataaaaattatttagaatagc

SEQ ID NO: 289175 - DNA, 814 bp, Unknown
  Bacterial polypeptide expressing nucleotide sequence isolated from the Sargasso Sea
tgaagaggttgtaggagatattaaagatcttgcagatggatatggtgttgtaaggatagatgaggctagaagaataagaagtttatctgataaaaaaattttattaatgcagggaatttattctaatgatgaatttcttgaagcaaaggatctcaatcttgatattgttgttcataatcaagaccaatttcaaatagttaaagaaaataatatttttgataatttatggctcaaaatcaatacaggcatgaatagacttggttttgaaatagatgattttatgaaaatttataatgagtttctttctaataaaaaatttactcttatgactcatttagctgcgtcaaatgaaaaaaatgccatttcaaaccagaatcaatttaagctatttacagatttatctaacaagatgcatgaagatgtagataaaagtattgcaaatactggttgtattatgaattttccagaccaatcatatgattgggtaagatgtggaattggtatgtatggtggttattttaaagatagtaaaattaaaactgcgatgacgcttagatcgccaattgtaaatataagaaagataaaaaaaagtgataaagttggttacgatggaagagctattgctaaaaatgacatgctaattgctacggtatatcttggttatgcagatggattgcctttaaatataaaagatggaacagatgtaatgattaacgaacaaaaggcaaaagtttttggaagagttagcatggatttaactacaatagatgtaacgaatattaatgactgtgttttaggtgattggtgtgagttt

SEQ ID NO: 289176 - DNA, 814 bp, Unknown
  Bacterial polypeptide expressing nucleotide sequence isolated from the Sargasso Sea
aataaatgtaaagatttttatgttgctaggttagatgatgctattaagctgagagaaaattttaaaaatataaatatttaccttttatcaggtgtgatttcaaacaatgatttaaaagaaataaaaaaatataaaataataccaattattaataatgtcgatcaattatctttattaaaaacttcacaaaaacttaagtacgttttacatattgatactggaatgaatcgtcttggatttcaagcaagtgaacttgaaaaatattcaaatttaattgataaaaaaaatattatttttttaatgtctcacctatcttctgcagatgatttaaaaaaaaatgagtctagtaaacaattaaataaacttattgacctaaataaaaattttaacttacctttaagtattgctaattcctctgggatttttttaggaaagcagtatcatttaaattatgtaagacctggaaaaagtttatacggaattaatcctttctataaaaaaagatttaacttaagacaggttatgagtatttactcacctatattacaaattcaaaatgtcagaaaaggaaattcaattggctacagccagacttataaacttaaaaaagacttaaaagttgcaaccatagattttggttactctgatggatttcttagaagcggaagtaataaagcatctgtttatgtagataaatatcaatgtagaattttaggaagagtttcaatggacttgattacgattgatgtgtctaaagttcctaatagcaaaaggtatctaggcaaacctgtcgaaataatggaagtaatcaacc

SEQ ID NO: 289177 - DNA, 920 bp, Unknown
  Bacterial polypeptide expressing nucleotide sequence isolated from the Sargasso Sea
tagtaattgcattgtagctgcaacagtaaaagctaatgcttatggacttggtattaaaaaaattgtacctaaactgtacagatctggatgccgctatttttttgtcgctacaacaaatgaagccttagaagtaagaaaggttaataaatcaatttcaatatttatactaaatgggctcgtaacatctgatttatcaattatacataaatacaatttgatacctataatcaataacttatcagaacttaaaagaatcgaaaaatatcaagtaaaaattaaaaaatcactaaagattgcaatacattttgatacaggcatgtccagactagggttagataaagatgaaacaaaattgattttagaaaataaagaaaaatatattaacttctcaaatgttgttctggtaatgagtcatcttgcttgtgctgatacaccttcaaaaaaaaagaatggccatcaattaaagaatttttgtaaaattataaaatattttccaaatactaaacatagtctagcaaattctgcaggtatacatttaggtaagaagtatcattttgatttggttagacctggtatatcgctatatggtgggaatcctctaaaagatagtaaaaatatttatgataatgtaatcaacctaaaggcaaaaattattcaagtgagaaatatatctaagaatgacactattggatatggagctacgtttaaagcgaagaaaaatatgatcattggaactgttccacttggatatgcagatggatttagtagattattctcaaataattttgaaggatacgtaggccaccaaaaaattagtatagttggccgtgtatcaatggatttaattacctttgatgtaacaaatattaaaggaatatcaaaaaacaaaaatgtttacgtagatatcataggaaataaaa

SEQ ID NO: 289178 - DNA, 752 bp, Unknown
  Bacterial polypeptide expressing nucleotide sequence isolated from the Sargasso Sea
gggaattaaggcaaatatcttaattttaggttcaataactaatgaggaaataattagctcgatttcaagagatattgtttttacaatatatgacatatctcagcttcattttattaactctcttaaaaatataaataatattccttttcatctaaagattgatactggaatgaatagactaggaatagaaattaaagaaatcccagaatcaattaatattataaaaaaaaataagaatttatttctaacaggaatctatacccattttccagaatctaatttaaaaacttcttcttttacaaaattacagataatggaatttaataaaattattacagattataaaaatgctatacccggtatagatttttttcatattgcaaacagttcaggaatatttaattataaagattcccatttaaatatgattagaccaggactagctttatatggtctttattctgatgacgataatttttatcccataatggaattaaagacctcattgataaaaataagaaatataaaagagggtgattctataagttatggaaggacctttactgctaaggggaatatgaagataggcgttattccaattggttatgctgatggtttaccaagagcactttccaataaaggtaaagttatttgtaacaatgtagagtgcccaattttaggcagagtttgtatggatcttacaattgtagatatttctaatgtcagaaatcctaaagtaggagataatgtga

SEQ ID NO: 289179 - DNA, 863 bp, Unknown
  Bacterial polypeptide expressing nucleotide sequence isolated from the Sargasso Sea
aatgcagagcaaaatcatcatttctacaagtaaaattcaaaaaaattgggaattattgaatcaaaaatctagtttaaaagcctctgcagttgtcaaagcgaatggttatggtttcgggatgaataaaatagcaaaatctctagtaaatcaggggtgcaattttttttatttagctcaaatagatgaggctattaaattaagaaaaactttaaaaaattcaaaaaatattaaattagctgtttttgagggaatggttcacaaacctattgactatataaaaaatgatattatcccaattttaaataatttaaaccaactaaataaattagttaattataatatccaaagtcctaataaaattttaaaaggaatattaaatattgacacaggtatgaatagacttggttttgaggaacaagaaattataaatcttaaatcacattacaaaaatataaattcaaaaaatataatttttataatgtcacatttatctcattcaaatattgaacaaagtaatacaaataaaatccaattaaaaaaattaataacattttcctctctatttaaaaaaataaaattaagcctttctaatacaaatggaatcctccttgggaaaaaatttattcttgatcaaactagaccaggcattggtatttttggactggatgctaatgggaaagaaattataattaataatgctaaattacaaattccatttattttgaaatgtccaattattcaaataagaaaagtaaaaaaaaatcaaaccatttcttatgaaggaataacaaaattaaaaaaaaactctgttattgctaccattggaattggatatgctgacgggatattcagaatttttaaaa

SEQ ID NO: 289180 - DNA, 718 bp, Unknown
  Bacterial polypeptide expressing nucleotide sequence isolated from the Sargasso Sea
ttttttgcatattgataccggcatgacccggcttggcttggacaacggtcaaattgaatggctggttaaaaataaatatgcccttgacggggtttactgtcgatatgtgatgagccacctcgtatctgccgaaattgccgatgatcctacaaacgctcggcagcttgatacgtttaatgaaatgcgacagtggtttgccggcattcctgcaactcttgccaatagtgccggtagccttttgtcaccagcctatcattttcagatgacccggcccggcattgctctttatggtgtgcatccggcggatatgccgacagatacattgacgcccgttgtcacctggcaagcgcgcattattcaactgcgacacgccaaagcaggagatcgcgttggctatggcggcacctatattctggaccgtgactcgcgcattgctacaatcggcgttggctatgctgatggctataatcgcaagctcggcggcaaggcgactgttttgatcggcacgcagaccgcgccagtgattggccgcgtgtccatggacagcatcactgttgatgtgacggatattgacccagcgcatttgaggcatgaaagcgttgaattactacatagtggttatgatctatcacgcatggccgctgataccgactcaattgcctatgaaattttgacacgacttgggacacgccctgcgcgccactaccggaactcataa

SEQ ID NO: 289181 - DNA, 468 bp, Unknown
  Bacterial polypeptide expressing nucleotide sequence isolated from the Sargasso Sea
atttttcgatgacccggccaggaattgcgctttatggcattcatccgtttgaagatctggatagcccccttcagcctgtttttgattggcaggctcgtatccttcagatacgcaatgctgctgctggtgacaaggtagggtatggaggcacctaccaattagatcgtgattcccaaattgcgacccttggtgttggctatgcagatggctaccgtcgtcagcttgggggagtggccaccgtttcaattggcgggcgggctgcacctgttattggccgtgtttctatggacagcatcaccgttgatgtgacaggttttgatcaggaaagcctgcgcaccggcacagcctcgcttgttcacgcagattacggtgtcgaaaaaatggcgaacgacctcggcaccattccctacgagatcatggccagtcttggtcaccgggcagaacggcgttaccgaggtggcggctgac

SEQ ID NO: 289182 - DNA, 616 bp, Unknown
  Bacterial polypeptide expressing nucleotide sequence isolated from the Sargasso Sea
ttaatcagtcatctagcaagtgctgaagaattcaacaataaatttagtaataagcagaatatgaaatttaaaacaatttttaataactttaaatcaataaaatataaaagtttaagtaattctgctggtttagttaataattctttttttcattatgatattttaagacccggaattgccttatatggtggatacgataataataaaattaaaaaaattatgaagccaaaaccagttgtaaaattaaaagcaaaagttctgcaaataaaatatgtgaataaaaatgaatttattggttataatcaaacatttaaaacaagaaaaaaaattaaaatagcaattttgggtattggttatgcagatggttttccaagatcattaagtaacaaaggtaaagtatattttaaaaaacaaatttttgaaatattaggtagagtatctatggactcaataacaattaatataactaattcaaaatataaaataaaaaatggggattatatggatttgattaataacaaatatgatattgaaagattttcaagattatgtggaactattaatagagaaattctaacatcattctcaaaaagagttaaaagaatatatatataaa

SEQ ID NO: 289183 - DNA, 1069 bp, Unknown
  Bacterial polypeptide expressing nucleotide sequence isolated from the Sargasso Sea
aatgagaagttggttagaaattaatttgaataatttaagctataacttagcccaaattgaaaaattaactaataaaaaagtaattccagtcataaaagcaaatgcttacggactaggatctatacaaattgctcaatacttaaaaagtaaagactacgatttatatgcagtagctaattttcgcgaagcgctagaaataaaagaatcaggtgtaaatattaaaactcttataatgggcaataatgataaggatgatttgcaacaagcgataaaaaataattttagtataactatttcttcttgggatgatataaaaaatttggaaaccattgcgagtaatattaactctttgattcatatcaaaatagatacaggaatgggtagaattggatttttaccctctgaagcagagaaagctatacaatatattaaaacaaataatctgggtgaaattgaaggaatatattcccacctctcaagcgcagatgaaaacgaagatgaatttactttaaatcaaataactcagttttcaaaatacgaaaataacgaaaacataaaatttagacatatactaaatagtcctgggattttcaaatattataaaaatacaaatacaaattatgttagaccaggtatagcaatgtatggtattttgctgtttgacagccctttaaaaaacatactaaaacctgtatttaaactaaaaaccaaaattatatatttaaaaaaattgcaaaaagaaacttttatatcctatgggaaaactgagtcagggcaaaaaggagatataattgcaactctgccaattggttatgccgatggattagacagaagattttcaaacggtggaatagtaaaagtgttaggtcaagaatgtaaaattattggaagagtttgcatggatatgacaatgattgttatacctgaatccattaaagatagagttgaaataggaacagaagttgatatttatgacgaagaaattcagacggcagcagaaaaaattggaactatcgcagacgaattaatgacaagaattaataaaagagttcagaggagacatatttaa

SEQ ID NO: 289184 - DNA, 1081 bp, Unknown
  Bacterial polypeptide expressing nucleotide sequence isolated from the Sargasso Sea
ttgtcccaaattgacagcaaaattaacaaaaaatctatttttataaacaaagataatctctcttataattacaagctaattcaaagacatgtaaaaaagtcaaaagttataagtgttatcaagggtgatggctatggtcatggcttattagaatgttgtaagattttaaaatcgagtaattgtaatgatttctatgttgctagattagacgatgctttaaaactcagagaaaatcataaaaatattaaaatttatctactgtcaggaatgattaaaaaaaatgatgtcaaagagatagaaaataaaaaaataattccaattatcaatagtcctgaacaattagatattattgaagcatcatcaaaaaaattaaattacgtattacatattgataccggaatgaataggttaggatttcaaattaaaaattttgaagaaaatataaatgatattaatttcaaaagaataaaattttttatgtcacatttttcgtctgcagatgacttaaataaaaaagagtgtaacaatcaattaaaagaccttttgaaatttaaaaagatatttaataagccacttagtatagctaattcagcagggatatttttaaacagaaaatatcacttagattttgtaagacctggtaaaagtctttatggaattaatcctttttataaaaaaaattataaacttaaacaagttatgagtatctacgctccgatccttcaagtaactgatttaaaaaaatctcaaacaattggatatagccaaacatttaaaacaaataaaaaaataaaaattgcaactattgattttggttactccgatggatatctaagaagtgggagtaatagaggtaaagtattcattgatggaattccatgtaaaattttaggaagggtgtcaatggatcttataactattgatgtttccaaagtgcccatgaaaaaactatacttgggcaagccggttgaaataatcggaataaatcaatcatatgagaatattgcatatgatactgagactaatgaacacgaaatacttatttctttaggaagaaatctgagtagagtgtatttctaaa

SEQ ID NO: 289185 - DNA, 1054 bp, Unknown
  Bacterial polypeptide expressing nucleotide sequence isolated from the Sargasso Sea
tatgagtgcaataatttacttagatctcgcaagattaaaaaaaaattttggtatcgtaaaaaaaattgcaaataactcaaaaataatgtctgtaatcaaaactaatgcttatggtcataacattttaaaagttgccaaatctttatctggttctgatgcattcgcagttgctgaaataagcgaagctaaaatccttagaaaaaactatattaaaaaaagaataatttgtttgcaaggttttgaaaatataaaggaacttaatttttgtaaaaaaaataaaatagagcccgttattcataatgaatatcagttaagagaagtagcaaggcttaaaaaaaaatcgttcgaaaatatttggattaagtttaatacaggcatgaatagacttgggtttgatgtaaaggaagctaataatatattcaaaaaaatatatggtgtatctgaaaaaataaatcttatgactcatttttctgatgctgacgaaaagttcgataagaaaacaaataagcaattaagattgtttaattcaattttatgtacagagaaaatggaaaagagtctttctaattcagctgggattttaaaatatgataatagccacagtgactgggtaaggcctggtttattattatacggaataaatctaactcataagaaaatcactggattaaaaccagtcatgaaagtcactgcaaaagttatagcaacaagaaaatgtaaaaaaggtgatgaaataggatatggaagcacatataagtgtaaaaaaagcgaatacatagctgctttatctattggttatggagatggccttcctagatcttttagcaataacggaaaagtattctttaaaggaaaaaagttttctattgttggaagaatatcaatggatattaccacaataagttctggcaataatcaacttaaaataggtgatgaacttgagatttggggtgataatatttctgttgaagatatttccagtaatattaatactataccctatgaattactttgcaatataaaatcaaaaagaaaaattaatttttctaattaa

SEQ ID NO: 289186 - DNA, 1084 bp, Unknown
  Bacterial polypeptide expressing nucleotide sequence isolated from the Sargasso Sea
tatggatagaggttacgtatatgtaaataagacaaattatttacacaatatagaagtattaaaacaactatcagacaaagaactttgcttggttgtcaaagccaatggttatggtcacggtattgaatggactgtcaaaacagctatggaagctggaatcaaatggttcgcagtagcagctattagtgaagcaaaaaaagttcgagctcaatctgatgaactaagggtattgttacttaccgagccatcacttggtgagatagacaatatagagaaatataatatcgacttaacagtttataatgatttttttattgatggtctagcaaaatccggtaaagcattcaatacccatataaaaatcgatactggtatgcacagagttggttgtgaaccagaagattttaaaaacctttatgaaaaaataacaagctctaaaacaataaatcttgctggtatatgcacccattttccattagcagacgaagagattgagcctacagaagaatctatcgaattgttcaaacaaacaatcaaggatgtagatacagataatttactattacatgctgataattctggatcgtcattttataattttgatcctacgtttaacctgtcaagagttggtctcgcagtatatgggtgcaatataacacccgcagaagttgttcaagatctgaaacctacgatggcaataaaaacaagaatatcaaacattcaccatagaaaaaagggtgaagccgtttcttatggaaaagcactaactttagaaagagatacaactgttggtgtatcacctgttggatatggcgatggatatccatggagtacatttcctgatggaaaagtcatagttaacaatacatattgcaatttgataggaagagtaactatggatcaaattttatatgacatcacagatgtggaggcaaatattaatgatgaagttgttcttttgggaaattctgagaacaatgaacttaaaattacagttttcgatattgcaaaatggaataagactattgaatgggagatccttacaaatataaatgaacgacttgaaagggttgaaattgaatga

SEQ ID NO: 289187 - DNA, 1054 bp, Unknown
  Bacterial polypeptide expressing nucleotide sequence isolated from the Sargasso Sea
atgacaacttattctgcagagctaatcgtcgatagctctaaaattattagtaatatttatcatctaaaatcacttataagcagtgagtcaaaatttatgttcattgtaaaaagtaatgcatatggacacagtttaaaagagattgtaaaaaatcttgaaagctatgttgatgcttttggtgtcgttagaatggaagaagctattttagttagaaaagctacaagtaagcctattcttcttatgcaaggtatttatacagagaatgaaataaaaacagctaaagaaaataatatacaagtagttatccataaaatgagccaatttaagttaattgataagaatgatagtgagcttggcctttggataaagataaatactggcatgaatagattaggactttcacaagaagaattaaaattagtctacaaaaaggggattatagattcagattctgtacttatgacacatatggcatgtggagatgatccagatgatccaatgaataagatgcaaataaacaactttgaaaaagcttttaacttggttgagagaaaaacgaaaagaagtatttgcaatagcgcatgcttaataaattttcctgaactttcatttgattgggttaggtcaggtatagctgcttatggtggagaatttaaaaatttagaccttaaaacagcaatgacattcagagccccaataatttcgataagaaacataagaaaaggagaaagggtcggatatggcggaagaaagaaagcatccaaggatatgagaattgcgatagtctacgccgggtatgctgacggaatcccgcagacaacagttgatgggaccaaagttttggtaaatgacaaaaaggcagagatttttggtagagtgagtatggatttagtatcaatagatgtcacaaatctccctcaagtctcagaaaatgattttgtttcattctggtctgaagaacttccaataaatgaattttcaaataataatggattgatttcatatgagcttatgactagaatcagtagcagagtaaaagtaaaagtaatttaaa

SEQ ID NO: 289188 - DNA, 976 bp, Unknown
  Bacterial polypeptide expressing nucleotide sequence isolated from the Sargasso Sea
atgacaacttattccgcagagctaattgtcgatagctctaaaattattagtaatatttctcatctaaaatcacttataagtagtgagtcaaaatttatgttcattgtaaaaagcaatgcttacggacacagcttaaaagagattgtaagaaatcttgaaagctatgttgatgcttttggcgtagttagaatggaagaggctattttagtcagagaagctaccagcaagcccattcttctgatgcagggcatttatacagatcatgaaattaatatagctagagaaaataatatacaggtagttatccacaacatgagccaatttaaattggttggcaagaatgataatgagcttggtctttggataaagataaatactggcatgaatagattagggctttcgcaagaagaactaaaagtagcctatgaaaagggaatcattaggtctgattctgtgcttatgacgcatatggcatgcgcagataatccagatgatccaatgaataagatgcaaataaacaactttgaaaaggctttcgacttagttgaaaggaaaacaaaaagaagtatttgcaacagcgcatgtttaataaattttcctgagctttcatttgattgggttaggtcaggtatagctgcttatggtggagaatttaaaaatttaaacctaaaaacagcaatgacattcagagctccaataatttcagtaagaaatataagaaaaggagagagagttgggtatggtggaagaaagaaagcatctaaggatatgagaattgcgatagtctatgcaggatatgctgatggaatccctcagacaacagctgacgggaccaaggcgttggttaatgacaaacaggtagagatttttgggagagtgagtatggatttagtatcaatagacgttacaaatcatcctcaagtctcagagaatgatcttgtttcattctggtctgaagaacttccaatcaatgaat

SEQ ID NO: 289189 - DNA, 784 bp, Unknown
  Bacterial polypeptide expressing nucleotide sequence isolated from the Sargasso Sea
attgattgaaaaacataaattggattttgttattcattccagttggcagcttgataagattgaaaaatacaatttatccaactcaagggtttggttgaaaataaatacagggatgaatcgattaggtgtaaatcttgatgattttgaggaattatttaaaaagattgaatctctggaagcaagggaaattatcttaatgtctcatctctctgcatctagtcttaaaggtgatcctcatactctaagtcagataaaaatattcaataatttggtagatggaatttcttgtaaaaaaagcttatctaattcaggagctgtttttaatatgcctgaggctgaacatgatattgttcggccaggaatggctatatatggtggaaaatataatgaatttggtacaaagaatgtatcttcattaacttctcaaattatttcattacgtaatattaaagctggagaaagagttggatatgatgggtcatgggaagcaaaggaagactgtatcattggctctataccaataggttatgcggatgggctaccttactttaagaaacccatcactgtaagcgtaaatggaaaggaattcaaaacagcgggtaagcttaatatggacttaactttaataaatcttgaacaagacagtaccattaaaattggagatactgtaaagctttgggactttgattctgatctttcaaaggtttctgaagaatttaatacaatttcttataacttattaaccaatatctcgagtagagttacaaaaaattatttagaatag

SEQ ID NO: 289190 - DNA, 1019 bp, Unknown
  Bacterial polypeptide expressing nucleotide sequence isolated from the Sargasso Sea
tatgcaaggacctgtagctgttatccatttagatcgattattaaaaaattatgatcttgtaaaaaatcatttaaatcaaaaacggataatggttgttgttaaagctaatgcatatggccatggaagtgtagaatgcgcaaaagcccttgaaaagcatggatgcgattcttttgcggtattttctgttgaagaaggagtagagctaagagaaaatggtataaactcagatattttggtatttagcaaaatgagcaactcatctttgaacttatctaataaatatgaattaataatcaatgcatctagcctatcagatattaatttgctagagagatttagaaagaaaaatggaaaatcgcctgattttcatctcaagtttgatactggaatgactaggcttggctttgatccaggggatgctcaagaggtatttgagcttgtaaaaaatacaaaattatcttgccaggggctgtattcacattttgctacagctgacgaaggagacttatcctatgcccttgaccagttatcgaaatttaaaaaaataaaaaaaattgcagactcctttaatttgaaatttaaaactgttcatttttcaaatagtggagcaatccttaatatcgatcaaagtgagtttgatcaagtacgcgttgggatgcttgtttatggagcttttccatcagatgaagttccaatggatattccaatcttaccagtaatggaattcaaggctccaatagttgagataagaagcgtgaaaaaagggacccacattagctatggaggtgtttataaaactgaatcaaaatcaaatattggagtaattcaatgcggctttgctgatggaattcccagatcttggtataatagtggatatgtaagttgtaatgggaaaaaatataaaattgcaggtagaatctgcatggatcagtttatggtaaattttgaaaatgatttacctgaattaggagatgaagtcttaatttttggttctgataagattaatactatcacaatgg

SEQ ID NO: 289191 - DNA, 1123 bp, Unknown
  Bacterial polypeptide expressing nucleotide sequence isolated from the Sargasso Sea
aatgagttatttaggtccaaaagtttatattgatttattacagctgaaaaaaaactatcacatcgttaaaagtgaagttggagagatccctattatggctacagttaaggcaaatgcatatgggcatggggctgttgaagtttccaaagctcttgagcaagaaggagtgagatatttagctgtattcacaattgatgaaggaattgaattgcgagatgctggtattaaaacagatatctttatatatgcaaaatttgatccaacaagagttcaagaagcatcaaagcataaccttactctcaacatttcatcttttgatgatttgaaagcacttaaagctcataaaggaaattctgtcaaggttcatttaaagattgatacaggtatgacaagattaggggtcccatacgaacaagcagaagactttttaacagaagcaaatcagattgaaagcattgaattggaaggattgtactctcattttgcaactgcagatgaaggagacctttcttatgctaatagtcagctaagcaagtttaatgacattatagaaatttcaaaaaaattaaatatatcctttgctttcattcactgtagtaacagtggagctttattgaatgttcaagattccagatttaatatggttagagcaggaatgcttctttatggagcttttccatcagatgaagttcctcaagaacttccaataaaaccagtaatgacctttacggctcctgtagttgaaattcgagatgttaaagcaggaactcaaattagttatggtggagtttatacaacgaaatcagatacccgtatagctgttatacaggctggttttgcagatggaattcctcgaccatggtatattgatggttttgtaaagtttcaaaatcaagattttaaaattactggaagaatttgtatggatcagctaatgatagatattggaacagctgatataaaatatggagatgaaattttaatctttggctcaaatgaacatggaagtattgatattaatcacattgcaaaaaaaattgattctacttcatatgttttagtaactgctctgggtattcgtcctaaaagattttataaattcgaggagcaaattaaaacctaa

SEQ ID NO: 289192 - DNA, 931 bp, Unknown
  Bacterial polypeptide expressing nucleotide sequence isolated from the Sargasso Sea
tttgggatgttgtaaaatattaaaaacgaataaatgtaaagatttttatgttgctaggttagatgatgctatcaagctgagagaaaattttaagagtataaatatttaccttttatcaggtgtgatttcaaacaatgatttaaaagaaataaaaaaatataaaataattcctattattaataatgtcgatcaattatctttattaaaaacttcacaaaaacttaagtacgttttgcatattgatactggaatgaatcgtcttggatttcaagcaagtgaacttgaaaaatattcaaatttaatcgataaaaagaatattatttttttaatgtctcacctatcttctgcagatgatttaaataaaaatgagtcaagtaaacaattaaataaacttattgacctaaataaaaattttaacttacctttaagcatagctaattcatctgggatttttttaggaaagcagttccatttaaattatgtaagacctggaaaaagtttatacggaattaatcctttctataaaaaaagatttaacttaagacaggttatgagtatttactcacctatattacaaattcaaaatgttagaaaaggaaattcaattggctacagccaaacttataaacttaaaagagacttaaaagttgcaaccatagattttggttactctgatggatttcttagaagcggaagtaataaagcatctgtttatgtagataaatatcaatgtagaattttaggaagagtttcaatggacttgattacgattgatgtgtctaaagttcctaatagcaaattgtatctaggcaaacctgccgaaataattggaagtaatcaaccatatgaaagaattgcatacgaaactgggactaatgaacacgagattttaatttctttaggcaggaacttaaagaaagtatatatataa

SEQ ID NO: 289193 - DNA, 796 bp, Unknown
  Bacterial polypeptide expressing nucleotide sequence isolated from the Sargasso Sea
ctctgtttttagcaaatataaaattataccaattttaaattatatagatgaatataattacgtttctaaaaatataaaaaaatataaaaatttaaaatttggattacatgttgatacaggaataaatagacttggtattaacttcaaagaatttttaggattaaaatttaaaaataatatccatattttgataagtcacttagcaagctcggatgaatccaagaactattataatgctatacaaaatacaaaatttagaaaagcgattgatctacaattaaatgctaaaattaaaagtctctccaattcatttgctttaaatttgggaaaagatttccactttgacttagttaggccaggaatttctttatatggaggtcacagaaatacaaaaatgaaaaaaataattaaacctgttattaccttaaaagcaaagatactgcagattaaagaaattggtaaaaatgaatacattggttacaatcaaacctacaaaacagcaaaaaaaataaaagtagcagtgattggtattggatacggagatggagtatcaagattattaagcagcaaaggaaaagttttttacaaaaagagtagctataaaattttaggacgtgtttccatggacaccattacaattgatatcacaaaaaatagtcataatttaagggtaggtaaatatatggaaataataaatcatacatttggaattgatagtctagcacaacaatgcaatactatacctcacgaaattcttacatctattactaaaagagttaagcgagtctatatttaa

SEQ ID NO: 289194 - DNA, 957 bp, Unknown
  Bacterial polypeptide expressing nucleotide sequence isolated from the Sargasso Sea
aaattctgatgcatattggccataatattaaaaaagttgttaaagatatagatgatcttgttgatggatatggtgttgtaagaatggaagaggcaaaaaaaataagaactctctcaaataaaaaagtactgttaatgcaaggtatttattcaaaggatgaattcttagaatcaaaaaaaaatgatttagatattgttattcataattatgatcaatttaacatagtcaaagatagcgataattttgagaatatgtggtttaaggtcaatacaggaatgaacagacttggatttgagattgacgactttttaaagatatacgaattaaatctcaaaaataaaaaatttacattaatgagtcatttagctgcttctaatgaaaaagatgaaatctctaatagaaatcagtttgatatatttgatagtttatctgaaaaaataaatcacaatgttatcaaaagtattgcaaatactggatgtgtcatgaattttcctgatcaattgtatgactgggtaaggtgtggaatcggaatttatggaggctattttaaggatgaaaaaattaggacagctatgacacttaggtcaccaatcgttaatattagaaacataaagaaaaacgatagagttggatacgatggaagagcagtagctgaaaaaaatatgacaattgcaacagtttatctcggatatgcagatggattgccacttaatatcaaagacggaactccagttatgatcaataatcaagttggcaaagtatttggaagagttagcatggatctaaccactattgatatttcagaaattgaaagctgtgctgagggcgattggtgtaattttttctcaaaagatttacctgtatctgaaattgcaaagtctaacgatttaatttcttattattttatgactaatattaagtcaagagttaaaaaaatatataaaagaataaattaat

SEQ ID NO: 289195 - DNA, 597 bp, Unknown
  Bacterial polypeptide expressing nucleotide sequence isolated from the Sargasso Sea
catggatagaggttacgtatacgtaaataagacaaattatttacacaatatagaagtattaaaaaaactatcaaataaagaactttgtttagttgtcaaagccaatggttacggccatgggattgaatggactgtcaaaacggctatggaagctggaattaaatggtttgcggtagcagctattagtgaagcaagaaaagttcgtgctcaatctgatgaacttagagtattgttacttaccgagccatcacttgatgagttagagaatatagaacgatataatattgacttaacagtctacaatgatttttttatcgatggtttagaagaatctggtaaagaattcagcactcatataaaaatagatactggtatgcacagggttggttgcgaaccagaggattttaaaaacctttataacaaaataaaaaagtctaaaaccataaatttagccggtatatgtactcattttccattagctgatgaagaaatagaaccaacacaagaatctattgaattatttaaaaaaacaattaaagatatagatttagatgatttactaatacacgcagataattctggatcgtcattttataa

SEQ ID NO: 289196 - DNA, 1054 bp, Unknown
  Bacterial polypeptide expressing nucleotide sequence isolated from the Sargasso Sea
aatgacaaccctctcagcagagctaattgtcgatagctctaaaattattaacaatatttctcgtctaaaatcacttattagtagcgagtcaaaatttatgttcattgtgaaaagcaatgcctatggacatggcttaaaagagattgtaagaaaacttgaaagctatgttgatgcttttggcgtagttagaatggaagaagctattttagtcagaaaagccaccaataagcctatccttcttatgcaaggcatttacacagatcatgaaattaaagtagctaaagaaaataaaatacaaatagttattcacaacatgaaccaatttaagctgatcggcactaataatagtgagcttggcctttggataaaagtaaatactggcatgaatagattggggctttcacaagaagaattaaaagtagcctatgaaaagggaatcataaattctaattctgtgctcatgacacatatggcatgtggagatgatccggatgatccaatgaataagatgcaaatagataactttgaaaaagcttttgacttggttgagaggaaaacgaaaagaagtatttgcaatagcgcgtgcttaataaattttcctgaactttcatttgattgggttaggtcaggtatagctgcttatggtggagaatttaaaaatttaaagcttaaaacagcaatgacattcagagccccaataatttcgataagaaacataagaaaaggagaaagagttggatatggtggaagaaagaaagcatctgaggatatgagaattgcgatagtctatgccgggtatgctgacggaatcccacagacaacaacagatgggactaaagtgctggtaaatgacaaacaggccaagatttttgggagagtgagtatggatttagtatcaatagatatcacaaatctccctcaagtctctgaaaatgatcttgtttcattctggtctgaagaacttccaatcaatgaattttcaaacaacaatggattgatttcatatgagcttatgactagaatcagtagcagagtaaaagtaaaaataatttaa

SEQ ID NO: 289197 - DNA, 1084 bp, Unknown
  Bacterial polypeptide expressing nucleotide sequence isolated from the Sargasso Sea
atggatagaggatatatatacgtcaataagacaaattatttaaataatataaattatttaagaagtctttcagacaaagagctttgtttagttgttaaagcaaacggatacggtcatggaattgaatgggctgttaaaaccgccatagaaggtggggtaaaatggtttgcagttgctgctattaatgaagctataaaagtacgaagagtatctgataatgttcgtattttgttacttactgagccctcattatcagaaatagataaagtagtttcaaacaatatagatttaactgtttacaatgatttttttattgagggactaaagaaatcagataattcatttaatacacatataaagatcgatacgggaatgcatagagttggatgtgagccagaagattttcaaaaaatatatgaaaagattgattcctcagaaaatataaatcttacaggaatttgtacacatttccccgttgcagatatagaaaaggaacctacagatatatcgattaagttatttaaggatctcatctcaaatatcgacacaagtaacttattaattcacgtagacaactcaggatcaactttttataactttgatccaatttttaatctttccagagtaggtttagcagtttatggttgcaatataactcctgttgaagtggatcatgaacttaaacccacaatggagatcaaaacaagaatatctaatattcagcaaagaaaaaaaggagaagctgtttcttatgggaaagctttaacacttgagagagacacaatagttggaactgccccggtaggctacgctgatggttttccttggaactcctttccagagggaaaggtaataattaataatcaattttgtaatttaataggaagagtaactatggatcaaattttatttgatattactgatgttaatgcagaagtgaatgacgaggttgttatacttggctcttctgaagatgggaaatcaaagatctctgtttttgatattgctgagtggaataaaactattgaatgggaaatcttgacaaacataactgaaagacttgaaagagtagaagttgaataat

SEQ ID NO: 289198 - DNA, 1039 bp, Unknown
  Bacterial polypeptide expressing nucleotide sequence isolated from the Sargasso Sea
atgacagccatcaactcagagttaattattgatggaaatattcttagaaagaatatttcatatataaaggataagcttaagaataaatctaaatttatggcagtaataaagtctgatgcctatggccataacattgaagaggttgtaggagatattaaagatcttgcagatggatatggtgttgtaaggatagatgaggctagaagaataagaagtttatctgataaaaaaattttattaatgcagggaatttattctaatgatgaatttcttgaagcaaaggatctcaatcttgatattgttgttcataatcaagaccaatttcaaatagttaaagaaaataatatttttgataatttatggctcaaaatcaatacaggcatgaatagacttggttttgaaatagatgactttatgaaaatttataatgagtttctttctaataaaaaatttactcttatgactcatttagctgcgtcaaatgaaaaaaatgccatttcaaaccagaatcaatttaagctatttacagatttatctaacaagatgcatgaagatgtagataaaagtattgcaaatactggttgtattatgaattttccagaccaatcatatgattgggtaagatgtggaattggtatgtatggtggttattttaaagatagtaaaattaaaactgcgatgacgcttagatcgccaattgtaaatataagaaagataaaaaaaagtgataaagttggttacgatggaagagctattgctaaaaatgacatgctaattgctacggtatatcttggttatgcagatggattgcctttaaatataaaagatggaacagatgtaatgattaacgaacaaaaggcaaaagtttttggaagagttagcatggatttaactacaatagatgtaacgaatattaatgactgtgttttaggtgattggtgtgagtttttctcaaaagatttaccgatatcaaatatagccaaatcaaatgatctaatttcttattatttaatgactgggattaagcccaagggtcaaa

SEQ ID NO: 289199 - DNA, 727 bp, Unknown
  Bacterial polypeptide expressing nucleotide sequence isolated from the Sargasso Sea
ttaagtaataaatttgatcacttatggttaaagattaatacgggtatgaatagattaggttttgaaattgatgaatttttagagatttattataaatacctgactaataagaaatttactttaatgagtcatcttgcagcatcaaatgatgtgaaggctatttcaaataaaaaccaatttaaattatttaatgatctgtctaataaaatgaataaaggtgtgctcaaaagtcttgcaaatacaggatgtattatgaattttcctgataaatctttcgattgggtaaggtgtggtattggtatatatggcggctattttaatgatgaaaatattaaaacagcgatgacgctaagatcacagatagtcaatctcagaaaaattaagaaaaatgaaagagttggatatgatggcagagcgattgcagacaaagatatgataattgctacaatatatttaggttatgcagatgggcttccactagcaataaaagatggaactgaggtaatgatcaataatcaaatagcaaaagtttttggaagagttagtatggatttaacgacaatcgatgtatcaaatattgataattgtagtgttggcgattggtgtgaatttttttctaaagatatgcctatttccaatattgctaagtctaatagtttaatttcttactatatgatgactagcgtaaaatcaagagtaaaaaaaatatataaaagagctgagtaat

SEQ ID NO: 289200 - DNA, 1105 bp, Unknown
  Bacterial polypeptide expressing nucleotide sequence isolated from the Sargasso Sea
atgattggaccaaaagcatacattgatattggtagattaaagcaaaatgtatggaatattcgtagaaatataggagatagaaatttaatgatcgtagttaaagcaaatggctatggtcatggcgctttacatattgcaaaacatctatctgatgagccagggattatattttgtgtatttacaattgatgaagctattgagctgagaaatggtggcattaagaaccatatcttgattttctctagaatacaaagagattggcttgaacttgcttatgaacatggtctttggatcaatgcttgccatttggatgatttagaattattagatcatttttataatgaccatggatattgccctaatgttcatttaaagtttgatacaggcatgacacgtttaggttttgatgataacgacagcgataaggttttcagtttccttctagatcgtgatcatttgccagttataggcatttattctcatttcgcgactgcggatgaaggagacttatcatacgcagaatcacagttactaaaattcaataaaatagtagaatcaggcagatcagctaaaatagaatttcaatatatacactgttcgaatagtggtgctttattaaatcttccctcatctttatttaataccgttcgggtcggtatgttagcctatggtattgcaccatctgatgaggttacaatggatattaatgtagaacctgttatgagtttttgtggcccaatagtgaatgttagaagagtagagcctggaacccaagtaagttacggaggtgtttatatgactgaacgctcaactaatataggggttgtgcaaacaggttttgcagatggttttcctagaccatggtataaaaatggtcacataagctataaaggggaaatatataatattgcaggcagagtatgcatggatcagtttatggttgattttggtgatatggagccaaggctaggagacgaggtattaattttcggtaaaaaagatgacgaccatatctctcttgaatcaattgcaaagaatattgataccactacatatgtacttttaactgctatacaaggaagaaccgagagaataactatttgat

SEQ ID NO: 289201 - DNA, 619 bp, Unknown
  Bacterial polypeptide expressing nucleotide sequence isolated from the Sargasso Sea
aatgattatgagccatcttgcatgtggtgatgaaccaaaacataaaaagaatctagttcaattaaaatcatttaaaaaaatatgtgcacacttcccaaatgtgacaaaaagtttatcaaattctgcaggcattttacttggccgaaattatgattttgatcttgtaagacctggaatttctctttatgggggacattgtcaaaaaaaccaaaattcatctatttataaaaatgtaatttcattaaaatcgaaaatcatacaaaaaagaatagtttttaaaaatgatactgttggttatggaggaacttttaaggcaaaaaataagatgttaattggtacgcttccaatcggctatgccgatggatttttccggtctttttcaaataagggtagtttttatttgcttggaaaaaaagtaccaattattggtagaatttcaatggatcttactacaattgatttaacttcattgagaaataaaaatttaaataagaatgtccttgttgaggttattggtaacaaaaataatgttaatcatctatcaaaaataatctcaacaattccttacgaaatattaactagcctaggcaagcgatatcaaagacgatatattgcttaa

SEQ ID NO: 289202 - DNA, 1054 bp, Unknown
  Bacterial polypeptide expressing nucleotide sequence isolated from the Sargasso Sea
atgacaactcactcagctgagctaattgtcgatagctctaaaattattagcaatatttcacatcttaaatcactcataagcagtgattcaaaatttatgttcattgtgaaaagcaatgcgtatgggcacagtttaaaagagattataaaaaatcttgaaagctatgttgatgcttttggcgtcgttagaatggaagaagctattttagtcagaaaagctaccagcaagcctattcttcttatgcaaggtatctatacagagcacgaaataaatatagctagagaaaataacattcaagtagttattcataaaatgagccaacttaaatttattggcaaggatgataatgagcttggcctttgggtaaagataaatactggcatgaatcgattagggctctcacatgaagaattaaaagaagtctacgaaaatgggatcataagttctgattctgtacttatgacacatatggcatgtgcagataatccggatgatccaatcaataagatgcaaataaataactttgaaaaagcttttaacttagttgagaggaaaacgaagagaagtatttgcaatagtgcatgcttaataaatttccctgaactttcatttgattgggtgaggtcaggtatagcagcctacggcggagaatctaaaaatttaaatttaaaaacagcaatgacattcagagctccaataatttcgataagaaacataagaaaaggagaaagagttggatatggtggaagaaagaaagcatctaaggatatgagaattgcgatagtctatgctgggtatgctgacggaatccctcagacaacaactgatgggactaaagttttggtaaatgacaaacaggcagagatttttgggagagtgagcatggatttagtatcaatagatatcacaaaccttcctcaagtctcagaaaatgatcttgtttcattctggtctgaagaacttccaatcaatgaattttcaaacaacaatggattgatttcatatgagcttatgactagaatcagtagcagagtaaaagtaaaagtaatttaaa

SEQ ID NO: 289203 - DNA, 1093 bp, Unknown
  Bacterial polypeptide expressing nucleotide sequence isolated from the Sargasso Sea
aatggtttcaccaaaagcaataattcacttagataatcttgtacataactaccgcttaattaaaaatcagctgaataatttacctattatggctgttgtaaaagcaaatgcatatggacatggagtaatagaagtttcaaaagttttacaaaatgaaggtgtaaagttttttgctgtatttacttttaatgaagcattagagttgagagaagctgggattaatgaagatattctcgtattctgtaggccaacaaaagaaatgctaaaaatagcatataaaaaagatattactttaaatctaagtgacccagatgatgttagattattttatgagggtaaacaaagcccaaaatttcatttaaagatagatactgggatgactaggttgggagtatcatttaatgaagcgtatgaaattattgatttaattaaaaaagaaggactcaattgtcatggaatatatagtcattatgctacagctgatgaaggagacctaagttatgcagaatatcaacttgatcaattcaatcaattattagcttatattaataaaatagatttacaaattaattatactcatttttcaaatagtggtacagtaatcaatatgccgcattcctcgtttaatttagttcgcgttggtatgttgctatatggctctttcccttcagatgagatcccaagagacctccctataaaacctgtaatggaatttaaagggccagtagtttcattaagaaatgttaaagctggtacaaaagtaagttatggaggagtttgggaagcaaaagaaaatactgtgattggagttgttcaagtaggatttgcagatggatttcctagagaatggtatacagatgggtatatttcactaagaggaaaaaaatatcctatagctggacgagtatgtatggatcaatttatggttgactttagtaatggaaaagttgaagtaggcgatgaagtattgatatttggggaaaataaacaggataaaattttagttgatgacattgctaaagatattggatcaacaagttatgtgattttaacaggtattaaaggaagaacagaaagaaagtatgtaaattaa

SEQ ID NO: 289204 - DNA, 1054 bp, Unknown
  Bacterial polypeptide expressing nucleotide sequence isolated from the Sargasso Sea
aatgacaactcactcagctgagctaattgttgattgctctaagattattagcaatatttctcatctaaaatcacttataagcactgaatcaaaatttatgttcattgtgaaaagcaatgcatatggacacagcttaaaagagattgtaaaaaatcttgaaagctatgttgatgcttttggtgtcgttagaatggaagaagctattttagtcagaaaagctacaagtaagcctattcttcttatgcaaggtatttatacagagagtgaaataaaaacagctaaagaaaataatatacaagtagttatccataaaatgagccagtttgagttaattggcaagaatgatagtgagcttggtctttggataaagataaatactggcatgaatagattagggctttcacaagaagaattaaaattagtctacaaaaaggggattataggttcagattctgtgcttatgacacatatggcatgtggagatgatccggatgatccaatgaataagatgcaaataaataactttgaaaaagcttttgacttggttgagaggaaaacgaaaagaagtatttgcaatagcgcgtgcttaataaattttcctgaactttcatttgattgggttaggtcaggtatagctgcttatggtggagaatttaaaaatttaaaccttaaaacagcaatgacattcagagccccaataatttcgataagaaaaataagaaaaggagaaagagttggatatggtggaagaaagaaagcatctgaggatatgagaattgcgatagtctatgccgggtatgctgacggaatcccacagacaacaacagatgggactaaagtgttggtaaatgacaaacaggccaagatttttgggagagtgagtatggatttagtatcaatagatatcacaaatatccctcaagtctctgaaaatgatcttgtttcattctggtctgaagaacttccaatcaatgaattttcaaacaataatggattgatttcatatgagcttatgactagaatcagtagcagagtaaaagtaaaagtaatttaa

SEQ ID NO: 289205 - DNA, 778 bp, Unknown
  Bacterial polypeptide expressing nucleotide sequence isolated from the Sargasso Sea
tataaatccgagacaaataattgtcctagatatcatatcaaatttgacacaggaatgactcgtctaggaatagatattgaagattctgagctattatataaaaaaataattagtgatttagcgattcgccctgaaggaatatacactcatttcgcaactgcagatgagggagatctatcttatgctcatatgcaattggaaaagtttaagggtgttattgagttggcagaaaaatataatatccaatttaaatatgttcacagttcaaacagtggagctttacttaatcttcgagaatcctattttaatatgattagggtaggaatgcttttatatggagcgctaccatcaaatgaagttccaaatgatattgatatagaaccagctatgtcattttgtggtagtatagtaaaccttcgtaaagttcctaaaggaactcatgttagctatggagctatttataccacaaaaaaaaatacaaatattggtgttattcagaccgggttcgcagatgggtttccaagaccgtggtatgaacatggttttgttcattataatggtaaagaatataaaattgcaggtagggtatgtatggatcagttaatggttgattttggtgataccattcctaaaattagagatgatgtattgttttttggtaaaaatagcaatggtcatattcctatagaaactattgctgattccataaaaagtactccctatgttttgctaactgcaattggaggaagaacaaagcatatttacattcgcaactaaa

SEQ ID NO: 289206 - DNA, 692 bp, Unknown
  Bacterial polypeptide expressing nucleotide sequence isolated from the Sargasso Sea
tttgataaaagtaaatactggaatgaatagacttggtattgcgttagatgagcttgataagtttcaatcactattaaaggattcaaatgttttgatgacgcatttagcttgtgcagataacccagcagatgatcttaataatactcaatttaagaattttgactatgcttggaatcaggttgcaaatgatattcagcgaagcatattgaattctgcaggagtatttaattttcctgatcaagcatatgactgggttagaccaggcattgccatgtatggtggaattgcctttcctggtttaaaaactgctatgacgtttagaagtcaaattatctctattcaatccttagatcaaaatgaaagaattggatatggtggaagggtaacgacaagcaagccatctaaaattgctattgtttattgtggttatgcagatggtttcccccaaacagcaatagatggaacctctgtaatagtcaatagctataaatctaaaattattggaagagtgagtatggatcttatttcgattgatattacagaaatccctgattgcaaaattggagactggtgtgaattgtggtcaccggatttgtcgatattagagaatgctaaaaaaaatcatttgatttcttacgaacttatgaccaaaatgagccaaagagtgaaacgacaatacctaaatgtatgaa

SEQ ID NO: 289207 - DNA, 769 bp, Unknown
  Bacterial polypeptide expressing nucleotide sequence isolated from the Sargasso Sea
gatgagtcgtcggccgatagcgcaaattaatgtggatgcgctacagcataattttaatcatatcctcagtattgcgccgcagagtaaagtgctggccgtactgaaagccaatgcttatggccatggcttattggccgtggccgaacagcttaaagctgctggcgcttttggggtggcacggattgacgaagcgttaatgctgcgcgctggtggtattgttaaacctatagtgctgttggaaggttttttccatccggatgaattaccgcaaattgtcgcttctaacttacaggtggtggtgcatcatcgttcacaggtcgaggctttattggcggcagagctggaagccccggtgcatgtctggttgaaagttgatagcggtatgcatcggcttggcatttatccggcagaatttcatgatatttaccagcagttgatggcaagcccgaaagtgttaaagccgctgcgactgatgacgcattttgcttgtgctgatgaaccggagaatccagccacccaacgacaattggctttgtttcaacagctgattcagggctgtgaagccgagttatccattgctaactctgctggggtcctggcgtggccgcaaagccatggagattggatccggcccgggctggcgctatatggtgtctcgccaatggtggcaggtcgttccgcccagcatggtttgcgtcctgtgatgaccttcagtagctccgtgatcgcggtcaggcaagttaaaaaaggcgatgccgtgggttatggt

SEQ ID NO: 289208 - DNA, 199 bp, Unknown
  Bacterial polypeptide expressing nucleotide sequence isolated from the Sargasso Sea
gtgccgattgttggtcgtgtcgcgatggatatgattggcgtcgatcttgggcctgaggcgcaggataaatccggcgacccggtggtgctctggggggaagacctgcccgtcgagcgtattgccgcactgacgaatgtgagtgcttacgaacttattacgcggctgacgtcgcgggtcgccatgcagtacgtggattaag

SEQ ID NO: 289209 - DNA, 910 bp, Unknown
  Bacterial polypeptide expressing nucleotide sequence isolated from the Sargasso Sea
cgatctcgatgaggccgtccgtgtgcgccagcttggctggcaggggccggttctgctgctggagggttttttcaagcccgaagacctcgccatcgtcgagcagtatcgcctgaccaccaccgtccatagcgaagaccaactgcgcatgctggaactggcccgcctgaaagggcccatcagtgtgcagctcaagatcaacacgggtatgagccgcctgggcttcatgccggcggcttaccgtgccgcgtgggaacgtgcccgtgccatctccggcgttggcaccatcgtccacatgacgcatttttccgatgcggatggcccgcgtggcattgagcaccagctcgctgccttcgagctggctacgcaaggattgccgggcgaggcatcgctgtcgaactccgccgccacgctgtggcacccgaaggcgcaccgcgactgggtgcgcccgggcgtgatcatgtacggcgcctcgccgacgggcctggccagcgatatcgaaggcaccggcctgatgcccgccatgtcgctcaagagcgaactgatcgccatccaggatctgcagccgggcgacaccatcggttacggctcgcgcttcgtggcagagcgcccgatgcgcatcggcgtggtggcatgcggctatgcagacggctacccgcgccacgccccaggttggggtgaccagttcacgccggtgctggtcgacggcgagcgcacgcacacggtggggcgcgtatcgatggacatgattaccgtcgatctgtcgggcctgccgaacgcccgcgttggcacgtccgtcacgctgtggggcgaaggtctgcccatcgatgatgtggcgcatgccgctggtaccgtcggctatgaactgatgtgcgcggtcgcgccgcgcgtgccggtcacagtcgagccggtt

SEQ ID NO: 289210 - DNA, 897 bp, Unknown
  Bacterial polypeptide expressing nucleotide sequence isolated from the Sargasso Sea
gcatagaggaagcactggagctgcgcgccgccggcatccgccagccgatcctgctgctgaaaggctggttcgaggccgacgagctgccactgctggccgagcacgatctctgggccgtgctgcaccatgaagagcaactgctgcagttgcaagacgccaacctcagccgccccttgcacatctggctgaagcttgacagcggcatgcaccgcgtcggcttcagccccgctgaatacgccagcgtctggcagcgtctggccgccttgccgcaggtcgccagcctgagcaagatcacgcacttctcgcgcgccgacgagcccgagaccgggcgcaccgaacagcaactggcgacctttgccgccgccaccgccggccttgaaggccaggccagcctgtgcaactcaccgggcatcctcgcctggccgcaagcccatcacgattggctgcgccccggcatcatgctctatggcgccacgccgtttgagttcgaacaggacaacgccagcaagctgcgcccggtgatgcagctcacctcgcgcatcatcgccgtgcgcgagctgccagcgggcgagcccatcggctacggctcgcgctttatcacgccccggccgacccgggttggcgtggttgccatgggctatgccgacggctacccgcgccacgccaaagacggcacgccggtgctggtcgacggccagcgcacgggtttgattggtcgggtgtcgatggacatgctcacggttgacctgaccgacctgcccggcagcggcctgggcagcgcggttaccctgtggggcgacggcctgaacgccagcgaagttgccggttgggccgacagtattccctatcagctgttctgcaacctgaaccgcgtaccccgtcactaccgcgactgaa

SEQ ID NO: 289211 - DNA, 985 bp, Unknown
  Bacterial polypeptide expressing nucleotide sequence isolated from the Sargasso Sea
agagctaagagctaaattagatccagagaccaaaataatgtctgtaatcaaagcaaatgcatatggacatggggcaatagaagtagctaagatagcagaacaatcaaatgtaaattacctagcagtagcaacattaaatgaagcgatagagttaagattaaacaatataagacttcctattttaacgttaacaaaagatacggcgttaaacactaacaagcgagtagggttaaaattaacctcaactgtttgtagtttagaaacaataaatgctttaaataaaacagcaaagcgatttaataccatagccaaagttcatgtcaaaatagatacgggaatggggcgattaggtttttctattaaagatgctttggaattaataaaaagagttggagattttccttatattgaatgtgaaggtatttttactcatttatcaaagacagaatataaggatgaaacatatactaagtatcaattaagtcagtttaatcaattaatagaggaattagaaaagttgaaaataaaaattcccttaatacatgctgctaatacatatgctataaatttatttcctgaaagccattataaaatggtccgtgtagggttagatttatataaagatgtagtaactcttaaaagcactataggatttattaagaatgtatcaaaaggttctttgattggatacgatggtgaatatagaacaccaagagatactaggatagcagtaattaatattggttacgccgatggatatcctcgactactatcaaataaaggtgagatcgtaattaatggaaaatactaccctgttgttgggaaagtatgtatggacatgattatggttgatattggaaccagttcagaaataaatattagtgatacagtaacagtaatgggctctaaagaatttagcaatatatcgattcctcatatttgtaaattaacgaatggaaatcctagagaacttatttgtatttag

SEQ ID NO: 289212 - DNA, 857 bp, Unknown
  Bacterial polypeptide expressing nucleotide sequence isolated from the Sargasso Sea
cgaagtctgtgaaacgatcgaggatcaagttgaatcttttggtgttattacagtaggtgaagcaaaagagttaagaaaaaaaacaaaaaaacctattttgattctgcaaggagttcatgaagttgcagagtatgaagaaattaagggtttagacttagactttgtaatacattcagattggcaattagacaatattcctgatattgatttttctaatactagagcttggctaaaaataaataccggaatgaatagattaggctttcatccagaagaattctccgataaatatcaaaacctaatagataataagttcaaagatttggtactcatgtctcatttagcatcatcaagtgagaaatcagatataaaaaatgtagaacagatagagctttttaacaatctaaccaaagatcttaataataaaaaaagtcttgctaattctggggcaatatttaatttcaaagaatctcactttgatattgttaggccaggcattgctatttatggtggcaaatatttagaacatggaatcaaacctgttacatgcttaagatcaaaaataacaatgttaaaaaatattaaagctggagaaagtgttgggtatgatggttcatgggtagcagattcagattgtattattgccggcataccaataggttatgcagatggatatccttatttctctgaatcaaaagaagtcagcataaatggaaaaaaatttaaaacagctggaaagataaatatggatttaataacaatcaatcttgaacaggattctagtattaaaataggtgattgggttgaattgtggggatttaacacaaatttaactgatttctcaaaaagcatttgat

SEQ ID NO: 289213 - DNA, 827 bp, Unknown
  Bacterial polypeptide expressing nucleotide sequence isolated from the Sargasso Sea
aatggatagagggtatatatacctaaataaaaaaagttatcttcataatatagaagtactaaaaaatttatctagaaaagaactctgtttggtcgtaaaagcaaatgcctatggtcatgggttagagtgggctgtaaaaaacgccaaagaatctggtgtcaaatggtttgctgttgcttctgttgacgaaggaattgaagttaaaaaagtatatgaagattcgcgggtattattgcttgccgaaccttcaataactcagctagataatgtaaaggtaaataatatcgatcttactgtatataacgaaagctttattgatactttaattgagacaggagatgaatatagtgttcatctcaaaattgatactggcatgcacagactaggatgtcctccagagaagttttataacttatataaaaaaatagctgactcaaacttaaatctagtaggtatttgtactcactttcctttggcggatattgatgaaacagagacaaaaaaatcaattgaattatttgaaaagactatttcagatatagattcaaccaatatgatcttacatgtagataactcagcatctactttatacaaactcaataattcttttaatatggcaagagttgggattgctgcatatggtgttcaaattacagcggttgaaaataaaaatgaactaataccaactatggaaatcaaaacaagaatttctaatttgcaagtaagaaaaaaaggtgaggcagtttcctatggaaaagcacaaacactttctagagactcaattattgcgaccgcacctattggttatggtgatggctatccatgga

SEQ ID NO: 289214 - DNA, 667 bp, Unknown
  Bacterial polypeptide expressing nucleotide sequence isolated from the Sargasso Sea
cattgagaaagtgcatgaggagctcattcagcaccccttcattcgtgacgggtttgttttagcgacgcacttggccagagcggatgaccatgaagtgatgacccgcgaacagttggttgatttttcagaagcgacatccgtcttcaaaaattgtaagagtgtatgtaattcagccgctattctagcctacccgagtgcacatttggattgggtccgtccgggcattatgctctacggcgtgtcgccgtttatggggcagttgggtcgtgattttaatttgaagcccgttatgcgttttgttgcgcgagtaattagtatcaaaggggttaagcgaggacaggctattggatacggtgggggttatgtttgtaaagaagataaaaccattgcagtggttaatgcgggttatggtgatggttacccccgcacggttaagccgggcacgggagaagtgatgattcgaggcgagcgttgtaccattttaggcagggtgtcaatggacatgctaacagtggatatatcacacttgcccgaagttgaggtgatggacgtggttacgttgtggggggagggtttgccggtggagaaagtggcggaagctgcgcaaacgattccttatgatttagtgactcgggtgacgatgcgagtgccttatcaatatcattaa

SEQ ID NO: 289215 - DNA, 814 bp, Unknown
  Bacterial polypeptide expressing nucleotide sequence isolated from the Sargasso Sea
ctcgaaggcgtgttcgagccgcgcgacctggaactgtgctcgcgcctgggcctgtggcacgcggtgcattgcgatgagcagatcgacatgctggccgcccacaagacgcaggtgccgcaccgggtgttcctcaagatgaattcgggcatgaaccgcctgggcttcacgcccgagcgctaccgcgccgcgtgggcccggctcaatgcgctgccgcaggtggacgagatttcgttcatgacccacttcagcgacgccgacggcccgcgcggcatcgcgcaccagatggcggccttcaacgccgccgcgcaggacttgcccggcgaacgcagcctgagcaacagcgccgcgacgctgcgccacgcgcaggatgcgggcgtgcgtgccgactgggtgcgtgcgggcatcgtggtgtatggcagcgcgcccgacttcccggagcacaacgccagccactgggggttgcaacccaccatgacgctgtccacccgcctcatcgccacgcagcagctgcaggcgggcgacaccgtgggctatggctcgcgcttcacggccgacggcccgctcaccatcggcatcgccgcttgtggctacgccgacggctacccgcgccactgcgacaccggcacaccggtgctggtgaacggcgtgcgcacgcgcctggtggggcgggtgagcatggacatggtgaccgtggacctcacgcccctgcagcaggcgggtgtggatgtgggctttggcagcgaggtcacgctgtggggccgcgccagcaatggcgtggtgttgtccattgacgaagtggcgcaggcggcgggca

SEQ ID NO: 289216 - DNA, 787 bp, Unknown
  Bacterial polypeptide expressing nucleotide sequence isolated from the Sargasso Sea
catggagagtgttgtagagggtcttaaagaggcagatggactagcagtccttgaaatacgggaggcgagggaagcgcgagaattaggctggcaaaaaccaattttattgcttgaaggtatttttgctagacaagaattacagaatatttctaacttagatctagaaattgttcttcataactcacagcagattgcttggtgcttgagctcaaaaataaagtttagaaagatttgggttaagattaattcaggaatgaatcggttaggattcaaggaaggtagtttttcgttatctagtaatattaacgatactctaaatcaattgagatttgagtgttcgcaaacaggggcattaggttggatgacacatttcgctgttggagagtcaactgacttttgtcttgagcaagaggaagagtttaaaaaaactattagccttctcggttttagggatggtgagagcatcagttacagtaattctgatgcaattattcacaattctaaattctgtttagactgggtaaggccaggaatacttctttatggagccccatcttcactaaatcctaattttgatatgaagaccttcttgaatgtgttgcaaccatgtcaatccttacaatcagagattattgcaactcaagtcgtgaaagctggcgaggccgtaggttatgggaaaacttttgtggctctaaaagagatggtagttggtattgctgcaattggttatgcggacggatacccccgcagtataaagaaaggtacatgttgtattgttgaagggtag

SEQ ID NO: 289217 - DNA, 658 bp, Unknown
  Bacterial polypeptide expressing nucleotide sequence isolated from the Sargasso Sea
atgaacacagttacggccagcatcgatatcgatgcactccagcacaatttcgccgtggtgcgccgccatgccccccacagcaagatcatcgcggtactcaaggccaatgcctatggccacgggctgctgccggtggcccatgcactcgctcaggccgatgcctatgcggtggccagggtcgaggaggcgctggtgctgcgcgccaacgccatcaccaagcccattctggtgctgggaggcttcttcagtgccgaggcgctgccgctgctggcgaaacacgaactgcaaaccaccttgcatacctgggagcagctggcactgctcgagcaggccagtctgcccgcccccatcaaggtgtggctcaagctcgataccgggatgaaccggctcgggctgcgcgccgaggagttgcccgccttcatcgagcggctgagccattgtcgcaacgtggtacagccgttccatctgatgacccacttcagccagtccgatgaacaggatacccaggccactcagttgcagatcgaggagttcaaccgcctctctgctcatctgccgggcgagcgggccatggccaactccgccggcatcctcgcctggccggcatcgcgcagcgactggatccggcccggcctcatgctctacggcgcctccccgc

SEQ ID NO: 289218 - DNA, 203 bp, Unknown
  Bacterial polypeptide expressing nucleotide sequence isolated from the Sargasso Sea
tgaagtgccgatcgtcggtcgcgttgcgatggatatgatctgcgtcgatttaggccccgaagcgcaggataaagccggcgattcggtgattctgtggggggagggactgcccgttgaacgcattgctgaaatgacgaaagtaagtgcttacgaacttattacacgcctgacctcaagggtggcgatgaagtatatcgattagc

SEQ ID NO: 289219 - DNA, 442 bp, Unknown
  Bacterial polypeptide expressing nucleotide sequence isolated from the Sargasso Sea
atgctgtacggcgccacgccgttcgaacaggctcaggagcaggccgcgcgcctgcagccggtgatgacccttgagtcgaaggtcatcagtgtgcgtgaactgccgaccggcgagccggtgggttatggcgcgcgcttcgtcgccgaaaggccgacccgcgtcggtgtggtcgccatgggctatgccgacggctatccgcgccacgcgccgagcggcacgccagtgatggtcgacggtcaactgacccgcctgatcggccgcgtgtcgatggacatgctgaccgtggacctgaccgatctgccacaggccggcctcggcagccgtgtcgaactatggggcaagcaggtgctggccagcgacgtggccatggcggctggtagcattccctatcagattttttgcaacctgcggcgggtaccgctgctctatctcgagggctgag

SEQ ID NO: 289220 - DNA, 1084 bp, Unknown
  Bacterial polypeptide expressing nucleotide sequence isolated from the Sargasso Sea
atggatagaggatacatatacgtcaataagacaaattatttaaacaatataagttatttaaaaagtctttcaaataaagagatatgcttagttgttaaagcaaacggttatggtcatggaatagagtgggctgtcaaaactgctattgaaggcggagtaaaatggtttgcagttgctgctatcaatgaagctataaaagttcggaatgtatcagatagtgttcgcattttacttcttacagagccctcattatcggaaatagataaaatagtatcaaacaacatagatttaactgtttacaatgatttttttattgaagggctagaaaaatcaggtaattcgtttaatacgcatataaaaattgatactggaatgcatcgagttggatgtgagccagaagattttgaaaatatatatgaaaaaatcaaatcttcatcaaatataaatctcgcaggaatttgtactcatttccctgttgccgatatagaaaaagcacctacagatgtatcgattaaattattcaaggatttgatttcaaatattgacacaagtgggctactaattcatgtagataactcaggatcaaccttttataattttgatccaatgtttaatctttcaagaataggccttgcagcgtatggttgtaatataactcctgttgaagtagatcataaattaaaaccaacaatggagataaaaacaagaatatcgaatattcatcacagaaagaaaggagaagctgtttcatatggaaaagctttaacacttgagagagattcaataattggaatagcaccagttggttatgctgacggatatccatggaactcttttccggaaggaaaagtaataattgataatcaattttgcaatttgattggaagagtaactatggatcaaattttgtttgatattactgatgttaacgcacaagtgaatgatgaggttgttattcttggttcttctgaggacggaaaatctaatatctctgtttttgatattgcagagtggaataaaactattgagtgggaaattttaacaaatattacggaaagacttgaaagagtagaagttgaatgat

SEQ ID NO: 289221 - DNA, 1093 bp, Unknown
  Bacterial polypeptide expressing nucleotide sequence isolated from the Sargasso Sea
atgttctctcccaaagcgataatccacctagaaaacctaaaatataattatcatttattaaaagatcagttaaatgatgtgccgattatggctgtagtaaaagcaaatgcctatggacatggtgtaattgaaatttcaagaactttacgtgatgaaggagtgaaattttttggagtttttactttttctgaagcattagaattaagaagcgctggaattgatgaagaaatccttgttttttgtaggccctcaaaagaaatgatagaaatagcttatgataaaaatattactttaaatctttctgatacagatgatcttaaattatttcgtggaaatagattcagtccaaaatttcatttaaaattagatactggaatgaccagattaggaatatcattagatgaatcatataaaattattaaaataattaaaaatgaaacactcaaatgccatggaatctatagtcattatgctacggcggatgaaggtgatataacttattcagaacatcaactggatcaattcaaaacaatattagattttatcaaagaaatagatctttctattaattatatacatttttctaatagtggttctattattaatattcctcatagctcatataacttagttcgagtcggaatgctattatatggagcatatccatcagatgaagtttcaaaggacattcctatcaaaccagtgatggaattcaaagggcctgttgtatcattaaggaatataaaggcaggaacaaaagtaagctatggtggagtttgggaagcccctaaagatactataataggagtaattcaaacaggctttgctgatgggtttcctcgggagtggtatataaatggatatatttcacttaaagggaaaaaatatcccattgcaggacgtgtctgtatggatcaatttatggtagactttggagatgctgaagtaaagataggagatgaagtgctaattttcgggcagaacaataaagataaaatattagtagatgatatagcgaaagatattaagtcaacaagttatgtaatattgagtaatattggaggtagaacagaaagaaaatatattaattaat

SEQ ID NO: 289222 - DNA, 1045 bp, Unknown
  Bacterial polypeptide expressing nucleotide sequence isolated from the Sargasso Sea
tatgcggaaaacagaactgcagattaatctttcaaacctagagaacaatctcaaagtaataaagtcgacaacctctgcagaaatccaagcagtaataaaagcaaatgcttatggtcttgatatcaatgaaatttgtgaaaatattgaaaatgaggttgaatcttttgctgtcatcacagtagatgaagctctgaatctaagaaaaaaaacaaaaaaacccattctaattttgcagggagttcatgaaattgcagattacgataaggtaaaagattttaatttagattttgttattcattctgattggcaattatatgacatgcctgagatagatttttctaacagtagagcttggctaaaaataaatactggaatgaatagattgggttttcatccagaagaattcctagaccgatatcaaaaattagcagataaaaatttgaaagacttaattcttatgtctcatttagcctcatcaagtgagaaatcagatccaaggaacatggaacaaataaaacttttttctaatttgactaaaggcttaaataacaaaagaagccttgctaactccggagcagtatttaattttaatgaatctcactttgatattgttagacctggtattgctatctatggaggtaaatattttgaacatggaattaagcctgttacatgcttaagatcaaaaataacgatgttaaaaaatattaaagctggagatagtgtaggttatgatggttcctgggtagcagattccgattgtatcattgctggtataccaatagggtatgcagatggatatccttattcttctaaatcaacagaagttagcattaatggaaaaaaatttaaaacagcaggcaaaattaatatggatttaataacaattaatcttgagcaagattccagtattaaaataggtgattgggttgaattgtggggttttaatactgatttaactaatttttcacaagagtttgattcaatttcttatcaattattaactaatatctcgggtagagttaataaaaattatttagaatag

SEQ ID NO: 289223 - DNA, 1030 bp, Unknown
  Bacterial polypeptide expressing nucleotide sequence isolated from the Sargasso Sea
ctgcagattaatctttcaaacctcgagaacaatctcaaagtaataaaatcaacaacttccgcagaaattcaagcagtcataaaagcaaatgcttacggtcttgatattagtgaagtctgcgaaactatcgaagatcaagttgaatcatttgctgtcattacagttgatgaggctttgaatctaagaaagaaaactaaaaaacctattttaattctgcaaggaatccatgagatttcagattatcaggagataaaaaattctgatttagattttgttgtccattcagattggcaattagagaatattcctaatattgatttttctaatacaagagcttggctaaaaataaatactggaatgaatagattaggttttcatccagaagaattttctgataaatatcaaaagctaatagataagaagttcaaagatttggtactcatgtctcatttagcatcatcaagtgagaaatcagacacaaaaaatatagaacagatagagctttttactagcctaaccaaagatcttgataataaaaaaagtcttgctaattctggggcaatatttaatttcaaagaatctcacttcgatattgttaggccaggcattgctatttatggcggcaaatatttagaacatggaatcaagcctgttacatgcttaagatcaaaaataacaatgttaaaaaatattaaagctggagatagtgttggctatgatgggtcatgggtagcagattcagattgtattattgccggcataccaataggttatgcagacggatatccttattcttctcaatcaagagaagtaagcataaatgggaaaaaatttaaaacagctggaaagataaatatggatttaataacaatcaatcttgaacaagattctagtattaagataggcgattgggttgaattgtggggatttgatacaaatttaactagtttttcacaagaattcgattcaatttcttatcaattattaactaatatctcgggtagagttaataaaaattatttagaatagc

SEQ ID NO: 289224 - DNA, 1060 bp, Unknown
  Bacterial polypeptide expressing nucleotide sequence isolated from the Sargasso Sea
aatgacttgtgtcctagaaattgatctttcggcaattcgagaaaattatcagtaccttgctcgagatacgagtaaacgaatagccggagtggtcaaagcagatgcatatggattgggggcagccagagtagtctccgaattggtgaaccttggctgtaaagatttttttgttgctaatgtcgaggaaggcaaggcgctacgctctaggttcgatgagattattttgtatgtgttggagggcgtattagatagcacttatgacgacctcttgcggcacaatttaaggcctgtgctgaataccctcgctcaatgtgaactctggtcgaagcagtctgcaccctgtgcggttcacatagattctggtatggaacgattaggtctcaatgaagatgagatgaatcaagtgctcggcgacccgaaccagttaaaccctcagttattgatgagtcacctggcgagagctgatgagccagaccataggtttaaccagctacaaatcgaacggtttaacctgatcagacaacgagtaagtgatcgtttcccagaggtggaaaccagcatgacaaattctgcggggctcgctcatcggggctatgttgacgatttaggaagaccaggcattgcgctttatggaggaaatcctttcagtgatcgcagtaaccccatgtcgcctgtcgtcagattaatggcgcaagtgcttcaggtacggagggtcgaacagggtgttccagtgggctacggaggaacattcgtaactgatcaggcgagtgtcctcgcgataattggggcggggtatgctgacgggatatctcgagcactatccaataaaggtcgagcctttgtatcgggtagttattgcccaatagtcggtcgtgtaagcatggacacgatccatgtcgatgtcacgggaattgaggtaaaagagggtgattggatcgagctaataggatcgaacatgagtcttgacgaggttgcgttgcaaagcggaacgatttcctatgaagtattaacaaatctcggtaggcggtgctcgcgagtctacctaggctcggctacttaa

SEQ ID NO: 289225 - DNA, 788 bp, Unknown
  Bacterial polypeptide expressing nucleotide sequence isolated from the Sargasso Sea
tatgccacgccccatcgttgcgcagattcatcccgctgcagttgcccataatctctccatcgtcaaacagcgggcacctcgatcacgggtttgggccgtggtcaaagcgaacgcgtacggacacggcatcgagcgcattttcccggcgctcgcgagtgccgacggcatcgcgctactcgatctcgacgaagcggtccgcgtgcgcgaattgggttggacgaggccggtccttcttctggaaggtatcttccggccggatgatgtgcggatcgctcaactgttcgatctttccatggccgtgcattgccgtgagcaactcgatctgttgcgcctgtcgtcatcaggcaagcgcgtcaacgtgaatctgaagatgaactccggcatgaatcgcctcggcttccggcccgacgcataccgcgccgcgtgggaggaggcgaaatcgattccgggtatcgcggacatcacgctgatgagccatttcgcgaatgcggacgaaggcgacgttgcatggcagatggatcgtttcgatgcggtgacgcaagacatcccgggtcaacgaagtctcgcgaattccgcggccgttctgtggcatccccaggcgcatcgcgactgggtgcgcccgggtgtcgtgctctatggcggttcgcccaccggtcagtcgcgtcacattgacgacgtgggcttgcgcgcttcaatgacgttcacaagcgaagtgatcggcgtgcagtcgttgtcggcgcaggaaacagtcggctatggtcgcgccttcgccgcgaatcgtgacatgc

SEQ ID NO: 289226 - DNA, 1045 bp, Unknown
  Bacterial polypeptide expressing nucleotide sequence isolated from the Sargasso Sea
atgcggaaaacagaactgcagattaatctttcaaacctcgagaacaatctcaaagtaataaagtcaaaaacctccgcagaaattcaagcagtcataaaagcaaatgcttatggtcttgatattaatgaagtttgtgaagctatcgaagatcaagttgaatcatttgctgtcattacagttgatgaagctttaaatctaagaaagagaactaaaaagcctattttaattttgcaaggaatccatgagattgcagattatcatgagatagaaaattctgatttagactttgttgttcattcagactggcaattggaaaatattcctgatattgatttttctaaaaatagagcttggctaaaaataaatactggaatgaatagattaggttttcatccagaagaattttctgataaatatcaaaagttaacagacaagaagttcaaagatttggtgctcatgtctcatttagcatcatcaagtgagaaatcagatacaaaaaatacagaacagatagagctttttggcaacctaaccaaagatcttaataataagaaaagtcttgctaattctggagcaatatttaatttcaaagaatctcactttgatattgttaggccaggcattgctatttatgggggcaaatatttagaacatggaatcaaacctgttacatgtttaagatcaaaaataacaatgttaaaaaatattaaagctggagatagtgttggctatgatggatcatgggtagcagattcagattgcattattgccggcataccaataggttatgcagatggatatccttattcttctcaatcaagggaagtcagcataaatgggaaaaaatttaaaacagctggaaagataaatatggatttaataacaatcaatcttgaacaagattctagtattaaaataggtgattgggttgaattgtgggggtttgatacaaatttaactagtttttcacaagaactcgattcaatttcttatcaattattaacgaatatctcgggtagagttaataaaaattatttagaatagc

SEQ ID NO: 289227 - DNA, 240 bp, Unknown
  Bacterial polypeptide expressing nucleotide sequence isolated from the Sargasso Sea
aatgcaagcggcaactgttgtgattaaccgccgcgctctgcgacacaacctgcaacgtctgcgtgaactggcgcctgccagtaaactggttgcagtggtgaaagcgaacgcttacggacacggtcttctcgagaccgcgcgaacgctccctgatgccgatgcctttggcgtcgcccgtctcgaagaagccctgcgcctgcgcgctggcggtatcacgaaaccgatcctgctgctggaggg

SEQ ID NO: 289228 - DNA, 924 bp, Unknown
  Bacterial polypeptide expressing nucleotide sequence isolated from the Sargasso Sea
tggccgcggtaaggccgacgcctatggccacggtgccgtagcctgcgcgcgcgcgctggacggcgaggccgacgcgttcggcgtggcctgcattgaagaagcgctggaactgcgcgcggccggcatcagcggcccgatcctgctgctggaaggcttcttcgacgccgacgagctgccactgatcgtgcagcacaagctgtggttcgcggtggccgcgccgtggcaggtggacgcggtggaagcgttccagaccgacgccacgctgcagatctggctgaagctggacagcggcatgcaccgcctgggcctggccccggccgagttccgcgccgcgcatgcgcggctgtcggccctgccgcaggtggcgccgatggtgctgatgagccacatggcccgcgccgacgaactggacagcccgcgcacgcgcgaacaggccgacctgttcgccgccaccattgaaggtctggccggcgaaaccagcctgtgcaactcgccggccctgctgggctggccggacgtgcgcagcgactgggtgcgcccgggcctgatgctgtacggggccaacccgctggccgcgcacaatgcctacaccgagcgcctgcgcccggtgatgaccatgcagtcgaagatcttcgccacccgcgagatcgccgccggcgaaccggtcggctacggcgcccgcttcgtcgccgaacgcccgacccgggtcggcgtggtggcgctgggctatgccgatggctacccgcagttcgccccgaacggcaccccggtgcagatcgacggccagcccggccacctgatcggccgggtctcgatggacatgctcaccgtggacctcaccgacctgccgcaggccggggtgggcagcaccgtcaccctgtggggcgacgcgcccccgctggacgtgctggccccgctgtgcaa

SEQ ID NO: 289229 - DNA, 917 bp, Unknown
  Bacterial polypeptide expressing nucleotide sequence isolated from the Sargasso Sea
aatttttcacagataaaaaagcttacttctaatagcaaagtcatggctattgttaaggctgatgcttatggtcatggtcttgttagagtcgcaagcgctctttgtaatgcagatgcatttggagttgcatgtattgaagaagcagaacaacttagagctgcgtcaataaaaactccaattattctactcgaaggaccttaccaacccgatgacttatccctcattttgaatttgaatttagatattgttgttcataatgaatatcaattagaaattcttgaaaattcgaaacttgagggttcaattagggcttggttaaagatcgataccggaatgcatcgtcttggattttctgaaagtgatgcgaagaatgctttatcaagattaatttcatgcagaaatatcaaaaaaaatccaatattaatgacgcatcttgcaattgctaatgaaaaaggcaaagagctcaccactaagcaattagctagctttaaggaaattagtaatattgagaatatggaaaagaccatttctaattcagcggcggttattaattatccagaggcacatctcgactgggttagaccaggattgatgttgtatggcgtttcaccacttgttaatagtaaaggctatgaacataacttaaaaccagtaatgacacttgaatctgagataatctcaattaagtttctatcaaaaggcgaaactgttggttatggtgcaacttggacttgtccagaagacatgttaatcggaattatcgctgctggatatggcgatggttttccaaggcatgccaagtctggtacgccggtacttgtcaataacactcgctgtaagttaattggccgtgctttcatggacatgatgacagttgatctacgtaatcagcctagtgcaaaaattggcgacaaagt

SEQ ID NO: 289230 - DNA, 288 bp, Unknown
  Bacterial polypeptide expressing nucleotide sequence isolated from the Sargasso Sea
cccgtctcggcgtggtggcgatgggctatggcgacggttatccgcgcgccgcgccgtcgggcacgccggtgctagtcaatggccgcgaagtgccgattgtcggtcgggtggcgatggatatgatctgcgttgacctcggaccgcaggcccaggataaagccggcgacgctgtggtgctgtggggagaggaacttccggtagagcgcatcgccgagataacgaaagtgagtgcttacgaacttattacgcgactgacttcccgcgtcgccatgaaatacctcgactaag

SEQ ID NO: 289231 - DNA, 337 bp, Unknown
  Bacterial polypeptide expressing nucleotide sequence isolated from the Sargasso Sea
agcgggcgagccggttggttatggtggtacctggttgagcgagcgcgacacgcttctgggcgtggtggcaatgggctatggtgatggttatccgcgcgcggcgccgtctgggacgccggtactggtcaatggccgtgaagtgccgatcgtcggtcgcgttgcgatggatatgatctgcgtcgatttaggccccgaagcgcaggataaagccggcgattcggtgattctgtggggggagggactgcccgttgaacgcattgctgaaatgacgaaagtaagtgcttacgaacttattacgcgcctgacctcaagggtggcgatgaagtatatcgattag

SEQ ID NO: 289232 - DNA, 625 bp, Unknown
  Bacterial polypeptide expressing nucleotide sequence isolated from the Sargasso Sea
tatgcggttgatgacccattttgccagtgccgatgaaccgacactggacagtacccaacagcaaattgatctgtttctgaaaacagttgaaggtttggctggcgagctttgtctggccaattccgctggtactcttgcctggccacaaagccatggtcattggatccgtcctggtatagctttatacggtgtttcgcctatggagcagggcagagcagagcaacatcaattaaaagctgtgatgagctttagcagcagcgttatagctgtgcgtgatgtaaagcaaggcgacaaagtggggtacggtggcacctggactgcaccaactgatacccgtttagctgtggtcgctgtaggttatggtgatggttaccctagggcagccagcaatggctgtcctgtactgattaaaggccaacgttatccaatagttggacgggtctctatggatatgaccacagtagacattggtcatgctgacgtgcagattggtgacgaagtcgtgttatggggcgccgatttgccagtcgaagaaattgcagagcaggtgcagactattccttatgagttgctctgtaatatcaccagcagggtcgaattccgctatctaactgcagaaacctaa

SEQ ID NO: 289233 - DNA, 1072 bp, Unknown
  Bacterial polypeptide expressing nucleotide sequence isolated from the Sargasso Sea
atgccgcgcccgctctcagccacgattcatacctccgcactcgccaataatctcgccgtcgcccggcgctatgcgccgaaatccaaaatctgggctgtggtcaaggcgaatgcctatggacatggccttgcgcgcgcttttccggggctgcgtgccaccgacggctttggtttgctggacctcgaagaagccgtgaagttgcgtgaattgggctgggccgggccaattctcttgctcgaagggttctttcgtccgaccgatatcgacgtaatcgaccgctacagcctcaccacggcgctgcattcggacgaacaactgcgcatgctcgaaatggcgcgcctgtccaagcccgtcaatatccagttgaagatgaacaccggcatgaatcggctcggctacacggtggaaaaattccgctcggcgtgggagcgcgcacgggcctgccagggcgtcggccagatcacattgatgacacatttctcggatgccgacggcgagcgcggcatcgcccatcagatggaagcgttcgagcgcggtgcgcaaggcattgcgggggcgcgcagtctgtcgaattccgcggcaacgctgtggcatccggccgcgcacttcgactgggtgcgaccgggcatcatgctgtacggcgcgtcaccctcgggtgtgacgtcggcgattgccggcaccggcctgcaaccggccatgacgctcacctccgaactgatcgccgtgcagacgcttgtcgaaggcaatacggtcggctacgggtcggcgttcaaggcgcgcgcgccgatgcgcattggcgtggtggcctgcggctacgcggacggttatccacgggtcgcgccggaaggcacgccggtgatcgtcgacggtgtgcgtacgcgcatcgtcgggcgggtatcgatggacatgctgacggtcgacctcacaccgatcccgacggccaacatcggctcgcgtgtcgagttgtggggcaacgcactgccgatcgacgacgtcgcgcaggcgtgcggcacgatcggctacgagctgatgtgcgcggtcgcgccgcgcgtcccggtgcgtgcggagtaag

SEQ ID NO: 289234 - DNA, 1072 bp, Unknown
  Bacterial polypeptide expressing nucleotide sequence isolated from the Sargasso Sea
catgccgcgcccgatctccgccaccatccataccgccgctctcgcgaacaatctctccgtcgtccgccgctttgccggcccgtccaaggtctgggcggtcgtcaaggccaacgcgtacggtcacggtctcgcgcgtgtgtttcccggcctgcgcggcactgacggcttcggcctgctggacctcgacgaggccgtcaagctgcgcgagctcggctgggccggcccgatcctgctgctcgaagggttcttccgctcgaccgacatcgacgtgatcgaccgctatagcctgacgacgaccgtccacaacgacgagcagatgcggatgctggaaacggcgcggctgtcgaagcccgtcaacgtgcagctcaagatgaacagcgggatgaaccggctcggctacgtgccggagaaataccgtgccgcgtgggagcgcgcccgtgcgtgccccggcatcggccagatcacgttgatgacccatttttcggatgcggacaacgagcgcggcgtcgccgagcagctcgcgacgttcgagcgcggcgcggaaagcatcgccggcgcgcgcagcctcgcgaactccgcggccgtgctgtggcatccggatacccacttcgactgggtgcgcccggggatcatcctgtacggcgcgtcgccgtccgggctgtcgtccgacatcgccgataccgggctgaagcccgcgatgacgctcgcgtccgagctgatcgcggtgcagacgatcgggaagggccaggccatcggctatggctcgacgttctccgcgcaggcgccgatgcggatcggcgtggtcgcgtgcggttacgcggacggctatccgcgggtcgcgcccgaaggcacgcccgtgatcgtcgacggcatccgcacgcggatcgtcggtcgcgtatcgatggacatgatcaccgtcgacctgaccccgtgcccgcaggccggtgtcggcgcgcgcgtcgagctgtgggggaacgcgctgccgatcgacgacgtcgcccgccattgcggcacgatcggctacgagctgatgtgcgcggtcgccggccgcgtgcccgtgcgcgcggaataa

SEQ ID NO: 289235 - DNA, 1081 bp, Unknown
  Bacterial polypeptide expressing nucleotide sequence isolated from the Sargasso Sea
atgacacggccgtcaagagtaattatcaatataaaggcacttgaacaaaatttttctcgtataaaagaacttgctccacagtccaaagtcatggctattattaaggcggatgcatatggccacggtatcgtcagagttgccaaaacacttcgtgatgcagatgcttttggtgtcgcatgtcttgaagaagctgaacaacttagacaatcttcaattaaaacccctattgttttactcgagggaccatataaacccgacgacctagcgttaattgccaaatttaaattagatatagttatacataatgaatatcaaatagagttactagaaaaggcagaaattgagggttcgattaatgcctggttaaaaattgacacaggaatgcaccgacttggatttcctgtagaaaaagttgatgtaatgttaaatcgattattgttatgcaagaatattaattcaagacctatcctaatgactcatcttgcaactgctaatgagaagaaaaataatttaactcaacaacaattagatgcctttaaaaaaataagcaaagttatagatggagaaaagacagttgctaattcggctgctcttattaactttccggaagctcattttgattgggtgaggccgggtttaatgctctatggtgtttcgccaattgtaggtagtagtggtattgatcacggactgaaatctgtgatgacattagagtcagaaataatttcagtccaaaatttaatgaaaggggagcccgttggatacggtgcgacttggcggtgcccggaagatatgccagttggaataattgccgcaggctatggagatggttttccaaggcatgcaaaaactggcacaccaatacttgtaaataatgttcgatgtcctcttataggacgggcttctatggatatgttgactgtcgatttacgcaatcaaccaaatacaaaaataggcgataaagtaattttatggggtgattcgcttccaatagaagagattgctgtgcatgctgaaacaattccgtatgaattattatgtggtgttcataaacggttacaatttgttgaacataactaac

SEQ ID NO: 289236 - DNA, 808 bp, Unknown
  Bacterial polypeptide expressing nucleotide sequence isolated from the Sargasso Sea
gctggcggccaacaacctgcagaccgcggtgcacacctgggagcagctcgaggcgctggagcaggcggatctgcctgcccccgtggtggcctggctcaagctcgacaccggcatgcaccgcctcggcgtgcgggccgacgagatgcccgcctttatcgagcgcctcgccaggtgcaagaacgtggttcaaccgttcaatatcatgacccacttcagccgctccgatgagctggagcagcccacgactcgcgagcagatcgacttgttcagccagctgaccgcgccgctgttgggcgagcgggccatggccaactcggcgggcatcctggcctggccggattcccactgcgactggatccgccccggcgtgatcctctacggcgtctcccctttccccaatacggtggcggccgattacgacctgcagccggtgatgaccctcaagacacaactgattgcagtgcgggatcacaaggcgggtgagccggtgggctatggcgccaactgggtgtcggatcgcgatacccggctcggggtgattgccatcggctatggcgacggctatccacgcatggcccccaacggcacgccggtgctggtcaacggccgcatcgtgccgctggtgggtagggtctccatggacatgaccacggtggatctcggccccggcgccaccgacaaggccggcgacgaggcggtactgtggggtgaagggctgccggtagagcgggtggccgaccagatcggcaccatcccctacgagctcatcaccaagctcacctcccgcgtctttatggaatacgtctag

SEQ ID NO: 289237 - DNA, 1111 bp, Unknown
  Bacterial polypeptide expressing nucleotide sequence isolated from the Sargasso Sea
gatgaacacagttacggccagcatcgatatcgatgcactccagcacaatttcgccgtggtgcgccgccatgccccccacagcaagatcatcgcggtactcaaggccaatgcctatggccacgggctgctgccggtggcccatgcactcgcccaggccgatgcctatgcggtggccagggtcgaggaggcgctggtgctgcgcgccaacgccatcaccaagcccattctggtgctgggaggcttcttcagtgccgaggcgctgccgctgctggcgaaacacgaactgcaaaccaccttgcatacctgggagcagctggcactgctcgagcaggccagtctgcccgcccccatcaaggtgtggctcaagctcgataccgggatgaaccggctcgggctgcgcgccgaagagctgcccaccttcatcgagcggctgagccattgtcgcaacgtggtacaaccgttccatctgatgacccacttcagccagtccgatgaacaggatacccaggccactcagttgcagatcgaggagttcaaccgtctctctgctcatctgccgggcgagcgggccatggccaactccgccggcatcctcgcctggccggcatcgcgcagcgactggatccgccccggcttcatgctctacggcgcctcaccgtttgccggtcaactcgccgccgaccatgatctgcgcccggtcatgaccctcaagagccagctcatcgccacccgcgcctgtgcgcagggcgaggcggtcggctatgggggacactgggtggcagatcgaaaaaccaccctcggcgtggtggcggcgggttatggggatggctatccgcgcatggcgcccgaagggacccccatgctgatcaatggccgccgggtgcccatcgtgggtcgggtctccatggacatgatcaccgtcgatctggggccggcggccagcgacaaggtaggagacgaggtgacgctgtggggggaagggctgccggtggaacaggtggccgaaaagataggcaccatcccctacgagctgctgacccgcctgaccagccgggtccatctcacacactgtgacaagcgcgaacagatgccgatgttgaagctggcctga

SEQ ID NO: 289238 - DNA, 1081 bp, Unknown
  Bacterial polypeptide expressing nucleotide sequence isolated from the Sargasso Sea
atgcgcttagctactgctgaaattaacttaacggcacttgcgcataatttagcgcaggtaaagcgttttgcaccaaacagtaaagttatggcggtattaaaagccaatgcttatggccatggtttggttaaaattgcacaacatttaaatgatgcagacgcatttgcagtagcacgtatagatgaagctttagcgcttcgagctggcgggttaacaaaaccgattgtgttacttgaaggcttttttaataaagacgatttacctattttattggccaataactttcaaactattattcatgatgggtatcagcttgccgctttggaagaggctgagcttgaagcgcctttattgtgctggcttaaagtaaataccggcatgcatcgcctgggtattgccccagagcagtttgatgaattttataagcgcttgcaaaaaacacccaatgccaataacaccgttaatttaatgacccactttgcatgcgcggacgatgtaaataacaccaagacagcacagcaaatttcacagtttgactgcctagtaaataatattaaccaagcacattgcttatctaactcggcaggcattattgcttggccgaatgctcatggcgattgggtacgccctggtttaatgttatatggggtatcacctatggcaaacgcattgggtgagcagcaccagcttaaacccgttatgcgattaacgacacgtgttatagcagtgcgccatgttccagctaacgaggccgtaggatatggtgggcgttggaaaagcgataaagcgactcagttagctgtggttgctatgggatatggtgacggttacccgcgacatgcaaaagagggtacaccagtggttattggcaagcagcgctatggtattgtgggtagtgtggcaatggatatgattagcgtagacataggccaaaacgagcacaacataaaagtaggcgacagagtcacaatgtggggcccagagctaccagtagaagaaatagcacagtgcgccgataccattccttacgagcttttgtgtaatattacaccgcgcgtaagttatgagtatcagccataat

SEQ ID NO: 289239 - DNA, 1078 bp, Unknown
  Bacterial polypeptide expressing nucleotide sequence isolated from the Sargasso Sea
tttgaaaccttttccccgagcagaaattagcagtagtgcactgcagaacaatctcgccgtcttgcgtcaacaggcgagtcgcagccaagtaatggcggtggtgaaagccaatggttatggtcatggattattaaatgtcgccaactgtttacacacggctgatggctttggtttagcccgtttagaagaggcgttagagctacgcgctggtggcgtgaaggcgcgcttgttattacttgaaggcttctttcgcagtactgatttacctttgttggtggcccacgatatcgatactgtggtgcaccacgagtcgcaaatcgaaatgttagagcaggcgacgctctcaaaacctgtcactgtatggttgaaagtggattctggcatgcatcgtttaggcgtaacccctgagcaatttacgcaggtgtatgcgcgcttgatggcctgtgacaatgtcgccaagcccatacatttgatgactcactttgcctgtgccgatgagcctgaaaatcattacacccaagtgcaaatgcaaacctttaaccagttaaccgcggatttacctgggtttagaaccttagccaattctgcgggtgccctctattggcctaagagccaaggggactggatacgtcctgggatcgcactctatggtgtgtctccggtgacgggggattgcggcgccaatcatggtctgatcccggcgatgaatttagtctcgcgtttgattgcggtgcgcgatcacaaggcgggacaacccgttggctatggttgttattggacggcgaaacaagatactcgccttggcgttgtggcgattggttatggtgatggctatccgcgcaatgcaccagaaggcacgcctgtgtgggttaatggtcgccgagtaccgatcgttggtcgtgtatctatggatatgttaaccgttgatttaggcgccgatgcgacagaccttgtgggcgatgaagccctgctctggggcgccgccttaccggttgaggaagtcgccgagcatattggcaccattgcctatgaattagtgactaaactcaccccaagggtggcagtttgccttgcataa

SEQ ID NO: 289240 - DNA, 1003 bp, Unknown
  Bacterial polypeptide expressing nucleotide sequence isolated from the Sargasso Sea
gagcagcagccaagtgatggcggtggtgaaagccaatggttatggtcatggattattaaatgtcgctcattgtttacatactgccgatggcttcggcttagcccgtttggaagaggcattagaactgcgcgaaggtggtattaaggcgcgtttattattgctggagggcttttttcgcagcaccgacttacctttgttggtggagcacgatatcgatactgtggtgcaccacgaatcgcaaatcgagatgttagaacaggcaaacttaacgaagcctgtcaccgtgtggctaaaagtcgattcggggatgcatcgtttaggggtcacgcctgaacaattcactgcggtttatgctcgtttggcagcttgcgaaaatgttgccaaacctgttcatttgatgacccactttgcctgtgccgatgaaccagataatcattacactcaagtacaaatgcaaacctttaaccagttaactgcggatttacctgggtttagaaccttagccaactcggcgggtgcgctttattggcctaaaagccaaggggattggatccgtccaggcattgcgctctatggcgtatctcctgtcacaggagattgcggtgcgaaccatggtttgatccccgcaatgaacttagtctcacgtttgatcgcggtgcgcgatcataaagcgggtcaacccgtaggttatggttgttactggacagccaaacaagatactcgccttggcgttgtcgctattggctatggtgatggctatccgcggaatgcgcctgaaggcacgcctgtatggattaatggtcgccgagtgccgattgttggcagggtatctatggatatgttaaccgtagatttaggccaagatgcggcggatcaagtcggtgatgatgtgctactttgggggcaggctttacccgtagaggaggtggccgaacagattggtaccatcgcctatgaattagtgactaaactgactccaagagtagctgtttgcctagcatag

SEQ ID NO: 289241 - DNA, 712 bp, Unknown
  Bacterial polypeptide expressing nucleotide sequence isolated from the Sargasso Sea
tgaagtggattccggcatgcatcggttaggcgtaacccctgagcaatttacgcaggtgtatgctcgcttgatggcctgtgacaatgtcgccaagcctatacatttgatgactcactttgcctgtgccgatgagcctgaaaatcattacacccaagtgcaaatgcaaacctttaaccagttaaccgcggatttacctgggtttagaaccttagccaattctgcgggcgccctctattggcccaagagccaaggggattggatccgcccaggaatcgcgctctatggcgtgtctcccgtgacgggggattgcggcgccaatcatggtctgatcccggcgatgaatttagtctcgcgtttgattgcggtgcgcgatcacaaggcgggacaacccgttggctatggttgttattggacggcgaaacaagatactcgccttggtgtcgtggccattggttacggtgatggttatccgcgcaatgcaccagaaggcacgccagtgtgggttaatggtcgccgagtaccgattgttggtcgtgtatctatggatatgctaaccgttgatttaggcgccgatgcgacagaccttgtgggcgatgaagccctgctttggggcgcggctttacccgttgaggaagtggctgaacatattggcaccatcgcctatgagttagtgactaaactcaccccaagggtcgctgtgtgtcttgcataa

SEQ ID NO: 289242 - DNA, 1123 bp, Unknown
  Bacterial polypeptide expressing nucleotide sequence isolated from the Sargasso Sea
catgccccgtcccatcgtcgcccacatccgacctgacgccgtccgccacaacctcgacttcatccgccgcaccgccgcgcaatcgcgcgtgtgggccgtgatcaaggccaatgcgtacggtcatggcatcgagcggatctacccgggcctcgcagcggccgacggcatcgcgctgctcgatctcgacgaagccgtgcgcgtgcgcgaactcggctgggacaagccggtgctgttgctcgaagggatcttcgagcccgccgacgtcgagctggccgatcgccaccgcctgacggtggccgtgcactgcgacgagcagctcgacctgctgatcgcggccaggccgcagcagccgatcgacatccagctcaagatgaattccgggatgaaccggctcggctatcgccccgccgctttccgtgccgcgtgggagcgcgcggccggcgcgccgtcgatcggcaagatcacgctgatgatgcatttcgcgaacgccgacgaaggcgaagtcgactggcagctcgaccagttcgatgcggcgacggcgggaattccgggcgagcgctcgacgtcgaattcggccgccgtgctgtggcatccgcgcgcgcaccgcgactgggtccggcccggcacgatcctgtacggtgcatcgccgacgggtgcggcgcgggatatcgccgatacgccgctgatggccgcgatgacgctgacgagcaagatcatcggcgtgcagacgctgtcgccggacgagaccgtcggctacggccgccgcttcacggccgaccggccgatgcggatcggcgtcgtcgcgtgcggctatgcggacggctatccgcgccacgcaccgaccggcacgccgatcgcggtggacggcgtgatgacgcgcgtcgtcggccgcgtgtcgatggacatgctgaccgtcgatctgacgccatgcccgaacgcgggcatcggatcgggtgtcgagctgtggggcgaccaggtaaaggtggatgacgtggcggaagccagcggcacgatcggctacgagctgatgtgcgcgctcgcgcgccgcgtgccggtcgtgatcgtgccgccgggtgcatcgagcgaacagccgacgctgcggaccgggagctacgggcgctga

SEQ ID NO: 289243 - DNA, 258 bp, Unknown
  Bacterial polypeptide expressing nucleotide sequence isolated from the Sargasso Sea
tatggataatcgacccattggagtatttgattctggtatcggaggtcttactgttgttgatgctataaccaataatttatctagcgaagacataatttatgttggagatacagcaagagtcccctatggtaataaaagtaaaaatcgcatacagcaatatgcattagaaattactaagtggcttattacccaagattgtaaaatgatagttgttgcctgtaacacagtatctgcgttagccttagattattttaactc

SEQ ID NO: 289244 - DNA, 481 bp, Unknown
  Bacterial polypeptide expressing nucleotide sequence isolated from the Sargasso Sea
aactaaaaataataaaataggtgttataggcacacaagccacaattcaatcaaatgcatatgttaaatcattacattctataatgcctgatattaaagttattagtaaagcatgtccgttatttgttcctttagcagaagaagggatggttgatggggacatcccttcagctatagcagattattacttgaaagatattcagtcttctgatattgatacagtaatacttggctgtactcattatcctcttttaaaaaaagtaataggcgcagcattaggtagtcgaataactcttgttgattcgggtaatgcaatagctaaagcagtaacatttgaattagataagcataatttaatttctactattaagaaaggcggtactcaatgctttgtaacagatgatcctaaagactttgatgtttttgcttcaaagtttttacagacacctataacacaaactcagcatattgacctctcctga

SEQ ID NO: 289245 - DNA, 516 bp, Unknown
  Bacterial polypeptide expressing nucleotide sequence isolated from the Sargasso Sea
tgcccggggccattgccgccaatgaagccactcgcaacgggcacattggcgtgatcggtacgcaggccaccattcgcagcggtgcttatgagcggttggtgggcgaattaaatagcgaactgcgcgtgaccagtcgggcctgtccgttgctggtgccattggtggaggaagggtggctggatcatgaggtgaccgatgccgtgctgcgggaatatctgatgcccatgctggaaagcggcgtggatacgctggtattggggtgcacacattatccattgctcaaggaatccatcgcccgcgtgaccggaccggaggtggcgctggtggattccgctgaaacgtgtgcggcgtttgtgcagcgggaattgcaatggcatcatctgttggccaccgaaggagaggggtgcgtgcggattcatgtgactgacgagatggagcgtgtgagcgaaatggccggacggtttctcggtggaccctcgaatgctgtgcagcaggtggagctaggggcgttgtgag

SEQ ID NO: 289246 - DNA, 454 bp, Unknown
  Bacterial polypeptide expressing nucleotide sequence isolated from the Sargasso Sea
cccgccacggtggcctcagaggcctatagcgccagcatcgaagcccttcatcctggagctctgtttgtggagcaggcctgtccggccttcgttcccttgatcgaagccggggactgcagcagtgatgagttgagacaggtggccaggtcctatctcgatccgttgctggcggcgtcggtggagacgattgttctcggctgcacccattacccgttgctgattccactgttgaagcagttgctgcccgatgccatccagctgattgaccccgcgctcggggtggcccgccagttggatgcggttctgggggttcccgatgcctccaccggcgacacccttgagcttgggcaatgccgcttttgcgtcacggcggatcctgatggttttgccaaccgcgccaccccctggcttggggcccgccctgaggttcatctgcaacggctgcagagctgag

SEQ ID NO: 289247 - DNA, 350 bp, Unknown
  Bacterial polypeptide expressing nucleotide sequence isolated from the Sargasso Sea
tatggataataggcccataggagtatttgattctggaattggaggattaactgtagttaagtctttaaaagagtcgttgccgaatgaaacgatatgttatgttggagatacagcacgagttccttatggcaataaaagtaaacaacgaatacagcaattttcaaaagaaattgtaaaatggctcatccaaaaaaattgtaaaataattattgtggcatgtaataccgcatcttctttagcaatagagatattaaaaaaagaattctcaatacctatttttggtgttataaatcctggcgttgattatgcgataaatgcaacaaaaacatataatattggggtattaggta

SEQ ID NO: 289248 - DNA, 280 bp, Unknown
  Bacterial polypeptide expressing nucleotide sequence isolated from the Sargasso Sea
ttatcaataatagatacacttatattaggttgtacgcactatccattattaaaaccagcaataaaaactattacaaaaggtcttacattaattgattcagcagattcagttgcaaatgaaacaaatgagattctaaaaaataataattttattaatgataataataatcagggacagaaaaaattttatgtaacagattctcctttaaatttttctaatgtagcaaaaagatttttagggtatccgattaaagatgttgaaacagcacgaatcagctgat

SEQ ID NO: 289249 - DNA, 466 bp, Unknown
  Bacterial polypeptide expressing nucleotide sequence isolated from the Sargasso Sea
ggtgtatttgggaacaacagcaacaatatcttctaaatcttacgaaaacactttactaaaaataaatcgcgatataaatgtctttagcaaagcttgtccactatttgttcctttagcagaagaaggttgggttagtggaaatattccaaaatcaattgctgaaatatatttaaaaggaataaaaaaatctaatattgatactataattcttggttgcacacactatccattaattaaattagtaatatctgaaatactaggaggggaaatcaaccttatagattctggcaaagctgccgctgaatcagtagaagaaattttgattagaaaaaacctcaaagcatatataaataatatcccggaaattaattgttacgtgacagattcagtcgaaacattcattgttcttgctgataaatttttgacttttccaataaattcaataaagcatattgaaatattctaa

SEQ ID NO: 289250 - DNA, 424 bp, Unknown
  Bacterial polypeptide expressing nucleotide sequence isolated from the Sargasso Sea
cttaaggtaatcagacctaaaatcaatattttaaatcagccttgtcctctgtttgtaccgcttgtcgaagaaggattaacaagggggccaataactaaattgattgtagaatcttacctgagtcattttaaaaatactgatgtagatactctcattttagggtgtactcattacccaatattaacagcagtaatcaaagatgtagtgggtaaaaatataagccttgttgattcgggtaaagctaccgctaaggtggtcatggatgtcttgaaaaaaaacggcattctttcaaaagagtctaatggtggagtgcactcctttgtaacagattcaaagcaatcattccaaaaggtaattactaaggctctgacttctgaaattaatattagtattaaatctattaatcgcattgacatcggctaat

SEQ ID NO: 289251 - DNA, 573 bp, Unknown
  Bacterial polypeptide expressing nucleotide sequence isolated from the Sargasso Sea
acaccaccaatgccctggcgcgggacgtggctgaggggcaggcgggtggcccggtgatcgggctgatcggtgccgcggcggccatggtggagacccggcgggtgggagtgctggcgacaccagccacggtggcctcggcggcctacagcgccagcatcgaagccctccatcccggagctcttgttttggagcaggcttgtccggctttcgttcccttaattgaggctggtgactgcagcagtgacgaactgagacaggtggccaaggcttatctcgatcccctgttggcggcctccgtggaaacgattgttctcggctgcacccactacccattgctgattcctttgttgaagcagttgctgccggatgccattcagttgattgaccctgcactcggagtggcccgtcagctcgatgctgttctcggtgttccccggtcaacacccggcgacacccttgagcttgggcaatgccgcttttgcgtcacggcggatcctgatggttttgccaaccgcgccactccctggcttggggcccgccctgaggttcatctgcaacggctgcagagctgag

SEQ ID NO: 289252 - DNA, 700 bp, Unknown
  Bacterial polypeptide expressing nucleotide sequence isolated from the Sargasso Sea
atggctgttggcatatttgattctggactaggtggcttaacggtgttggatgcggttcaacatagaatgcctgatttacccctcgcttatatgggggataacgcgcatgcgccttatggtgttcgaggcgcggatgacgtgtatgaattgacgcaaaagggtgtagagcgcttgtggcaagaaggatgtgatctggtaatccttgcatgtaatacggcctcagcagctgcccttcggcgaatgcaagaaaattggataccatcagacaaacgtgttcttggcgtttttgttcctcttattgaggccctgaccgaacggcaatggggcgacaactctccgcccaaagaggtttccgtaaaaaatgtggctctgtttgcaacaccggccacagtttcaagccgcgcatttcaaagggaattggcgtttcgggccattggcgttgatgtcgaagcgcaatcttgcggcggcgttgtggacgccattgaagagggggataatattctagctgaagcgcttgtacgaagccatgtgtcggctcttttgcgcaaaatgccaaaaccacaggcggctatccttggctgcacacattatccgcttatgcaggatatatttcaggatgccctcggtccaagagtaaaagttttttcgcaagcaagccttgtggctgaaagccttgccgattatcttgtccgccatccga

SEQ ID NO: 289253 - DNA, 640 bp, Unknown
  Bacterial polypeptide expressing nucleotide sequence isolated from the Sargasso Sea
gcctcacaaataacaaggtttcttttagaaaaaaatgcaaaattaattatcgtagcctgtaatactgcctcagctcttgctattcccacacttcaaaatgagtttaatgttcctgtagttggcgtaataagtcctggagctaatgctgcagctcagattacaaaaaacaataatattggagtggttggtacaattgcaaccataaactccaaggcctatcataaagaattaattaaaataaacccctcaatcaatacgttttcccaggcgtgtcctttatttgtcccccttgtagaggaaggtctattaagtggggcaatagtctcatctataataacttattatattaacaatcttgacttatcaacaatagatacacttatattaggttgtacgcactatccattattaaaaccagcaataaaaactattacaaaaggtcttacattaattgattcagcagattcagttgcaaatgaaacaaatgagattctaaaaaaaaataattttattaatgataataataatcagggacagaaaaaattttatgtaacagattctcctctaaatttttctaatgtagcaaaaagatttttagggtatccgattaaagatgttgaaacagcgcgaatcagctgat

SEQ ID NO: 289254 - DNA, 667 bp, Unknown
  Bacterial polypeptide expressing nucleotide sequence isolated from the Sargasso Sea
ctggtggtggcatgcaacaccgccacggcagccgccatccatgaggtgcgaagcagccacccagaattgcccctggtgggcctggagcccgccgtgaagcccgctttggtcgtgacccaaacagggcatgtgggtgtcatcggcacccggggcacgctgaccagcgccaagttcggcaagctcatggcctcgctggccgaccaggcccattttgtggtgcagccctgcgacggtctggcgcacgccattgagcgcagcgtggccctgcccgccgctgcccctgacagccctgtcagcaccacagagaccggcgcgctgtgcgaacgctatgtgcaggccatgggcagctttggcaccggacccgggcagatggacaccctggttctcggctgcacgcactacatttttgtggcccatgagttgcgcgcactggtggggccggacgttcagttcatcgaaacgggtgaacctgtggcacgccagacgcggcgcctcttggaggcggccggtctcctcgcgttgccaccgtccggccagcccacatcccctatgggctcggagcccgtacaactgctcaccaccggccctgtcgccatgatgcaggcagcagcccagcgctggctgaacctgcctgccagactctgccagagcgtgtcagtgccttgat

SEQ ID NO: 289255 - DNA, 817 bp, Unknown
  Bacterial polypeptide expressing nucleotide sequence isolated from the Sargasso Sea
atggcagttggtatttttgatagtggcctagggggccttacagtcttggatgctgtaactaagaaactacctgaggaatcttttgtgtatatgggtgataatttacatgcgccctatggtgttcgcgaaccctcacatatttttgatctaacaataaaaagtattgaaagaatgtgggatgagaattgtgatttaattattcttgcttgcaatactgcttcagcggctgcgcttaagagaatacaggaagagtggctcccgaaaaacaagagagtattgggtgtttttgttccattaattgaacgtttaacaaaaagaaattggggagataattctccaccgcgagaggttgatgttcaaaatgtggcattgtttgcgacaccatctacagtagctagcagggcttttcagagagagttggcctttagagccattggtgttgatgtggaaagtcaagcatgtggtggcttggttgacgctattgaagatggagatataattttagcagaggcattagttcgatcgcatgtcgatgcactgaaaagaaaaatgccaaaacctcaagctgcaattttgggctgtacacattatcctcttttggaagaagtttttcaggatgcattaggaaaaaaagtgcaggtttattcgcaagctaaccttgttgcggaaagtttatcagattatcttaagagacatccagacttaagtagtactaataacccaaaaaatagatttataacgactggagatccggctattgtttccatgcgagcaagtcaatttcttaaaaggtcagttgaatttacatcagcatagg

SEQ ID NO: 289256 - DNA, 400 bp, Unknown
  Bacterial polypeptide expressing nucleotide sequence isolated from the Sargasso Sea
atgcctgatattaaagttattagtaaagcatgtccgttatttgttcctttagcagaagaagggatagttgatggggacatcccttcagctatagcagatttttacttgaaagatattcagtcttctgatattgatacagtaatacttggctgtactcactatcctcttttaaaaaaagtaataggcgcagcattaggtagtcgaataactcttattgattcgggtaatgcaatagctaaagcagtaacatttgaattggataagcataatttaatttctactattaagaaaggcggtactcaatgctttgtaacagatgaccctaaatactttgatgtttttgcttcaaagtttttacagacacctataacacaaactcagcatattgacctctcctgat

SEQ ID NO: 289257 - DNA, 690 bp, Unknown
  Bacterial polypeptide expressing nucleotide sequence isolated from the Sargasso Sea
ccgcccgtgtaccatatggcaataaaagcacccaaaagatacaacaatattctcatgagatagctgaatggctcatgcaaaaaaattgtaaaatgattgttgtcgcttgcaatacagtttcatcactagcaatggattacttgcaatcttattttcccttacctatcattggagtaatacagcctggtgttgattttgcaattcaaacaactaaaaataataaaataggcgttataggcacacaagccacaattcaatcaaatgcatatgttaaagcattacattctataattcctgatattaaagttattagtaaagcatgtccgttatttgttcctttagcagaggaagggatagttgatggggaaattccttcaggtatagcagatttttacttgaaagatattcagtcttctgacattgatacattaatacttggctgtacccattatcctcttttaaaaaaagtaataggcgcagcattaggtagtcgaataactcttgttgattcgggtaatgcaatagctaaaacagtaacatttgaattagataagcataatttaatttctactattaagaaaggcagtactcaatgctttgtaacagatgaccctaagtactttgatgtttttgcctcaaagtttttacagacatctatagcacaaactcagcacattgacctctcctgat

SEQ ID NO: 289258 - DNA, 402 bp, Unknown
  Bacterial polypeptide expressing nucleotide sequence isolated from the Sargasso Sea
catggataatagaccaataggggtattcgattcagggcttggtggtttgacagtggttaaggcattaaaagaactactcccaaatgaatcaattgtttattttggagatactgcccgactgccatatggtgtaaaaagtcaaaatttaattaaacaattctccaaagaaataataaaatttttattagaaaaaaatgcgaaggcgattatcattgcctgcaacacagcaaccgctatggctcttaactcactaaaaaatgaatttaataatattccaataattggagtaattgagccgggttctgaaaaagctgtttttgaaacaaccactaataaagttggtgttattggaactatagctacgatttcttccggctcatatgaaaaatcaatacatcaaaa

SEQ ID NO: 289259 - DNA, 334 bp, Unknown
  Bacterial polypeptide expressing nucleotide sequence isolated from the Sargasso Sea
ctgaggagtaaagtggataatagaccaataggagtttttgattcagggcttggtggattaacggttgttaaggcaataaaggagttactcccaaatgaatcaattgtttattttggcgatactgcacgtttaccatatggtgtaaaaagccaaagtttagttaaacaatattctaaagaaatagtaaaatttttattagaaaaaaacgcaaaggcagtcattattgcttgtaatacagcaactgctatggctcttaattcactaaagaatgaatttaagaatattccaataattggggtgattgaaccaggttctgaaaaagctatttatgaga

SEQ ID NO: 289260 - DNA, 802 bp, Unknown
  Bacterial polypeptide expressing nucleotide sequence isolated from the Sargasso Sea
tttgagcagagaagaattaccaataggtgtatttgactccggtatgggagggctaaccgttcttaaagagttgtgtcagcgattgcctgatgaagatttcatatatctaggagacacggctcgcttgccctacgggaccaagtcaccgcagactgtgcacaagtattcgatgcaagccgctgacaaattaatgcagatgaaggttaaggcgcttgtgattgcttgtaacacggcagcttccttttcgctgggcaaactatcaacagcttattatcccacgccggtatacggggtgatagagcctggtgctgagaaagcctgtgagcgggtggatgcgagcggcatattagtgttggccacggagggaaccgtttcgggtggtgcgtatcaacggtcaatacttaacaaaaacccagaggccccggtttatgctcgtgcttgcccgctttgggtaacgttggctgagcagcgacagcaagatgatcacattacgaggagcttgattgaatactatttgcaagggtttattggtaaagggcccagtacggtcttactgggctgtacgcacttcccgttatttacagctttcataagagagatgttaggagaaggctgtagggtagttgattcggcggtcaccacagctaatcatgttgcaagtgaacttgagctgaaagggttgttgaactcaaatggaggcgagatatcttttatggcaacggatggtcttggcaggttttcaaggattggggaacaattcttgaataccaagatagtaaatgtctccgaggtcgatttatag

SEQ ID NO: 289261 - DNA, 749 bp, Unknown
  Bacterial polypeptide expressing nucleotide sequence isolated from the Sargasso Sea
tatgagtaataacccaatcggattttttgattcaggtataggaggtgttactctgtggaaagaagttcacagcctgcttccatatgaaagtaaaatctatctggctgattcaattaattccccctacggagacaaaagtgataaagagctagaggaaatttcatttaaaaattcagaatttttactagaaaaaggatgtaaactaattattgttgcttgcaatacagcaacaacaaaatgtattgaaaaacttagaaagagatttgatataccttttattggaattgaacctgcaataaaaccagcagctttaaatacaaaaacaggtaaagtaggagttttagcaactaaaggcactttagggagcgacttattttataaaacatctaataagcatgctagctctgttaagattatagagcaaagtggtagaggtcttgttccacttattgaacaaggaaaaatagatggagatgaaataaaaaatctattaaaaaaatatcttcaggtaatgattaatgaaaatgttgacaaactagtgttagggtgcactcactatcctttgattatcaaatctatatcagaaattttacctgaaacaattgaaattattgattgtaataaagccgtagctattcaaactaaaaaagttttagaaaacaatagaattattaatttgaataaaattgaatcaaataatattttttataccaactctgaaagtaatattcttggtaaaataattgata

SEQ ID NO: 289262 - DNA, 333 bp, Unknown
  Bacterial polypeptide expressing nucleotide sequence isolated from the Sargasso Sea
tatggataatcgcccaataggtgtttttgattctggcgttggtgggctgactgttgtaagcgcattagtacaaaacattccaagtgaaacaatatactatgttggtgatactgcaagagttccgtatgggaataagagcaaggataggattcagcaatattctgaagaaataattgagtggctaataaaaaaagactgtaaaatgattataatcgcttgcaacacggcatcatctttggcaattgattatttggaaaaaattttttcattgccgatcattggagttattgacccaggggttcgccttgcaataaataaaacaaatagccaatc

SEQ ID NO: 289263 - DNA, 667 bp, Unknown
  Bacterial polypeptide expressing nucleotide sequence isolated from the Sargasso Sea
actggtccatattggtgaaaagtccaagaaagaaattgatgaaatatcaatttataattcccggtttttaattgacagaaattgtaaaattatagttgtcgcatgtaacactgcaactacaaattccatttcaaagctcagaagaaaatttaaagttccatttattggaatcgaacctgccataaaacctgcagccctcaattcaaaaacaaaaaaggttggagtattagcaacaaagggcaccttaactagtaatttattttttaaaacaagttctgatcaaatagcagacgttgaattaattaatacctacggagaaggtttgatagaattaattgaaaagggtgattgtgaaaatgaactcaatgttttactaaaaaaatatctaattccaatgattgattatggtatagatcagcttgtacttggttgtacacattaccctctaataaaagactccataaaaaatatagtaggtgaaggtattaatgtagttgactgtaacgatgcagttgcaatgcaaacaaaaagaattttagaattaaattatcttattcaaaacaacaaattagattcaccaaatcattgtttttttaatagtggcgaagatgacttttctattaaagaaatccttcaaaataaatatgaaatttttaaatttgaatag

SEQ ID NO: 289264 - DNA, 680 bp, Unknown
  Bacterial polypeptide expressing nucleotide sequence isolated from the Sargasso Sea
gatgcctgatagtcgaccaattggtgtttttgattcaggcttagggggattaactgttgcgaaagccataaaagaaaaactaccgaatgaaaacatagtttacctaggtgatactgctcgggtaccctatggcaataaaagcacatcgttagttacaagttatgctacacagatcacgaatttcctccttggtgaaaatgcgaaattaatagtagtagcctgtaataccgcatctgcccttgcactaccagcattacaatctgaatttctagtgccaatcttgggagtaattattccaggatcacaagctgcggttcttgcaacacgtaataagcatgtaggagtaattggtaccaccgcaacaattaattctaatgcgtatactcatgcattgaggggaatcgaatcatcgatacaaattactgcacaggcttgtccattatttgtaccacttgtggaggaaggttggttgaatggcccagtacctttagaaataaccgcatcttacttaaaaagcatcaatatggcaaatgttgatactttaatcttaggctgtactcattatccactgttgaaaccaatgataaaggatattgttaatgataatactgttatcattgattcagctgaaactgtagctgaaggagttgctactatacttctcgacaagaaaattagtg

SEQ ID NO: 289265 - DNA, 694 bp, Unknown
  Bacterial polypeptide expressing nucleotide sequence isolated from the Sargasso Sea
aagcattgatattattgaaaagcgatcgcttcaaatttgcaagtattttattaaagaaaaaaaagttagctgcttagtcatagcatgtaatactgcttctgctgtgttttttaatactttagaaaaaaaaattaagaaaaaacaatggtataatgaagttccaatttttggtgttataaaccctgttgttagccatataaaaaacaatcaatataaaaaaattgctattattggcactgagcgaacagttgcatctaaatcatataaaaaagtaataagcaggtttaacagcaatatagaagttatgcaaactgcctgtcctctatttgttccaatgattgaagaaggcctaataaacaaaaaattaatgatggatatcattgatctatacctgcggccatttaaaagccaaaatatagatgctattatattgggatgcactcactaccccatcattgctaatcaaataaataaatattttaaaaataagattgagataattgatacaggaaaatcagttgctgaagaagttcatttgtttgtaaagaaatatcatattaaccaatcaaagaaacaaccaacaattaaaatactttctaccgatataacaactaattttcatgatatgacaaggagaatattgaacattgataatataaatgtgaataaaatagattttaatggacccatttaa

SEQ ID NO: 289266 - DNA, 541 bp, Unknown
  Bacterial polypeptide expressing nucleotide sequence isolated from the Sargasso Sea
gcgccagtactaccccgactggccgctggtaggcatggagcctgcggtcaaacctgctgccgcggccacgcgcagtggtgtggtgggtgtgctcgccactacgggcacactgcaaagcgccaagttcgccgccttgctcgaccgttttgccaccgatgtgcgggtgattacccagccgtgcccgggcctggtggagctgattgaagccggcgacctcaacagccccgccttgcactccctgctgcaaggctatattgagccgctgcttagcgccggttgcgacaccatcatcctgggttgcactcattatcccttcctcaagccactcctggcgcagatgctgccccccagcatcatcctcattgataccggcgccgccgtggcgcgccagctcaagcgcttgctgggtgagcgcgacctgctggccattggcgaacctgaacctgcacagttctggaccagcggcgatctgtgtcacctaagaaacatcctaccgacactttggaaacatcctggagttgtgcgaagctttggctcgtga

SEQ ID NO: 289267 - DNA, 673 bp, Unknown
  Bacterial polypeptide expressing nucleotide sequence isolated from the Sargasso Sea
ctgactccaaataattcaccatatggaacaaaatcttatgatgaattaataaatatttccaaagaaaatgttgattttttaatcaataaaaaatgtaaacttattgttgtcgcatgtaatacagctacaactaattcaataaattttttgagagaaagctatgatttaccttttattggaattgaaccagctattaagcctgcagcattaaatacaaaaacaggtaaaattggagtcttagcaacaaaaggcactctcggaagtagtttatttgaaaaaacatccaatattcatggtaataaagttgagattattgaacaacatggaataggattggttgaattaattgaaaaaggaatatactctggctctaaaattgattctttattaaaggagtatcttaatccaatgatagaaaatgatattgataagttagttttaggatgtacccattaccctttaattatagattcaatcaaaaaaattattaatgagtctattgaaattattgagtgcagtgatgcagtagctcttcaaaccaaaagaattttaataaaaactaatttgataaattctcgtgctgaaaaatcagaaaatttattttatacaaatggagataaaaatgtcttgaatagtttattaaataataaatttgaaattttaatggtttagt

SEQ ID NO: 289268 - DNA, 712 bp, Unknown
  Bacterial polypeptide expressing nucleotide sequence isolated from the Sargasso Sea
aaatattatatatgtgggggacactgcccgtgtaccatatgggaacaaaagtgcaccacttataattaaatatgcctcacaaataacaaggtttcttttagaaaaaaatgcaaaattaattatcgtagcctgcaatactgcctcagctcttgctattcccgcacttcaaaatgagtttaatgttcctgtagttggtgtaataagtcctggcgctaatgctgcagctcagattacaaaaaacaataatattggagtggttggtacaattgcaaccataaactccaaggcctatcataaagaattaattaaaataaacccctcaattaatacgttttcccaagcgtgtcctttatttgttccccttgtagaggaaggtttattaagcggggcaatagtctcatctataataacttattatattaacaatcttgacttatcaataatagatacacttatattaggttgtacgcactatccattattaaaaccagcaataaaaactattacaaaaggtcttacattaatcgattcagcagattcagttgcaaatgaaacaaatgagattctaaaaaataataattttattaatgataataataatcagggacagaaaaaattttatgtaacagattctcctttaaatttttctaatgtagcaaaaagatttttagggtatccgattaaagatgttgaaacagcacgaatcagctga

SEQ ID NO: 289269 - DNA, 614 bp, Unknown
  Bacterial polypeptide expressing nucleotide sequence isolated from the Sargasso Sea
taatacccagtttttaattgaaagaaattgtaaaattatagtcgtcgcatgtaacaccgcaactacaaattccatttcaaagcttagaattaaatttaaagttccatttattggaatcgaacctgctataaaacctgcagctctaaattcaaaaacaaaaaaggttggggtattagcaacaaaaggtacgttaactagtgatttgttttttgaaacaagttctgatcacaaagcagatgttgaattgattaatacctacggagagggtttgatagaattaattgaaaagggtgatcgtaaaaatgaactaattgatttattaaaaacatatctaaatccaatgattgatcatggtatcgatcaacttgtacttggttgcactcattatcctctaataaaagattccataaaaaatattgttggcgaagctattaatgtagttgactgtaatgatgcagttgcaatgcaaacaaaaagaattttagaattaaataatcttataaataaaaagacattaggtccaccaaatcattgtttttttaatagtggagaagatgatttttctattaaagaaattcttcaaaataaatatgaaatttataaatttgaatagt

SEQ ID NO: 289270 - DNA, 262 bp, Unknown
  Bacterial polypeptide expressing nucleotide sequence isolated from the Sargasso Sea
tatggataatcgcccaataggtgtttttgattctggtgttggtgggctgactgttgtaagcgccttggtgcaaaatattccaggtgaaacaatatactatgttggtgatactgcaagagttccatacgggaataagagtaaggataggattcagcaatattctgaagaaataattgagtggttaataaaaaaagactgtaaaatgattataatcgcttgcaacacggcatcatctttagcaattgattactggaaaaaaaat

SEQ ID NO: 289271 - DNA, 323 bp, Unknown
  Bacterial polypeptide expressing nucleotide sequence isolated from the Sargasso Sea
cttgtcgcaaccaatattagtattcgattctggcatcggtgggctatccgtattggccgaaattcgcaaattgctcccacatcacgattactgctatttgttcgataatgccagattgccctatggcgagttggaagagcaggaacttgtctcgggttgtgttgcgctcatcgaccaagtcgtcgagcgtacccatgccgccattgtcgtcgttgcctgcaataccgccagtactgtggtgctgcccgcgctgcgtgcaacttatctattcctgtttgtgggtgtggtccccgccattaaacccgcggcgcagttatctaaga

SEQ ID NO: 289272 - DNA, 707 bp, Unknown
  Bacterial polypeptide expressing nucleotide sequence isolated from the Sargasso Sea
gtcgattcgttacgtcggggatacctctcgaggtccgtacggtccactacccatcgcccaggttcgcgagtattcactcgaaatcatggatggcttggtcgacgacggagtcaaagccttggtcatcgcctgcaactccgccagcgctgcaactctgcgtgacgctcgcgaaaggtacgaggttcccgtcatcgaggtcgtgcatccagccgtgcgtcgtgccgtctcggcgacgcgtggtggccgtgtcggtgttatcggaactgaagccactatcgcatccggggcatacatcgacgcattcgcggcagcaccgcaggtcaccgtgtactcgcaggcgtgtccgcgcttcgtcgaactcgtggaagcgggagtgacgagcggcgacgaagccatcgcggtggcacgtgagtacctggccccactccaggagtccgaggtcgacaccctcgtgctcgggtgcacgcactatccattgctgaccggtgtgctcgcgtacgtcatgggggacgacgtcaccctggtgtcgagcgcggaagaaacagcgaaagatgtctaccgggtgctcgtggccggggatctcctgcgcagtgagggcgaggggtcaccaacctatgagtttctcgtcaccggcgatccggatgctttcgaagaccacggtcgccggttcctcggtccggaaatagggcgcgttagttctctatagg

SEQ ID NO: 289273 - DNA, 759 bp, Unknown
  Bacterial polypeptide expressing nucleotide sequence isolated from the Sargasso Sea
gtggattaactgtagtcaaggctatgaaaaaactattaccaaatgagtctatcttatattttggtgatactgcacgtctaccatatggagtaaaaagcaaagaactagtaattcaatattcaaatcaaattgcaaaatttttaattaaaaaaaatgcaaaaatgattattgttgcttgtaatacagcaactgcaatggcattagaagaattaaagtataattttaaagacactccaataattggagtgattaagcctggctcaattcaagcttcattagattcaaaaaataaaaagataggagttataggtactgttgccacaattaaatcaagagcatatgagcatgctttaaaatcaattgataataatattaatgtcttttcaaaagattgcccactatttgttccttttgttgaagagggaatggttgagggtgaagcaattaatttaattgttgagcactatctctctagttttctaaataacatagacaccatgatactaggttgtacgcattaccctttattagaatctgtaattaaaaaatatgtaaaaaatattaagttagtggattcagcatctgcagttgcaaaacacgccgataagattttaaatgatcatgaaataaaaaataaatataaaaaaagagtttcattagactgttttgtaacagatctgcctagacaatttgaaaaacttgggagaatttttttaggcgagtcaatcaaagagcctcatttagttgatgacttttagt

SEQ ID NO: 289274 - DNA, 711 bp, Unknown
  Bacterial polypeptide expressing nucleotide sequence isolated from the Sargasso Sea
gctgaggaataaagtggataatagaccaataggagtttttgactcagggcttggtggattaacagttgtgaaagcattaagggggttactcccaaatgagtcaattgtttatcttggtgacacagcccgactaccatatggtgtaaagagtcaaagtttagttaaacaattctctatgcagataacaaaatttttattagaaaaaaattcgaaagcaattatcatcgcttgtaatacagcaacagctatggcccttaattcattaaaaaatgaatttaaagatgtcccaataattggggtaattaaaccaggttctgaaaaagcaatttctgaaacaatcactaaaaagattggtgttattggtacaattgctacgatttcttcaggtgcctataaaaaagcaattcaacaaaaggataatagtattgaaattatatctaaagcatgccccttatttgttccttttgtcgaagaaggattaattaatggtaccgcgattaatgaaatagctaaacattatttatcttcctttaacaacaaggttgacactttaattttaggatgtacccattacccattgctaaaagatattatttttgaaaacactgaaaatattaatttaattgattcagcttcatctgtggcagaggttgcttataaagtattgtttgaccagaaattattaagtcatgaaaaccccccaggtacttt

SEQ ID NO: 289275 - DNA, 802 bp, Unknown
  Bacterial polypeptide expressing nucleotide sequence isolated from the Sargasso Sea
atgccagatagcagacccataggaatttttgactcaggattgggtggccttactgttgtagatgctataaatcgaaagacgcctaatgaaaatattatatatgtgggggacactgcccgtgtaccatatgggaacaaaagtgcaccacttataattaaatatgcctcacaaataacaaggtttcttttagaaaaaaatgcaaaattaattatcgtagcctgtaatactgcctcagctcttgctattcccacacttcaaaatgagtttaatgttcctgtagttggcgtaataagtcctggagctaatgctgcagctcagattacaaaaaacaataatattggagtggttggtacaattgcaaccataaattccaaggcctatcataaagaattaattaaaataaacccctcaatcaatacgttttcccaagcgtgtcctttatttgtcccccttgtagaggaaggtctattaagtggggcaatagtctcatctataataacttattatattaacaatcttgacttatcaataatagatacacttatattaggttgtacgcactatccattattaaaaccagcaataaaaactattacaaaaggtcttacattaattgactcagcagattcagttgcaaatgaaacaaatgagattctaaaaaaaaataattttattaatgataataataatcagggacagaaaaagttttatgtaacagattctcctctaaatttttctaatgtagcaaaaagatttttagggtatccgattaaagatgttgaaacagcgcgaatcagctgat

SEQ ID NO: 289276 - DNA, 398 bp, Unknown
  Bacterial polypeptide expressing nucleotide sequence isolated from the Sargasso Sea
tatggatgatagacctataggagtatttgactcaggtgttggtggattaacagtcgttagtgcgctatcaaatgcattaccaaatgagtccatatactatgtcggtgacaccgctcgtgtaccatatggtaataaaagtacccaaaagatacaacagtattctcatgagatagctgaatggctcatgcaaaaaaattgtaaaatgattgttgtcgcttgcaatacagtttcatcactagcgatggattacttgcaatcttattttcccttaccgatcattggagtaattcagcctggtgttgattttgcaattcaaataactaaaaataataaaataggtgttataggcacacaagctacaattcaatcaaatgcatatgttaaatcattacattcta

SEQ ID NO: 289277 - DNA, 985 bp, Unknown
  Bacterial polypeptide expressing nucleotide sequence isolated from the Sargasso Sea
tttgccaaagcaggcgccgtgcgggcgatatacttgcgcacttccccgttttcgtgagtttcccgtgaccggtgcgccgcgcgtctccttatcgcctatgtccacagaatcgccgtcttctagtgtcggaattgccaactccggtgacaattcacgagcgccggtcggcattttcgattcgggtctgggcggtttgtcggtgttgcgggcggttcgggcgcaactgcccaacgaggcgctcatctacgttgccgactcgctctacgccccctatggcgaacgcgacgacgacttcatcgccgatcgcaccctcgcaatcggggaatggctcgccaaacaaggcgcgaaagcgctggtggtcgcgtgcaacacggcgaccgcacagtcgatcgcgctggtccgcgaaaagctggcgatcccgctggtaggcgtcgaaccgggcatcaaacccgccgcgctgcagtcgaaaacacgtgttgccggcgtactcgccactcaggtgacgttgcgcagcgcgcgcttccaggccttgctcgagcgctacgccagtgactgccgttttctttgccaaccgggccacgggctcgtgcaggcggtggaacgctgcgacgtcgggtccgctgaactgcgcgccctactgcgcagctatctggagcccatgctcgacgccggcgccgacactctggtgctcggttgcacccactatccgtttctcgacgcggcgatccgcgatatcgtcggcgaccggctgatgctgatcgatacgagcgtggccatcgcgcgtcagctggaacgggtactcgatcagcatgggctgcgcgccatggcggcaagccccggctctgttccggcccgcttttattcgaccgacgacggcgcgcatcagcagcaacttgccgcgaccctgctgcatatcgacgcaacggtcgaccgggtcgtgatcccatcgcgccgcacggccgcgccggattcccaagccgcataa

SEQ ID NO: 289278 - DNA, 787 bp, Unknown
  Bacterial polypeptide expressing nucleotide sequence isolated from the Sargasso Sea
attgccaataggtgtatttgattccggtatgggagggctaaccgtacttaaagagctgtgtcggcggttgcctgacgaagatttcatatatctcggagacacggctcgtttaccctacgggaccaagtcaccacagactgtgcacaagtattcgatgcaagccgctgacaaattaatgcagatgaaggttaaggcgcttgtgattgcttgtaatacggcagcttcgttttcgctggataaactcgcaacagcttatcatcccacgccggtatatggggtgatagagcctggtgccgagaaagcctgcgagaaggtcgatgcgagcggcatattagtgttggccacggagggaaccgtttcgggtgctgcgtatcaacggtcaatacttagcaaaaacccagaggcccggatttatgctcgtgcttgcccgctttgggtaacgttggctgagcagcgacagcaagatgatcacattacgaggagcttgattgaatactatttacaagggtttattggtaaagggcctagtacggtcttattgggctgtacgcacttcccgctatttacagccttaataagagagatgttaggagaaggttatagggtagttgattcggcggtcaccacggctaatcatgttgcacgtgaactcgagctgaaaggattgttgaactcaaatggaggcgagatatcttttatggcaacggacggtcttggcaggttttcaaggattggggaacaatttttgaagactaaaatagtaaatgtctccgaggtcgatttatag

SEQ ID NO: 289279 - DNA, 802 bp, Unknown
  Bacterial polypeptide expressing nucleotide sequence isolated from the Sargasso Sea
aatgtcagatattcgacccataggtatttttgattccggattgggagggttgacagttgcgaatgctcttaagcagatactccccagtgagaatattatctatgttggagatacagcaagggtgccctatggtaataaaagcgctccacttataatacaatatgcttcgcaaatcacggaatttcttttggataaagatgcaaagttaattgttgtagcgtgtaatactgcatcagcacttgcgttaaatactcttcaaaacaattttgatctgcctattattggtgtaattgcgcctggagctagctttgccgcagaattaacaaaaaataataatgttggtgttataggtacgattgcgactataagctcaaatgcttatgaaaaagagttgtataaaattaaccctgatataaaaatcttttcccaagaatgccctttatttgtacctctagttgaggaaggcatattagaaggaccaatagtgtctgctattatagaatactatttaaaaaatcttgaattatcaattattgatacaatgattttaggttgtacacattatccattattgaaaccagctataaaaaaatatttaaatgatcttgttttgattgattcagcggattctgttgcaaaagaagtatataaaattttaaaaaataatcatattgttaataataatacggataaaggaaagcaaagattttatgttacagactctccttcaaatttttcaaatattgctaaaagatttttaggatattctattaagaatgttgaaacagcgccaatcagctga

SEQ ID NO: 289280 - DNA, 799 bp, Unknown
  Bacterial polypeptide expressing nucleotide sequence isolated from the Sargasso Sea
aatggataatagacctattggagtatttgattctgggataggaggtttaactgttgtcaatgctttgaccgaggctttgccaaatgaatctattttttatgttggtgataccgctagagttccatatgggaataaaagtagaaatagcatacagcaatttagttgtgaaataactaaatggttaattgagcaagattgcaaaatgatcgtagtcgcatgcaatacggtttcatcattagcgttagatgaattaaatagacagttttcaatacccattattggtgttattgagccagttgtaagacatgccgtaaatactagtaacaattccagcattggcatattagggacacaagcaacggtaaaatcagatgcatataaaaaatgtataacagcaataaactctcagctcaatatagttagtcaagcttgccctttatttgttccattggtagaagaaggttggataaacggtaaagttccccatctagttgcaagtcattaccttaaaaaatttgaaaatatgagtgttgatactataattctaggttgcactcattacccacttttaaaaagtgtaatcagttcagtacttgggaacagaatacaattagtcgattcaggcgagtcaacagcaaaagttgtttcggatcttctgtataataataaattaatatctggggagcagaaaggaggcatacagtgttttgttacagatgatgcaaaatcaaataatatacttgctgttaaattcctaaataaaaaaatatttaaaacaaaagcaattgacctctcctaa

SEQ ID NO: 289281 - DNA, 799 bp, Unknown
  Bacterial polypeptide expressing nucleotide sequence isolated from the Sargasso Sea
atgacgaagcaactgctggggttcttcgacagcggcctcggtggcctgacggttctgcgtcgggtgctcgaacgccatggaccggtgccctgcgtctacctcggtgacacggcccgggttccctatggcaaccgtcaacccgatgacatccggcgcatcgccgcagaagtggtgggttggttgcgcgaccaacaggtctccacggtggtgatggcctgcaacaccaccaacgctctggcgagagatgtggccgagggacaggccggggtaccggtgatcggtctgatcggcgccgccgcagcgatgttggaaacgcgccgtgttggcgtgttggccacaccagccaccgtggcctcctcggcctaccgggtcagcatcgaagcgcttcatcccggctcggtggtgatcgagcaggcttgtcctgcttttgttcccctgatcgaatccggcgggatgaacagcgacgacctgcgtcgtgcggcccaggcctatctcgaacccttgctaacggcttccgtggactcgatcgttctgggttgcacccattaccccttactggtgcctctgttgcgtcagctgctgccggagtcggtccagatcattgacccggccatcggcgttgcccgtcaactggatgccgttctggggccaccggcgcgcatctcacctgctccaaggccgttttccctggagagctgccgcttttgcgtcaccgcggatccagatggcttcgctgtacgcgccaccccctggctgggccagcggcctgccgtccgcctccagctgctgcaggactgag

SEQ ID NO: 289282 - DNA, 802 bp, Unknown
  Bacterial polypeptide expressing nucleotide sequence isolated from the Sargasso Sea
aatgccagatagtaggcccataggaatttttgactcaggattgggcggtcttacagttgtagacgctataaatcgaaagacgcctaatgaaaatattatatatgtgggggacactgcccgtgtaccatatgggaacaaaagtgcaccacttataattaaatatgcctcacaaataacaaggtttcttttagaaaaaaatgcaaaattaattatcgtagcctgcaatactgcctcagctcttgctattcccgcacttcaaaatgagtttaatgttcctgtagttggtgtaataagtcctggcgctaatgctgcagctcagattacaaaaaacaataatattggagtggttggtacaattgcaaccataaactccaaggcctatcataaagaattaattaaaataaacccctcaatcaatacgttttcccaagcgtgtcctttatttgttccccttgtagaggaaggtctattaagcggggcaatagtctcatctataataacttattatattaacaatcttgacttatcaataatagatacacttatattaggttgtacgcactatccattattaaaaccagcaataaaaactattacaaaaggtcttacattaattgattcagcagattcagttgcaaatgaaacaaatgagattctaaaaaataataattttattaatgataataataatcagggacagaaaaaattttatgtaacagattctcctttaaatttttctaatgtagcaaaaagatttttagggtatccgatcaaagatgttgaaacagcacgaatcagctga

SEQ ID NO: 289283 - DNA, 667 bp, Unknown
  Bacterial polypeptide expressing nucleotide sequence isolated from the Sargasso Sea
attgaagataggaatttttgattcaggaataggtggcctaacagtatttaaagaaatctctaaggctcttccgtcttttgaaattatatatttaggcgatactgctagactcccctatggaataaaatccaagagaacaatcgacagatattcaattaataacgttaaattattaaagtctttagattgtgaaattattgttatagcttgcaatacagcatcttcttattcgacaaatttattaaagtctaaattcaaaataccaatctttgatgttatttctgcaggcgtaaaggccgcacttaaggataatccaaagattttaggagtcattggcacagattcaaccattaacagtatggcatacaataaaatcattttgaataataattccaatattaaggtctatactaaagcatgttcaatatttgtcccaatcattgaacaaggtctaattaaaaagaaacattacaataagataatagaagagaacttaaagttctttaaaaataaaaatttaaatgggttaattttggggtgtacgcattaccctattattaagcgaaagattaaagattatttaggagatgatataaggcttattgactcatctttagaggtttctgcaacacttaaaaaatatttagaaattaattacccggaatga

SEQ ID NO: 289284 - DNA, 723 bp, Unknown
  Bacterial polypeptide expressing nucleotide sequence isolated from the Sargasso Sea
gagatccggcgtcttctgccggatctccactatatctacgctttcgacaacgtcgcctttccttatggagagaagagcgaggagtttatcgtcgagcgtgttgttgagattgtgactgctgtccagcagcgctatcccctttctcttgcggtcatcgcgtgtaatacagcaagcacggtgtcgcttcctgcgttacgtgagaagtttgccttcccggttgtgggcgtggtgcctgcgattaaaccggcggcgcgactcacggcgaatggcgtagtggggctgctggctacgcgtgcaacggtgaagcgctcatatacccatgagctgattgcgcggtttgctaacgaatgtcagattgcgatgttgggttccgccgagctggtggaactggcggaagcgaagctgcacggtgaaacagtttctctggaagagctgcggcgtattctgcgtccgtggctgcggatgtcggaaccacccgatacggtagtgctcggttgcactcatttccctctattacaggaagagcttttacaggtcctgcccgaggggacacggctggtggattctggtgccgcgattgcgcgccgtacggcctggttattagaacatgaagcgccagatgcgaaatcaaccgatgagaacgttgcattttgtatggcaatgacgacagaagccgaacaactaatgcccgtgctacagcgctatggctttaaaacgctcgaa

SEQ ID NO: 289285 - DNA, 687 bp, Unknown
  Bacterial polypeptide expressing nucleotide sequence isolated from the Sargasso Sea
tatatatttctgacaaaaagaattgtccatatggtgaaaagtcaaagaaagaaattgatgaaatatcaatttataattcccggtttttaattgacagaaattgtaaaattatagttgtcgcatgtaacactgcaactacaaattccatttcaaagctcagaagaaaatttaaagttccatttattggaatcgaacctgccataaaacctgcagccctcaattcaaaaacaaaaaaggttggagtattagcaacaaaaggcaccttaactagtaatttattttttaaaacaagttctgatcaaatagcagacgtggaattgattaatacctacggtgagggtctgatagaattaattgaaaagggtgattgtggaaatgaactcaatgttttattaaaaaaatatctaattccaatgattgattatggtatagatcaacttgtacttggttgtacacattaccctcttgtaaaagactccataaaaaatatagtaggtgaaggtattaatgtcgttgactgtaacgatgcagttgcaatgcaaacaaaaagaattatagaattaaataatcttatgcacaacaacaaattagattcaccaaatcattgtttttttaatagtggcgaagatgactcttctattaaagaaattcttcaaaataaatatgaaatttttaaatttgaatagt

SEQ ID NO: 289286 - DNA, 832 bp, Unknown
  Bacterial polypeptide expressing nucleotide sequence isolated from the Sargasso Sea
ctggagacgggcttgtcgcaaccaatattagtattcgattctggcatcggtgggctatccgtattggccgaaattcgcaaattgctcccacatcacgattactgctatttgttcgataatgccagattgccctatggcgagttggaagagcaggaacttgtctcgggttgtgttgcgctcatcgaccaagtcgtcgagcgtacccatgccgccattgtcgtcgttgcctgcaataccgccagtactgtggtgctgcccgcgctgcgtgcaaccttatctattcctgttgtgggtgtggtccccgccattaaacccgcggcgcagttatctaagagtaagcgtattggtttgctcgccaccccaggtacggtcaagcgccactatacctacgagttaatcagccaatttgccgatgattgtcacgttgagctgttcggatcttctgaattagtgctgatggccgagcagaagattgccactggtcaattggacatggcgcggttaacacaggttttatcacccatcgtcgaagcggacttagatgtactggtgcttggatgcactcacttccctatgctgcgtgatgaattgcaacaggtattaggccaaggtgtcaccttgctcgattccggtgaggcaatcgccaagcgagtcaaaacattgttggctgagactaacagtgagcagcaagttcaagaagatgcgcactgcgatgcacatatgcaggcgttttatactaaagcggaaatcagtgagggattagcgactacgttagtcgattgtggcttttcaactttagagcgaatcaccacaatcaactcaaacggataaa

SEQ ID NO: 289287 - DNA, 688 bp, Unknown
  Bacterial polypeptide expressing nucleotide sequence isolated from the Sargasso Sea
atgagttcacatccaataggtttttttgattcaggaataggagggattaccttatggaaaaaaattaccagtttattaccaaatgaaaataccatctatatttctgacaaaaagaattgtccatatggtgaaaagtctaagaaagaaattgatgaaatatcaatttataattcccggtttttaattgacagaaattgtaaaattatagttgtcgcatgtaacactgcaactacaaattccatttcaaagctcagaagaaaatttaaagttccatttattggaatcgaacctgccataaaacctgcagccctcaattcaaaaacaaaaaaggttggagtattagcaacaaaaggcactttaactagtaatttattttttaaaacaagttctgatcaaatagcagacgtggaattgattaatacctacggtgagggtctgatagaattaatcgaaaagggtgattgtgaaaatgaactcaatgttttattaaaaaaatatctaattccaatgattgattatggtatagatcaacttgtacttggttgtacacactaccctctggtaaaagactccataaaaaatatagtaggtgaaggtattaatgtcgttgactgtaacgatgcagttgcaatgcaaacaaaaagaattttagaattaaataatcttatgcacaacaacacattagatc

SEQ ID NO: 289288 - DNA, 799 bp, Unknown
  Bacterial polypeptide expressing nucleotide sequence isolated from the Sargasso Sea
ttggataatagaccaataggagttttcgattcagggctcggtggattaacagttgtgaaggcagtaaaagaattacttccaaatgaatcaattatttattttggtgacacagcccgcttaccatatggtgtaaaaagccaaagtttggttgaacaatactcaaaggagataataaaatttttattagacaaaaatgcaaaggcgattatcatcgcttgcaatacagcaactgctatggctcttaatatattgaaaaatgaatttattaatgttccaataattggtgtaattgaaccaggctctgaaaaagctatttctgaaacaattaccaaaaagattggtgtaatagggactatttctactatttcgtccggtgcctatgaaaaagcaattcatcaaaaagataatagagctgaaataatatctaaggcatgtcccttatttgtcccttttgtagaagagggattaataaatgggtctgcgattaatgaaatagctaagcattatttatattcatttaatgataaagttgatactttaatattagggtgtacgcattatccattacttaaagacattatctttgataatactgaaaatattaaactaattgattcagcatcatctgttgcagagtttgcttataaagtattggtaaatcataaattattaagtggtgaaaaaaatcttgggggtttagaatgttatgtcactgatttaccaatgagatttgaggagcttggtaatatattttttggctctgatattaaaaatgtacaattggtagatgagttctaat

SEQ ID NO: 289289 - DNA, 817 bp, Unknown
  Bacterial polypeptide expressing nucleotide sequence isolated from the Sargasso Sea
cttgcaccaaaggggagctcaagtggccaatattctcgtgttcgactccggtatgggtgggttgaccatctaccgcgagatccgccgcgcattgccggcacacaactacttctattgttttgataatgccaacttcccctatggtgagctgagcgaggccgccctcaccgaagtctgcaccaggttggtcagccacatggtggtcgagcatgccatcgatctggtggtgattgcctgcaacacggccagcaccatagcgctgccgtccctgcgtgctgccatgacagtaccggtcgtcggcgtggtacccgccatcaagcccgcagccgcgcttacccgtaatggttgcatcggcttgctggcaaccccggggaccgtcagccgtgaatatacccacgagctcatcgcccagtttgcgccgggcaagcgggtgctgctcaagggggcgaccgagctggttgtcgaggccgagcacaagctggcgggtctgccggtcaatatggcgctgttgcgggaagtattggcagactggctggaaggggaagagcatccggataccctggtgctgggctgtacccatttccccttgctggatgaagaaatacggcagttgatgcctgcgtgtcagctggtggattccggcagcgcggtcgccaagcgggtggctcacctgctggccggtttggtaacgacaccgacacggctggaagatgtcgggggtaaggcctattgcacccggctggatgcccagacccagaaactgacagcccccttgcaagcttgggggctgtcatcactcgaagaggtcaggttctaa

SEQ ID NO: 289290 - DNA, 790 bp, Unknown
  Bacterial polypeptide expressing nucleotide sequence isolated from the Sargasso Sea
atgcgcataggttttatcgacagtggagtgggtggtctttctatattagaggcggtgcgtgctttagtgcctgcggactacttctatatgatggataacagatacctgccttatggcactaagtcggagttatttatccgccagcgcttaaagcaactgaccgaacatctgctgactcatcaggtggatcttatagttatcgcctgcaacacagctactactcaagccgttgattggttacgacagcagtttgatttgccttttgtcggtgtagtgccggccattaaacctgctgctttctattgtgctggcgaaaaaatggcgttgctggccactccagccacagtcaaaggccactatataaagaagctggttgctgattatgccggagaaagtcaggtgcaacttgttggtagcagtgagctggtgatgttggcagaacaaaaagtctgggcaggtgccgatgtgacatctgcggttgcccaagtgattaaagatagtggcttaaatgagtttgcccccaaagctattattttgggctgcactcattttccttttttagccgaagagatccgtgctgcgtttactgatgcgccaaagttgtttgacacagccgatgcgatagccagaagggttcaacatttaacttcagcgatcactgatctatataaagagaaggggaaggatcgttttattgcaacacaagagctgacagagcagcaaaaattaagagtcaaacagatggggtttggccagcagagctgctggccagatgtataccaggactaat

SEQ ID NO: 289291 - DNA, 565 bp, Unknown
  Bacterial polypeptide expressing nucleotide sequence isolated from the Sargasso Sea
atggacggtttaggtaacgattttgtcataatagatactagacaaaaaattataaatctgaccaaagaacaaataattaaaatttgtgacagaaattttataggttgtgatcaattaattttagttaaaaaaaatcaaacctctgacgcagctttagaattttataattcagacggtggcgtttcaggagcttgcggtaacggaacaagatgtgttgcaaaccttttgtctagagaaagtgataaaaaagaaataattcttactacattatctggtgatttgaaatctcgaatcattgctgaaaaattggtttctactgaaatgggtgttgcaagaacaagatggaatgaaattcctttatctgaagatttagatacaaataatttaaaaattaaattaatagatcttaataaaaatgaattttttggtggaacagctgtaaatgtaggaaatccacatattattttttttctagataataatgaaaattttgagatcaaaaaaattggaccagaaatagagaaccattcactatttccagaaaagtgtaatgtcacattagcta

SEQ ID NO: 289292 - DNA, 684 bp, Unknown
  Bacterial polypeptide expressing nucleotide sequence isolated from the Sargasso Sea
agtatgaaggtgaagtttcagaaattcaaattattgctcttgtaagtgatgctgaatatgatgtagatggtgtaatattcgtagaaccattagataacaattctgtaaaaatgcattatttcaataatgatggttctgatgcagaactttgtgtaaacggagtacgatgtgttgctaaatttgcgcttgataataactatctggatgttgatagatttattgttaaagcaccagttggagatttagaagtatttgtagacgataatatagttgaagtatcaactcctattcctacttatgaagaagaaaaaattaatgtaaatactttcgaaggtgttaaatcttcagtcggcaatcctcattttatgatagaagtagatgatgtagatagactagatttagagaatttgaattcagaagtactaaacgaaaacatattcccggatggtgtaaatgttgaaatataccaaatagttagtaaaaattatattaaagctagagtcttcgaacgaggagtaggcgagacagacgcctgtggatcaggtgcactatgcatgtttaactatctaaataaaacagatcaaattgacaataattcatatgtgatgtatccgggtggtgatttaaatcttagatttgaaaatgataatttatacttatcaggagaagttatatatctctaaa

SEQ ID NO: 289293 - DNA, 364 bp, Unknown
  Bacterial polypeptide expressing nucleotide sequence isolated from the Sargasso Sea
aatggatggtttaggaaacgactttgttattatagatcagagaactactaaaattaatctaagcaaagatcagatactaaagatttgtgatcgaggttttattggatgcgatcaacttatttacattacagaaaataataagtctgatgcaggaatggagttttataattctgatggtagtacttctggggcttgtggaaatgggacaagatgtgttgcttacttattatctaaagaaaaaaatagagatgagattaacttaattgtatcttcaacagagttaaaatcaaaaatactaagtaataaattggttgaaacatctattggtgtaccaaaaactaattgggatcaaattccaattatt

SEQ ID NO: 289294 - DNA, 295 bp, Unknown
  Bacterial polypeptide expressing nucleotide sequence isolated from the Sargasso Sea
cctctggttagaaaaaaattctatttttcctgaatttgcaaatattgaatttgtttctgttttaaaggacaagtcactaagagtgagagtttgggagagaggagcaggcatgacttcagcatgtggatctggagcgtgcgcaacattagtcgctgcttcttcattaggtaaaagtaataaagaaaataaaatagttttagacggaggagatttgtttattaagtggctcgataacggatcagtaactctttctggagaaactgaaagagtgtttgaaggatttataggtgaataa

SEQ ID NO: 289295 - DNA, 766 bp, Unknown
  Bacterial polypeptide expressing nucleotide sequence isolated from the Sargasso Sea
agaagtagtagaattaatctaagcaatgatcagatattaaagatttgtgatcgaagttttattggatgtgatcaacttatttatattacagaaaataataagtctgatgcaggattggagttttataattctgatggtagtacttctggagcttgtggaaatggtacaagatgtgttgcttacttattatctaaagaaaaaaataaagatgagattaaactaattgtatcttcaacagagttaaaatcaaaaatactaagtaataaattggttgaaacatctattggtgtgccaaaaactaattgggatcaaattccaattattaaatctgtggatacaaaaaatttaggtttagaaataaaagatagaaaaaatgttattataaaaggaggaattggagttaatgttgggaaccctcatgtaattttttttgtaaacgacattaataattttgacctaaaaataattggtcctgaaatcgaaaatcatgaattatttcctgaaaaatgtaatgtaacacttgcaaaaaaagtaaacgacaaccattacaaagttaaggtttgggaaagaggtgctggattaacaaaggcctgtggaacagctgcttgtgcaactgctgtagcggcgaatttggaaaaaatagaaaatacacaaactgaaattgaatttaatttgggtaaattattaatttcaatagataaaaataaaattatttctatgagaggtcctgtttcagaaattgaagaaattaaaattaatatttaat

SEQ ID NO: 289296 - DNA, 833 bp, Unknown
  Bacterial polypeptide expressing nucleotide sequence isolated from the Sargasso Sea
agtgtttatgcacgagtttaagttcgtaaagatgaatggccttggaaatgattttgttgttattgatcaaagagaatctgaatttgatttatcagaagaacaaataaaattaatttgtaacagaacagacggggttggctgcgatcaactaatcatgattagaaagtcacaagataacagcgacccgatgattaaattttttaattcagatggaagtgaaatagatgcttgtggaaatggttcgcgttgtgttgcaaactttttgatgaaagaaacaaagagcgagaaaataaacttaacgacacgtgaaagaacaattgcatgtgaaaagattgataatgtcacagttagtgtaaatatgggcaagccaaaattcaaatggaatgaaatccctttgactgaagatatcgatccagtggatataaatttttcaataagagaccttactctaaaaaaaccatttttagttaatattggtaatccacatattatattttttgatgatgaaatcgaaaaatatgatgttgaaagttttggatctttaattgaaaacgataatttatttcctgaaaaaataaatgtgagttttgcaaaattaaaaagtgataatcacattgtactaaacgtatgggaaaggggtgtaggaaaaacaaatgcttgtggtacggctgcttgtgcaacagctgtagcaggagttgaaatgggagtgataaaaaataaggtgacagtaacattgccagggggagatttagaaatatattacaaaagtactgacaatattattatgacgggtccaactgagataaattttactgataaatataagctgtgag

SEQ ID NO: 289297 - DNA, 709 bp, Unknown
  Bacterial polypeptide expressing nucleotide sequence isolated from the Sargasso Sea
acaggaaacgattttatagttggtaaatatgaaggggaagtttcagaaattcaaattattgcacttgtaagcgatgctgaatatgaagtcgatggagtgatattcgtagaaccattagacaaaaattctgtaaaaatgcattattacaataacgatggatctgatgcagaactatgtgtcaacggcgtacgatgtgtggctaaatatgcactcgataacaactatttagatgtatcaagattcattgttaaagcacctgtcggggacttagaggttaatgtagatgagaatatagttgaagtctcaactcctatacctacttttgaagatgggaagattaaagttcataattttgaaggtgtgaaatcagaagtaggaaatccacatttcatgatagaggtagatgatgtagatggattagatttaaacaaattgaattcagaagttctaaatcaaagtatttttccagatggtgtaaatgttgaaatatatcaaataataagtagaaattatataaaagctagagtctttgaacgaggagttggcgagacagatgcctgtggttcaggtgcactatgcatatttaactatcttaataaaacaaatcaaattgataataattcttatgtgatgtacccgggcggtgatttacatcttaaatttgaaaatgataatttatacttatcaggagaagttatatatctctaaa

SEQ ID NO: 289298 - DNA, 377 bp, Unknown
  Bacterial polypeptide expressing nucleotide sequence isolated from the Sargasso Sea
ctcttagacattaaaaacgacagaatttctttgcctataattcctgtaggcatcggaaatcctcatgctgttattgaagttacgaatctgcaagactatccagtcgctgaaattggaaaaaaagtatgtagccatgaaaattttcctaacggggcaaatgtaagttttatagaactagtgtcgagacagcaactaaacctcagggtttttgaaaggggtgttggagaaaccagtgcttgcgggaccgcggcatgtgcggctgcagcgtgcggaataaaaaaaggaacactggacgctgaggttttggtgaatcaacctggaggtggactgaatatcatctggaataacttcgagaaaccgatgatcatgtcgggccc

SEQ ID NO: 289299 - DNA, 511 bp, Unknown
  Bacterial polypeptide expressing nucleotide sequence isolated from the Sargasso Sea
gatggtaccttttacaaagatgcacggtgcggggaacgacttcgtcgtgatagatctgcgggcgcatcaattagacttatcagcagaggcatttgcggttatcgccgaccgtcaccgtggaattggctgtgaccaaataattctaattgaaccgccacaaaatggcgccgatgttcgcttccgattccataacgcagacggcagcgaagctggtgcctgcggcaacggcgcacgctgtgccgcatcaaaagtaatggctgaagacggagccaacaaactttccatcgaaacgcattccgctgtccttagtgccaaacggtcagctagcggcgatatcactatcgacatggggccagcccatttggattgggaaaatattccactctcaaaagcgatttcaacctgcaatctgccgtccttaatcgacgggttggctgcacctattgccgttggtgttggcaatccacactgtgttttcttcgtcgaagacgcggaagcagtcgaaattgaa

SEQ ID NO: 289300 - DNA, 365 bp, Unknown
  Bacterial polypeptide expressing nucleotide sequence isolated from the Sargasso Sea
tatggaatttaatgcatttaaaatggatggattaggcaatgattttgtaatcattgatcttagaaaaaaaaacataagtttatccaaccaacaaattatcaaaatttgtgatcgtaaatttataggatgtgatcaattaatatttattaaaaaagataataatttagatgcaaaattagaattttataattcagatggaagtaaatcagatgcttgtggaaatggtacaagatgcgtagctcatttactatcaaaagaaaataataaaaaagaaataaatttaacagtagcatcaaaaattttgaaatctaaaatttttgaaaataatttggtcgaaacttcaattggttctcctaaaatgaatt

SEQ ID NO: 289301 - DNA, 721 bp, Unknown
  Bacterial polypeptide expressing nucleotide sequence isolated from the Sargasso Sea
atggatggtttgggaaatgattttttaatcattgatagaagaaaaaattctatttctataagtaaagaaaaaattattgaattaggaaaaagagataacatcggttttgatcaaatgatatttattgaaagagatgaagaaatttctggtcgagtttatattacaatatttaattcagatggagatgaggtttctgcatgtggcaatggaagtagatgtgttgcaaaaattttatgtgatgaaaaaaaaatggaacatgccgtgatcattacatcaaatagaattttaaaagcacaaaaagtttctgaatacaatattagaattgtaatgggtgaacctttatttggttggaaaaatattcctctatcaaaaaatataaatcataaaaatataaatctaaatattaatggaataaaattagtagaaggttatgctttaaatgttggtaaccctcatatagttttttttgttgatgattgttttaaatatgatctaaaaaaaataggaccattaatagaaaaccacaatctattccctgaaaaagtaaatgttacgtttgctcaaataaaaagtgacaataatattttagtaaatgtatgggagagaggtgctggactaactaaagcatgtggtacagctgcttgcgctactggagcagtggcttttgaaaaaagtcttgcaggaaaaaatactaatatacattttaaagaaggctttttaa

SEQ ID NO: 289302 - DNA, 271 bp, Unknown
  Bacterial polypeptide expressing nucleotide sequence isolated from the Sargasso Sea
gtttcccgatcgaataaatgttgaatttgctactgtgcaaaataaaagtaaagtgcctgtgagagtatgggaaagaggcgctggacaaacggccgcttgcggctctggtgcctgtgctgttttagtcgctgcagtgctcagaggtttaacagaaagaaaggccgaagtagtacttgatggcggaccacttctaatagagtggagggataataatagagtttcaatgactggacctactgagataagcttcaatgggagtttttctatctag

SEQ ID NO: 289303 - DNA, 748 bp, Unknown
  Bacterial polypeptide expressing nucleotide sequence isolated from the Sargasso Sea
tatggaatttaaagcttacaaaatggatggtttagggaatgattttatcatcatagacagaagagaaaatccaattaatttgactaaagaaaaaattattgaattgggaaatagatctaatgttggatttgatcaaattatctttattgataaagaaaaagaaagttctttccctatacaaatttttaattctgatggaggtgaagtaagcgcctgtggaaatggatcaagatgcgtagcttatcttttaagtaaaaatttaaatactaaagaaattaaattaaaaactaataatcgatttcttaatgcaaaaatagttgggaatttagaagttgaacttgaaatgggaaaacctttatttagttttgaagatattccattatcaaaaacagtaaatcctgctgatatatctttaaaaataaatgataaaatattttctaatggattttgtgttaacatcggaaacccacatataattttttttgtaaaaaattgttttaattatgatttaaaaataataggtcctaaaattgaaaaccatgatctatttcccgaaaaagtaaatgtaacatttgctgaagtcaaagataaaaacaatatgactgtgaacgtgtgggaaaggggtgcgggacttactaaagcttgcggaacagcagcttgtgcatcagctgttgctggtttcaagaagaatttagttaatgataaggttaatattaattttagtgaaggggctttaaaaattgagata

SEQ ID NO: 289304 - DNA, 711 bp, Unknown
  Bacterial polypeptide expressing nucleotide sequence isolated from the Sargasso Sea
attttattggctgtgatcaattaatttatattcataaaaataaagataataaagataaacttacattctataactcagacggaagtatttcaggagcgtgtggaaatggaacaagatgtgtagctaaactattatcaaaagagtataaaaatcaagaaataaatttagaaacatcttctggaattttacattcatcaatcctagaagaaaatgtagttgaaaccaacataggcaaaccttcgatgaaatgggacgaaattcccttaattaaagctatgaacactaaagatttacaaatatctatcaaggatattaacgagaataattttgtcggaggtatagcaattaatgttggcaatccccatataatcttttttgttgaaaataatgaaaactttgaaatagaaaatattggaccgaagatcgaacagcatcaatattttccagaaaaatgtaatgtgactatagcaacaattaaaaataataatttaataaatgttaaagtttgggaaagaggagcggggttaacaaaagcatgtggaactgcagcttgtgctacagcttatgcaggctttgttactgaaaaaacatctaacaacgtagatataaaatttactactggaatattatcaatcaggattgataaaaataattcaatttttatgaagggtcctgtttctaatatagaagaaataaaagtaaatttataat

SEQ ID NO: 289305 - DNA, 364 bp, Unknown
  Bacterial polypeptide expressing nucleotide sequence isolated from the Sargasso Sea
atggatggtttgggtaatgattttgtcattatagataataggcaaaaaattactgatttaactaaacaacaaataattaaaatttgtgacaggaaatttatcggttgtgatcaattaattttgataaataaaaacgagacttcagatgcatctttagaattttataattctgatggtggaacttctggagcatgtggaaacggaacaagatgtgttgcagatttattatcaaaagaaaataataaatcgttaattactttaaccacacagtctggagatttaaaatcagagatattgggaaacaggctagtttctacagaaatggaaaaggtaaaacagagggaacgaaatcccctctctaaaa

SEQ ID NO: 289306 - DNA, 346 bp, Unknown
  Bacterial polypeptide expressing nucleotide sequence isolated from the Sargasso Sea
gatgatcgacgactgcgacggggcaccggtcaacacgctggggccgttgattgagtcccacgagcggtttcccgaccgggtcaatgtgggatttatgcagatcgtctcgcggactgaactgaagctgcgagtttacgaacgcggtgtcggggagaccgaggcctgcgggtccggagcctgcgccgcagtggttcacggtattgggctcggtttgctggacgccgccgtcgcggtaaaactgccgggcggaaaactgtcggttagctgggacggtgccgaggcccctgtttggctcggaggacccaccgcatcggtatttgacggtaccatctctctgagggactga

SEQ ID NO: 289307 - DNA, 799 bp, Unknown
  Bacterial polypeptide expressing nucleotide sequence isolated from the Sargasso Sea
aatggatggtttaggtaatgactttgtaattattgataatagacaaaaaattaccaatttaaataaagagcagataattaaaatttgcgatagaagttttattggttgcgatcaattgattttgatagaaaacgacaattcagctgatgcatacttgaaattttttaattctgacggtggagagtcaggagcatgtggtaatggaacaagatgcattgctaatttcatttcaaaagaaacaaataaaaaaactataattttgaaaacattttctggacttttaaagtctgaaattttaggaaataagattgttacaacagaagtcggcaaagctaaaacagagtggaatgaaattcccttgtcagaaaaattggatacaaaaaatttaaatgtaaaaatacttgataaaaatgataaagagcatattggtggcactgcagtgaatgtcggaaatcctcatatcattttttttgttaatgaacttaacgatttcaatattaaaaagattggtccagaaattgaaaatcactttattttccctgaaaaatgtaatgtcacaattgctcaagtaataaataaagatttgattaaagttaaagtctgggaaagaggagctggattgactaaggcatgtggtaccgctgcttgcgcaactgcatttgctggtaagataaataatttaacagaaaataaaacagatatagaattttcgacaggaaaattatcgatatggattgatgcaaaaaattcaatacatatgaaaggtcctgtatcagatgtagaggaaattgaatcaaac

SEQ ID NO: 289308 - DNA, 481 bp, Unknown
  Bacterial polypeptide expressing nucleotide sequence isolated from the Sargasso Sea
atggatggattaggcaacgattttgttattattgataatagaaaaaaaattactcatttatcaaaagaacaaataatcaaaatttgtgacagaaattttataggttgtgatcaattaatattaatcgaagcagataaatctgcagatgcttacttaaaattttataactctgatggtggagaatctggggcatgtggaaatggaacaagatgtgtcgcagatttaatctcaaaagaacttaatagtaaaaaagtaattttaaaaactctatctggaaacttaaaatctgaaatattagggaataatattgttacaacagaaattggtaaagctaaaacagaatggaatgaaataccattatccaaaaaattaaatacaaaaaatttaaatatcgaaattaatgataaaaataataaaaaatattcaggtggtactgcagtaaatgtcggaaacccacgatattattttttttgtaaatgaa

SEQ ID NO: 289309 - DNA, 747 bp, Unknown
  Bacterial polypeptide expressing nucleotide sequence isolated from the Sargasso Sea
tgtcaaaagaagagattgttaaaatttgtgatagaaattttattggttgtgatcaacttattattataaaaaaaaacaaagaattagatgctagcttagaattttttaactctgatggaagtacttctggggcatgcggtaatggtactagatgtgtagcttatctattatctaaagaaaataataaaaaagaaattacagtctggacttcttcatcaatattaaaatcaaaaatattagataataatattattgaaactaacattggtgtttcaaaaattctgtggaatgaaattccaataaatgaaaataaaaatactaaaaatttagatataaaaatttttgataacaataataatgaacatagaggcggaactgcagttaatgtaggtaaccctcatgttattttttttgtagaagatattaataattataatattaaaaaaatcggtccctcaattgaaaataataaactttttcctgaaaaatgtaatgttacaattgctaaggtagtaaacaataacttaattaaagttaaagtttgggaaagaggtgcgggtcaaactaaagcttgtggaacagcagcatgcgcagtagcagtagcagggaatataaacaattacataaaagaaaaagttgacgttgagtttgagcttggaaaactatcaatttatatagatgaaaaaaaaaatattcatatgaaaggccctgtttctgaaataaaagaaatagatataaaactttaat

SEQ ID NO: 289310 - DNA, 136 bp, Unknown
  Bacterial polypeptide expressing nucleotide sequence isolated from the Sargasso Sea
tatgcaaaaaatagaattcattaaaatgcatggtttaggaaatgattttgtcattattgataaaagatctaataattatgaaattaacgacaatcttattcaaaagttagcagatcgtaaaactggagcgggttgt

SEQ ID NO: 289311 - DNA, 455 bp, Unknown
  Bacterial polypeptide expressing nucleotide sequence isolated from the Sargasso Sea
aatggatggcttaggaaatgacttcgtaataattgatcaacgaaatagtcaatttgcgttgaccaatgatcaaatcaaaaaaatatgtaacagaaattttattggttgtgatcaacttatttttataagaaaaaacaaaaatactgatgctgatatcgaattttataattcagatggaggtagttctggtgcgtgtggaaatggaacaagatgtgtagcttattttttatcaaaagagatgaataaggataaaattatacttggaacagaatctggaaatttagaatcaaaaattttaggagaaaaattggtggaaacaaacattggtccagcaaaagctaaatggaatgaaattccactatcaaaagaattaaatactattaatttaaattataaaattattgataaaaataataatgaatattttggtggcacagcaataaatgttggaaatc

SEQ ID NO: 289312 - DNA, 655 bp, Unknown
  Bacterial polypeptide expressing nucleotide sequence isolated from the Sargasso Sea
tatggacataaaagcttttaaaatggatgggttaggaaatgattttctaattgttgatagaagaaaaaaatccatttccattaaaaaagaaaagattattgagttaggtaaaagggataatattggatttgatcaattaatttttattgatgaaattgacaatataactccgagttataatccaataacaatatataattctgatggagaaaaagttgaagcatgtggaaatggtagcaggtgtgtagcaaaaattttatgtgatcaagaaaaaaagggggaagctgtaattgtaacatcaaacagagtgctaaaagctcaaaaaatttctgaaaataatataagacttgaaatgggggaacctatttttgaatggaaaaaaattcctttatcaaaagatataaaccataaaaagattaatataaaaattgatgatttagaattaaaagatggttttgcaataaatgttggaaatcctcatatagttttttttgtagatgattgttataaatatgatttaaaaaaaatagggccattaattgaaaattatgagttattccctgaaaaaataaatgtcacatttgctcaaataaaagattcatcgaatatactggtaaatgtttgggagcgtggagctggtttaacaaaagcttgg

SEQ ID NO: 289313 - DNA, 637 bp, Unknown
  Bacterial polypeptide expressing nucleotide sequence isolated from the Sargasso Sea
tcagatggcggtcgctctggtgcatgtggcaacggaactagatgtgttgctgatttcttatcaaaagaaaataataaaaaagaaattactgtatggacgccctctggaatacttaaatcaaatattctggaaaaaaatattgtaaaaacagagattgataaaccaaaaacaaattgggaagaaattccattaaaaaaaaatgtaaatacaaaaaatttagaaataaaaatttcagataaaaataaaaatatacatattggaggtacggcaattaacgtcggcaatcctcatgttattttttttgtagaaaatattgatgactatgatttaaaaaaaattggtcccaatattgaaaatcatgaactatttcctgaaaaatgcaatgttacattagctaaagttataaataaaaatttaataaaagtaaaagtttgggaaagaggagcaggtcttactaaagcctgcggaacagctgcatgcgcaacagtagtggcaggtaatattaaaaaattagttcagccaaatacagacatcgagtttgaacttggtaaattatcaatttttattgatgataaaaatattgttcatatgaaagggcctgtttccgatattaaaaatattgaaataaatttataat

SEQ ID NO: 289314 - DNA, 554 bp, Unknown
  Bacterial polypeptide expressing nucleotide sequence isolated from the Sargasso Sea
aatggatggattaggtaatgattttgttatcatagacaatagacaaaaagttactaacttaacaaaagaacagataattaaaatttgtgatagaaattttattggttgtgatcaattaatattaattgaaaatgacaacaatgctgatgctcgtttaaagttttttaattctgatgggggtgagtctggtgcatgtggtaatggtacaagatgtgttgcagatttaatttcaaaagaaaaggataagaaaaatattactctaactactctatctggaaatttaaaatcagagatattaggaaataactttgttacaactgaaattggaaatgcaaaaactagttggaatgaaattcctctttctgttgaggtagatacaaaaaatttaaatattaagattaatgatttaaataaaaaagaacattctggtgggacttctataaatgttggaaacccacatgttatattttttgttgatgaaattaaaaattttgatattacaaaaattggtccctcaattgaaaatcacaaaatgtttccagaaaaatgtaatg

SEQ ID NO: 289315 - DNA, 733 bp, Unknown
  Bacterial polypeptide expressing nucleotide sequence isolated from the Sargasso Sea
cgaagactctaacaaagtcgatttcgtcaaacgcatttgtaacagaaaaatgtctataggtgcagatggtgttatttttgtagaaaaatcggacaaagctgatattaaatgggatttttataacgatgatggttcttctgcagaaatgtgcggtaatggtggacgctgtgttgcgagatatgcggtggaaaagaagattacctcaaatgaattgaccttggaaaccgttgcaggaatcatagcggcaaaagttgacggtgttaatgtgcgggtcaagctgacttcccctgaaaatttaaagcaagatattgttgcagagctgaatggcttgcaatataagattgatagccttaataccggtgtgccacacgctattatttattctgaggatattgaaaacgtgaatgtgaaagaagttggtaatgggattcggttccatgaggtatttgcgccttcaggaacaaatgtgaattttgtcgaaaaggtgggtgagcatgacttgaaaattcgaacttatgagcgtggagtcgaagatgagactctggcttgtggcacggggacagtagcttcggctttgctttcttcttataaaaatttagtgaagcctcccgtaaaagttgaaacacgcggtggagaaattttgaaagtagactttgatccttctaatgaaacagatgtttttctcgaagggctaactcgaattgcttttgagggtgttcttaaggagtattaa

SEQ ID NO: 289316 - DNA, 418 bp, Unknown
  Bacterial polypeptide expressing nucleotide sequence isolated from the Sargasso Sea
atggatggacttggaaatgacttcgtcataattgatcaacgtgaaaaaaaatatgatttaaacaattctcaaataaaaaaaatttgtgacagaggcaatattggttgtgatcaactaattcttattaataaaagtgataaatttgatgcatttctcacttttaaaaattcagatggctcggactccgcagcatgtggaaatggaactagatgtgtagctagattgttatcaaaagaaagttcaaaaaactttattactgttgaaacttcttcaggaaaattagagtcgaaaattttaaaaaataatttgattcaaacaaatattggaaaaccaaaaactaattgggatcaaatacctctaagcgagaaaaatgatacaaaaaaaataaaagttatggttggtgatattgagtttttag

SEQ ID NO: 289317 - DNA, 511 bp, Unknown
  Bacterial polypeptide expressing nucleotide sequence isolated from the Sargasso Sea
atggatggattaggtaacgactttgttattattgatcagagaataaataatttaaacttatcaaatgaccaaatcttaaaaatttgtgacagagatttcatagggtgcgatcagttgatctacataaaaaaaagtcaaaaagctgatgctgatgttgctttttttaactcggatggaagccgctcagatgcatgtggaaatggaactagatgcgttgcttatttactaagtattgaaaaaaataaaaaagaaattgaaatttcggtatcctcaaaaatattaaaatctaaggtccttaataataaagatgttgaaacaataattggaactccaaatttagagtggaacaaaattcctttaagtaaagatcttgatactaaaaatctatcacttggtatgattgatattgacggaaataaaatgaatggtggtattgcagtgaatgttggaaaccctcatgtcatatatttttgcgaggatatagaaaaaataaatttaaaaaaatatggac

SEQ ID NO: 289318 - DNA, 328 bp, Unknown
  Bacterial polypeptide expressing nucleotide sequence isolated from the Sargasso Sea
tatgcaaaaaattgaatttatcaaaatgcatggactaggaaatgactttgtaattatagatcaaagatcaaaaaacatacctataacccaagatctaatccaaaaaattagtgacagaagaactggtgccgggtgtgatcagctaattactataagtaattcaaaaaataatgtcgatgctgatatggaaatatttaaccctggaggagatcgtgcagaagcatgtggaaatgggactagatgtatagctcgaattttatttgatgaaaataaaaacaaagaattattaagaattcattctgatgctgggattttagaagcacaaaaa

SEQ ID NO: 289319 - DNA, 307 bp, Unknown
  Bacterial polypeptide expressing nucleotide sequence isolated from the Sargasso Sea
tatggaaattaaagcttttaaaatggatggattaggaaatgattttgtaatcattgatcaaaggaaagaaaaaataaatctatctaacgatcaaataataaaaatttgtgatcgtcaattcataggatgtgatcaattaatatttattaaaaaaaataatgatttagacgcagaattagaattttacaattcagatggaagcaaatcagatgcttgtggaaatggcacaagatgtgttgcacatttactttcaaaagaaaatagtaaaaaagaaataaatttaattgtagcttcgcaaattttctaa

SEQ ID NO: 289320 - DNA, 661 bp, Unknown
  Bacterial polypeptide expressing nucleotide sequence isolated from the Sargasso Sea
tgatgctggaatggagttttataattccgacggtagtacttctggtgcttgtggaaatggtacaagatgtgttgcttatttattatctaaagaaaaaaataaagatgaaattaatcttttcgtatcttcaacagagttaaaatcaaaaatactagaaaataactttgttgaaacaattattggtttgccaaaaacaaattgggatcaaattccaattactaaacttatggatactaaaaatttaggactagaaattaaaaatagaaaaaatgttataacaaaaggaggaattggggttaatgtaggaaatcctcatgtaatattttttgtagatgacattgataattttgatctagaaaaagttggtcctgagattgaaaatcatgaattatttcctgaaaaatgtaatgtgacactcgcaaaaaaagtagctgataatcattataaagttaaagtttgggaaagaggggctggattgactaaagcttgtggaacagctgcttgtgcaacagcggtggcagcaaatttagaaaaattggaaaatacccgaactgaaattgaatttgatttaggaaaattattaatttcaatagataaaaataaaaatattgctatgaaaggtcctgtttcaaagattgtggaaattaaaattaatatctaa

SEQ ID NO: 289321 - DNA, 502 bp, Unknown
  Bacterial polypeptide expressing nucleotide sequence isolated from the Sargasso Sea
gttgcagaaaaacaaggcactaatattagtattaatagtgggaaaaatatcaaataattggaaagatattcctctaaatgaagaaattgatactcttaatattcccatagaagtagaaggatttagtaaaggagttggtgtcaatgttggcaacccacatgtagttttttttggcaaaaatattgataaaataaatttgcaccaaattggtccaacaatcgaaaatcacaaattttttccaaataaaacaaatgttgaatttattgaaattgtagattttaaaaaaattaaaatgaaagtttgggaaagaggtgccggtatgactttagcatgtggtagtggagcttgtgcagcagtttatgcgggatggaaaaaaaaactaattgataatcaagcagaagttttgcttgaaaaaggatcattacatataaatatatttaatgaagaagctattatgactgggcctgctgaagtcagctatcatggatatgttgaaatttaa

SEQ ID NO: 289322 - DNA, 638 bp, Unknown
  Bacterial polypeptide expressing nucleotide sequence isolated from the Sargasso Sea
ttcagatggaagtaaatcagatgcttgtgggaatggcacaagatgtgttgcatatttactttcaagagaaaataataaaaaagaaataaatttaattgtagcttcacaaactcttaaatcaaaaatttttgaaaataatttagtagaaacgtcaattggattacccagaatggattggaatgaaattccattgagcaaagaaacagatactaaaaatttaaaaataaaattagttgataaagaaaataaagaattttacggtggaatagcagtaaatgttggaaacccacatgtaattttttttatagaaaatatagaaaaatttaatattgaaaagatcggtccagaaattgaaaatcatgaactattccctgaaaaatgtaacgttactttagcaaaaaaaattagtccttctttgataaaagtaaaagtttgggaaagaggcgctggtttaacaaaggcatgcggtacagctgcttgcgcaacagcagttgctgcaaatttagaaaatctttccaattcaaaaactgaaattgaatttggtatgggtaaattattagttagtatagatgaaaatcacaatataaaaatgatgggaccggtctcagaaattaaagaaattaaaattaatatttaat

SEQ ID NO: 289323 - DNA, 338 bp, Unknown
  Bacterial polypeptide expressing nucleotide sequence isolated from the Sargasso Sea
tttttttggacaaaatataaatgatgtagatttaggtatgataggacctaaaatagaaaatcataagttttttcctaaaaaaataaatgttgagcttgtagaaatcataaataggaataaaattaaaataagggtatgggagcgaggagctggacttacactagcctgtggaagcggagcttgtgcttcagtatatgctggaacattaaaaaaccttcttgaaaatgaagttgaggtaattttagaaagaggatcattatatataaacatagttaatggtgaagcaataatgactggaccagcagagataagtttttatggaagtttggattactaat

SEQ ID NO: 289324 - DNA, 595 bp, Unknown
  Bacterial polypeptide expressing nucleotide sequence isolated from the Sargasso Sea
atggatggattaggaaacgattttgtaatacttgatcaaagatttaatgaaatcaatctaaccaaagaacaaataattaaaatttgtagtcgctcatttataggctgtgatcaactgattattataaacaactcagaggacaacgatggtgatttaatattttataattctgatggaagcgagtctagcgcctgtggtaacggcactcggtgtgttgcttatttaatatctgaagagaataataaaaaagaaataaatttaaggacaaaatcaggaattttaaattcaaaaatattggacaaaaatttagttgaaacagttattggaatagcaaaaactgattggagagaaatacctattagtcacaaaatagataccaaaaatttaaatttaagaattgaagataaaaataaaaacgagtattttggtgggacagctgtaaatgtaggtaatcctcatacaattttctttgttgataaactagaaaattataatctatcagagattggaccgagtttagaaaaaaataaattatttccagacagatgtaacataacacttgctaaaattgagaatagtaagaaaatatttgtta

SEQ ID NO: 289325 - DNA, 328 bp, Unknown
  Bacterial polypeptide expressing nucleotide sequence isolated from the Sargasso Sea
aaatcaattaaaaacgttaatttaactaagatagggcctaaaattgaaaaacatcatttttttccaaataaaacaaatgttgaatttattgaaatagtaaattcgaaaacaattaaaatgaaggtatgggaaagaggagcaggagtaacacttgcttgtggcagtggtgcatgtgctgctgtttatgcaggatggaaaagaaatttgatagaaaaaaattctgaagtgcagcttacaaaagggtccttacaaataaatataattgatgacgaagctataatgactggtccagcagaaataagttatagtggatatattcaaatttaat

SEQ ID NO: 289326 - DNA, 388 bp, Unknown
  Bacterial polypeptide expressing nucleotide sequence isolated from the Sargasso Sea
aatgacatgtgtttcaatgggaaatccgcatgcagtgttttattgtcatgatgttatggcaatacctctcgagacagttggccctctgttggagtgccacccaatgtttccaaaacgaatgaatgttcactttgtacagagactcacgtcgggtcgtgtgcgaatgagaacgtgggagcgaggctctggcataacaatggcatgcggcactggagcctctgcggtgtgtgttgccggggtactcacaggtcgtacagatagtcaacttgtggctgaactgcccggtggcgaactggttcttcagtgggacggaaaaggcgaggtcttcatgacaggacctgcagaggaagtgtttgagggagaatggtatctggagcatcaaaaatga

SEQ ID NO: 289327 - DNA, 739 bp, Unknown
  Bacterial polypeptide expressing nucleotide sequence isolated from the Sargasso Sea
atggatggattgggtaatgatttcattattatcgatagaagatcaaattctattaacttgaccaaagataaaattattgagttgggaaaaagaagtaatattggttttgatcaaataatttttattgaaaaagaaaaagaaaattcttttccgataacaatttttaattctgacggtggtgaagtaagtgcctgtggcaatggttcgagatgtgttgcctatcttttgagtaaaagtttaaatgctaaccaaattaaattaaaaacaagtaatcgaagtctcaatgctaaaattgttggaaatttaatggtagagcttgaaatgggaaaacctttatttaagtttgaagatattccattatcaaaaaaagtaaatactgctgacgtctcgctagatatcaaaggcaaaaagtttactggtgggttttgtctaaatataggaaacccccacatagtttttttcgtagatgattgttttaaatacgatttgaaagtaataggacctttaattgaaaatcatgaattatttcccgaaaaaacaaatgtaacatttgctcaaattttggataaaagaaatattttagttaatgtttgggaaagaggcgctggacttactaaagcatgtggaacagcagcttgcgcaacagctgttgctggaaaaaataatgaattaatagaaaacaaagttgctattaaatttaaagagggaatcttaaatatagttttagatgaaaaaaata

SEQ ID NO: 289328 - DNA, 418 bp, Unknown
  Bacterial polypeptide expressing nucleotide sequence isolated from the Sargasso Sea
atggacggcctaggaaatgattttgtaatcattgatcaaagacataatcatattgaattaacaaatgatcaaataaaaaaaatatgtaatagaaattttattggctgtgatcaacttatatttataaaaaaaaatgaaaaaacagatgctggtatagaattttataattcagatggaggtacatctggtgcctgtggaaatggcactagatgtgtagcttatttattatcaaaagaaatgaataaagataagattatgctagaaactgagtctggaaatttagagtcaaaaattttaggagaaaaattggtagaaacaaaaattggcttagcaaaaactaaatggaatgaaattcctttaataaaagagcttaatactaacaatttaaattacaaaattattgataaaaataataaag

SEQ ID NO: 289329 - DNA, 499 bp, Unknown
  Bacterial polypeptide expressing nucleotide sequence isolated from the Sargasso Sea
agatcagcgcaaggatgtttataccgtcgacatgaatggccagacggtcgagctgtcagccatctccatgggtaatccccacggagtactggtggtggacgatgtcgatacggcgccggtggaaagccttggcccgcagttggaaaagcatccccggtttccggccagggccaacattggttttctgcaggtgattgatcgccgccatgcccggttgcgggtgtttgaacggggctccggcgaaacactcgcctgcggcagcggtgcctgtgcagcggtggtggccggttgtctccgcggcttgctggacagccgggtcgaagtcgagttgcgtggcggcaggctggtcattgaatggcagggggaaggtacccctgttatgatggaaggtcctgcaaccacggtatttgaaggccagttgcggctgcctggcgaaccccagccccggcgccgcaggagtgcccgcccgaacacccgacctcataaaaacggggcctga

SEQ ID NO: 289330 - DNA, 520 bp, Unknown
  Bacterial polypeptide expressing nucleotide sequence isolated from the Sargasso Sea
aatggatggtctaggaaatgattttgtaatcattgatcagagagcggttcaatttggattaacaaatgaccaagtaaaaaaaatatgtaatagaaattttattggttgtgatcaacttatattaattaaaaaaagtaaaaaagttgatgccagtatggaattttataattcagatggaggtacttcgggtgcctgtgggaatggaactagatgtgtagcttatttattatcaaaagaaattaaaaaaaataaaattatactaagtactaaatctggaaatttagaatcaaaaattttaggagaaaaattagtagaaacaaagttaggtatggcaaaaactaattgggatgaaattcctttagcagaagagttggatactgttaatttaaactataaaattgttgacaataataataaagaacattttggtggtacaacagtaaatgttggaaatccacatattgttttttttgtaaataatatagaagattttaatttagaaaaaattgaccaaaaatga

SEQ ID NO: 289331 - DNA, 481 bp, Unknown
  Bacterial polypeptide expressing nucleotide sequence isolated from the Sargasso Sea
atggacggtttgggtaatgattttgtcattattgatcaaagaaaaagatcggtaagtcttactaaggatcaaattataaaaatttgtgatcgtaattttttaggatgtgatcaattaatttttataaaaaatagcactatatcaaatgcttcaatgcaattttataattcagatgggagtacatcaggagcgtgtggtaatggaacaagatgtgttgcatatttgatttcagaagaagagaaaaataaaaatataagtctaaatgttgataatcaaatacttagttctaaaattttagatagtaaacaggttgaaacaataataggaaaaccaaaactgaattggaaggatatcccaattaatagagaattgaatacaagaaatttagaattaaccatttctggtgttgacaataataaaattactggaggtgtaggtatcaatgttggtaatcccccatgtaattttttttgtaaatgat

SEQ ID NO: 289332 - DNA, 820 bp, Unknown
  Bacterial polypeptide expressing nucleotide sequence isolated from the Sargasso Sea
atgaatataccatttgtcaaaatgcatgctaatggaaatgattttgttattattgacaatagaactaaaagattcttatttaaagagtcacaagttttattgctctctaatagaaacaccgggataggatttgaccaattgatattattagaaaaaagcaagagcagtgatgtttcgatgaaaatctataactctgatggcagggaagctaaaatgtgcggaaatgctgctacatgtgtggcttcattattatttgcatctaaaaatacaaactctattactatagaaactatatctactaaaataactgcaaagttaaataaaagtggagcagttaatactacaataaagttaccgtctcaaattttttcatatataattagagataaaaatattgatactaacaatataaatttttcaaaaattcatccttctttacattcaggaatactagtaaatatgggcaacccacatatagtatttatagttaataacttagaagaaatagatttattgaaatacgggaaaaaaattgaaacaaatgaactatttttagacggaataaatgtagaaattgtcgaattagtaaataagaaaaaatttaaagttaaattttgggaaagaggagctgggttgactttatcatgtggatcaggaatattatcatcattttatgcttgttataaaaaaagcttatgtgaaaaagaaatagaaattatgatacccttaggagaagtaaatactagaattaacggaactgagttaactataacttctactcctcaagtttctttcttaggagagtttaattatgaataat

SEQ ID NO: 289333 - DNA, 412 bp, Unknown
  Bacterial polypeptide expressing nucleotide sequence isolated from the Sargasso Sea
atggacggattgggtaatgattttgtgataatcgataatagagaaaaaattaccaatttgacgaaagatcagatagttaaaatttgtgacagaaattttattggctgtgatcaactaatatttattgagtcagatagctctgcagatgcaaatttaagattttttaattcagatggaggagagtctggagcatgtggaaatggaactagatgtgttgcaaatttgatttcaaatgaaaataataacaagtcaataattttaaatacgctatctggaaaattaaaatctgaaattttagagaaaaaaattgttacaacagaaattggtaaagcaaagttaaaatgggatgaaatacctttatcaaaagaaatggacacaaaaaacttaaatatcaaaattattgatataaata

SEQ ID NO: 289334 - DNA, 345 bp, Unknown
  Bacterial polypeptide expressing nucleotide sequence isolated from the Sargasso Sea
aatggatggattaggtaatgattttgttattattgataatagacagaaaattaccaatttaactaaagaacaaataattaaaatttgtgatagaaattttataggttgtgatcaattaatattaattgaaaaacataaaacttctgacgcttacttaaaattttataattctgatggcggagagtcaggagcatgtggtaatgggactagatgtgttgcagacctcatctcaaaagaacttaataccaaagttgtaaacttaaaaactttatctgggaatttaaaatctgaaatattgggaaataatattgttacaacggaaattggcaaagcaaaaactgagtg

SEQ ID NO: 289335 - DNA, 445 bp, Unknown
  Bacterial polypeptide expressing nucleotide sequence isolated from the Sargasso Sea
tatgcaaaaaattgaatttatcaaaatgcatggactaggaaatgactttgtaattatagatcaaagatcaaaaaaaatacctataactcaacatctaatccaaaaaattagcgacagaagaactggtgctgggtgtgatcaactaattactataagtaattcaaaaaataatgtcgatgctgatatggaaatatttaaccctggaggagatcgtgcagaagcatgtggaaatggaacaagatgtatagctcgaattttatttgatgaaaataaaaacaaagaattattaagaattcattctgatgctgggattttagaagcacaaaaagaaggaggtaatattagtataaatatgggatacataactatggattggaggaaaatacctttaagtcaacattttgatacgctgaatattccaatttcaatagagggatatagtaaa

SEQ ID NO: 289336 - DNA, 208 bp, Unknown
  Bacterial polypeptide expressing nucleotide sequence isolated from the Sargasso Sea
tatggacattaaagcatttaaaatgaacggattaggtaatgactttgtaatcatagataatagacaaaaaattaccaatttaacaaaggatcaaataatcaaaatttgtgatagaaattttattggctgtgatcagttgatcctaatagaaaatgacaagtcagctgatgcaaacttaaaattctttaattctgatggggggagtcag

SEQ ID NO: 289337 - DNA, 666 bp, Unknown
  Bacterial polypeptide expressing nucleotide sequence isolated from the Sargasso Sea
aatggatggcttaggtaatgattttatcattgttgatagaagaaaaaattctattaatttaacaagagaaaaaattattgaattgggcagtagatctaacattggctttgatcaaataatctttatagaaaaagaaaaagaaaattcttttccaataacaattttcaactctgatggaggtgaagtaagtgcatgtggaaatggatctagatgcgtagcttatcttttgggtaaaaatttaaacacaaaagaaataaaactaaaaacaaacaaccgtcttcttaatgcaaaaatagtaggaaatttacaagtagaacttgaaatgggaaaacctttatttaattctgaagatattcctttatcaaaaaaaataaacccagcagatattactttagagataaataataagaaatttacaggtggattttgtgtaaacgtaggaaatccacatataattttttttgtgaagaattgttttgaatataatttaaaaacaataggtccaaaaattgaaaaccacattctatttcctgaaaaagccaatgtaacaatggctcagataattgatgaaaataatataactgttaatgtttgggaaagaggcgctggactaactaaagcatgtgggacagcagcatgtgcaaccgctatcgctggttttaagaa

SEQ ID NO: 289338 - DNA, 646 bp, Unknown
  Bacterial polypeptide expressing nucleotide sequence isolated from the Sargasso Sea
attttataattctgatggtagtacttctgaagcttgtggaaatggtacaagatgtgtagcctacttattatcaaaagaaaaaaataaaaatcaaattaatcttgttgtttcttcaacagaattaaaatcgaaaatacttgatgataatttagttgagacatttattggagtaccaaaaactaattgggacgaaattccaatagtaaaatctttagataccaaaaatttaggattagaaattaaagataaaaataattatgtaactcaaggaggaataggagttaatgtgggaaacccacatgtaattttttttgtcaataacattgataattttgtattagaaaaaattggtcctagaattgaaaatcatgaattattccctgaaaaatgcaatgtgacacttgcaaaaaaaataggtgataatcactataaagttaaagtctgggaaagaggagctggtttgactaaagcttgtggaacagccgcttgcgcaactgcagtagcagcaaatttagaaaaattggaaaatacccgaactgaaattgaatttaatttaggaaaattattaatttcaatagatgaaaataaaaatgtttctatgagaggtcctgtttcaaaaattgaagaaattaaaattgatatctaa

SEQ ID NO: 289339 - DNA, 706 bp, Unknown
  Bacterial polypeptide expressing nucleotide sequence isolated from the Sargasso Sea
atggatggtctgggtaatgactttgtgatcattgattgcagatccgaagagattaatctctcaaaaaaacaagttattaaaatttgtaatagagattttctaggatgtgaccaattaataatcataaataaaagcaatagcgctgatgctgaattaattttttataattcagacgggagtgagtcttacgcgtgcggtaatggaacaagatgtgtagcattttttatttttaaagaaactaaaaagtcgattataaatttaaagactaaaaatggatttttgaaatcagagattttagataaaaatttagtagaaactgtaattggcaaagctaagacgaactggcgggacatacctattagtaaaaatataaatacaaaaaatttaaatattaaaattgaagataataataaaaatttaattattggtggtactgcagtcaatgttggcaatccacatgttgttttttttgtagacaatatagatagttttgatttaaagaaaataggccctatgttagaaaaagacgaattatttcctgaaagatgtaacgtaacaatcgctaaaattgaaaataaaaaaagcattaatgtaaaagtttgggaaagaggtgtgggattaactaaagcttgtggttctgcagcatgtgcaactgcttatgctggtaaaattaatggtttaagtgaaaataaagttaaaattaatt

SEQ ID NO: 289340 - DNA, 363 bp, Unknown
  Bacterial polypeptide expressing nucleotide sequence isolated from the Sargasso Sea
tatggatattaaagcttataaaatggatggtctgggtaatgattttgtaattatagatcagagaaataaaattacaaaattgtcaaaagaagaaattgttaaaatttgtaatagaaattttattggttgtgatcaacttattattattaaaaaaaataaagaattagatgctagcttagaattttttaactctgatggaagtgcttctggggcgtgtggtaatggtactagatgtgtagcttatctattatctaaagaaaataataaaaaagaaattatagtttggacttcttcatcaatactaaaatcaaaaatattaagtaataatattgttgagactaatattggtgtttcaaaaattca

SEQ ID NO: 289341 - DNA, 475 bp, Unknown
  Bacterial polypeptide expressing nucleotide sequence isolated from the Sargasso Sea
tatgagttcaattgattttataaaaatgcatggcttgggtaatgatttcgttattattgatctgcgaaaacaaaacctcgagatttctaatcgggctgtaaagtcaattgcaaatagacgtaccggcgttggttgtgatcagttaatagctattgaagagccaaaaaagtctgaaaatgacgttcgattaagaatatggaacgctgatgggggggaagtaggagcatgtggaaatgcaatgcgttgtgtgggtcatttaatattaaaagaaactaacaaagtagaaattgcaatagaaactgtatctggaattataaaagttaattcaaagaaagaaggtaagttatcagtggacatgggtcctcccaggatacattggaatgagataccactagcaacggaatgcgatactctctcacttgatataactataaatagattaaaggatccggtcggtgtatcaatggaaatccac

SEQ ID NO: 289342 - DNA, 436 bp, Unknown
  Bacterial polypeptide expressing nucleotide sequence isolated from the Sargasso Sea
aatggatggtctgggtaatgattttgtaattatagatcaaagaaataaaattacaaaattatcaaaagaagaaattgttaaaatttgtagtagaaattttattggttgtgatcaacttattattattaaaaaaaataaagaattagatgctagcttagagttttttaactctgatggaagtgcttcgggagcgtgcggtaatggtactagatgtgtagcttatctattatctaaagaaaataataaaaaagaaattacagtttggacctcttcatcaatactaaaatctaaaatattaaataataatattgttgaaactaatattggtatttcaaaaattcagtggaatgaaataccgataaatgaaaataaaaatactaataatttaggtataaaaatatttgataataataataatgaacacataggtgggact

SEQ ID NO: 289343 - DNA, 295 bp, Unknown
  Bacterial polypeptide expressing nucleotide sequence isolated from the Sargasso Sea
atggaatttaaagcttttaaaatggatggccttggaaatgattttgtaattattgataataggtcaaataatgtagaattaactagggatcaaataattagaatttgtgatcgaaaatttattggttgtgatcaactaatatttgtaaataaaagtaataaaggtgatgctgaaatggaattttataattctgatggaagtatttcaggcgcatgtggaaacggcacaagatgtgtagcatttttaatttctaaagaaacagataaaaaagttgtagatctttttgtaggatcca

SEQ ID NO: 289344 - DNA, 168 bp, Unknown
  Bacterial polypeptide expressing nucleotide sequence isolated from the Sargasso Sea
tatgaagaagtttgattttataaaaatgcatgggcttggcaacgattttgttatcattgatgaacgtaatggtgaacttggattatctacagccgaaatagtctcaattgctaatagacatacaggagttggttgtgaccagctcattacgattagttatgattctaa

SEQ ID NO: 289345 - DNA, 725 bp, Unknown
  Bacterial polypeptide expressing nucleotide sequence isolated from the Sargasso Sea
aatggatggtcttggaaataatttcataattattgacagaagaaaaaatgcattagaattaaacaaagacaaaatagtaaatatagcaaacaaaaaaatggttccttttgatcagttaattactttggaaaaagaagaaaaaaatatttttccaataaaaatttataatccagatggaattgaagtaggagcttgtggaaatggtagcaggtgtgttgcttatttaatttccaaagaaataaaaaaaactaaggtttcaataaaggctgaaaatagaattttagatgcagaagtaattggcaagcagattgtaacaataaatatgggttttccaaaatttaatgattggaaagatattcctcttgaaaatgaaagattaaacccaaagatggttccaatagattttttagaaaaagaatatggaactggaacttgtgtaaatgtaggaaatccccatattattttttttgttaaagactgctggaaagtggatatacaaaaaattggtcctgtagttgaaaaccatcattattttcctgaaagagttaatgtaactttcgcagaagtattggatgatcatgaaaatataaaaataaacgtatgggaaagaggagcgggtcaaacaaaagcttgcggaaccgctgcatgcgctactgttgtggctgcgtatttaaaaagtttagcaaaaaataattgtaacattcatttcaaagaaggaactctta

SEQ ID NO: 289346 - DNA, 507 bp, Unknown
  Bacterial polypeptide expressing nucleotide sequence isolated from the Sargasso Sea
aatattcactcgataataactatctagatgtatctagattcatagttaaatcacctgttggagatttagaagttaatgtagacgagaatatagttgaagtctcaactccaatacctacttttgaagatgaaaagattaaagttaataattttgaaggtgtgaaatcagcagtaggaaatccacattttatgattgaggtagaggatgtagacgagttagatttagagaatttaaatacagaagtacttaataaaaatatttttccagatggtgtaaatgttgaaatatatcaaataataagtagaaattatattaaagcaagagtctacgaacgtggagtaggagagacaaatgcctgtggttcaggtgcattgtgtatgtttaactatttaattaaaacagaccaaatagaaaacaattcttatgtaatgtacccagggggtgatttaaatctaagatttgaaaatgaaagattatatctatcaggagaagttatatatctctaaa

SEQ ID NO: 289347 - DNA, 366 bp, Unknown
  Bacterial polypeptide expressing nucleotide sequence isolated from the Sargasso Sea
aatggatggacttggaaatgacttcgtcataattgatcaacgtgaaaaaaaatatgatctaaacaatcttcaaataaaaaaaatttgtgacagaggcaatattggttgtgatcaactaattcttataaataaaagtgataaatttgatgcatttcttacgtttaaaaattcagatggctcggactccgcagcatgtggaaatggaactagatgtgtagctagcttattgtcaaaagaaagctcaaaaaacttcattacggttgagacttcttcaggaaaattagagtccaaaatattaaaaagtaacttgattcaaacaaatattggaaagccaaaaactaattgggatcaaatacccttaagtaa

SEQ ID NO: 289348 - DNA, 576 bp, Unknown
  Bacterial polypeptide expressing nucleotide sequence isolated from the Sargasso Sea
aatggatggtttaggtaatgattttgtcattatagataataggcacaaaattacaaaattgagcaaagagcaaattattaaaatttgcaatagagaatttataggttgcgatcagttaatattgataactaaaaataatagttctgatgcatctctagaattttacaattctgatggcggaagttctggagcatgtggaaatggaacaaggtgtgttgcagatttattatctaaagaaaaaaataaatcattaattactttaactacacgagctggagatttaaaatctgagatattgggagaaaaactagtttctactgagattggaaaaggtagaacaaggtgggatgaaattccactttctgaaaaattggatactaataacctcaatataaaaataactgatttaaataataataatcataatggtggtacagcagtaaatgttggaaacccacatgttattttttttgttaaaaataacgaaaactttgaaataaaaaaaattggaccagaaattgaacaccatcccttatttccagaaaaatgtaatgtcactttagcaacagtcgttga

SEQ ID NO: 289349 - DNA, 239 bp, Unknown
  Bacterial polypeptide expressing nucleotide sequence isolated from the Sargasso Sea
tatggaatttaaagcttttaaaatggatggtttaggtaatgactttgtcattattgatcaaagatacaataaattagaacttagcaatgaacaaattttaaaaatttgtgatcgaaattttattggatgtgatcaactaatatatattacagaaagtaataaaggtgatgctggagtagaattctataattctgatggtagtttatcaggtgcttgtgggaacggcacaagatgtgttg

SEQ ID NO: 289350 - DNA, 738 bp, Unknown
  Bacterial polypeptide expressing nucleotide sequence isolated from the Sargasso Sea
atcaagttaaaaaaatatgcaatagaaattttattggctgtgatcaacttatattcataaaaaaaaatgaaaaaattgatgctgacatgaaattttataattcagacggaagtgcttcgggtgcatgtggaaatggaactagatgtgtggcttatttattatcaaaagaaatgaacaaaaataaaattatactaggtactgaatctgggaatttagagtcgataattttagaagaaaaattggtagaaacaaaaataggaaaagctaaaactaactggaaagaaattcctttaatagaaaaattagatacaagtagtttaaattataaaatagttgacaataataataaagaatattttggtgggatagcggtaaatgttggaaatccacatattattttttttattgataatatcgaaaattttaatttagaaaaaattggaccagagattgaaaacgataagttatttcctgaaaaatgtaacgttactttggcaaaaataattaatgagaatcgtattaaagtaaaagtatgggaaagaggcgcagggcttacaaaagcttgtggaacagcagcttgtgcaacagcttttgctgcaaaaattaatggtaaaattaaaaataaaactgaaatagaatttgaactaggaaaactatcaatttttatagatgataatggaaatatttttatgactggacctgtttcaaatatagatcaaattcaaataaaaatttaat

SEQ ID NO: 289351 - DNA, 249 bp, Unknown
  Bacterial polypeptide expressing nucleotide sequence isolated from the Sargasso Sea
tatggaatttaaagcaattaaaatggatggattaggaaatgattttgtaatcatcgaccagagaaaaactaagataaatttaagtagagaaaatattattcaaatttgtagcagggattttataggttgtgatcaattgatctatattaataagagtgaagataataaagataaacttactttttttaattctgatggaagtacttctggagcttgtgggaatggtacaagatgtgttgctaaaatttt

SEQ ID NO: 289352 - DNA, 717 bp, Unknown
  Bacterial polypeptide expressing nucleotide sequence isolated from the Sargasso Sea
cttgcatatatattctggtctagggaacgttattgcaataattgacgctgtaagaaatgacttatccatagattctactcacgttacaaatatttgttctgtgcaaggcatcaattttgatcaacttcttgttgtgctgcctccacagaaggctgatattgatctggatgtgaaaatctataataaagatggttctttggccttaaactgtataaacggagctagatgcctagccaaatttattaaggataatgatttacttgtcaaagagtgctttgatgtccaaacagatggaggcatgtggaatcttgagatcattgacgatactacatttactgcatcatttactttcgttgaaaaagtaacaaagttgagttacgagtacggcgaaaattatataaacctaagctgcttggatcttggaaacccacacggagttacattcgagagcttaccgcaaggatcaaactttgtggaattaggtaaagatcttcagaattcggacagcttccatgaaggaataaattttggagttgctcaaataattagtgaagacgagattaatttaaaagtttatgaaagaggtgcaggagaaaccttagcatgcggaagtggtgcttgtgcggctgcagtcttaggcattattgagaaaaacttagtaagcccagtaaaggtcaacttcaaactgggcagtcttttggtagactatcaaactga

SEQ ID NO: 289353 - DNA, 190 bp, Unknown
  Bacterial polypeptide expressing nucleotide sequence isolated from the Sargasso Sea
atgacaataccttttttaaaaatgcatggtctggggaatgattttattatcattgaagaattttcaagaaaattttcaataggtaaagaattaatcaaaaaaatgtgttctagacaatttggtattggatgcaatcaacttttagtaataaaagaatttgaagattatgaggcattagtagaaatctata

SEQ ID NO: 289354 - DNA, 724 bp, Unknown
  Bacterial polypeptide expressing nucleotide sequence isolated from the Sargasso Sea
atttgtaaccgtaaatttataggatgtgatcaattaatatttgttaaagaaaatacagaaatagatgcagaattagaattttataattcagatggtagtaaatcagatgcttgtggaaatggcacgagatgtgttgcacatttactttcaaaagaaaatgataaaaatgaaataaatttaattgtagcttcacaaattcttaaatcgaaaatttttgaaaataatattgtagaaacatcaattggatcacccagaatgaattggaatgaaatacctttaagtaaagaatctgatactaaaaatttaaaaataaaattagttgataatgaaaataaagaattttatggaggaatagcagtaaatgttggaaatccacatgtaattttttttttagagaacatagataaatttaatcttgaaaaaattggtccagaaattgaaaatcatgaactatttcctgaaaaatgtaacgttactttagcaaaaaaaattagtccttctttgataaaagtcaaagtttgggagagaggtgctggtttaacaaaggcatgtggtacagctgcatgtgcaacagcagttgctgcaaatttagaaaatctttctaattcaaaaactgatattgaatttagcatgggaaagctaactattagtatagatgaaaatcataatataaggatgatgggacctgtttcagaaattaaagaaattaaaattaatatttaat

SEQ ID NO: 289355 - DNA, 320 bp, Unknown
  Bacterial polypeptide expressing nucleotide sequence isolated from the Sargasso Sea
aatgacaagattctataaaatgcacggcctcgggaatgactttgtaatatttgactcaagaaagattaaattagaattcaacactgaaaatataaaaaaaacttgcgacagaaaattaggaataggatgcgatcaattaattattatcgaaaaggacgcacaagtggattgctttatgagaatctttaacaaagatggaagtgaagcagaatcatgcgggaatgcagctagatgcgtggcaagattactacaagaagaaagcaaaaaaattgcctacaaaataaatactaaaggaggcctcttaaaatcaaagaaaatat

SEQ ID NO: 289356 - DNA, 556 bp, Unknown
  Bacterial polypeptide expressing nucleotide sequence isolated from the Sargasso Sea
aatggatggattagggaatgattttgtaatcattgataatagacaagatattattaaattatcaaaagaacagataatcaaaatttgtgatagaaattttatcggatgtgatcaattaatactaatagaaaaaaatagttcgtctgatgctagtttaaagttttataactctgatggtggggagtctggtgcatgtggtaatggtacaagatgtgttgcaaatttaatctcaaaagagaagaatagtaaaacaataattttaaccactctttctggaaatttaaaatctgaaattttaggtaacaatcttgtaacaacagaaattggacatgcaaaagttgagtggaatgaaattccactatcgagtgaattaaatacaaaaaatttaaatattaaaattagtgatcaaaataataaaaatcattctggtggtactgctattaatgttggaaacccccatgttgttttttttgtagataatatagatgactttgacgtttcaaaaataggtcctaaaattgaaaatcataagatgtttcctgaaaaatgtaacgta

SEQ ID NO: 289357 - DNA, 373 bp, Unknown
  Bacterial polypeptide expressing nucleotide sequence isolated from the Sargasso Sea
aatggatggtttaggtaatgattttgtcatcatagataataggcacaaaactacagatttaactaaacaacaaataattaaaatttgtgacaggaaatttatcggttgtgatcaattaattttgataaataaaaacgatacttcagatgcatctttagaattttataattctgatggtggaacttcaggagcatgtggaaatggaacaagatgtgttgcagatttattatcaaaagaaaataataaatctttaattattttaaccacacaatctggagatttaaaatcagagatattgggagacaggctagtttctacagaaattggaaaaggtaaaacagagtggaacgaaattcccctctctaaaaactag

SEQ ID NO: 289358 - DNA, 441 bp, Unknown
  Bacterial polypeptide expressing nucleotide sequence isolated from the Sargasso Sea
aatggatggtttgggtaatgattttgtcattatagataataggcaaaaaattactgatttaaccaaacaacaaataattaaaatttgtgacaggaaatttatcggttgtgatcaattaattttgataaataaaaacgagacttcagatgcatccttagaattttataattctgatggtggaacttctggagcatgtggaaacggaacaagatgtgttgcagatttattatcaaaagaaaataataaatcgttaattactttaaccacacaatctggagatttaaaatcagagatattgggaaacaggctagtttctacagaaattggaaaaggtaaaacagagtggaacgaaattcccctctctaaaaaactagacaccaataaccttaatatcaaaatatcggatttagataataataattatatgggaggagcggctgt

SEQ ID NO: 289359 - DNA, 421 bp, Unknown
  Bacterial polypeptide expressing nucleotide sequence isolated from the Sargasso Sea
tatggaatttaaagcttttaaaatggacggactagggaacgattttattataatcgaccaaagatctcaaaatataaatcttaccaaagaacaaataatcaaactttgtgacagaaaatttattggatgcgatcaacttatttatataaaaaaaaatatagaaattgatgcaagtttagaattttataattctgatggaagtgaatccggagcatgtggaaatggaacaaggtgtgtagcaaactttctgtcaaaagagagcaataaaaaagaaatttatgttaggactttgtctggaaatttaagatcaaaagtacttgataataatcaagttgaaacagaaattggagtacccaagttcaattggagtgagatacctttgacacacgatggtagacacaaaaaatttaaaaatacgaat

SEQ ID NO: 289360 - DNA, 619 bp, Unknown
  Bacterial polypeptide expressing nucleotide sequence isolated from the Sargasso Sea
atgtcaggaacaggcaatgattttatatgtactgagtacgatcgagacttgtcagatatagaaattatttcaattgttagtgatgcactttttcctattgatggagtcatattggtagagggtatagatagttcaacagtgaaaatgcactattttaataatgatggaactcctgctgagctatgtgtaaatggtgttcgttgtacagctaaatttgcagtagacaataacttagtagatactaaaaatttgattgttaaagctccagttggtgatataaaagcatttgtagaaaacgattatgtaaaaattgaagcacctcttcctacgactggtgatagtatcgaaattgatagttatacatgtacgactagtgaagttggaaatcctcatcttatggttgaggtcgatgatgtagagaaatttgatcttgagaaattttcagtaaatgccagaaaacttgacgtattttctaatggtgtaaatgttgaaatctattcagttgttgaacgcaaatttatttacgcaagagtaaacgaaaggggagttggcgaaacagacgcttgtggttctggagctttagctttgtttacatatttaagagaaattaataaagttg

SEQ ID NO: 289361 - DNA, 208 bp, Unknown
  Bacterial polypeptide expressing nucleotide sequence isolated from the Sargasso Sea
cttgaaaataccatttattaaaatgcatggattaggtaatgatttcatcatttttgataatattaatgatccagttatacatgaatctgaatttatcaaaaaaattggccacagaagatttgggattggatgtgatcaaattatgataattgagaacacagaaaataaagaaaactttagagtaaaaatatataattctaatgggaca

SEQ ID NO: 289362 - DNA, 718 bp, Unknown
  Bacterial polypeptide expressing nucleotide sequence isolated from the Sargasso Sea
atggaatttaaagcttacaagatggatggtttagggaatgattttatcatcatcgacagaagagaaaacccaattaatttgtctaaagaaaaaattattgaattgggaaatagatctaatgttggatttgatcaaattatctttattgataaagaaaaagaaagttcttttcctatacaaatttttaattctgatggaggcgaagtaagcgcctgtggaaatggatcaagatgcgtagcttatcttttaagtaaaaatttaaatactaaggaaattaaattaaaaactaataatcgatttcttaatgcgaaaatagttggcaacctagaagttgaacttgaaatgggaaaacctttattcaactttgaagatattccattatcaaaaaaagtaaatcctgctgatatatctttaaaaataaatgataaaatattttctaatggattttgtgttaacgtcggtaacccacatataattttttttgtaaaaaattgttttgaatatgatttaaaaataataggtcctaaaattgaaaaccatgatctatttcctgaaaaaacaaatgtaacatttgctgaggtcaaagataaaaacaatatgactgtgaacgtttgggaaagaggtgcgggacttactaaagcttgtggaacagcagcttgtgcatcagctgttgctggttttaagaagaatttagtcaatagtaaggttaatattaagt

SEQ ID NO: 289363 - DNA, 281 bp, Unknown
  Bacterial polypeptide expressing nucleotide sequence isolated from the Sargasso Sea
acaacatcatttttttcctaataaaaccaatgttgaattcattgaagtaataaattcaaatacaattaaaatgaaggtttgggaaagaggagcggggataacacttgcgtgtggtagcggtgcttgtgctgctgtttatgctggatggaaaaaaaaactaattgaaaaaaattctgaagttcaacttgaaaaaggatcgttacacataaacatagttaataatgaagccattatgactggaccagctgaaattagttataacggttatattcatatttaat

SEQ ID NO: 289364 - DNA, 616 bp, Unknown
  Bacterial polypeptide expressing nucleotide sequence isolated from the Sargasso Sea
aatggatggtttgggaaatgattttgttatttttgatgccagaaataaaaatctttccttttccaaggaagaaataatcaaaattgcagatagaaaatttttaggttgtgatcaagttattttggttaaaaatgatactgattcagatgcctatctaagtttttttaattcgaatggagaagaggcatctgcatgtggaaatggtagcagatgcgtttcttatcttttgagtaaagaaaaaaacaaaaataaaattaaaattaaaacaaaaggtggaattttaaattcggatatactggaagagaaaattgtaagaatcaatataggaaagccaaaatttttatgggatgaaattccattaaataaaaaaatggaatcacaaaatttaaaaatcgagctgagtgacttaaataacaatatacacaaaggtggttacgcagtaaatgtgggaaatccacatgctgttttttttataaataactgtgatagttttgatttaaaaaaaattggaccagaaattgaaaatcataaaatttttcctgaaaaatgcaatgtatctttagccgaaataaaaaacaaatcactaattaaattaaaagttgggaacgaggggcag

SEQ ID NO: 289365 - DNA, 660 bp, Unknown
  Bacterial polypeptide expressing nucleotide sequence isolated from the Sargasso Sea
aatggatgggctgggaaatgactttatcatcatcgatagaagggaaagttccattaatttaacaaaagaaaaaattatcgaattaggcagtagaactaatattggttttgatcaaataatctttatagaaaaagaaaaagacaattcttatcctataacaatttttaactctgatggaggtgaagtaagtgcttgtggaaatggatctaggtgtgtggcatatctcttaggtaaaaatttaaacactaaagaaattaaattaaaaacaagcaatagaatacttaatgcaaaaataattaaaaaattttatgtagagcttgaaattgggaaacctttgtttagttctgaagatattccattatctaagacgataaatccaagtaagatatctttgaacattaataacaaaacatttactaatggattttctttaaatgtggggaacccacatataattttttttgttgaagactgttttaaatatgatttaaaaattataggtcctaaaatcgaaaatcacaaactttttccagaaaaaaccaacgttacatttgctcaagtaattgatcaaaataatataacagttaatgtttgggaaaggggggctggacttactaaagcttgtggaactgctgcttgtgctaccgcggttgcagcctt

SEQ ID NO: 289366 - DNA, 426 bp, Unknown
  Bacterial polypeptide expressing nucleotide sequence isolated from the Sargasso Sea
aatggatggacttggaaatgacttcgtcataattgatcaacgtgaaaaaaaatatgatctaaacaattctcaaataaaaaaaatttgtgacagaagcaatattggttgtgatcaactaattcttataaataaaagtgataaatttgatgcatttctcacttttaaaaattcagatggctcggactccgcagcatgtggaaatggaactagatgtgtagcgagcttgttatcaaaagaaagttcaaaaaactttattactgttgaaacttcttcaggaaaattagattcgaaaatattaaaaaataatttgatacaaacaaatattggaaaaccaaaaactaattgggatcaaatacctctaagtgagaaaattgatacaaaaaaaataaaagttatggttggtgatattgagtttttaggaacagc

SEQ ID NO: 289367 - DNA, 760 bp, Unknown
  Bacterial polypeptide expressing nucleotide sequence isolated from the Sargasso Sea
aatggatggtctgggcaatgactttgtaatatttgataatagaataaagtctatttcccttactaaaaaccaaatcatagaaatttcaaatagaaataatattggatgtgaccaaattatttttatcgataaggacaaaagtagtaatgcttttttaaaattttacaattcagatgggggagaaatttcggcatgtggcaacggtagtaggtgtgttgcttatttattaatgaaagaaaataacaataaaaaaatatctttaaaaacaaaagttggagttttggaagctgaattgaatgatcaaaatttagtaagcataaacatgggacaacctatttttgaatggaataaaatacctttattaaaaaaaatggataaccaaaatttaaaaataaaaattaatagtattgatggaaaagaagttgtgggcggtttctctctaagtattggaaatcctcacatagttttctttgttgaagatgttaatcaatttaatttaaaagagattggccccaaaatagaaaaccatacatattttccagaaaaatgtaatgtcacattagctaatattaaaaataaaaaacttataaaagtaaaagtttgggaacgtggcgctggtttgaccaaagcgtgcggaacagctgcatgtgctactgcagtatcaggtgctgctctacaattaaacgatagatgtgtggatatagaatttgcggaaggattgttaaatatagattggaaaaaaaataataatatttatatg

SEQ ID NO: 289368 - DNA, 436 bp, Unknown
  Bacterial polypeptide expressing nucleotide sequence isolated from the Sargasso Sea
caggtgcatggtcctgaccacttgcaggttcgtgtctgggagcgtggtgctggtccaaccctggcttgcggaacaggtgcctgcgcaacgctggtggcaacgcatttgcgtggtgcctgtgatcgccaggtgacggttgagcttccaggtggcccattgcagatcctttgggacaacagcaatcacctgcaaatggctggacctgcggtttttgtgtttgcgggagagctcccgtcaccagcagctggaattgaggcggaggttgtggattgcgccaacctctgtggtgatggctgtattcgtccagaggcatgcccgagtgcagctgctcgtgagcaggcaatgagcttcttggaccgtctttcccttgatgacatggtcggattggccaatgaatcgctcgaggagcgcacccgtcgccgtgccggcttctagt

SEQ ID NO: 289369 - DNA, 753 bp, Unknown
  Bacterial polypeptide expressing nucleotide sequence isolated from the Sargasso Sea
aatggatggattaggaaatgattttctaattattgatagaagaaaaaaatcaatttctattaaaaaagaaaaaattattgaattagggaaaagggaaaatattggatttgatcaattaatttttattgatgaaattgacaatggtactccaaattataatccaataacgatatataattctgatggagagaaggttgaagcatgtggaaatggtagcaggtgtgttgcaaaaattttatgtgatcaagaaaaaaaagagggagctgtaattgtaacgtcaaatagaatactaaaagctcaaaaaatttcagaagatagtataagacttgaaatgggcgaacctatttttgaatggcaaaaaattcctttatcaagagatataaaccacaagaatattaatataaaaattaatgatttagaattcagagatggtttcgcgataaatgtcggcaatcctcatatagttttttttgtagatgattgttttaaatatgatttaaaaaaaattggaccactaattgagaattatgaattatttccagagaaaattaatgtcactttcgcacaaataaaagactcctcaaatatactggttaatgtttgggaacgtggagcaggtttaacaaaagcttgtgggacagctgcatgcgcaaccggagttgttgcatttgaaaaaaaattatctggtaataataccaacattcattttaaagaaggtcttttaaatattaaatataatagtgtaatttcaat

SEQ ID NO: 289370 - DNA, 373 bp, Unknown
  Bacterial polypeptide expressing nucleotide sequence isolated from the Sargasso Sea
aaggtgttgctgttatattggaaatcctcatgtagttttttttggaaaaaatattgatcaattaaatttacttcaaataggtccaacaatcgaaaatcacaaattttttcctaataaaaccaatgttgaatttgttgaagttgtaaatttaaaaaaaattaaaatgaaagtttgggagaggggcgcaggtattacgcttgcatgtggaagtggagcatgtgcagcagtatatgctggatggaaaaagaaattaattgataatcaagctgaagttttacttgaaaaaggtttattaaatataaatatacttaatgaagaagctataatgacaggaccagctgaagtaagctatcacggatacgttgaaatttaa

SEQ ID NO: 289371 - DNA, 766 bp, Unknown
  Bacterial polypeptide expressing nucleotide sequence isolated from the Sargasso Sea
tatggttaagttcataaaagctaacggcttaggaaatgatttcgtcattattgacgggcgcgagactccgattatacttgaaaaagaaacagtaattaagctcgctgatcgcaagaagggcgtcggctgtgatcaggtcatctacctgaaggactcgccgaaggctgatgtttatatgcagatctttaatccggatggttcggaggctgaggcctgcggtaatgctacgcgctgtgtgggttatctcctggaaaaagacctgggtcttattgagacaaaggtaggcctcttgcgctcccataagaaggagggcggggatgttgaggtctctcttggggagtcttctatcttacacgaaaacatagagcttgatggggtgatccgcgccatggccgtcagtgttggaaaccctcatctggtttgttttgtagagtctctagaaaaattcccagtggatagacgaggtaaggagttagaatatcaccctttttttccaaataaaacaaatgtagagtttgtgcaaatccttggcaaaggccacttaaaagcctatgtttgggagcggggagcgggcagaaccttggcttgtggtacaggtgctgctgctgctgcaaaagcttatcaagaaatcacgcaggaggaggtcgatgtaaccgttgatttacaaggcggcagcctaaaagtttcctttatttctaaggttcaagctgttataacaggaccagtagaaattaactattatggtcagtttgatttatcggcttaa

SEQ ID NO: 289372 - DNA, 416 bp, Unknown
  Bacterial polypeptide expressing nucleotide sequence isolated from the Sargasso Sea
tatctcaatagattttttaaataaagaaattggaaatggaatttgtattaatgtcggaaatccacatattgttttttttgtgaaagattgtgaaaatattgatataaaaaatataggtcctaaaattgaaactcatcactattttcctgaaagagttaatgtgtcttttgctcaaattgtaaatgataaaaacataaaactaaatgtatgggaaaggggcgctgggcaaactaaagcttgtggaactgctgcttgtgctacaacagtggctgcaaacataaagtcattttctaaaaatgaatgtgtcattcactttaaaagcggttctctaaaaatagattataataaaaatgttggagaagtatttatgtcaggtcgggtgtcaaaaattgaaaagataagttttaactactaat

SEQ ID NO: 289373 - DNA, 733 bp, Unknown
  Bacterial polypeptide expressing nucleotide sequence isolated from the Sargasso Sea
ggaagatatcataaaaaagctgagcgacagaagaactggagcagggtgtgatcaattaattactattaataatacaaataatctaagtgctgatgctgaaattgaaatctttaatccaggtggtgatagagctgaagcttgtggtaatggtacacgctgcgtagcaaaaatattatttgatgaagatgctaataaagaagttttaaaaattaaatctgatgcaggaatattagaatcaaaaaaaatagataaaaatataagtgtcaatatgggattaattaaaaatacttgggataagattcccttaagaaaagaagttgatacgatgaatatacaaatttcaattgacggatatagtaatggagttgctgtaaatgttggtaatccacatgtagttttttttgggaaatcaatatatgagacaaatcttgagagcataggtcctaaaatagaaaatcatgaactctttccaaaaaaaactaatgttgaaatagttgaagttattaattcaaaattaattcaaatgagagtttgggaacgaggagtcggaatcacgttagcttgtggcagtggcgcctgcgcagctgtttatgcggcttggaaaaagggattgattgaaaataatgctgaagtgaaacttgaaaaaggatcgctgtacataaatataattaatgatgaagctattatgacgggacctgcagaaataagttatcaaggtactttagaaatataa

SEQ ID NO: 289374 - DNA, 711 bp, Unknown
  Bacterial polypeptide expressing nucleotide sequence isolated from the Sargasso Sea
aatggatgggttaggtaatgactttattatattcgataatagaaaagagtctatttcacttaccaaagatcaaatagttaaaatttcagatagaaataacattggatgcgatcaggtaatttttattgataaagataaaaataatgatgcctttttaaaattttataattctgatgggggagaaattgctgcatgtggaaatggaagtagatgtgttgcttatttattaatgaaagaaaataaaaaaaaaaaaatatctcttaaaacaaaagtgggagtattgcacgcaaatttaaatgataaaaatttagtaagcataaatattggtcaacctaattttcaatgggataaaatacctttattaaaaaaaatggataataaaaatttaaaaataaaaattaataatattgacggaaaagaaattataagtggattctctttaagtgttggaaatccacatgtagttttttttgtagaagatttaaatcaatttaatttaaaagaaattggtcctaaaatagaacatcacagttattttcccgaaaaatgtaatgtcacattggctaatgttaaaaataaaaaacacgtaaaaataaaagtatgggaaagaggggctggtttgactaaagcatgtggaactgctgcatgtgctacagctgtatctggtgctgttttagaattaaacgaaaggcacgtaaatatagaatttac

SEQ ID NO: 289375 - DNA, 702 bp, Unknown
  Bacterial polypeptide expressing nucleotide sequence isolated from the Sargasso Sea
gttgtgatcaacttatatatattaaaaaaaatcaaaaaattgatgccgatatggaattttataattcagatggaagcgtttcaggagcctgtggaaatggaaccagatgtgttgcttatttattatcgaaggaaattaaaaaaaataaaattatattaggtactgaatcaggaaatttagaatcaaaaattttagaagaaaaattagtagaaacaaaattgggaatagcaaaaactaattgggatgaaattcctttggcagaaaagtcaaatactattgacttaaaatataaaattattgataaaaataataaagatcattttggaggtacagcagtaaatgttggaaatccacatattattttttttgtaaataatatagaagattttaatttagaaaaaattggaccagaaatagaaaacgataaattatttcctgaaaaatgtaatgttactttagcaaagataattaatgaaaatcatattaaagttaaagtatgggaaagaggtgctggactaacaaaagcttgtggaactgctgcgtgtgcaacagcttttgctgcaaaaattaatggtaaaattaaaaataaaactgaaatagaatttgaactaggaaaactatcaatttttatagatgataatggaaatatttttatgactggacctgtttcaaatatagatcaaattcaaataaaaatttaat

SEQ ID NO: 289376 - DNA, 796 bp, Unknown
  Bacterial polypeptide expressing nucleotide sequence isolated from the Sargasso Sea
atggatgggttaggaaatgattttatcattatagatagaagagaaaaatctatagaaataaaaaagagtaaaattattgaacttggaaacagagctaatattggatttgatcaaataatctttatcgaaaaacaaaaagaaggttcctatcctattacaatttacaactctgatggtggagaggtaagtgcgtgtggaaatggagcaagatgtgtggcttatcttttaagtgaaaacttaaatacaaaaaaaatacaaattaaaacaaataacagattacttaatgcaaaaatagttggggattttcaggtagagctagaaatgggaaaacctttatttggatctgaagagatacctctgtcaaaaaaaattaatcctaataacgtagttttgaatattaatgatcaaaagttttctgaaggtttttgtgtaaacgtaggaaatccgcatataattttttttgataaagattatctgaagcatgacttgaggattataggtccaaaaattgaaaatcataatctatttccagaaaaaactaatgttacatttgctaatgtaattgataaaaaaaatatcaaagttagtgtgtgggaacgtggcgcgggacttacaaaagcatgtggcacagctgcttgtgcaactgctgttgcttctttttctaaaaatctcactgaaagaaaagtacaaattgcttttgatcaagggtttttaaaaattgagtacaataaagataaaaatatttttatgacaggacctgtttcaaaaattaatgaattaagtatttcaatataat

SEQ ID NO: 289377 - DNA, 826 bp, Unknown
  Bacterial polypeptide expressing nucleotide sequence isolated from the Sargasso Sea
atgcacgagtttaagttcgtaaagatgaatggcctaggaaatgattttattgttattgaccaaagggtatctgaatttgatttatcagaagaacaaataaaattaatttgtaacagaacagacggggttggctgcgatcaactaatcatgattaggaagtcacaagataacagcgatccaatgattaaattttttaattcagatggaactgaaatagatgcttgcggaaatggttcgcgttgtgttgcaaactttttaatgaaagaaacaaagagtgagaaaataaacttaactacgcgtgaaagaacaattgcatgtgaaaagattgatgatgtcacagttagtgtaaatatgggcaagccaaaattcaaatggaatgaaatacctttaactaaagatgtcgatccagtggatataaatttttcaatcaaagaccttactctaaaaaaaccatttttagttaacattggtaatccgcatattattttttttgatgataaaatcgaaaaatatgatgttgaaagttttggatctttaattgaaaacgatagtttatttcctgaaaaaataaatgtgagttttgcaaagttaaaaagtgataatcacattgtactaaatgtatgggaaaggggttcaggaaaaacaaatgcttgtggtacggctgcttgtgcaacagctgtagcaggagttgaaatgggattgataaaaaataaggtgacagtaacattgccagggggagatttagaaatatattacaaaagtagtgacaatattattatgactggtccaactgagataaattttactgataaatataagctgtgag

SEQ ID NO: 289378 - DNA, 826 bp, Unknown
  Bacterial polypeptide expressing nucleotide sequence isolated from the Sargasso Sea
atggatattaaagcttttaaaatggacggtttaggtaatgattttgtcatcatagataataggcaaacaattacaaatttgacgaaagagcaaataataaagatttgtgacagaaaatttattggttgtgaccaactaatattgattaaaaaaaatgatatttcagatgcttcactagaattttataattcagatggaggaatgtctggtgcgtgtggaaatggtacacgatgtattgctgatttattaggcaaagaaaataacaaaaaagaaattgtcctaacaactttatctggcaaattaaaatcaaatattgttggagaaaaaatggtttctacagaaataggtgttgcaaaaacaaaatgggatgagattccattgtctaaagaattaaatacgaataatttaggaattaaaattaatgacaaaaataataacgaattttctggcggaactgctgtaaatgttggaaacccacatgtagttttttttgttgataataacgaaaattttgaaattgaaaaaattggaccaaaaatcgaaacccactctctatttccagaaaaatgtaatgttactttagcaactgttgttaacaaagaattgataaaagttagagtgtgggaaagaggagctggacttaccaaagcttgtggaactgcagcttgcgcaacagcttttgccgcaaaacaaaacggactggtaaatgataaagttgatattgaattttctacaggtagattgacaatttcaattgatgaaaacaatagtattcatatgaaaggaccagtttcagatattgaggagataaattttaaaatttaat

SEQ ID NO: 289379 - DNA, 160 bp, Unknown
  Bacterial polypeptide expressing nucleotide sequence isolated from the Sargasso Sea
atgaagaaaccttttataaagatgcatggccttgggaatgattttgtaataattgattctaggaataataattatcttattgatgaggatgctattaaacttatttctaatagacgatttggcgttgggtgcgatcaagttattgaaatgagaaattcta

SEQ ID NO: 289380 - DNA, 556 bp, Unknown
  Bacterial polypeptide expressing nucleotide sequence isolated from the Sargasso Sea
aatggatggattgggtaatgactttgtcattattgatcaaagaaataaaacaattgagcttagcaatgatcaaattttaaaaatttgtgatcgaagttttattggttgtgatcagcttattattatagaacaatctccttttaattttttaaaggaagaatttgatccaggaattattgcagaaataaattataaactaggcgatcataagattaaaccagataatataaaaaacatttataatcacctaacaagtatatatgctaaattaaaattttataattcagacggaagtagttcgggtgcttgcggaaatggaaccagatgtgtagcatatttattatcaaaagaaataaataagaatgaaatcacattttggattcagaatagtttggcagcaaatgaaattggaaatccaattataccatcaaaaatactaggtgataatttagttgaaacaattattggtgtaccacaaacaaattgggatgaaatcccaataagtaaacctttggatactaaaaatttaggaatagaaattaaggataaaaaaaat

SEQ ID NO: 289381 - DNA, 781 bp, Unknown
  Bacterial polypeptide expressing nucleotide sequence isolated from the Sargasso Sea
tgtcataattgatcaaagatcaaaagatttaaatctacaaaaagaacaagttataaaaatttgtgatagaaattatattggctgtgatcaattaattttaataaataaaattgattcaaataaaaactcattatttttttataattcagatggaggtgtttctggtgcctgtggaaatggtacaagatgtgtagcaaaattattatcagaagaaagtaaagaaaatataattaatctagaaacagcttctggaaaattaatttcaaaaatattagacgacaatacagttgaaacaaacattggaaaagccactattgaatggaaaaaaattccattaagtaaaaaagtaaatacaaaaaatttagaattaaaaataaaatcgataaataattctgaatttactggtggtatagcagtgaatgttggaaatccgcacgttatattttttgttgaaaatctagaagattataaaatagaaaaaattggaccagaaatggaaaaaaataaattatttccagaaaaatgtaatgttacaattgcaaatatattagataataaaaatattaaggttaaagtatgggaaagaggagctggactaactaaagcatgtggcacagctgcttgtgcaactgcatttgcaggatttataacaggacgtacacaaaatgaaacaaaaatcaaatttgaattaggtgatctttcaataaaaattgaaaatgatcattcaattttaatgcgaggtgcagtctctaaaataaaagaaattcaaataaaattataa

SEQ ID NO: 289382 - DNA, 763 bp, Unknown
  Bacterial polypeptide expressing nucleotide sequence isolated from the Sargasso Sea
tctgggaaacattatcgtcattgttgactctgtaagaaaagatatctccatagactcgaaaactgtattaagtttatacgaaaataaaggcattaattttgatcaactcattcaagtcttgcctcctctgaatcctgagaatgattttgatgtaaagatttataacaatgacggatcacttgcattaaattgtattaatggcgctagatgcgtatccaaatttgttgaagataactgtctgagtgcaacaaaggaaataaaagtaagcactgatggcggcctctggcatcttcaagctaaaagtaaggaagaattctctgcatcttttgaaataactaactctataaaccaaatcactctagatttgggagaagaaaacctaattttagattgtataaatcttggtaatcctcatggagttatttttcaagataaagactcaactgttaattttctaaaaacaggaaaagatcttcaagacaatagctactttcctgatggagtgaactttggcctagcgaataaattgaatgatagtgagattgacctaagagtatacgaaagaggtgcaggagagaccgcagcctgtggaagtggggcatgtgcagctgcgatcgttgggatatcaagaaaaaacatggtggctccagtgaaggttaacttccaactgggaagtcttttgatagactataagaaagaatctaatctaatagtcgctgaagggtcggcaactttagttgaaaaaagacaaatcgaaatttaa

SEQ ID NO: 289383 - DNA, 591 bp, Unknown
  Bacterial polypeptide expressing nucleotide sequence isolated from the Sargasso Sea
tatggaaattaaagcttttaaaatggatggattgggaaatgattttgtaatcattgatcagaggaaagaaaaaataagtctatctaacgatcaaattataaaaatttgtgatcgtaaatttataggatgtgatcaattaatatttgttaatgaaaatgccaatatagacgcagaattagaattttataattcagacggaagtaaatcaggtgcttgtggaaatggtacaagatgtgtcgcatatttactttcaaaagaaaataataaaaaagaaataaatttatctgcagcttcacaaaatcttaaatcaacgatttttgaaaataatttagtagaaacttcaattggattacctagaatgaattggaatgaaattccattaagtaaagaaacggatactaaaaatttaaaaataaaattagttgatgatgaaaataaagaattttatggtggaatagcagtaaatgttggtaatccacatgtaattttttttataaaaaatatagaaaaatttaaccttgaaaaaatcggaccagaaatgaaaatcatgaactatttcctgaaaaatgtaacgttacttagcaaaaaaaa

SEQ ID NO: 289384 - DNA, 826 bp, Unknown
  Bacterial polypeptide expressing nucleotide sequence isolated from the Sargasso Sea
tatggatattaaagcatttaaaatggacggtttaggtaatgattttgtcatcatagataatagacaaacaattacaaatttgacgaaagagcaaataataaagatttgtgacagaaaatttattggttgtgaccaactaatattgattaaaaaaaatgatatttcagatgcttcgctagaattttataattcagacggaggaatgtctggtgcgtgtggaaatggtacacgatgtattgctgatttattaggcaaggaaaacaacaaaaaagaaattgtcctaacaactttatctggcaaattaaaatctaatattgttggagaaaaaatagtttctacagaaataggtgttgcaaaaacaaaatgggatgagattccgttgtctaaagaattaaatactaataatttaggaattaaaattattgacaaaaataataacgaattttctggtggaactgctgtaaatgttggaaacccacatgtagttttttttgttaataataacgaaaattttgaaattaaaaaaattggaccagaaattgaaaaccattctttattcccagaaaaatgtaatgttactttagcaactgttgttaacaatgaattgattaaagttagagtgtgggaaagaggagctggacttactaaagcatgtggtacagcagcttgtgcaacagcttttgctgcaaaactaaacggactggttaatgataaagtggatattgaattttctacaggtagattgacaatttcaattgacgaaaacaatagtattcatatgaaaggaccagtttcagatatcgaggagataaattttaaaatttaa

SEQ ID NO: 289385 - DNA, 610 bp, Unknown
  Bacterial polypeptide expressing nucleotide sequence isolated from the Sargasso Sea
atggacggattaggtaatgattttgtgattatagacaacagaattgatgatattaagctttctattgaccaaataattaaaatttgtaatcggtcatttataggctgcgatcaacttattatcataaaccactcagatgagtccgatgctgatttaatattttataattctgatggaagcgagtctggagcctgtggaaatggaacaaggtgtgttgcttatttaatatctgaagaaaagaataaaaaagaaataaatttaagaacaaaatcaggagttttaaattccaaaattttggacaaaaatttagttgaaacagttattgggatagcaaaaactgaatggaaagaaatacctattagtcagaaaatggatacaaaaaatctaaatttaaaaatcacagataaaaataaaaatgaatattttggtggtacggctgtaaatgtgggtaatcctcatgctattttctttgttgataaattagaaaattttaatttagaggatattggaccaaatttagaaataaataaattatttccagatagatgtaacgttacacttgctgaaattaagaatagcaaaaaaatatttgttaaagtctgggaaaggg

SEQ ID NO: 289386 - DNA, 715 bp, Unknown
  Bacterial polypeptide expressing nucleotide sequence isolated from the Sargasso Sea
atgtcaggaacaggcaatgattttatatgtactgagtacgatcgagacttgtcagatatagaaattatttcaattgtaagtgatgcactttttcctattgatggagtcatattggtagagggtatagatagttcaacagtgaaaatgcactattttaataatgatggaactcctgctgagctatgtgtaaatggtgttcgttgtacagctaaatttgcagtagacaataacttagtagatactaaaaatttgattgttaaagctccagttggtgatataaaagcatttgtagaaaacgattatgtaaaaattgaagcacctcttcctacgactggtgatagtatcgaaattgatagttatatatgtacgactagtgaagttggaaatcctcatcttatggttgaggtcgatgacgtagagaaatttgatcttgagaaattttcagtaaatgccagaaaacttgacgtattttctaatggtgtaaatgttgaaatctattcagttgttgaacgcaaatttatttacgcaagagtgaacgaaaggggagttggcgaaacagacgcttgtggttctggagctttagctttgtttacatatttaagagaaattaataaagttgatgatgatgcaatcgttttatatcctggtggtgagctagaactatcttatgaaaatgaaaaattgtatcttaaaggtgaagttacatatctctaat

SEQ ID NO: 289387 - DNA, 838 bp, Unknown
  Bacterial polypeptide expressing nucleotide sequence isolated from the Sargasso Sea
aatgttaccatttgttaagcttcaaggtgctggaaatgattatatagccttagatggaaggaataaaaattatgactggaatcaactctctttagatatgagcaaacctgcttttggagttggatcagatgggatagtagtagtttttgaaagtgaaacagctgatatcagaatgagaatttataacccagatggttctgaagctgaaattagtggtaatggaattagattatttactaaattcgtcattgactctaaaataatttctcctaataaagagtcaataaaaattgaaactggagatggcattaagactgtttatccaaaaattcaagatgataaagttatatcatctcgagttgaaatgggagttccaaattttgttgccagcaaaattcctataagtgtaccttcaattagtgataatgattctcctaaatttcctcttgaaattctagggaaaaaattagatattacctgtctttcaataggtaatcctcatgcagtaattataattgatgaaaatgttgatgatttcccattagtagaaattggtactattgttgagaaacatgaatatttcccaaacagaataaattttgaaattgttaatattttgtcaagaaataaaataagagctaggatttttgaaagaggagcaggagaaacactttcctcaggtactggtagcactgcatctgctagtgctgcgcgttataatggactagttgatgataatgtagaagttattttggatggtggaagcttgaatatttcatgggataaaaatgatatggcaatgcttgaaggcccaagtgaagaagttttttctggaatt

SEQ ID NO: 289388 - DNA, 500 bp, Unknown
  Bacterial polypeptide expressing nucleotide sequence isolated from the Sargasso Sea
aattgccatgggtaaacctaaatttttaagagatgagattcctgtaagccaagatatctttaaggataatactgatgtaaatgaattggtcttagatttagaaaaaaaaataaccgtaagttgtgtaaatattggaaaccctcacgctgtatcaataatggatgaagatgtagataattttgagctaagaacgattggtccgttagttgaaaataatccagcttttccaaatagaataaattttgagattgttaatatcatttcaaaaaatgaaattaaggccagaatatttgaaagaggggcaggtgaaactttatcttcaggaacaggtacttcagcatgtgcgataattggtattaagaaaaagttattagataacaatgttagagtaaatgttcccggtggacatttaaatataagttgggttcctggtgaagaatcatatttagagggaccaactgagagagtatttacaggaaattggaaaattaaggagtaat

SEQ ID NO: 289389 - DNA, 715 bp, Unknown
  Bacterial polypeptide expressing nucleotide sequence isolated from the Sargasso Sea
tatgtcaggaactggcaatgatttcatatgcagttcatatgaaagagatctctctcagattgaaattatttctatagttggagattctcttcttccaattgatggtgttatttttattgaacaaattaactcttcaactgtcaagatgcattatttcaataatgatggaacgccggcagaattatgtgtaaacggcgtacgttgcacagcaaaatttgccgttgataacaaccttgtcgataatccaaagttaattgttaaaacacctgttggggacattgaagcggttgttgaaaatgatacagtaaaaatagaagcaccaatgccaactataggcaaagaagtagaaattgattctttaatatgcacaacaagtaatgttggcaaccctcatttaatgcttgaagttgatgatgttgataaatttgatcttgattcattttcagacaaagcacgcaatactgatttttttaaagatggtgtaaatgttgaaatttattcagttgttgatgaacgatttatttacgcaagagtaaatgaaagaggagtgggagaaactgatgcatgcggctccggtgcgttagctttatattcttttcttagatttaataataaagtccaggatgaagcagttgtgttatatcctggtggtgagcttgatatgagttttgaagatgaaaaaatttatttaaaaggttctgtcacatatctctaa

SEQ ID NO: 289390 - DNA, 304 bp, Unknown
  Bacterial polypeptide expressing nucleotide sequence isolated from the Sargasso Sea
tatggaatttaaagcttttaaaatggatggccttggaaatgattttgtaattattgataatagatcaaataatgtcgaattaaccagggatcaaataattaaaatttgtgatcgaaaatttattggttgtgatcaactaatatttataaaaaaaagtaataaaggtgatgctgaaatgaaattttataattctgatggaagtatttcaggcgcatgtggaaatggtacaagatgtgtagcatttttaatttttaaagaaacagacaaaaaagttgtagatctgtttgtaggatccatcaattaa

SEQ ID NO: 289391 - DNA, 718 bp, Unknown
  Bacterial polypeptide expressing nucleotide sequence isolated from the Sargasso Sea
atgtcaggtacagggaacaattttgttattagtgaatatgaaaattctaaaactgatattgaaatcatttcaatagttgctgattcactttttgatattgatggtgttatttttgtcgaaaaaattgattcttcaacagtaaggatgcactattacaataacgatggatctactgcagaattgtgtgttaatggggttaggtgtgtagctaaatatgctattgataattcatttgtagataataatgagttaacagtaatagctcccattggcaatataaaaacaactgtaaatgaagaaaatgtatcactagaagttgcaattccaacatatgataaaaataaaattttaatagatggtttagaatgtattaaatcaaatattggcaacccacacttacttgttgaagtaaaagatgtagaaaaattcaatttagaagaatttgttgcaagagtatatgaaactaatgaatttgaaaatggtgtaaatgtcgaaatatataatatgttcgataaaaaaattataaatgcacgagtatatgagagaggcgttggtgaaacagatgcatgtggatcaggtgctatctgcatgttttattatttatacaatactgatcaagtaaataataattctttaattttttatcctgggggagagcttgaaatgagtattgaaaaagatatcataacgttgaatggtaaagttacatatctctaaa

SEQ ID NO: 289392 - DNA, 718 bp, Unknown
  Bacterial polypeptide expressing nucleotide sequence isolated from the Sargasso Sea
catgtctggtacagggaacaactttcttgttagcgagtatgaaaattctaaaactgatattgaaattatatcaatcgtcgctgattcactttttgacattgatggcgtaatatatgtagaaaaaatagattctctaacagtaaaaatgcattattacaataacgacggttcaactgcagagctatgtgttaatggtattaggtgtgtagctaaatatgctttagataattcaattgttgatagtaatgaggtaacagtcgtagctcctattggaaacataaaaacaaatataaaagaaaacacagtaacaatagaagtatcaactccaacatatgaaaaaaataagttattaatagatggtcttgaatgcattaaatctaatataggtaatcctcatttacttgttgaagtagataatgtagataaatttgatttagaacagtttgtaaaaaaagtttatgaaacaaaagaatttgaaaaaggtgtaaatgttgaaatatttaatttatttgataaaaaaataattaatgctcgagtttatgaaagaggtgttggagaaacagatgcatgtgggtcaggtgctgtttgtatgttttattatttatataacactaatcaagtaaacaataattctttaattttttatcctggtggggagctagaaatgagtattgaaaaagagattgtaaaacttagtggcgaagttacatatctctaa

SEQ ID NO: 289393 - DNA, 793 bp, Unknown
  Bacterial polypeptide expressing nucleotide sequence isolated from the Sargasso Sea
catgccaatagacttatacatttactcagggcttgggaatatcattgccatcattgattctttaagaaatgatatttctatcaattcagaagatgtacttaaaatatatcaaaatcacaaaatagattttgatcaactgatattggtattgcctccaaaagaaccaaaaaatgatttcgacgcaaaaatatacaacaacgatggttctattgcgtcaaattgcatcaatggcgcaaggtgtgtttctaaatttttagaagatcactctttatgtgcttcaaagaaggttaaagttaaaactgatggaggtatctggtacctagagtcattgagtgaagatagattttcggcttcttttgagattttagaagaaatcaatcaggttacattagatattgaagggcaagagctatttatagaatgtatagaacttggaaatcctcacggagtaacatttgtagatagagactctaaagttgatctcagtgttatgggtgaaaagctacaaactaataaattatttcccgatggggttaactttggcttggcaaatatagttaatgataatgagatcaatctaagagtttacgaaagaggtgttggcgagaccttagcatgtggaagtggggcttgcgccgctgctttaataggcataaaaaataaagcgatgtcatctccggtaaaggtaaacttcaaacaaggaagcattttggtagactataagataggatcaagaaaaatatatgctgaaggttctgcaacttttttaaaagaaatagtaatcaaaatttaa

SEQ ID NO: 289394 - DNA, 796 bp, Unknown
  Bacterial polypeptide expressing nucleotide sequence isolated from the Sargasso Sea
aatggatggcttaggtaatgattttgtcattattgatagaagaaaaaattctattaatttaacaaaagaaaaaattattgaattgggcagtagatctcaaattggctttgatcaaattatctttatagaaaaagaaaaagaaaattcttttccaataactatttttaactctgatgggggtgaagtaagtgcatgtggaaatgggtctagatgcgtagcttatcttttaggtaaaaatttgaacacaaaagaaataaaactaaaaacgaacaaccgtctgcttaatgcaaaaatagtaggaaatttacaagtagaacttgaaatgggaaaacctttgtttggttctgaagatattcctttatcaaaaaaaataaacccagctgatattactttagagatacataataagaaatttacaggtggattttgtgtaaatgtaggaaatccacacataattttttttatggaaaattgttttgaacaagatttaaaatcaataggtccaaaaattgaaaaccacgttctatttcctgaaaaaatcaatgtaacaatggctcagataatagatgaaaacaatataactgttaatgtttgggaaagaggtgctgggcttactaaagcatgcgggacagctgcttgcgcaacagctgtcgctgcctttaaaaataaattggttaataatgaagtagatataaaatttaaggaaggttttttaaatataaaaatagacaaaacagaaaatatatttatgactggtccagtctcagagattaaaaaaattgactttgaaacataa

SEQ ID NO: 289395 - DNA, 793 bp, Unknown
  Bacterial polypeptide expressing nucleotide sequence isolated from the Sargasso Sea
atgccaatagacctatacatttactcaggacttgggaatatcattgccattattgattctttaagaaatgatatttctatcaattcagaagatgtacttaaaatatatcaaaatcacaaaatagattttgatcaactgataatggtattgcctccaaaagagcctaaaaatgatttcgatgcaaaaatatttaacaatgatggttctattgcgtcaaattgcatcaatggcgcaaggtgtgtttctaaatttatagaagattactctttatgtgcttcaaaaaaagttaaagttaacactgatggaggtatctggtacctagagtcattgagtgaagataagttttcggcttctttcgagtttttagaagaaatcaatcaggttacattagatattggagggcaagagttatttctagactgtatagaacttggtaatcctcacggagtaacatttgaagatagaggttctaaaatagatttccctgttatgggtgaaaagctacagactaataaattatttcccgatggggttaactttggtttagcaaataaagttaatgataatgagatcaatctaaaagtttacgaaagaggtgttggagagaccttggcatgcggcagtggggcttgcgccgctgctgtaattggcatatcaaataaagcaatgtcatctccggtaaaggtaaacttcaaacaaggaagcattttggtagactataagataggatcaagaaaaatatatgctgaaggtcctgcaacttttttagaagaaatagaaatcaaaatttaat

SEQ ID NO: 289396 - DNA, 736 bp, Unknown
  Bacterial polypeptide expressing nucleotide sequence isolated from the Sargasso Sea
atgactaattttgcatatatgtctggaacaggtaatgattttatagttggtcattatgaaggcgaagtttctgaaattcaaattattgctcttgtaagcgatgctgaatatgaagtagatggtgttatattcgtagaaccattagataacaattctgtaaaaatgcattatttcaataatgatggttctgatgcagaactttgtgtaaacggagtacgatgtgttgctaaatttgcgcttgataataactatctggaagttgatagatttattgttaaagcaccagttggggatttagaagtatatgtagataaaaatatagttgaagtgtcaacacctattcctacttatgaagaagaaaagattaatgtaaattcattcgaaggtgtaaaatcttcagttggcaatcctcattttatgatcgaagtagaagacgttgatggattagatttagaaaatttgaattcagaagtagttaatgaaaacatattcccagaaggtgtaaatgttgaaatatatcaaatagttagtagaaactatattaaagccagagtattcgagcgaggagtaggtgagacagatgcctgtggatcaggtgcactttgcatgtttaactatctaaataaaacagatcaaattgataataattcttacgttatgtacccgggtggttatttaaatcttagatttgaaaatgataatttatatttatcaggagaagttatatatctctaaa

SEQ ID NO: 289397 - DNA, 799 bp, Unknown
  Bacterial polypeptide expressing nucleotide sequence isolated from the Sargasso Sea
atggatggtttaggaaatgattttgtaattattgatagaagaaaaaatccagtttctgtcagtaaagaaaaaattattgaattaggaaaaagagataacattggttttgatcaaatgatatttattgatgaattagatcataaaactcctaattataatccaattacaatatttaattctgatggagataaagtgactgcttgtggaaatggaagcagatgtgttgcaaaaattttgtttgatgaaaataaaaaagaggatgctgtaattgttacttcaaatagaattttagaagctaaaaaagtttctgaaaatagtattagacttgcaatgggtgaacctatctttgattggaataaaattcctttatcaaaaaatattgatcataaaaaaataagtttaaaagtagatggtatagagctaaaagaaggttttgcattaaacgtgggtaatcctcatatagttttttttgttgaagattgttttaaatatgacttaaaaaaaataggaccattagtagaatgtcatgaattatttcctgaaaagattaatgttacttttgcacaaaaaaaggattcttcaaacatattagtaaatgtgtgggaacgtggcgcaggattgactaaagcatgtggtacagcagcatgtgcaacagcagtagttgcttttgaaaaaggctatgcagaaaataataccaatattcattttaaggaaggttttttaaatattcaatatgatagattaattttaatgactggtccggtttcagacattaaagaaattaaaataaaattataat

SEQ ID NO: 289398 - DNA, 799 bp, Unknown
  Bacterial polypeptide expressing nucleotide sequence isolated from the Sargasso Sea
aatggcctaggaaatgattttgttgtaattgatcaaagagtatctgaatttgatttatcagaagaacaaataaaattaatttgtaacagaacagacggggttggctgcgatcagttaatcatgattagaaagtcacaagataacagcgatccactgattaaattttttaattcagatggaagtgaaatagatgcttgtggaaatggttcgcgttgtgttgcaaactttttaatgaaagaaacaaagagcgagaaaataaacttaacaacacgtgaaagaacaattgcatgtgaaaagattgatgatgtcacagttagtgtaaatatgggcaagccaaaattcaaatggaatgaaatacctttaactaaagatgtcgatccagaagatataaatttttcaatcagagaccttactctaaaaaaaccatttttagttaatattggtaatccacatattatattttttgatgatgaaatcgaaaaatatgatgttgaaagttttggatctttaattgaaaacgatagtttatttcctgaaaaaataaatgtgagttttgcaaagttaaaaagtgataatcacattgtactaaacgtatgggaaaggggtgcaggaaaaacaaatgcttgtggtacggctgcttgcgcaacagctgtagcaggagttgaaatgggagtgataaaaaataaggtgacagtaacattgccagggggcgatttagaaatatattacaaaagtagtgataatattattatgactggtccaactgagataaattttactgataaatataagctgtgag

SEQ ID NO: 289399 - DNA, 844 bp, Unknown
  Bacterial polypeptide expressing nucleotide sequence isolated from the Sargasso Sea
atgaataaagatactaatcaaattatggcacttttaaacgcttacagaatggacggattgggtaatgattttgtaattatcgatagaagaaaaaaatctatagatttaacaaaagacaaaattattgaattagggcgcagatctaatattggttttgatcaaataatttttatcgaaaaagagaaagaaaatttttttccaataacaatttttaactctgatggaggtgagataagtgcatgtggaaatggatctagatgcgtagcttatcttttgggtaaaaatttaaataccaaagaaattaaattaaaaacaaaaaaccgactacttaatgcaaaaatagtaggaaatttacaagtagaacttgaaatgggaaaacctttatttagttttaacgaaatcccattatcaaaaacagtaaacccagctgatataactttagagataaataacaagaaatttacaagtggattttgtgtaaacgtaggaaatccacacataattttttttgttaaagattgttttgagcacgatttaaaaatgataggtccaaaaattgaaaaccatgatctatttccagaaaagaccaatgtgacaatggctcaagttatagataaaaataatataaatgttaatgtttgggaaagaggtgcgggactgaccaaagcttgtggtacagcagcttgcgcaacagctgttgccgcattaaaaaataaattgtctgatgataaagtagacataaaatttaagcagggttctttaaaaataaaaatagataaaacagataatatatttatgattggtcctgtttcagaagttaaaaagattgaattagaagtataat

SEQ ID NO: 289400 - DNA, 820 bp, Unknown
  Bacterial polypeptide expressing nucleotide sequence isolated from the Sargasso Sea
atggcaacaattaacgcttacaaaatggatggcttaggtaatgattttgtcattatcgatagaagaacaagttctattaatttaacaaaagaaaaaattattgaattagggagtagaactaatattggctttgatcaaataatctttatagaaaaagaaaaagaaaattcttttccaataacgatttttaattctgatggaggtgaagtaagcgcatgcggaaatggatcaagatgtgtggcttaccttttgggtaaaaaacttaatactacagaagttaaattaaaaacaaacaaccggctacttaatgcaaaaatagtagaggattttaaagtgcaacttgaaataggaaaacctttgttaggttttgaggatattccgttatcaaaaacaattaatccagccgatataactatcaagattaataacaaaacatttactggtggattttgtgtaaacgttggaaatcctcatataattttttttgtaaaaaattgttttgagcatgatttaaataaaataggtcctaaaatcgaaaaccatgatctatttccagaaaaaactaatgtaacatttgctcaaattgtagatgaaaaaaatataactgttaatgtatgggaaagaggtgctgggcacacgaaggcatgtgggacagcggcttgcgcaacagccgttgcggcctttaaaagtagattaattaataatgaagtagatataaagtttaaggaaggttttttaaatataaaaatagataaaacagataacatatttatgaccggtcctgtctcaaaggttaaaaagattgaaattaaaatataat

SEQ ID NO: 289401 - DNA, 820 bp, Unknown
  Bacterial polypeptide expressing nucleotide sequence isolated from the Sargasso Sea
aatggcagggattaatgcttatagaatggatggattaggaaatgattttatcatcatagatagaagagaaaaatttatagaaattaaaaagaataaaatcattgagcttggaaatagagctaatattggttttgaccaaataatctttatcgaaaaacagagagaagactcttatccaattacaatttataactctgatggtggggaagtaagtgcttgtggaaatggagcaagatgcgtggcttatcttttaagtaaaaacttaaatacaaaaaaaatacaaattaaaacaaataacagattacttaatgcaaaaatagttggggattttcaggtagagctagaaatgggaaaacctttatttgaaactgaagagataccgctgtcaaaaaaaattaatcctaataacgttgttttggatattaataatcaaaagttttctgaaggcttttgtgtaaatgtaggaaatccgcatataattttttttaataaagattatctaaagcatgacttaagggttataggtcctaaaattgaaaatcatgatctatttccagaaaaaactaatgttacatttgctaatgtaattgataaaaaaaatatcaaagttaatgtttgggaacgtggtgctggacttacaaaagcttgtggcacagctgcttgtgcaactgctgttgcttctttttctaaaaatcttactgaaagaaaagtacaaattacttttgatcaagggtctttaaaaattgagtataataaagataaaaatatttttatgacaggacctgtttcaaaaattaatgaattaagtatttcaatataa

SEQ ID NO: 289402 - DNA, 820 bp, Unknown
  Bacterial polypeptide expressing nucleotide sequence isolated from the Sargasso Sea
tatggcaacgattaacgcatataaaatggatggattgggtaatgatttcattattatcgatagaagatcagatcctatcaacttaaccaaagataaaattattgagttaggaaaaagaagcaatattggttttgatcaaataatttttatagaaaaagagaaagagaattcttttccaataacaattttcaattctgacgggggtgaagtaagtgcttgtggaaatggttcaagatgtgttgcgtatcttttgagtaaaaatttaaatgttaaccaaattaaactaaaaacaagtaatcgaagtcttaatgctaaaattgttggaaacttaatggtagagcttgaaatgggaaagcctttatttaattttgaagatattccgttatcaaaaacaataaatcctgctaacgtttctctaaatgtaaaaggtgaaaaatttactggtggattttgtctaaatgtaggaaacccccacatagtttttttcgtagatgattgttttcaacacgatttgaaagaaataggacctttaattgaaaatcatgaattatttcccgaaaaaacaaatgtaacatttgctcaaattttagatgaaagaaatattttagttaatgtttgggaaagaggtgctgggcttactaaagcatgtggaacagcagcttgtgcaacggccgttgctggaaaaaataacaaactagtagaaaacaaagttgctattaaatttaaagaggggatcttaaatatagttttagatgaaaaaaataatatatttatgactggtccagtgtcagaaataaagaatataaaagtagaaatataa

SEQ ID NO: 289403 - DNA, 823 bp, Unknown
  Bacterial polypeptide expressing nucleotide sequence isolated from the Sargasso Sea
atggaatttaaagcttttaaaatggatagtcttggcaatgacttcataataatagatcaaaggtctaaagttattaacctttctaaagagcagataattaagatttgtgatcgaaaatttattggttgtgatcaacttatttacataaaaaaaaaagaaattgatgttggattagaattttataattctgatggtagtcaatctggtgcatgtggaaatggaacaagatgtgttgcatatttattatcaaaagaaactaaaaaaaatgaaattacaatttggacttcgtctgggaatttaaaatctaaaatatttgataataaagatgttgaaacagagattggagtacctaaatttaattggcgtgaaataccattaaaatacgatttagatacaaaaaatttaaatataaaattaatcagcaaagataataaagaacattatgggggcattgctgttaatgtaggtaacccacatgtagtattttttgtagataatttagataattataatttagaggaaattggaccacaaatagaaaataacgatttgtttccacaaagatgtaatgtgacccttgcaaaaaaagttagcaaaaacttggttaaagtaaaagtttgggagagaggagctggattaacaaaagcatgtgggactgctgcttgtgcaacagccgttgcgtctaatttagaagaattaaaatattccaaaacagaaatacaatttagtttaggaaagttaataattaatattgatgataaaaatagaattcatatgaaaggccctgtctcagatgtgaaggaaattaatataaaaatataat

SEQ ID NO: 289404 - DNA, 820 bp, Unknown
  Bacterial polypeptide expressing nucleotide sequence isolated from the Sargasso Sea
atggaattcaaagcttttaaaatggatggtttgggtaatgattttgttatcattgatagaagaaaaaattcaatttctattgttaaagaaaaaattgttgagttaggaaaaagagataatattggttttgaccagttaatatttcttgatgagatagatcctcaggctcccaattatattcccataacaatatttaattctgatggtgaagaagttgaagcttgtggcaatggaagtagatgtgttgcaaaacttatatgtgatgaaaaaaaaattgagcatgctgcagtactagctggtaatagagttttgaaagctcaaaaaatttctgaaaataatgttagaattgtaatgggtaatcctatttttagttggcaaaaaattcctttatcgaaaaatatagattgtaaaaacataaaccttaaaattggaaacgaagaatttaaaaatggttatgcattaaatgtaggaaatccacatatagttttttttgttgatgactgttataaatatgacttaaaacaaattggaccattaattgaaaaccatgaattatttccagaaaaaataaatgttacatttgctcaaataaaagatagtaataatatcttggtaaatgtttgggaacgtggagctggacaaactaaagcatgtggaacagctgcttgtgcaacaggagttgtagctttcgaaaaaaaaattgctggtaataacaacaatattcattttaaagagggttttttaaatattgaatatgatggaattatttctatgacaggtcctgtttcggatattaaggaaattaaaataaaattataat

SEQ ID NO: 289405 - DNA, 856 bp, Unknown
  Bacterial polypeptide expressing nucleotide sequence isolated from the Sargasso Sea
atgaataaagatactaatcaaattatggcacttattaacgcttacaaaatggatggtcttggaaataatttcataattattgacagaagaaaaaatgcattagaattaaacaaagacaaaatagtaaatatagcaaacaaaaaaatggttccttttgatcagttaattactttggaaaaagaagaaaaaaatatttttccaataaaaatttataatccagatggaattgaagtaggagcttgtggaaatggtagcaggtgtgttgcttatttaatttccaaagaaataaaaaaaactaaggtttcaataaaagctgaaaatagaattttagatgcagaagtaattgacaagcagattgtaacaataaatatgggttttccaaaatttaatgattggaaagatattcctcttgaaaatgaaagattaaacccaaagatggttccaatagattttttagaaaaagaatatggaactggaacttgtgtaaatgtaggaaatccccatattattttttttgttaaagactgctggaaagtggatatacaaaaaattggtcctgttattgaaaatcatcattattttcctgaacgagttaatgtaactttcgcagaagtattgggtgatcacgaaaatataaaaataaacgtatgggaaagaggagccggtcaaacaaaagcttgtggaactgctgcatgtgctactgttgttgctgcatatttaaaaagtttagcaaaaaataattgtaacgttcatttcaaacagggaactcttaaaattaattatgacagaggcaatggccaagtgtatatgagtggacctgtttctgaagttaaaaagattaacctgaatatctaat

SEQ ID NO: 289406 - DNA, 826 bp, Unknown
  Bacterial polypeptide expressing nucleotide sequence isolated from the Sargasso Sea
tatggacataaaagcttttaaaatggatggtttaggaaatgacttcgtcattattgatagaagaaaaaatgaaataaatctttctaaagaacaaataataaaaataggtgacaggaataatgttggttttgatcaaataatatttattgaaaaagaaattaaaggtgttttcccaattaaaatttataatcctgatggaatagaagttggtgcatgcggtaatggaagtagatgcatagcttatttaatctcaaaagaaaataatcaaaaaactataaaattggaggcagacaaaagaattttagaagcagaaattttaggtgaaagaatggttagaataaatatgggtttcacgaaatttaaggaagggaaagatataccacttattgagggattagatccgaggaaagtttcaatagattttttagaaaaagaatacggatttggctactgtgtaaatgtaggcaatcctcatattgttttttttgttaaagattgtgaaaaagtagatattgaaaaaattggacctaaaatagaaaatcaccattatttccctgaaagaataaatgtaacttttgcagaagtagcagatgattgtaaaaatataaaagtaaatgtttgggaaaggggtgctggtaaaaccaaagcttgtggaacagctgcatgtgcaactgtagtagttggatatttaaatacattaacagaaagaatttgcaatgttcattttaaagaggggtctctagaaattttctcagatatgggtgattgtcatgtatatatgactggtcctgtatcagatattaaagagataacattgaaaatttaa

SEQ ID NO: 289407 - DNA, 719 bp, Unknown
  Bacterial polypeptide expressing nucleotide sequence isolated from the Sargasso Sea
attgaggttcaaaaagtcaataaataaagataaaactaaaaatatgaataatttagaagcttataaaatggatggtttgggtaatgattttataatttttgataatagaaaaaattctatttctcttagcaaagatcaaattataaaaattgcagatagaaacaatattggttgtgaccaggtaatttttatagacaaagacagcagcaacgatccctttttaaaattttataattctgatggtggagaaattgctgcatgcggtaacggtagcagatgtgtaggctatttgttaatgaaagaaaatcaaactaaaaatattattttaaaaacacaagttggaactttaaaagcagaattaaaaaatgaaaacttagtttgtataaacatgggccagccaaatttcgagtgggacaaaatacctttattaaacaaaatggattataaaaatctcaaaataaaaattaatgacgaaaatggaaaagaaattataggtggttttgctttaagtgttggaaaccctcatatagttttttttgttgaagacttaaataaatttaatataaaaaaaataggcccagtaattgaaaatcataattattttccagaaaaatgtaatgttacattagcaaaaataaaaaataaaaaacatgcaatagtaaaagtttgggaacgtggtgcaggtattactaaggcttgtggaacggctgcatgtgctg

SEQ ID NO: 289408 - DNA, 481 bp, Unknown
  Bacterial polypeptide expressing nucleotide sequence isolated from the Sargasso Sea
tatggaatttgaagcatttaaaatggatggattaggtaacgactttattattattgatcagagaataaataatttaaacttatcaaatgaccaaatcttaaaaatttgtgacagagatttcatagggtgcgatcagttgatctacataaaaaaaagtcaaaaagctgatgctgatgttgctttttttaactcggatggaagccgctcagatgcatgtggaaatggaactagatgcgttgcttatttactaagtattgaaaaaaataaaaaagaaattgaaatttcggtatcctcaaaaatattaaaatctaaggtccttaataataaagatgttgaaacaataattggaactccaaatttagagtggaacaaaattcctttaagtaaaaatcttgatactaaaaatttatcacttggtatgattgatattgacggaaataaaatgaatggtggtattgcagtgaatgttggaaaccctcat

SEQ ID NO: 289409 - DNA, 500 bp, Unknown
  Bacterial polypeptide expressing nucleotide sequence isolated from the Sargasso Sea
tatggaatttaaagcttttaaaatggatggtcttggaaatgattttgtaattattgataataggtcaaataatgtcgaattaaacaaggatcaaattattaaaatttgtgatcgaaactttattggttgtgatcaactaatctttattaacaacagtgataatgctgatgctgatctagaattttataactctgatggatcgggatctgacgcctgtggaaacggtacaagatgtgtggccttcttattatcaaaagaaaaaaatacaaaaaatataaacgttcaagtagcatcaaaacagttaaattcaaaattacttgatgatggtcaagttgaaacaataattggtgtaccaagaactagctggaaagaaattcctttatctaaaaaactcgatactaaaaatttaggaataattatagaagataacaataaccaagaagtgagtggcggtatagctattaacgtaggtaatcctcatactattttttttgttgata

SEQ ID NO: 289410 - DNA, 820 bp, Unknown
  Bacterial polypeptide expressing nucleotide sequence isolated from the Sargasso Sea
atggcagcgattaacgcttatagaatggatggattaggaaatgattttatcatcatagatagaagagaaaactttattgaaataaaaaagaataaaatcattgagcttggaaatagggctaatattggctttgaccaaataatctttatcgaaaaacagagagaagactcttatccaattacaatttataactctgatggtggggaagtaagtgcgtgtggaaatggggcaagatgtgtggcttatcttttgagtgaaaacttaaatacaaaaaaaatacaaattaaaacaaataacagattacttaatgcaaaaatagttggggattttcaggtagagctggaaatgggaaaacctttatttgggtctgaagagataccactgtcaaaaaaaattaatcctagcaacgtagttttagatattaatgatcaaaagttttctgaaggtttttgtgttaatgtaggaaatccgcatataattttttttgataaaaattatctaaagcatgacttaagggttataggtcctaaaattgaaaatcatgatctatttccagaaaaaactaatgttacatttgctaatgtaattgataaaaaaaatatcgaagttaacgtttgggaacgtggtgcgggacttacaaaagcttgtggcacagctgcttgtgcaactgctgttgcttctttttctaaaaatctcactgaaagaaaagtacaaattgcttttgatcaaggatcattaaaaattgagtataataaagataaaaatatttttatgacaggacctgtttcaaaaattaataaattaagtatttcaatataat

SEQ ID NO: 289411 - DNA, 357 bp, Unknown
  Bacterial polypeptide expressing nucleotide sequence isolated from the Sargasso Sea
atccgcatgcggtgctgcgcgtcgacaacgttgatgacgcaccggtgcatacgctcgggccgaagctggaacaccacccgcgcttcccgcagcgggtcaatgtcggcttcctccaggtgcttgaccgcaagcatgcgcgcctgcgcgtgtgggagcgtggtgccggcgaaaccctggcctgcggcaccggcgcctgcgcggcggccgttgcggccattcgccagggctggatggattcgcccgtgcaactggaactgccaggcggcaaactgtccatcgaatgggcaggcgagggtcagccggttatgatgaccgggcccgctgcccgcgtatacgaaggacagattcgcctatgac

SEQ ID NO: 289412 - DNA, 802 bp, Unknown
  Bacterial polypeptide expressing nucleotide sequence isolated from the Sargasso Sea
aatggacggtcttggaaatgactttgtaattattgatgaaagatttgataaaattaacctgaggaacaaagacataataaaaatatgtaacaggaaattcataggttgtgatcaattaatcattataagagaagctgatcaaaatgatgcggaattaatattttataattcagatggaagcctggcaggagcttgtggaaatggaacaagatgtgttgcttaccttttatcgaaagaaaacaataaaaatctgataactctaaaaactttaggtggtatacttgagtcaaaaatttatgaaaatcaaattgttgaaacaaaaataggtccaggaaaattaagttgggcagatgttcctcttaaagaaaaaatggatactagaaatttaaactttagttttgaagatattcaagttgaaatgaaaaatggtactgcaataaatgttggaaatccacatgtggtattttttgtaaatgaacttgaaaagtttaatattgaaaaaataggacctaaaattgaaaatcataatttttttccagaaaaatgtaatgtaacaattgcaaaaaagataaatgaaaatcatattaagttaaaagtttgggaaagaggagctggacttacaaaagcttgtggtacagcggcttgcgcaacagctttggctggtaaaatcaacaatttaataaaatccccggtaaatcttgaatttgaattaggtaaacttgaaataaatgttgatgataataattttatttctatgaaaggacctgtttcaaaaatacaggaaattaagattaatttttga

SEQ ID NO: 289413 - DNA, 760 bp, Unknown
  Bacterial polypeptide expressing nucleotide sequence isolated from the Sargasso Sea
aatggatggtttaggcaacgactttgtcattatagataagagaagcaacaagattgatttgagcaaagatcagatcctaaagatttgtgatcgaagttttattggatgtgatcaacttatttacattacggaaaataataaatctgatgcaggaatggagttttataattcagatgggagtacttctggtgcttgtggaaatggtacaagatgtgttgcctacttattatctaaagaaaaaaataaagatgaaattaacttagttgtgtcttcaactaagctaaaatcaaaaattctaaaagataacttagttgagacatttattggtgtgccaaaaactaattgggatcaaattcctatgaataaatccttagacacaaaaaatttgggtttagaaataaaagatagagaaaacgccattacaaaaggaggaattggggttaatgtaggaaatcctcatgtaattttttttgtaaatgatattaataaatttgaaatagaaaaaattggtcctcagattgaaaatcataaattatttccagaaaaatgtaacgtgaccctcgcaaaaaaagttggtgacaatcattataaagttaaagtttgggaaagaggtgctggattgacaaaagcttgtggaacagctgcttgcgcaactgcagtagcagccaatttaggaaaattagaaaatacaaaaacagaaattgaatttaatttaggaagattattaatttcgatagatgataataaagtaatttctatg

SEQ ID NO: 289414 - DNA, 334 bp, Unknown
  Bacterial polypeptide expressing nucleotide sequence isolated from the Sargasso Sea
tatgctcaacttcagcaaaatgcacagtctcgggaatgacttcatggtcatcgatggtgtgacgacctcggtagaactcgaccctgaacaagtggctgcttggggcaaccgccagcgcggcattggttttgaccagctactgctcgtcgcgccgccaagctcgccagcctgtgactttgactacgtcatcttcaacgccgacggtagcgaagctcagcagtgcggcaacggtacgcgctgtgttacagattttgttcaccgtcttgggttgacccgacaaaatcagcttagctggcattcaaagggcggcattattcgcacggccaagcaacct

SEQ ID NO: 289415 - DNA, 822 bp, Unknown
  Bacterial polypeptide expressing nucleotide sequence isolated from the Sargasso Sea
aatggaaaatataatatttgaaaaatatcaaggcaatggtaatgattttataataatagattcaagaaataatgaaatattcaacaaatttaattcaaacgtattttttgatattaaaaaattatgtaatcgacaatttggaattggaggagatggtgtaatttttatagtggaacctgatgggaataatttcgcaaaaatgattatttacaattcagatggttctgaagctcaaatgtgtggaaatggaataaggtgtttagttgagtatattcataaatctaataaaattaataatgattcttctgaatataggattgaaacaagagccgggttaaagatagctcaatataacgatggagaaattacagtaaaaatgggcaaacctatattagaaactaatcgaattccaacaactatagatacaaagcaaaataatcttcctacatatttttttaaagaatctaactttgaacaaaaaggatatgcgattggtatgggaaatcctcatttgatattttttgttaaagatatcaataaaatatcactttcattattaggacctatttttgaaaataataaattatttcctgaaaaaacaaatgttcacttttcacaaatattagatagagacaatattaaagttagagtatgggagagaggagctggtcctacacttgcttgtggtacaggcgcttgtgcggttcatgtagcagcatataaactaggtttatgtaattcagagactacgataaatctaccagggggtaatctaaaaattaattggtcgagaatagaagacgagatattgatgacaggtta

SEQ ID NO: 289416 - DNA, 694 bp, Unknown
  Bacterial polypeptide expressing nucleotide sequence isolated from the Sargasso Sea
atggacggattgggtaatgattttgtaattatcgataatagacaaaaaattaccaatttaacaaaagatcagataattaaaatttgtgatagaaattttattggctgtgatcaactaatatttattgatccagatagttctgcagatgcaagtttaagattttttaattcagatggaggagagtctggagcgtgtggtaatggaacaagatgtgttgctgatttaatttcaaaagagaaaaacaataaatctatagttttaaatacactatctggaaaattaaaatctttaatattggataaaaaaattgttgaaactgaaattggtaaggcaagattaaaatggaatgaaatacctttatcaaaagagatggatacaaaaaatttaaatattaaaattatcgacacaaacaataaagagcttttaggtggcacagcaattaatgttggtaacccacacattgtttttttcgtaaaaaagattgaagattttaatattgaaaaaattggtcctgagatagaaaatcacgaaatctttccagaaaaatgtaacgtaacaattgcacaaatctttaataaaaatttgatcaaagtaaaagtttgggaaagaggagctggtctcactaaggcatgcggaactgcagcgtgcgctacagcatatgctggtaaattaaataatcttacagaaaataaaa

SEQ ID NO: 289417 - DNA, 682 bp, Unknown
  Bacterial polypeptide expressing nucleotide sequence isolated from the Sargasso Sea
aatggatggtttaggtaatgattttgtcataatagataataggcacaagactactgatttaaccaaacaacaaataattaaaatttgtgacagaaaatttatcggttgtgatcaattaattttgataaataaaaacgatacttcagatgcatctctagaattttataattctgatggtgggacttcgggagcatgtggaaacggaacaagatgtgttgcagatttattatcaaaagaacacaataaatcattaattactttaaccacacaatctggagatttaaaatcagagatattgggagacaagctagtttctacagaaattggaaaaggtaaaatagagtggaacgaaattcccctctctaaaaaactaaacaccaataatcttaatatcaaaatatctgatttagataataataattatatgggaggaacggctgtaaacgttggaaatccccacgtaattttttttgttgataataatgaaaattttgaaatccataaaattgggccagaaattgagcaccatcctttgtttccagaaagatgcaatgtcactttagcaacagtcgttgataaggaattaataaaagttaaagtttgggagagaggagctggtcttactaaagcctgcggtacagcagcatgtgctactgcatttgctgcaatgaataatggactt

SEQ ID NO: 289418 - DNA, 807 bp, Unknown
  Bacterial polypeptide expressing nucleotide sequence isolated from the Sargasso Sea
tatgcaaaaagtagactttataaagatgcatggacttgggaatgattttgttatcatagataaaagatctaacaatatcgcaattactgaagatattattaaaagactcagtgacagaagaactggagcagggtgtgatcaattaatcacaattaacaatacaaataatcaaagtgctgatgctgaaattgaaatttttaatcctggtggtgatagagccgaagcttgtggtaatggaacacgctgcgtggcaaaaatactatttgaagaagattcaaataaagaaattttaaaaattcaatctgatgcaggcatattagaatcaaaaagaatagataataatataagtgtgaacatgggttcaataaaaaatacttgggataaaattcctttaagtaaagaaatcgatacaatgaatattccaatttcgattgatggatatagtaatggagttgctgttaatgtaggtaatccacatgtagttttttttgggaaatcgatcaaagatacagatcttgaaagtataggtcctagaatagaaaatcatgagctctttccaaaaaaaactaatgttgaaatagttaaagttattaatacaaatttaattgaaatgagggtttgggaacgaggagttggaatcacgttagcttgtggtagtggtgcctgtgcagctgtatatgcagcgtggaaaaaaggattgattgaaaataacgctgaagtgaaacttgaaaaaggttcactgcacataaatataattaataatgaatctattatgacaggacctgcagaaatagttatcggggtagt

SEQ ID NO: 289419 - DNA, 794 bp, Unknown
  Bacterial polypeptide expressing nucleotide sequence isolated from the Sargasso Sea
tatgaaattatataattttacaaaaatgcatgggcttggaaatgattttttgatttttccatggagcgaacagttaccccaaaaaaacctgattaaagctctatcctctagatcaaagggagtaggttgtgacttggttgtttttcttgttaaacttgaaaaaaatattgcaaattataaaactcatttctttaaccatgatggaacgagagcagagatttgcggtaatgcactgagatgtataggaaagttacattatgaaagatttaattcgaaaaattgtttaattgaaactgattcagggcttatcgatatagaattcaatgatgattataccgtaagtgttgacattggttcaccgaaatttgactggaaagatgtacctttaataagagaaatggatggttctaacttgggttttgattttccatatttaaaaaatgggtttgcactgaatattggaaatccacatttggtttttgttgttgataaaattgataaaaaaaaacttatacaggattcattaaaagtgcggaacagtaaaatatttcctgaaggagtcaacattaatgttgtagaaattttgaaaaaaaatgaaatttcaattttaacaagtgaaagaggagttgggttgactgaagcatgcggaactggtgcttgtgcgagtgtaattgcaacaaataggatgcagcttgttgaaaataaagtttcagttaatatgcctggggggggattaaaagttgaaattacctctaatgaacatatcttcatgacaggtggagcaaccaaagtgt

SEQ ID NO: 289420 - DNA, 808 bp, Unknown
  Bacterial polypeptide expressing nucleotide sequence isolated from the Sargasso Sea
ttcgtcgtcctgcccgacctcgaaggaaagatggaactgtcggctgagcgggttcgctggatatgcaatcgccgccacggaatcggagctgacggggtactccgagtcgttcgctgcgccaacgatccggagttcgcgtccttcgccgatgtcgccgagttcttcatggactatcggaatgcggacggttccatagcggaaatgtgcggcaacggggcgcgggtattcgttcggtatctgcacgcgacaggctccctcacgggccggaccaccgttgtggcgactcgtggcggcctagtggaggcacacgttggcggacacgaggccgaagagatcgcgatcagcatgggtgttgcgacgatgcaggacggcgcatcggaagtgtcggtggcactcggtgagcggcgatgggatgcggtggcggtatcggtccccaatgcgcacgccgtggtcttcgtcgagtcgctcgacgccgatgttcaatccttggcacaggccccggtggtggcaccggcagaggcgttccccgacggggtaaacgtcgagttcgccgaacgcgtggcacccgggcatgtccgcatgcgggtccatgagcgaggcgtcggcgagacgcgctcctgcgggacgggtgcgtgcgccgtggcttgggtggcggcctcagaggctggagaccagacaggttcgttccgggtagatgtgcccggggggaccgtgtgggtagacatcgagccggatggcccgctggtgctgcgcggcccggccgaactggtcgctcgcggcacggtgcagtggccccgcggcgcgtagg

SEQ ID NO: 289421 - DNA, 730 bp, Unknown
  Bacterial polypeptide expressing nucleotide sequence isolated from the Sargasso Sea
atggactcgataaatacaaataatttgccgtttatcaaaatgcacggcctaggcaacgattttgtcataattgatgccaggaaaagagatatccagctaactcaaaaggttatatctggtattgcagataggcactttggcgtaggcttcgatcaactcgccgtaatatccaaaggtgaatttgatgcacatcttacattctataatgcagatggatctgagtctttggcgtgtggaaatgcaaccagatgcatagcccgtcatttgatggacgaagggtctaaagaaaagttgatccttaccacaaagcacggacagatacctgctatagatttaggaaatggtgttacatccgtaaatatgggccaacctgagctggactgggacaaagtacctctagcggaaaacattcccactttggaacttcctattgatggaacaccaactgcaacagggatgggtaatcctcactgtacgtttttcgttgaggatgcttcgaaaataaacttagacgagatgggcccaaaatttgaaaatcaccccctatttccagaacgaacaaatgtgcaaattgcatcgatatctgcaccagaccaaatcagaatgcgcgtttgggaaagaggtgtaggtgtaactttagcatctggatcctcatcttgtgctgcagctgttgctgcaaacagacgaggattaactggaaaaaaagtccaaatagaactggacggaggta

SEQ ID NO: 289422 - DNA, 433 bp, Unknown
  Bacterial polypeptide expressing nucleotide sequence isolated from the Sargasso Sea
gaaaattctaataataaacacatcatcgaggttgaggatcaagaaatagagctaggtgttatcgatctaggaaatcctcatgcggttagcttcaaagagcttaatgaaggtatttctttaaaaagagtcggtgaagtattacaaaacagtgaatggtttcctgaaggggtaaatttcggtgtaggaaaaatcctttctaaaaatgagatacaacttagggtatatgagagaggagcaggagaaactttagcctgtggaagtggcgcttgtgcagcagcattgatagccataaatgatcaaactattgaaagcccagtaagaattaagtttgagaaaggaagtatatttatagattacaatatagagaaccaagaaataacagctaaaggcgaggctgagtttattgaacaaatacacatatcgatacaatgac

SEQ ID NO: 289423 - DNA, 556 bp, Unknown
  Bacterial polypeptide expressing nucleotide sequence isolated from the Sargasso Sea
agaatatagaattgagactaaagcaggtttaaaaattgcaaaatatataaatgatgaaattacagtaaaaatgggagttccaattttagatagtcaaaatattccaacaacaattgaaaaaaaaatcaattcaattccttcacatgaatttactgagaaaaattttaataatttaggttatgccgtaggaatgggaaatcctcatttaatattctttgtagaaaacctagagtcaattgttctttccagacttggacctatatttgaaaaaaatgaattatttccagaaaaaactaatgtgcatttttgtcaaatcttaaatagagataatatcaaagtaaaagtatgggaaagaggagcaggaccaacattagcctgtggaacaggtgcctgtgctattcatgtagcagcttataaattaggtctttgtaatccacaaaccatagtatctttaccaggcggtaatcttaaaattgattggtcaaaagacgattgtgaagtcattatgaccggtaatgctaaaaaggttttctcaggatcaatgttattaaattaa

SEQ ID NO: 289424 - DNA, 828 bp, Unknown
  Bacterial polypeptide expressing nucleotide sequence isolated from the Sargasso Sea
atatggacattagagcatttaaaatggatgggttgggtaatgattttgtaatcattgataatagacaacaaattaccaacttgacaaaagaacaaataataaaaatttgtgacaggaattttattggttgtgatcaattgatattaattgaaaatgataaatcatctgatgcttgtttgaaattttttaattctgatggtggagagtcaggagcatgtggaaatggaactagatgtgttgcggaattaatttctaaagagacaaacaaaaaaactatagttttaaaaacgctatctggaaacttaaaatctgaaatattgggaaataatattgtcacaactgaaattggtaaagcaaaaatagaatggaatgaaataccattatcaaaaaaattaaattcaaaaaatttgaatattaaaattcatgacaagcacaataaagaatattcaggtggtactgctgtaaatgttggaaatccacatatcattttttttataaacaaagttgatagttttgatattgaaaaaattggccctgatattgaaaatcatgaaatttttccagaaaaatgtaatgtgacaattgcagaagtaattaataaaaatttaataaaagttaaagtttgggagagaggagctggtttaaccaaagcttgtggtaccgcagcatgcgcaactgcatttgcaggcaaattaaataaactgactgaaaataaaactgacatagaattcaaaaatggaaaattatcaatcctaatagatgaaagaaattcaattcatatgaaaggtcctgtttcagatataaaagaaattacgtttaaattataat

SEQ ID NO: 289425 - DNA, 467 bp, Unknown
  Bacterial polypeptide expressing nucleotide sequence isolated from the Sargasso Sea
cccaaacttgaaaccaaacaaaataccattaaaagccagtaaacgtgagttgacctatatcatccgcacagaagagcacacggttttcagtggtgcagtttctatgggtaatccacattgcgtgttagaagtcgatgatattcataccgccgaagtgaacactttagggccactgcttgaaaatcacgagcgttttccacaacgagccaatgttggttttatgcaggtaatttctcaagatcatattaaacttagagtctgggagcgaggtgtaagcgaaaccttagcatgtggaacaggtgcctgtgcagctgtcgttattggtcaagtacaaaataagcttgccaacacagtgcaagtagatttacccggtggaagcttgcaagttcgctggcaaggtgaaggacatccagtaagaatgactggccctgctgaacatgtttttgatggacaagtggcattatgag

SEQ ID NO: 289426 - DNA, 751 bp, Unknown
  Bacterial polypeptide expressing nucleotide sequence isolated from the Sargasso Sea
aatgaaaaaaataacatttgaaaaatatcaaggtaacggcaatgatttcatagtaattgattctagaggaaatgatttttataaaaattacgggacaaataaaatatttgatattaaacaaatttgcaacaggcaatttggtattggagcagatggtgtgatttttatagaagaacctaatgaagataattatgcaaaaatgataatctttaattctgatggttctgaagcacaaatgtgtggaaacggaattaggtgtttagttgagtatctccacgtaaatgattcaatgaataataaaaacatagaatataaaattgagactaaagcaggtttaaaaattgcaaaatatataaatgatgaaattacagtaaaaatgggagttccaattttagaaagtcaaaatattccaacaacaattgaaaaaaaaatcaattcaattccttcacacgaatttattgagaaaaattttaataatattggttatgccgtaggaatgggaaatcctcatttaatattctttgtaaaagacattgagtcaattgttctttccagacttggtcctatatttgaaaaaaatgaattatttcctgaaaaaactaatgtgcatttttgtcaaatcttaaatagagataatatcaaagtaaaagtatgggaaaggggagccggaccaaccttagcctgtggaacaggtgcctgtgctatccatgtagcagcttataaattaggactttgtaattcacaaaccata

SEQ ID NO: 289427 - DNA, 765 bp, Unknown
  Bacterial polypeptide expressing nucleotide sequence isolated from the Sargasso Sea
taaaagggtcaatgaaattaatatttacaaaagaattaataagcaaattaagtgatagaaaaagtggagctggttgtgatcaattaatcactattaataatagtagtaaaaaaggtattgatatagatgctgaaataaaaatatataatcctagtggtgatcaagcggaagcttgtggaaatgggaccagatgtgtagcaaaattattatttgaagagtcaaataaaaatgatatcaaaatactttctgatgctggaattttagtagctaaacaaaaagataacaatattagtgtcaatttaggaaagcttacaactaattggaaaaaaatccctataatgaaagatatggataccatgaatgttccaataaaaataaataattttagtaatggagtagcagtaaatattggcaatcctcatttagttttttttggacaaaatataaatgatgtggatttaggtactataggacctaatatagaaaatcataagttttttcctaacaaaataaatgttgagcttgtagaaattataaatagaaataaaattaaaataagggtatgggaacgaggagctggacttactttagcctgtggaagcggagcttgtgcttcagtatacgctgggacattaaaaaaccttcttgaaaatgaagttgaggtaattttagaaagagggtcattatatataaacatagttaatgatgaagcaataatgacaggaccagcagagataagtttttacggaagtttagattattaaa

SEQ ID NO: 289428 - DNA, 792 bp, Unknown
  Bacterial polypeptide expressing nucleotide sequence isolated from the Sargasso Sea
tatggatatcaaagcttataaaatggatggtttgggcaatgactttgtaatcattgatcaaagaattaaaaatattgatctatcaaaagatcaaatagtcaaaatctgtaatagaaattttataggttgtgatcaacttataataataaaaaaaaatcccgagttagatgcagagctagaattttataactctgatggaagtacatcgggtgcttgtggaaatggcacaagatgtgttgctaattttttatcaagagaaaaaaatcaaaaaaaaattactgtttcaacttcttctggagttttaaaatcaaatattttagacaacaattcagtagaaactgaaattggcatacccaaagtaaagtggaatgaaattccattaagtgaaaatttagatactaaaaatcttaaaattaaaattttaaacaaaaataatattgaacatataggtggtactgcaataaatgttggtaatccacatgttattttttttgtagaagatgttgaaaattttgatttaaaaaaaattggacctgaaattgaaaatcacaaactttttcctgaaaagtgtaatgttactctagctaaagtaataaataaaaatttaattaaagttaaagtttgggaaagaggagcgggattaacaaaagcctgtggtaccgcagcgtgtgcaacggctatagctggaaatattaatggattagttgaaaaaaagactgatatagaatttaaacttggaaaactttccatttttattgatgataaaaatattgtttatatgaatgggccggt

SEQ ID NO: 289429 - DNA, 399 bp, Unknown
  Bacterial polypeptide expressing nucleotide sequence isolated from the Sargasso Sea
tagacgagtttgaagctttctgtttgtctatgggaaatccacatgcagttatttttataaataatttaaaagaacttgagaatttgaacataaactctattggtcctcgattagaaaaacattctatttttcctgaatttgcaaatattgaatttatatctgttttagaagataaatctctaagaatgagagtttgggagagaggagcaggtattacttcagcatgtggatctggagcgtgtgcagcattagttgctgcttctttattagacaaaagtgctaaagagaataagattgttttagatggtggagatttgtttattaagtggcttgataatggatcagtaacactttctggtgatactgaaagagtgtttgaaggattcataggtgaataat

SEQ ID NO: 289430 - DNA, 826 bp, Unknown
  Bacterial polypeptide expressing nucleotide sequence isolated from the Sargasso Sea
tatggatatcaaagcgtttaaaatggatggtttaggtaacgattttgtgattatagataataggcaaaaaattactaatttgagcaaagagcaaattattaaaatctgcaatagagaatttataggttgcgatcaattaatattgataactaaaaatgatagttcggatgcatctttagaattttacaattctgatggtggaacttctggggcatgtggaaatggaacaagatgtgttgcagatttgctatctaaagagaacaataaatcattaattactttaactactcaatctggggatttaaaatctaagatattgggagaaaaactggtatctacagaaattgggcaaggcagaacagaatggaatgaaattccactctctaaggagttagatactaataacctcaatattaaaattactgatttggataataatcatcatagtggtggtacagcagtaaatgttggaaacccacacataattttttttgttgataataacgaaaattttgaaattaaaaagattggaccacaaattgaacatcattcgttgtttccagaaagatgtaatgtcactttagcaacagtggttaataaggaattaattaaagttaaagtgtgggagagaggagcaggtcttactaaggcgtgtggtacagcggcttgtgctactgcttttgctgcaatgagaaataaactttcaggtaacaaggtagatatcgagttttctactggtaagttatcaatacttattgatgaaaataacagcattcacatgaaaggacccgtttctgatattgaagaaattaatataaaaatttaa

SEQ ID NO: 289431 - DNA, 754 bp, Unknown
  Bacterial polypeptide expressing nucleotide sequence isolated from the Sargasso Sea
atggatggcttaggaaatgatttcgtaatcattgatcaaagagtgaaagctgtaaatttaactaaagaaaatataataaaaatttgtagtagagattttattggctgtgatcagttaatttatattaacaaaaataatgataatcgagataaacttattttctataattctgatggaagtatttctggtgcatgtgggaacggtacaagatgtgtagctaaacttttatcaaaagaatatggaaaagaagaaataaatttagagacatcgtctggaaacttacattcattgatactaaaagaaaatttagttgaaactaatataggtataccttctatggagtgggataaaattcctttaattaaagaaatgaacactaaaaacttaaatataactattaatgatattaacaaaaaaaaatttactggtggtatcgcaattaacgttggtaatccccatataatcttttttgtagaaaataataataattacgagatagaaaatatagggcctgtaattgagcaacatgaatattttccagaaaaatgcaatgtaactatagcaacaattaaaaatgaaaacttgattagtgttaaagtttgggaacgaggtgcaggattgacaaaggcttgtgggacagcagcatgtgcaaccgcttatgcgggttttataacaaataaagtttccaattatgttgatataaaattttctacaggaattttatcgataagaataggaaatgataattctattt

SEQ ID NO: 289432 - DNA, 778 bp, Unknown
  Bacterial polypeptide expressing nucleotide sequence isolated from the Sargasso Sea
atgaaaaatataccttttgataaatatcaaggaaacggaaatgattttgtagtaattgattccagaggaaatgatttatataaaaattacaagacaaataaatcttttgatataaaaaaaatttgtaacaggcaatttggtattggagcagatggtgtaatttttatagaggaacctaatgaagataattatgcaaaaatgataatctttaattctgatggatcagaggcacaaatgtgtggtaacggaattaggtgtttagttgagtatctccatataaatgattctattaagaataaaaatattgaatataaaattgagactaaagcgggtttaaaaattgcaaaatacataaatgaagaaattacagtaaaaatgggagttcccattttagatagtcaaaatatcccaacaagaattgaaaaaaaaattaattcaattcctacacataattttattgagaaaaattttaataataagggttatgcagtaggaatgggaaatcctcatttaatattctttgtacaagacttagagtcaattgctgtttctagccttggacctatttttgaagaaaatgaattatttccagaaaaaacaaatgttcatttttgtcaaatattaaatagagagaatatcaaagtaaaagtatgggaaagaggtgcaggcctaaccttagcctgtggaactggtgcttgtgctatacatgtagcagcttacaaattaggcctctgtaattcagaaaccatagttacattacctggaggcaatcttaaga

SEQ ID NO: 289433 - DNA, 710 bp, Unknown
  Bacterial polypeptide expressing nucleotide sequence isolated from the Sargasso Sea
aatggacggtttaggtaatgattttgtgatcatagaccaaagaagtcaaaattataatctaagtaaagatcaaataattaaaatatgtggtcgagatttcattggatgtgatcagttaattttcattaaaaatagtggcaaaaaagatgctgaattagaattttacaattcagatggtagtatttctggtgcttgtggaaatggcacaagatgtgttgctgaattgttgtcaaaagaaagcgatgataaagaaattatactttggacatcttctggaacacttaaatcaaaaattttaggcaataatttagtagaaactgaaattggtgttgcaaaaactaactgggatgaaattccgcttaaaaaagatttaaacacaaaaaatttgaatattaaaattattagtaaaaataataatgagcatattgggggaacttcaattaatgttggaaaccctcatgttgttttttttatagataatatcgaagattatgatttaaaaaaaattggtcctgaaatagaaaatcacaattattttccagaaaaatgtaatgtaactcttgcaaaagttattaatagaaatttgattaaagtgaaagtttgggagagaggagcaggacttacaaaagcttgtggtactgcagcgtgtgctacagttgtagctgcaaatataaatggattaacagataaacaagctgatgttgaatttg

SEQ ID NO: 289434 - DNA, 751 bp, Unknown
  Bacterial polypeptide expressing nucleotide sequence isolated from the Sargasso Sea
atgaaaaatataagttttgaaaaatatcaaggtaacggaaatgatttcgtaataatagattctagaggaaatgaattatataaaaattacaagacaaataaaatatttgatataaaaaaaatttgcaacaggcaatttggtgttggagcggatggtgtgatttttatagaagaatctaatgaagataattatgcaaaaatgataatttttaattctgatggttctgaagcacaaatgtgtggaaacggaattaggtgtttagttgagtatctccacgtaaatgattcaatgaataataaaaatatagaatataaaattgagactaaagcaggtttaaaaattgcaaaatatataaatgatgaaattacagtaaaaatgggagttccaattttagaatgtcaaaatattccaacaaaaattgaaaaaaaaataaattcaattccttcacacgaatttattgagaaagattttaataatatgggttatgccgtaggaatgggaaatcctcatttaatattctttgtaaaagacatagagtcaattgttctttcaagacttggtcctatatttgaaaataatgaattatttcctgaaaaaactaatgtgcatttttgtcaaattttaaatagagataatataaaagtaaaagtatgggaaaggggtgcaggaccaaccttagcttgtggaacaggtgcctgtgctatccatgtggcagcttacaaattaggccttttaattcacaaaccatagt

SEQ ID NO: 289435 - DNA, 571 bp, Unknown
  Bacterial polypeptide expressing nucleotide sequence isolated from the Sargasso Sea
aatgcgaaaaattgaatttattaagatgcacggattaggcaatgattttgtaattattgatagaagaaaaaataattacaaaataaatgaggaattaattcgaaaattaagtgatagaagaacaggggctggatgtgatcaactgattacaattgataaaaatttatcttctgatcatgatgcaagtataaaaatatttaatccaagtggagatagtgcagaagcttgtggcaatggtacacgatgtgtagcaaaattgctttttcaagaaaaaaaaacaaagaatataaaattacattctgaagctggtgtgttgtatgcaaaaaaaattaatgatgatattattagtgttaatttaggaaaggtgtcttataattggaaagatatacctttgtcaaaaaatgtagacactcttaatatgcctataattaacaaaaactttgtatatagcgtcgctgtaaatgtgggaaatccgcatattgttttttttggacaaaatattgatgaatttaaactagaagattttggacctaaaatagaacatgatagtttatttcctgaaaaaataaat

SEQ ID NO: 289436 - DNA, 307 bp, Unknown
  Bacterial polypeptide expressing nucleotide sequence isolated from the Sargasso Sea
tatgcaaaaagtagactttataaagatgcatggacttggaaatgattttgttatcatagataaaagatctaataatatcgtaattactgaagatattatcaaaagactcagtgacagaagaactggtgcaggttgtgatcaattaattacaattaatgatacaactaataaaagtgttgatgctgaaattgaaatttttaatccaggtggtgatagagctgaagcttgtggaaatggtacacgttgtgtggcaaaaatattattcgatgaagattcaaatagagaaattttaaaaattcaatctgac

SEQ ID NO: 289437 - DNA, 640 bp, Unknown
  Bacterial polypeptide expressing nucleotide sequence isolated from the Sargasso Sea
atgcatggtcttggtaacgactttgttgtgatcgattctcgacgtaaaagcacatatttaaccaccaatttaattaaaaaattgggagataggaactttggcgtaggctttgatcaattggcgattattcacgatagtaaagtatctgatgcccgtttgactttctttaattcagatggttccaaatcagtaacttgtgggaatgccactcgatgtattgccaattttttgatggaggagataaaaagagatgaaatagagctttcaactgatcacaaattgttgaaagcaaagcgtgaggccgatggatcagtatctgtaaatatggggctaccagagatagaatggcagaaaatacctttgttagaggacgttgacacgttatttttaccaatcccaggaaaaccgactgctacgagcatgggaaatccacattgttcattttttgtagataatctggatcaggtcaagatagaagccgagggtgctgaaatagaaaaccatcctttattcccacaaaaaacaaatgttcaatttgtttccttaatttccaaagatcgtttgcgagtaagggtttgggaaagaggtgttggagtgactaaggcttctggctcatcagcttgcgctgctgtggttgcat

SEQ ID NO: 289438 - DNA, 732 bp, Unknown
  Bacterial polypeptide expressing nucleotide sequence isolated from the Sargasso Sea
aatggatggattaggtaatgactttgtaatcattgataatagacaaaaagttactgaattatcaaaagagcaaataattaaaatttgcgatagaaattttattggatgtgatcaattaatattaatagaaaaaaataacatatcagatgctagtttaaaattttttaactctgatggtggtgagtctggcgcatgtggtaatggcacaagatgtgtagcagatttaatctcaaaagaaaaagataataaaaatataattttaactactctatcaggaaatttaaaatctaaaatattaggaaataatcttgttacaactgaaattggaaatgcaaaaataagatggaatgaaattcctctttcagatgaattgaatacaaaaaacttaaatattaaaattaatgatttgaacgatcatgaacattctggtggtactgctataaatgtaggaaaccctcatgttgttttttttgttgatgaaattaaaaattttgatattgaaaaaattggacctcagattgaaaatcataaaatatttccggaaaaatgtaatgttacaattgctaaagttgttaataaaaatttaatcaaagttaaagtctgggaaagaggtgctggattaacgaaggcatgtggaactgcagcatgcgcaacagcatttgccggtaaaataaataatcttacagataataatacagatatagaatttgaaactggaaaattatcaatttt

SEQ ID NO: 289439 - DNA, 862 bp, Unknown
  Bacterial polypeptide expressing nucleotide sequence isolated from the Sargasso Sea
atgaacaatataatatttgaaaaatatcatggtaatgggaacgattttataataatagattccagaaatagtaatattttcaaaaaatttctatctgacaaaactatcgatataaaaaatttgtgtgatcgacaattcgggataggtggtgatggcgtaattttcatcttggaacccgatagaaataattacgccaagatgattatctataattcagatggttcggaggctcaaatgtgtggaaatggaatcaggtgtttagttcaatatctacacaattccaataaaggatcttatagcgtctctgaatataggatcgaaacaaaggctggtataaaaattgctcaatataataatggtgaaattactgtaaaaatgggaaaacccatattagaaactaaatccattccaacaaaaatagatacaaaaatcaattcaattccttcatatctttttaaagaaccaaattttgaacaacagggatatgccgtagggatgggaaatccacatttgatattttttcttgaagatatcactcaaatatcactttcactattaggtccagtgtttgaaaaacataaattatttcctgaaaaaacaaatgttcatttttcccaaataataaatagagataatattaacgtacttgtatgggaaagaggagcaggaccaacattagcctgtggaacaggagcttgtgctgtacatgtggcagcatacaaacttggtttatgtaattcaaaaacagaaataaatctaccaggaggtcatctaataattaattggtctagatcagaagatgagattttgatgactggtagtgcaaaaaaagttttttctggaacatatattctaaaataga

SEQ ID NO: 289440 - DNA, 643 bp, Unknown
  Bacterial polypeptide expressing nucleotide sequence isolated from the Sargasso Sea
tatgcatgagtttaagttcataaagatgaatggcctggggaatgattttattgttattgaccaaagagtatctgaatttgatttatcagaagaacaagtaaaattaatttgtcacagaacaaaaggggttggctgtgatcaactaataatgattaggaagtcacaaaagaacagcgatccgcttattaaattctttaattcagatggaagtgaaatagatgcttgtgggaatggttcgcgttgtgttgcaaactttttaatgaaagaaacaaagagtgagaaaataaacttaaaaacacgtgaaagaacaattgcatgtgaaaagattgatgatgtcacagttagcataaatatgggcaagccaaaatttaaatggaatgaaattcctttgactaaagatatcaatccaatggatataaatttttcaatcaaagaccttactttaaaaaaaccatttttagttaatattggtaatccacatattattttttttgatgatgaaatcgaaaaatacgatgttgaaagttttggatctttaattgagaaagataatttatttcctgaaaaaataaatgtgagttttgcaaagttgaaaaatgataatcatattttactaaacgtttgggaaagaggtgcgggaaaa

SEQ ID NO: 289441 - DNA, 382 bp, Unknown
  Bacterial polypeptide expressing nucleotide sequence isolated from the Sargasso Sea
atgcaaaaaataaattttatcaaaatgcacggtctaggtaatgattttgtcatcattgatagaagagtcaatgagattaacattacaaaagagttaataagcaaattaagtgacagaaaaagtggtgctggttgtgatcaattaatcactattaataacagtagtaaaaaagatattgatatagatgctgaaataaaaatatataatcctgctggtgatcaagcagaagcttgtggaaatggaaccagatgcgtagcaaaattattatttgaagagctaaataaaaatgatatcaaaatactttctgatgctggaattttagtagctaaacaaaaagataacaatattagtgtcaatttaggaaagcttacaactaatggaa

SEQ ID NO: 289442 - DNA, 673 bp, Unknown
  Bacterial polypeptide expressing nucleotide sequence isolated from the Sargasso Sea
tacaattaatgcaagtaaagactcaaatgccgaggttaaaatagaaatatttaatcctagtggtgataaagctgaagcttgtggaaatggaacaagatgtgtagcaaaattaatatttgaagaatcaaaaaaaaatgaagtaaatattctctcagatgcaggattattaaaagctaagaaagtagattcaaataatattagtgtaaatttaggccaactttctactgactggaaaatcattccactatcaaaaaaagtagatactttaaatattccaataaaaatagatgaatttgaaaatggcgttgctgttaatataggtaatccccatattgttttttttggcaagaatattaataatgtagatttatctaaaataggcccggatattgaaaacaatagcttgttcccaaataaaactaatgttgagataatagaaattataaatagaaaaaaaataaaaatgcgggtttgggaaagaggtgcaggaattactcttgcttgtggaagtggtgcgtgtgcagcagtatatgctggacaacttaaagattatttagataataacgttgaagttttattagatctcggctctttatttattacaataaataataaagaagcaataatgactgggccagctgaaataagctttcatggaaatattgatatataa

SEQ ID NO: 289443 - DNA, 702 bp, Unknown
  Bacterial polypeptide expressing nucleotide sequence isolated from the Sargasso Sea
aaactggagcggggtgtgatcaagtaattactattaatcaaagtttaaataataattcagatgcaacaattgaaatttttaatccaagtggagatcgagcagaagcttgcggaaatggaactaggtgtgttgctaaattactttttaaagaaaataaaaatatagattctttgaatatttcttcagatgctggcatcttaattgctgaaaaaaaagataataatattagtgtcaatatgggaaaagtgtcaattaattggaaagatattcctttaagtgaagaaatggacacactcaatattcctttgcatatagagggattcagcagaggtgttgctgttaatattggaaatccacatgtagtattttttggaaaaaatattaatcaattaaatttacttcaaataggtccaaaaatcgaaaatcacaaattttttccaaacaaaacaaatgttgaatttgttgaagttataaatttaaaaaaaattaaaatgaaagtttgggagaggggcgcgggtattacgctcgcatgtggaagtggagcatgtgcagcagtatatgctggatggaaaaagaaattaattgataatcaagctgaagttttacttgaaaaaggtttattaaatataaatatacttaatgaagaagcgataatgacagggccagctgaagtaagctatcacggatacgttgaaatttaaa

SEQ ID NO: 289444 - DNA, 816 bp, Unknown
  Bacterial polypeptide expressing nucleotide sequence isolated from the Sargasso Sea
gaaatgactatgtatttatagatggccgaaattccactttgaattggagttcactggctgtatcaatcagcgatcgtcattttggagtcggatctgacgggttaatagttgcattagaatccgaagatgctgatattagaatgcaaatgtataatctcgacggatccgaaggtaagatgtgtggaaacgggatacgctgtttcgtttcatttggcgttaatatcggattgcttgaaagggattcagcttcgtattcggttgaaacagcctctggtactctggaggttactcccatttgggaaaatgaccagatggtagcggcatcagtaaatatgggacagccaggatttctaagttcagaggtgccatttgttttagaaggctacgatgcagtagaggaccatgatttagaaattgaaggtcagcattttgctgtatcagccctgtctatgggaaatccacacgctgttacaatccttgatacccctatcagcagctttgatttagctcatataggaccaaagattgaaaaccatcccatgtttcctgaacaagtgaattttgagattatcaatatactgaatcgcgattcaattgccttaagagtttgggagcgaggttctggccaaaccctagcgtgcggcacaggagcatgtgcagcagccgtaatcgcaatcaaaaaaggtcttgttaacaacaaagttactgttaaattgcctggaggggaccttgaaatacactgggaaaataactccgatgtatatatgaaaggccccattgcaacagttttccaaggtagatacaacctaaactaaa

SEQ ID NO: 289445 - DNA, 596 bp, Unknown
  Bacterial polypeptide expressing nucleotide sequence isolated from the Sargasso Sea
tttattcatagaaaattcaacaaataatatcaacattgagacaaacgcagggatattagaagcgtggaaagataataactcaaatttgatttcagttaatatgggtaaaccaaattttatttggagtgaaataccattatctaaaaatattgatcatacaaatgttgatttaggatttgagaaaggtaataatgctttttgtttgtcaatggggaaccctcatgctgtgttttttgtagataacgttgaaagtgtaaatatttctttggttggcccaaagtttgaaaatcatcctattttccctgaaaaagctaatatttcattcgcagaggtcaaatctaagtcaaaaataaaaatgaaagtatgggaaagaggggcaggacaaactgcggcatgtggaagtggagcatgtgctgtagcagttgcagcaaaacaactatccaaaattaataataattgtgagataattcttgacggtggtatcttgaatgtaacaattcttgatgatgaaagtatagttttaaaaggaccaactgaaatttcgtttcaaggcatatttggtgacagaattaacaagttaattaaatttccatgaa

SEQ ID NO: 289446 - DNA, 361 bp, Unknown
  Bacterial polypeptide expressing nucleotide sequence isolated from the Sargasso Sea
tatgcaaaaaatagaatttacaaaaatgcatggcttaggaaatgattttgttatcattgatagaagatcaaaaaagattgaaataaatgatgatataattcaaaaattgagtgaccgcagaacaggtgctggttgtgaccaattaattactatcaatgatccaaaaaataacaaagttgatgttggtatcgatattttcaatccagctggagataaagcagaagcatgtggaaatggaactaggtgtgttgcaaaaattctttttgatgaaaataatgaaagagaaactctaaaaattctatcagacgcagggacactaattgctaaaaaatctggagataaaatcagtgtgaatatgggt

SEQ ID NO: 289447 - DNA, 598 bp, Unknown
  Bacterial polypeptide expressing nucleotide sequence isolated from the Sargasso Sea
aatgaaaccaataattttccagaaaatgcatggtttgggaaatgattttgtagtcattgattcgagagatgatgatttatttataagtacagaattagttaaatctcttgcagatcgtcactgcggagtgggatttgatcaactcgctgtaatctacaaaagcaaaaaaactggtgctgccgcaaaattagacttctggaattgtgatggtagcaaatctgcaacctgtggtaatgcaactagatgtgttgcaaaattattgatggatgaaacaaagtccaatgagataaaactcatgacttctcacgcagttttgagttgtaagagacttgccaatgataaaatttccgtaaatatgggtcaacctcaatcctcttggaaggatattcctttaacagaatcttgcgacacccttcatcttccccttgaaggaaagcctgttgcaacaaatattggaaatccacattgcactttctttgttgaagacataaaaaaatacaatcttgaaaaaataggaactacctatgaaaatcaccgcctgttcaagaaaaaaactaacgtgcaaattgctcaagttttaagccctaaaagcatcaga

SEQ ID NO: 289448 - DNA, 244 bp, Unknown
  Bacterial polypeptide expressing nucleotide sequence isolated from the Sargasso Sea
aatgcaaaaaatagaatttacaaaaatgcatggtttgggaaatgattttgttatcattgataggagatcacaagatattgaaattaatgataaattaattcaaaaactaagcgatcgaagaactggtgctggttgtgatcaagttattacaattaataatgctatgaatcaaaatactgatgttagtattgatatttttaatccagcaggagacaaagcagaagcttgcggaaatggtactagg

SEQ ID NO: 289449 - DNA, 382 bp, Unknown
  Bacterial polypeptide expressing nucleotide sequence isolated from the Sargasso Sea
aatgagagagaagcttaaattccacaaaatgcagagtcttggtaatgactttatggtggttgaggccataaccagagaaatttcgttgaaaccctctcaaataaaggcttgggcaaatcgatctagaggcgttggctttgatcaattgctactgatagaacccccaaccgatcccgaagtagacttccgatatcgaatatttaacgccgacggctcagaggctgaacaatgcggcaatggctcccgctgtgtggcccttctagtaaataagcttggactaagccacaaagacacacttcaatggcaaacaacgcggggcctaacaaagacggtgctttatctttcaaaccgcgaagtgaccgtcgaaacacatatgcaacca

SEQ ID NO: 289450 - DNA, 727 bp, Unknown
  Bacterial polypeptide expressing nucleotide sequence isolated from the Sargasso Sea
tatgcaaaaaattgaatttattaaaatgcacggattaggcaatgattttgttattattgatcaaagggtagataatatcaatatcacaaaagatttaatcaataaattaagtgaccgaaaaacaggtgccggatgtgatcaactaattactattaaaacaagtaagaatgataatgctgaagctgaaattgaaatttttaatcctagcggcgatagagctgaagcttgtggtaatggaactaggtgtgttgcacgattattatttcaagagtttagtaaagaagaaattaatataaattctgatgcaggattgttaaaagcaaaaaaaattgatgagaaaaatattagtgtaaacttaggtaagataagtacagattggcaaaaaattcctttatctcaaaaagtagatacattaaatatgcctatagaagtagacggttttgaaagcggagttgcagtaaatatcggaaaccctcatatagttttttttggtaaagatatagatagtgtaaagctcgataatattggaccaaatattgaaaataattatttattccccaataaaacaaacttagaaattgtggaaataataaataaacaaaaaataaaaatgcgtgtttgggaaagaggagttggaataactcttgcctgtggaagcggggcatgtgcagcagtatatgcaggacaaataaaaaaatatttacataataatgttgaggttttatta

SEQ ID NO: 289451 - DNA, 684 bp, Unknown
  Bacterial polypeptide expressing nucleotide sequence isolated from the Sargasso Sea
aatggatggtttaggaaatgattttgtaattattgatcaaaggcaaaatcaaattaaattaaccaaagatcaaattaaaaaaatatgtgatagaaattttattggttgcgatcaacttatatttataaaaaaaaatttaaaaattgacgctagtctagaattttataattcagatgggagtacttcaggtgcgtgtggaaatggaaccagatgtgtagcttatttattatcaagagaaatgaaaaaaaataaaattacactagaaactgaaactggaaatttagaatcaaaagttttaggagaaaaattagtagaaacaaaaataggtacagcaaaaactaaatggaatgaaattcctttattaaaagaattaaatacaaataatttaaattataaaattattgataaaaataaaaaagaatattttggaggtactgcagtaaatgttggaaatccacatgttgttttttttataaataatatagaagattttaatttagaaaaaattggtccagaaattgaaaatgacaaattatttactgaaaaatgtaatgttactttagcaaaaataattaataaaaatcatattaaagttaaagtttgggaaagaggtgctggactaacaaaagcttgtggcactgcagcttgcgcaactgcttattctgcaaaaataaatggcaaaat

SEQ ID NO: 289452 - DNA, 760 bp, Unknown
  Bacterial polypeptide expressing nucleotide sequence isolated from the Sargasso Sea
aatggatggattaggtaatgactttgtaatcattgataatagacaaaaagttactgaattatcaaaagaacaaataattaaaatttgcgatagaaattttattggatgtgatcaattaatattaatagaaaaaaataatacatcagatgctagtttaaaattttttaactctgatggaggcgagtctagtgcatgtggcaatggtacaagatgtgtagcagatttaatttcaaaagaaaaagataatagaactataattttaactactctatcaggaaatttaaaatctaaaatattaggaaataatattgtaacaaccgaaattggaaatgcaaaaattaaatggaatgaaatccctctttcggaagaattggatacaaaaaacttaaatataaaaattaatgatttaaacaaccgtgaacattttggtggcactgctataaatgttggaaaccctcatgttattttttttgtagatgaaattaaaaattttgatattgaaaaaattggacctcagattgaaaatcataaaatatttccagaaaaatgtaatgttacaattgctaaagttgttaacaaaaatttaatcaaagttaaagtctgggaaagaggtgctggattaacgaaggcatgtggaactgcagcatgtgcgacagcatttgctggtaaaataaataatcttacagataataatatagatattgaatttgagactggaaaattatcaatttttatagatgaaaaaattctattcatatga

SEQ ID NO: 289453 - DNA, 627 bp, Unknown
  Bacterial polypeptide expressing nucleotide sequence isolated from the Sargasso Sea
tatttaatcctaatggagatattgctgaagcttgtggaaatggaacaagatgtgtagcaaaattattatttaatgaaaaaaaatcaaaaaagttaaaaattaaatctgatgcaggaatactgcaggcaaaaatagttgataaaaataatataagtgtaaatttaggaaagttgtccgtaaattggaaaaaaattcctttagcaaaaaaaatagacactcttaatgtcccaattaatattaaaggttttgctttgggtgttgctgtaaatgttggcaatcctcacatagtatttattggaaaaaacattgataaagtaaatttgtcttctttgggtccaaaaattgaaaacaacagattgtttccaaataaaacgaacgttgaaatcattgaaaaaaaaaataaaaaaaaaattaaaatgcgtgtctgggaaagaggtgctggcataacattggcgtgtggcagcggtgcttgtgctgctgtttatgcaggtattttgaaaaaattattagcaaacaaagttgaggtgaagctagagaagggttctttgttcatagatattgataaacaaaatgcaataatgactggtccggcagaactaagttataaaggatctataaaattataat

SEQ ID NO: 289454 - DNA, 826 bp, Unknown
  Bacterial polypeptide expressing nucleotide sequence isolated from the Sargasso Sea
tatggatattaaagcttttaaaatggatggtttgggaaatgattttgtaatcatagatcaaagaaatacccaaattaatttaagcaaagatcaaataattagaatatgcgatagagatttcataggttgtgatcagctgattttaataaaaaagaatagaaaaatagatgctggtttagaattctataattcagatggcagtgcttcgggagcttgtggaaatggcacaagatgtgttgctagtttattatcaaaagaaaataataaaaaagaaataactctatggacttcaggtggtacattaaaatccaaaatcttagaagataatttagtagaaacagaaattggtgtttcaaaaactaactggaaagagattccattgaacaaagaattagatactaaaaatctaaatataaaaattctagacaataataataaagaacatatcggaggtacagctatcaatgttggaaaccctcatataattttttttgttaataatcttgaaaattatgatttaaataagattggacctgagattgaaaaccataaattttttccagaaaaatgtaatgttactcttgctaaagttaataacgaaaatttaattaaagtcaaagtttgggagagaggcgctggactaacaaaagcttgtggaactgccgcatgtgcaacagctgttgctggtaatattaataaactatcaggaaaaaaagttgatatagagtttagtttaggaaacctgtcaatttttattgatgataataatagtattcatatgaaaggaccagtttcagatattaaaaatatcgaaattaaattgtaa

SEQ ID NO: 289455 - DNA, 306 bp, Unknown
  Bacterial polypeptide expressing nucleotide sequence isolated from the Sargasso Sea
catgactgaatttttgaaaatgcatggtcttggcaatgattttattgtctttgatgcccgtgatccagaaaatgcagttcctgatcagatcagcccggccgccgcacggcggctagctgatcggcattttgggattgggtgcgaccagattctggtgatccgctcgtcgaccaaggctgatgtatttatggaaattctgaatagtgatggctctcaggcgacagcctgtggcaatggcacccgctgtgttgcagactttgtaatgccagcgggcgggtctagcatcttgatagagacggccgctgg

SEQ ID NO: 289456 - DNA, 564 bp, Unknown
  Bacterial polypeptide expressing nucleotide sequence isolated from the Sargasso Sea
gcctgactacaaaacataaaattagtgtatcaaccaaatcgggtaacttaacgctctatatagaaaaagacggccaagttacggttaacatggggcatcctaatttcgagccaagcaaaataccgctcaaagccagcaaacgtgaactcacctacattataagggctgaagaacacaccgtatttagtggcgcagtatctatggggaacccacactgtgtacttgaagttgacgatattgcgacagcgcaggttgatgtattgggtccactgcttgaaaaccacgaacgttttccacaacgcgctaacattggctttatgcaagttatatcgcaagagcatataaagctaagagtatgggagcgcggcgtaaacgaaacgctcgcatgcggcactggcgcgtgtgctgctatggtcattggccatatgcaaagcaagctttcaagcgcggtacaagtcgacctacctggtgggacacttcaaatacgttggagtggagaaggtcatccagtacgaatgacaggccctgctgaacacgtattcgatggacaagtcgcgttatgag

SEQ ID NO: 289457 - DNA, 382 bp, Unknown
  Bacterial polypeptide expressing nucleotide sequence isolated from the Sargasso Sea
tatgcaaaaaatagaatttacaaaaatgcatggactcggaaatgattttgttatcatagacaaaagatcaaatcaggttgaaataaatgataatttaataagaaaattaagcgaccgcagaactggtgctggatgtgatcaattaataaccattaatgagccaaaaaataataatgcagatattagcattgatatttttaatccagcaggagataaagcagaggcatgtgggaacggaactagatgtgttgcaaaaattctttttaatgaaaacaatgaaaaagaatctttaaaaatactatcagatgctggcacacttattgccaaaaaagttggagatcaaataaatgttaatatgggtactgttacaactgactgggaa

SEQ ID NO: 289458 - DNA, 753 bp, Unknown
  Bacterial polypeptide expressing nucleotide sequence isolated from the Sargasso Sea
tatggatatcaaagcttataaaatggatggtttgggcaatgactttgtaatcattgatcaaagaattaaaaatattgacttatcgaaagatcaaatagtcaaaatctgtaatagaaattttataggttgcgatcaacttataataataaaaaaaaatcctaatctagatgctaaactagaattttataactctgatggaggcaaatcaggtgcttgcggaaatggcacaaggtgtgttgctaatttcttatcaagagaaaataatcaaaaaaagattactgtttcaacttcttctggagttttaaaatcaaatattttagacaataattttgtagaaactgaaattggcatacccaaactaaaatggaatgaaattccattaagtgaaaatttagataccaaaaatcttaaaattaaaattttaaacaaaaataatattcaatatatatttggtactgcaataaatgttggcaatccacatattattttttttgtagaagatattgaaaattttgatttaaaaaaaattggacctgaaattgaaaaccataaactttttcctgaaaagtgcaatgttactcttgctaaagtaataaacaaaaatttaattaaagttaaagtttgggaaagaggagcgggattaacaaaagcctgtggaactgcagcatgcgcaacagctatagcaggaaatattaatggattagttgaaaaaaaaactgatatagaatttaaacttgggaaactggccatttt

SEQ ID NO: 289459 - DNA, 670 bp, Unknown
  Bacterial polypeptide expressing nucleotide sequence isolated from the Sargasso Sea
atgattaaaaagactaaaaaaaataacattccttttactaagatgcacggtttgggcaacgactttgtcattattgattggcgtggccaagaatcctcattacatgctgaccacataaaattacttggatcaagaaatttaggtattggatttgatcaattagcaataattagaaccggatcaagaaatgatattgcagcacacttagatttttggaactccgatggttcagtatcgtcaacatgtgggaatgcaactcgatgtgttgcagaccttttaatgtcagaaagaaactgtaaggaactaactgtatcaacaaatcatgacgaaattaaatgtaaaaaagtgaatggcgaattaatttctacaaatttaggacaacctaaaactatctggaatgaaattccattatcagtgaaatgtgatacactgagtttgccattgaaaggaaaacctgtggctacaagcatgggtaatccacattgtacctattttgttaaggatctagaagcgcatagtatacaagaaataggttcagcaactgaagttaattccctatttccagaacggaccaatgttcaaattgctgaggtaattgattcgtcttcagttagagttaaggtttgggaaaggggttgtggtgttaccatggcttcaggttcttctgctt

SEQ ID NO: 289460 - DNA, 705 bp, Unknown
  Bacterial polypeptide expressing nucleotide sequence isolated from the Sargasso Sea
tatgaacacgataattacaaataatttgccgtttatcaaaatgcacggcctaggcaacgattttgtcataattgatgccagggaaagagatatccagctaactcaaaaggttatatctggtattgcagataggcactttggcgtaggcttcgatcaactcgccgtaatatccaaaggtgaatttgatgcacaccttacattctataatgcagatggatctgagtctttggcgtgtggaaatgcaaccagatgcatagcccgttatttgatggacgaagggtctaaagaaaagttgatgcttaccacagcgcacggacagatacctgctatagatttaggaaatggtattacgtccgtaaatatgggccaacctgagctggaatgggacaaaatacctatatctaaaaatatctcaacgttggaactaccgatagaaggatcaccaactgctacaggaatgggcaatcctcattgtacgttctttgttgaagatgcagaaaaaataaatctagaagaaaaagggcaaaaatttgaaaatcaccccctattcccagaacggacaaatgtgcaatttgcatctatatccgccccagacaaaattagaatgcgcgtttgggaaagaggtgtaggcgtaactttggcatctggatcttcttcttgtgcaacggccgttgctgcaaacagacgagggttaactggaaaaga

SEQ ID NO: 289461 - DNA, 805 bp, Unknown
  Bacterial polypeptide expressing nucleotide sequence isolated from the Sargasso Sea
atggacggtttaggaaatgattttgtaatcattgatcaaagacataatcatattgaattaacaaatgatcaaataaaaaaaatatgtagtagaaattttattggttgtgatcaacttatatttataaaaaaaaatgaaaaaacagatgctagtatagaattttataattcagatggaggtacctctggtgcctgtggaaatggaactagatgtgtagcttatttattatcaaaagaaatgaataaagataaaattattctaggaactgaatctggaaatttagaatcaaaaattttaggagaaaaattagtagaaacaaaaataggcttagcaaaaactaaatggaatgaaattcctttattaaaagagttaaatactcttaatttaaattacaaaattattgataaaaataataaagaatattttggaggtacagcagtaaatgttgggaatccccatgttgttttttttattaataatattgaagattttaatttagaaaaaattgggccagaaattgaaaatgataaattgtttcctgaaaagtgcaatgtcactttagcaaaaataattgatgaaaatcatattaaaataaaagtatgggaaagaggtgccggcttaacaaaagcctgtggtacagcagcatgcgcaacagcttatgctgcaaaaattaatggtaaaataaaaaacgaaactgaaatagaatttgagctaggaaacctatcaatttatatagatgaaaatgaaaatatttcaatgagtggacctgtttcaaatatagatcaaattaatataaaaatttaat

SEQ ID NO: 289462 - DNA, 823 bp, Unknown
  Bacterial polypeptide expressing nucleotide sequence isolated from the Sargasso Sea
tatggaatttaaagcttttaaaatggacggtcttgggaatgactttgtaattattgatgaaagatttgataaaattaacctgaggaataaagacataataaaaatatgtaataggaaattcataggttgtgatcaattaatcattataagagaagctgatcaaaatgatgcggaattagtgttttataattcagatggaagcctggctggagcttgtggaaatggaacaagatgtgttgcttaccttttgtcgaaagaaaacaataaaaatgtgataactctaaaaactttaggtggtatgcttgagtcaaaaatttacgaaaatcaaattgttgaaacaaaaataggtccagggaaattaggctgggcagatattcctcttaaagaaaaaatggatactagaaatctaaactttaattttgaagatattcaagttgaaatgaaaaatggtactgcaataaatgttggaaatccacatgtggtatttttcgtagacgaacttgaaaaatttaatattgaaaaaataggacctaaaattgaaaatcataatttttttccagaaaaatgtaatgtaacaattgcaaaaaagataaatgaaaatcatattaaattaaaagtttgggaaaggggggctggacttacaaaagcttgtggcacagcagcttgtgcaacagctttggctggtaaaattaataatttaataaaatccccagtaaatcttgtatttgaattaggtaaacttgaaataaatattgatgataataattttatttctatgaaaggacctgtttcaaaaatacaggaaattaaaattaatttttaa

SEQ ID NO: 289463 - DNA, 805 bp, Unknown
  Bacterial polypeptide expressing nucleotide sequence isolated from the Sargasso Sea
atggatggtttaggtaatgattttgtcattatagatgttagagacaataaaataaatctctcagaacaacaaattattaaaatatgcgacagaaattttttaggttgtgatcaattgatattaatagacaaaaataatgaagccgacgctcagttaattttttataattctgacggaagcgagtcaggagcctgtggtaatggaaccaggtgtgttgcttatttgatttcaaaagagatgaataaaaaagaagtaaatttaattacaaaatctggcaaattatattctaaaattttaggtaaaaatttagtcgaaaccacaattggaaaagcaaaaactgattggagagaaataccacttagcaaaaataaaaatacaaaaaatttaggtattaaaattgaagataaaaatcaaaatatttttactggaggcacggcagtaaatgttggaaatccccacacaattttttttgttgataatattaataattttgatctagaaaaaattgggcctaaattagaaaccagcagtctatatccagaaagatgtaatataacccttgctaaaattgaaaataaaaaaaaaatttctgtcaaagtatgggaaaggggtgctggattaacgaaggcttgcggatcagctgcgtgtgcaacagcttttgctgctaatttaaatggcttagttggaagtcacgttgacatttgttttgatcttggcaatttatcaataatcttagagcataataattatattaaaatgaaaggttcagtctcggaaattgaaaaaataaaagtagaattataat

SEQ ID NO: 289464 - DNA, 826 bp, Unknown
  Bacterial polypeptide expressing nucleotide sequence isolated from the Sargasso Sea
tatgacaaattttaactttattaaaatgaatgggttaggcaatgatttcgtgatcattgatcaaagagatgaaccatttcagcttagtgaaaatcaaataaaaacgatttgtgatagaaagcagggtattggctgtgatcaactcatatatatacgaaattcagatcaaaatgaactttatctaatgaagttttttaattcttctggagaagaaattagtgcctgtggaaatggtaccaggtgtgtagcaaattatttaatgactgaaacaaattctaatgaaattaaaattaatactatcgagaaaatagtaaattgtaaaaaacttgaagataatattattagtgttgaaatgggaaaaccaaaatttcattgggacgaaattcccctttcacatgatgttaagcaagatgttcctaccttcaaacttggagaaaaattgataactaaccccttcttcgtaaatataggtaatcctcatgttattttttttgtaaatgatattaatgattacaatattgataaatttggtcctctaatcgagtgtaatgaattgtttccagaaaaaataaatgtaagctttgctaagatgattaataataataaaattttacttaatgtatgggaaagaggagcaggaaaaacagaggcatgtggaactgctgcttgtgcaacagtagtagctgcagttgaatctggacttagtgaaaataaagtcctagtaacattgccaggtggaaatttagatatacattataatgaagaaaaaaatattattatgactggacctacgcaattggattatgaaggagaatttaaaatatga

SEQ ID NO: 289465 - DNA, 555 bp, Unknown
  Bacterial polypeptide expressing nucleotide sequence isolated from the Sargasso Sea
ttggcaatccccatgcggtggtgcaagttgaagacttgggatcgctggacttcgagcgtctcggccctgccctggaacaacacccagccttcccggcccgcaccaatgtgcatttcgtgcaggtgcatgcccctaatcagctgcaagtgaaggtgtgggagcggggtgctggccccaccctggcctgcggcaccggtgcctgcgccaccgtggtggcgacccacctgcgtggagcctgcgctcgccaggtgacggtgcagcttcctggaggaccgctgcaaatcgactgggacagcaacaaccacatccagatggcgggtccagccgtctttgtttttgaaggtgttctgccgtcagccggtggcagtgatgctgttgaggtcatcgactgcgccagcctctgcagcgaaggctgcatccggccagaggcctgccctagtgctgcggcgagggaacaagcgatgacattccttgatcgtctgtcgctcgatgacatggtgggcttggcgaattcatcgctcgaagagcgcacccgccgacgtgccggcttctaag

SEQ ID NO: 289466 - DNA, 370 bp, Unknown
  Bacterial polypeptide expressing nucleotide sequence isolated from the Sargasso Sea
aatgtcgatgggaaacccccacgcgataattcgtgttgaagacctgactaagactgccgtaaaagatattggggagactctcggtagccaccctgattttccaaaaggagttaacgttggcttcatggaaatctattcaagggccgaaatcggacttcgggtattcgagagaggggctggcgaaactttagcttgcggtagcggggcatgcgcggccgttgtcgcgggcagaatactccaaaatttagatactaaggtgaaagtgagattacctggtgggcaactagaagtatgttggaaaggcttaggagattcagtagtcatgaaaggaccaactcagactgtttatgaagggatgatagagttatga

SEQ ID NO: 289467 - DNA, 811 bp, Unknown
  Bacterial polypeptide expressing nucleotide sequence isolated from the Sargasso Sea
atggcaaagatgctcaaattcaccaaaatgcatagtctcggtaatgatttcatgttggttgatgggttgagtcaagaagctgcgttcaatgtttcagagataaaaagttggagtaatcgcaacaccggcataggtttcgatcaattactcgtaattgagccgccggggtcacccgactcggattttttctttcgcatatacaatgccgatggctcagaggctgagcagtgcggtaatggcacccgttgtgcagcgaggttcgcgatagaaaagggattaaccaaaaaagaagtaattgaatggcaaagtctcgggggaaatttcgtgacctcttatcactccaataacgaaattcagactcagatcagcctcagcgaatctggctgcaaaaccatagagatagaaaatattggattagaagaaattcgcgaagtacatagcataaacataggaaaccctcacgccgtgacgttcgtcaataatattcataatctagatgttgatagcataggggcagccatatccaaaagccaagaattccccgagggtgtaaatgttggattttgccaagtcgttgataggggtttccttcgactgcgggtatttgaacgcggagtcggcgaaacgatggcatgtggtactggagcctgtgcagcttctattgtctcagcatcgaaagaattaactaacaataaggttaaggtctcaatgcccggcggcaaattgaaactagtcaatcaaccagaaaaagaatccatactactgacagggccggcagcgaaagtgtttgatgggaaattagagatatgac

SEQ ID NO: 289468 - DNA, 826 bp, Unknown
  Bacterial polypeptide expressing nucleotide sequence isolated from the Sargasso Sea
atggaaattaaagcttttaaaatggatggattaggaaatgattttgtaatcattgatcaaaggaaagaaaaaataagtctatctaacgatcaaataataaaaatttgtgatcgtcaattcataggatgtgatcaattaatatttattaaaaaaaataacgatttagacgcagaattagaattttacaattcagatggaagcaaatcagatgcttgtggaaatggcacaagatgtgtcgcacatttgctttcaaaagaaaatagtaaaaaagaaataaatttaattgtagcttcacaaattcttaaatcaaaaatttttgaaaataatttagtagaaacatcaattggatcacctaaaatgaattggaatgaaattccattaagtaaagaaatagatactaaaaatttaaaaataaaattagtagataaagaaaataaagaattttttggtggaatagcagtaaatgttggaaatccacatgtaattttttttatagaaaatatagataaatttaatcttgaaaaaattggtccagaaattgaaagtcatgaactatttcctgaaaaatgcaacgttactttagcaaaaaaaattagtccttctttgataaaagttaaagtttgggaaagaggggcaggtctaactaaggcatgtggtacagctgcatgtgcaacagcagttgcagcaaacttagaaaatctttcaaattcaaaaactgaaattgaatttagtatgggaaaattattagttagtatagataaaaatcataatataaaaatgatggggccagtctcagaaattaaagaaattaaaattaatatttaat

SEQ ID NO: 289469 - DNA, 832 bp, Unknown
  Bacterial polypeptide expressing nucleotide sequence isolated from the Sargasso Sea
tatggactcgataaatacaaataatttgccgtttatcaagatgcacggcctaggcaacgattttgtcgtaattgatgcccgcgaaagggatatccaactctctcaaagcgttatatctggcattgcagataggcactttggcgtaggcttcgatcaactggccgtaatatccaaaggtgaatttgatgcacatcttaggttctataatgcagatggatctgagtctttggcttgtggaaatgcaactcgatgcatagcccgtcatttgatggacgaagcgtctaaagaaagtttgattcttaccacaatgcatggacaaatacctgctgtagatttagggaacggcgtcacatcagtaaatatgggtcaacctgaactggaatgggacaaagtacctatatctaaaaatataccaaccttggaactaccgatagaaggatcaccaactgctacaggaatgggcaatcctcattgtactttctttgttgaagatgcggaaaaaataaatctagaagaaaaagggcaaaaatttgaaaatcaccccctattcccagaacggacaaatgtgcaatttgcatctatatccgccccagacaaaattagaatgcgcgtttgggaaagaggtgtaggcgtaactttggcatctggatcttcttcttgtgcaacggccgttgctgcaaatagacgagggttaactggaaaagaagtacagatagaactggacggcggcgttttaaatattagttggcgagaggaaggggtctggatgaccgggcccacaatgaaagtttttgccggtagcttttctgaagagtttttaaatagtttatga

SEQ ID NO: 289470 - DNA, 829 bp, Unknown
  Bacterial polypeptide expressing nucleotide sequence isolated from the Sargasso Sea
gatggaaataaacctttatatcttttctggcttaggaaatgttattgccttggtagacctgctgagagaagatttttgcttttcttcagaacaggtttcgaaaatagctgagttgggtgaagtggaatttgatcaactgatatgcattcttcctccagaaagtcctgatgtagatttgtctgcggaaatatataacgttgacggatcagtagcaaagaattgtataaatggagctagatgtcttgctaaatttgtcgttgatgaagagttgattgccaaaaaagaattctcagtcgccactttagggggtctttggaacttaaaggcacatcaaaacggagaatattcagttaaattcttaaatcccaacaatcttgatctaaaaaacaatctccctccagagaatgaaaaccataaacacattatctcgattgaaggaaatgaaattgagataggggttattgatctaggcaatcctcatgcagtcagtttcaaagaaatagctgatggaatggctttaaacttcataggtgatgcattacaaaatagtgactggtttcctgacggagtaaattttggattaggaaagattgtttctaataatgaaatagaattaagggtatacgaaagaggcgttggagagactttggcttgcggaagtggagcctgtgctgctgccctgattgccatagaagataaaactattgaagctcctgttaaagtgaactttgagaaaggaagtatatttatagattacaatgtagaaaataatgaaatattagctaaaggcgaggctaagttcattaaacaaataaacgtaacaatataa

SEQ ID NO: 289471 - DNA, 826 bp, Unknown
  Bacterial polypeptide expressing nucleotide sequence isolated from the Sargasso Sea
tatgaatattaaagcatttaaaatggacggtttaggcaatgattttgtaattattgataatagagaaaaagttacaaatcttactaaggatcaaataattaaaatttgtgacagagactttataggatgcgatcaacttatatttattaataaagaccaaaattacgatgcttctatagaattttttaactctgatggtggggtttctggtgcttgtggaaatggcacaaggtgtgtagctgagctattgggaaaagagaaaaataaaaacactattactttaactactttatccggccatttaaaatctcacatattaggagaaaaattagtgtctacagaaattggcttgggtagaactaaatggaatgaaattccattatctgaagaactagatacgaaaaacttaaatataaaaattgttgactcaaataataatgaattttttggaggaacagctgttaatgtgggaaaccctcatatagttttttttgtggaagacaatgagcaatttgcaatagaaaaaattggtccagaaatagaaaaccacaaactatttccagaaaaatgtaacgttacagtagcaacaatagtaaacaaagaattaataaaagttaaagtctgggaaagaggagctggtttgacaaaagcatgtgggactgcagcttgtgctacagcctatgctgctaaccaagcagggcttgtaagtaataaagttgacattgagttttctaccggaagattgacgatatctattgatgaaaataagagtatccacatgaaaggtcctgtttctgatataaaagaaattaatatagaaatttaa

SEQ ID NO: 289472 - DNA, 820 bp, Unknown
  Bacterial polypeptide expressing nucleotide sequence isolated from the Sargasso Sea
tatgcaaaaagtagactttataaagatgcatggtctaggcaatgattttgttattatagataaaaggtctaacaatattatgataacagaagatatcataaaaaaactgagcgacagaagaactggagcaggatgtgatcagttaattactattaataatacaaataatctaagtgctgatgctgaaattgaaatctttaatccaggtggtgatagagctgaagcttgtggtaatggtacacgctgcgtagcaaaaatattatttgatgaagatgctaataaagaagttttaaaaattcaatctgatgcaggaatattagaatcaaaaaaaatagataaaaatataagtgtcaatatgggattaattaaaaacacttgggataagattcccttaagaaaagaagttgatacgatgaatatacaaatttcaattgacggatatagtaatggagttgctgtaaatgttggtaatccacatgtagttttttttgggaaatcaatatatgagacaaatcttgagagcataggtcctaaaatagaaaatcatgaactctttccaaaaaaaactaatgttgaaatagttgaagttattaattcaaaattaattcaaatgagagtttgggaacgaggagtcggaatcacgttagcttgtggcagtggcgcctgcgcagctgtttatgcggcttggaaaaagggattgattgaaaataatgctgaagtgaaacttgaaaaaggatcactgtacataaatataattaatgatgaagctattatgacgggacctgcagaaataagttatcaaggtactttagaaatataa

SEQ ID NO: 289473 - DNA, 718 bp, Unknown
  Bacterial polypeptide expressing nucleotide sequence isolated from the Sargasso Sea
aatgaaaataccttttacaaagatgcatggtctaggaaatgattttgttataatagaaagtgatgctaattctgtttcaattaataaaaaattgattaaaaaaatatgttcaagaaattacggtgttggctgtgatcagttattgttgataaacagttattctaaagaggaagtagatttgactatttttaataatgatggttctgaagttggtgcttgtggaaacggagtaaggtgtgtggcatctatgattatggaaaaaaataatgttaaccaaatttacgtgaagacaattacagataagttgaaatgttggaaaaatggtaattcaattagtgttaatatgggtaagccaaggtttaagtggaaccaaattcctttgtcaaaaaatataaatccgaataaattaatgatagatggttataagattcattgtgtttcttttggtaatcctcatggtgttattttttttaataataaatcagaatttgagaatgtaaatattagagctattggaccaaagcttgaaaaaaatattattttcaaagaaggtgcaaatattgaatttgcaacaatattggatgatggtaaaatcaaaatgagagtttgggaaagagacgtaggaataacattggcctgcggctcaggtgcctgcgcaactcttgtattagcatctgttaataatttatctccgaagaaaaaaccagtatttatctag

SEQ ID NO: 289474 - DNA, 715 bp, Unknown
  Bacterial polypeptide expressing nucleotide sequence isolated from the Sargasso Sea
atgaaaaatataacttttgaaaaatatcaaggtaacggaaatgatttcgtagtaattgattctagaggaaatgatttatataaaaattacaagacaaataaaatatttgatataaaacaaatttgcaacaggcaatttggtattggagcagatggtgtgatttttatagaagaacctaatgaagataattatgcaaaaatgataatttttaattctgatggttctgaagcacaaatgtgtggaaacggaattaggtgtttagttgagtatctccacgtaaatgattcaatgaataataaaaatatagaatataaaattgagactaaagcaggtttaaaaattgcaaaatatataaatgatgaaattacagtaaaaatgggagttccaattttagaaagtcaaaatattccaacaacaattgaaaaaaaaataaattcaattccttcacacgaatttattgagaaaaattttaataatataggttatgcggtaggcatgggaaatcctcatttaatattctttgtaaaagacatagagtcaattattctttccagactaggtcctatatttgaaaaaaatgaattatttcctgaaaaaactaatgtgcatttttgtcaaattttaaatagagataatatcaaagtaaaagtatgggaaaggggggcaggaccaaccttagcttgtggaacaggtgcgtgtgctatccatgtggcag

SEQ ID NO: 289475 - DNA, 805 bp, Unknown
  Bacterial polypeptide expressing nucleotide sequence isolated from the Sargasso Sea
aatggacggtttaggcaatgattttgtaattattgataatagagaaaaagttataaatcttaccaaagaccaaataattaaaatttgtgacagaaactttataggatgtgatcaactcatattaattaataaagaccaaaattacgatgcttcaatagaattttttaactctgatggtggggtttctggtgcttgtggaaatggcacaaggtgtgtagctgagctattaggaaaagaaaaaaataaagacacaattacgttaacgactttatatggccatttaaaatctcatattttaggagaaaaattagtatctactgaaattggtttgggcagaactaaatggaatgaaattccattatctgaagaattagaaactaaaaacttaaatattaaaattgttgattcaaataataatgaattttttggaggaacggctgtcaatgtgggaaatcctcatataattttttttgtggaagacaacgaacaattcaaaatagaaaaaattggcccagaaatagaaaaccacaaactgtttccagaaaaatgtaatgtcacaatagccacaatagtaaacaaagagttaataaaggtaaaagtttgggaaagaggagctggtttgacaaaagcatgtggaactgcagcttgtgctactgcctttgctgctaagcaagcgggacttgctagcgataaagttaacatcgaattttctactggaagattgacaatatctatagatgaaaacaatagtatccacatgaaaggtcctgtttctgatataaaagaaattgatatagaaatttaa

SEQ ID NO: 289476 - DNA, 805 bp, Unknown
  Bacterial polypeptide expressing nucleotide sequence isolated from the Sargasso Sea
atggatggtctaggaaatgattttgtaatcattgatcagaggcacaattatattgagttaacaaatgaccaggttaaaaaaatatgcaatagaaattttattggttgtgatcaacttatatttattaaaaaaaatgaaaagattgatgcagatatgaaattttataattcagatggaagtgcttcaggagcttgtggaaatggaacaagatgtgtggcttatttattatcaaaagaaaagaataaaaataaaattatactaggtactgaatctggaaatttagaatcaaaaattttagaagaaaaattggtagaaacaaaattaggaccagcaaaaactaattggaatgagattcctttagtggaagagttaaatactattaatttaaaatataaaataatcgataataacaataaagaacattttggcggtacggcagtaaatgttggaaatccacatattgttttttttgttaataatatagaagattttaatttagaaaaaattggaccagaaattgaaaacgataaattatttccagaaaaatgtaatgttactttagcaaagataaataatgaaaatcatattaaagtcaaagtgtgggaaagaggtgctggactaacaaaagcttgtggtacagctgcttgtgcaacagcttatgctgcaaaaattaatggtaaaattaaaaacaaaactgaaatagaatttgaactaggaaaactgtccatcttcatagatgaaagaaaaaatatttctatgactggacctgtttcaaatattaatcaaattaatataaaaatttaat

SEQ ID NO: 289477 - DNA, 805 bp, Unknown
  Bacterial polypeptide expressing nucleotide sequence isolated from the Sargasso Sea
atggatggattaggtaacgactttgttattattgatcagagaataaataatttaaacttatcaaatgaccaaatcttaaaaatttgtgacagagatttcatagggtgcgatcagttgatctacataaaaaaaagtcaaaaagctgatgctgatgttgctttttttaactcggatggaagccgctcagatgcatgtggaaatggaactagatgcgttgcttatttactaagtattgaaaaaaataaaaaagaaattgaaattttggtatcctcaaaaatattaaaatctaaggtccttaataataaagatgttgaaacaataattggaactccaaatttagagtggaacaaaattcctttaagtaaaaatcttgatactaaaaatttatcacttggtatgattgatattgacggaaataaaatgaatggtggtattgcagtgaatgttggaaaccctcatgtcgtatatttttgcgaggatatagaaaaaataaatttaaaaaaatatggaccattaatagaaaatcatgaagttttccctgaaaaatgtaacgttacaatagctcaaaaaattagtgaacaacattacaaaattaaagtttgggagaggggcgctggtttaacaaaagcttgtgggactgcggcgtgtgcaacggcagtcgcagctaatttaaatcaactacaaaatagtaattcaaaaatagaattttcaacaggaattttaaatattcaaattgataatgaattaaatataaaaatgagaggtcctgtatctgaaattgaaaaaattaatatcaaaatataat

SEQ ID NO: 289478 - DNA, 820 bp, Unknown
  Bacterial polypeptide expressing nucleotide sequence isolated from the Sargasso Sea
atgcaaaaagtagactttataaagatgcatggacttgggaacgattttgttatcatagataaaaggtctaacaatatcgcaattactgaagatattattaaaagactcagtgacagaagaactggggcagggtgtgatcaattaatcacaattaataatacaagtaatcaaagtgctgatgctgaaattgaaatttttaatcctggtggtgatagagccgaagcttgtggtaatggaacacgctgcgtggcaaaaatactatttgatgaagattcaaataaagaaattttaaaaattcaatctgatgcaggcatattagaatcaaaaaaaatagataacaatataagtgtcaacatgggttcaataaaaaatacttgggataaaattcctttaagtaaagaagtcgatacaatgaatataccaatttcaattgatggatatagtaatggagttgctgttaatgtaggtaatccacatgtagttttttttgggaaatcgatcaaagatacagatcttgaaagtataggtcctagaatagaaaatcatgagctctttccaaaaaaaactaatgttgaaatagttgaagttattaattcaaatttaattgaaatgagagtttgggaacgtggagttggaatcacgttagcttgtggtagtggtgcctgtgcggctgtatatgcggcgtggaaaaaaggattgattgaaaataacgctgaagtgaaacttgaaaaaggttcactgcacataaatataattaataatgaatctattatgacaggacctgcagaaataagttatcggggtagtttagaaatataat

SEQ ID NO: 289479 - DNA, 169 bp, Unknown
  Bacterial polypeptide expressing nucleotide sequence isolated from the Sargasso Sea
tatgcaaaaaatagaatttacaaaaatgcatggtttaggaaatgattttgttatcattgatagaaggtcaaaaaagattgaaataaatgatgatttaattcaaaaattaagcgatcgcagaacaggcgctggttgtgatccattgattactattaataatcccaaaaat

SEQ ID NO: 289480 - DNA, 826 bp, Unknown
  Bacterial polypeptide expressing nucleotide sequence isolated from the Sargasso Sea
tatggacatcaaagcttttaaaatggacggattgggtaatgattttgtgataatcgataatagagaaaaaattaccaatttgacgaaagatcagatagttaaaatttgtgacagaaattttattggctgtgatcaactaatatttattgagccagatagttctgcagatgcaaatttaagattttttaattcagatggaggagagtctggagcatgcggaaatggaactagatgtgttgcaaatttgctttcaaatgaaaaaaataacaagtcaataattttaaacacaccatctggaaaattaaaatctgaaattttagagaaaaaaattgttacaacagaaattggtaaagcaaagttaaaatgggacgaaatacctttatcaaaagaaatggatacaaaaaacttaaatataaaaattattgatacaaataaaaatgagcacttaggaggcactgcaattaatgtgggtaacccacatattgttttttttgttaaaaagattgaggatttcaatatagagaaaattggccctgagatagaaaatcacgaaatcttcccagagaaatgtaacgtaacaattgcgcaaatttttaataaaaatttgatcaaagtaaaagtttgggaaagaggagctggtcttactaaagcttgcggaactgcagcgtgtgctacagcatatgcaggtaaattaaataatcttacagaaaataaaactgatatagagtttgcaactggaaaattatcaatttctatagatgaaaatgactctattcacatgaaaggacctgtttcaaatattaaagaaataaatataaaattgtaa

SEQ ID NO: 289481 - DNA, 862 bp, Unknown
  Bacterial polypeptide expressing nucleotide sequence isolated from the Sargasso Sea
aatgaaaaatataagttttgaaaaatatcaaggtaacggaaatgatttcgtaataatagattctagaggaaatgaattatataaaaattacaagacaaataaaatatttgatataaaaaaaatttgcaacaggcaatttggtgttggagcagatggtgtgatttttatagaagaacctaatgaagataattatgcaaaaatgataatttttaattctgatggttctgaagcacaaatgtgtggaaacggaattaggtgtttagttgagtatctccacgtaaatgattcaatgaataataaaaatatagaatataaaattgagactaaagcaggtttaaaaattgcaaaatatataaatgatgaaattacagtaaaaatgggagttccaattttagaatgtcaaaatattccaacaacaattgaaaaaaaaataaattcaattccttcacacgaatttattgagaaagattttaataatatgggttatgccgtaggaatgggaaatcctcatttaatattctttgtaaaagacatagagtcaattgttctttccagacttggtcctatatttgaaaaaaatgaattatttcctgaaaaaactaatgtgcatttttgtcaaattttaaatagagataatatcaaagtaaaagtatgggaaaggggtgcaggaccaaccttagcttgtggaacaggtgcctgtgctatccatgtggcagcttataaattaggcctttgtaattcacaaaccatagtaaccttaccaggaggtaatcttaaaattgattggtcaaaagacgattgtgaagtaatgatgaccggtaatgctaaaaaggttttctcaggatcaatgttagtaaattaa

SEQ ID NO: 289482 - DNA, 586 bp, Unknown
  Bacterial polypeptide expressing nucleotide sequence isolated from the Sargasso Sea
atgcaaaaaataaattttatcaaaatgcacggtctaggtaatgattttgtcatcattgatagaagagtcaatgaaattaacattacaaaagagttaataagcaaattaagtgacagaaaaagtggtgctggttgtgatcaattaatcactattaataacagtagtaaaaaagatattgatatagacgctgaaataaaaatatataatcctggtggtgatcaagcagaagcttgtggaaatggaaccaggtgtgtagcaaaattattatttgaagagctaaataaaaatgatatcaaaatactttctgatgctggaattttagtagctaaacaaaaagataataatattagtgtcaatttaggaaagctgacaactaattggaaaaaaatcccaataataaaagatatggataccatgaatgttccaataaaaataaatgactttagtaatggagtggctgtaaatattggcaatcctcatttagttttttttgggcaaaatataaatgatgtagatttaggaattataggacctggtatagaaaatcataagttttttcctaacaaatcaatgttgagattgtaga

SEQ ID NO: 289483 - DNA, 826 bp, Unknown
  Bacterial polypeptide expressing nucleotide sequence isolated from the Sargasso Sea
atggatatcaaagcgtttaaaatggatggtttaggtaatgattttgtcatcatagataataggcacaaaactacaaatttaactaaacaacaaataattaaaatttgtgacaggagatttatcggttgtgatcaattaattttgataaataaaaacaatacttcagatgcatctttagaattttataattctgatggtggaacttcaggagcatgtggaaacggaacaagatgtgttgcagatttattatcaaaagaaaataataaatctttaattattttaaccacacaatctggagatttaaaatcagagatattgggagacaggctagtttctacagaaattggaaaaggtaaaacagagtggaacgaaattcccctctctaaaaaactagacaccaataaccttaatatcaaaatatcggatttagataataataattatacgggaggagcggctgtaaacgttggaaatccccacgtaattttttttgttgataataacgaaaattttgaaataaaaaaaattggaccagaaattgagcaccatcctttgtttccagaaagatgcaatgtcactttagcaacagtcgttaataaggaattaataaaagttaaagtttgggagagaggagctggtcttactaaggcttgcggtacagcagcgtgtgctactgcatttgctgcaatgaaaaatggactttcaagtaataaggtggatatagagttttctacaggtaaattatcaatttttattgatgaaaataatagtattcacatgaaaggacctgtctcagatattaaagaaattaatataaaaatttaat

SEQ ID NO: 289484 - DNA, 862 bp, Unknown
  Bacterial polypeptide expressing nucleotide sequence isolated from the Sargasso Sea
aatgaaaaatataacttttgaaaaatatcaaggtaacggaaatgatttcgtaataatagattctagacgaaatgaattatataaaaattacaagacaaataaaatatttgatataaaaaaaatttgcaacaggcaatttggtattggagcagatggtgtgatttttatagaagaacctaatgaagataattatgcaaaaatgataatttttaattctgatggttctgaagcagaaatgtgtggaaacggaattaggtgtttagttgagtatctccacttaaatgattcaatgaataataaaaatatagaatataaaattgagactaaagtaggtttaaaaattgcaaaatatataaatgatgaaattacagtaaaaatgggagttccaattttagaatgtcaaaatattccaacaacaattgaaaaaaaaataaattcaattccttcacacgaatttattgagaaagattttaataatatgggttatgcggtaggaatgggaaatcctcatttaatattctttgtaaaagatatagagtcaattgttctttccagactaggacctatatttgaaaaaaatgaattatttcctgaaaaaactaatgtgcatttttgtcaaattttaaatagagataatattaaagtaaaagtatgggaaaggggtgcaggaccaaccttagcttgtggaacaggtgcctgtgctatacatgtagcagcttataaattaggcctttgtaattcacaaaccatagtaaccttaccaggaggtaatcttaaaattgattggtcaaaagacgattgtgaagtaatgatgaccggtaatgcaaaaaaggttttctcaggatcaatgttagtaaattaa

SEQ ID NO: 289485 - DNA, 793 bp, Unknown
  Bacterial polypeptide expressing nucleotide sequence isolated from the Sargasso Sea
aatggatggacttggaaatgacttcgtcataattgatcaacgtgaaaaaaaatatgatctaaacaattctcaaataaaaaaaatttgtgacagaggcaatattggttgtgatcaactaattcttataaataaaagtgataaatttgatgcatttctcacttttaaaaattcagatggctcggactccgcagcatgtggaaatggaactagatgtgtagctagcttgttatcaaaagaaagttcaaaaaactttattactgttgaaacttcttcaggaaaattagagtcgaaaatattaaaaaataatttgattcaaacaaatattggaaaaccaaaaactaattgggatcaaatacctctaagcgagaaaattgatacaaaaaaaataaaagttatggttggtgatattgagtttttaggaacagcaattaatgttggaaatcctcacattattttttttataaacgaattagaaaagatcgaaattaaaaaagttggaccgatcttagaaaatcatgaattatttcctgaaaaagttaatgttacttttgcaaaagagcaaagtaaaaatcattttaaagtattgcactgggaaagaggagctggtcttacaaaagcatgtggaactgcagcatgtgcaactgctgtagctggtgaaattaatggtatttcaaaatttccaactgaaatagaatttaaattaggaaaaattaaaatcaataaagatgaacaaggaaacgttattatggaaggttcagtctcagaaattgaacatattaatataaatatatga

SEQ ID NO: 289486 - DNA, 826 bp, Unknown
  Bacterial polypeptide expressing nucleotide sequence isolated from the Sargasso Sea
tatggaatttaatgcatataaaatggatggattgggcaatgattttataattattgatcagagagatagaaatacaattttatctaatgatcagattattaaaatttgtgatcgtaaattcctagggtgtgatcaattaatttatattaaaaaagataatgatttagatgcagaattagagttttataattcagatggaagtaaatcagatgcttgtggaaatggtacaagatgtgttgctcatcttctttcaaaagaaaataataaaaaagaaataaatctaaaagttgcatcaaaaacccttaaatcaaaaatttttgaaaataatttagtagaaacatcaattggatcaccgaagcttaattggaaagatatacctcttagcaagctctcagatacaaaaaatttgaagataaaaattattgatgaaaaagataaggaatattttggtggtatagcaataaatgttggtaatccacatataattttttttgtagacgatattgataacttcaatattgaaaaaattggtcctgaaatagaaaatcatgaactttttcctgaaaaatgcaatgtaactttggcaaagcaaattaatgaaaatttgatcagagtaaaagtttgggaaagaggcgcaggactaactaaagcatgtggtacagcagcatgtgctacagcagttgctgcgaatcttggaaattcatccgagtcgaaaactgagattgaatttagtacaggtaaactattaattaaaattgatgaaaaaaaaaatataagaatgatgggtccagtatcacaaattgaaaaaattaaaataaatatttaa

SEQ ID NO: 289487 - DNA, 826 bp, Unknown
  Bacterial polypeptide expressing nucleotide sequence isolated from the Sargasso Sea
atggaatttgaagcatttaaaatggatggattaggaaacgactttgttattattgatcagagaataaatagtttaaacttatcaaatgaccaaatcttaaaaatttgtgacagagatttcatagggtgcgatcagttgatctacataaacaaaagtcaaaaagctgatgctgatgttgctttttttaactcggatggaagccgctcagatgcatgtggaaatggaactagatgtgttgcttatttactaagtattgaaaaaaataaaaaagaaattgaaatttcggtatcctcaaaaatattaaaatctaaagttcttaataataaagacgttgaaacgataattggaactccaaatttagagtggaacaaaatacctttaagtaaaaatcttgatactaaaaatctatcacttggtatgattgatattgacggaaataaaatgaatggtggtattgcagtgaatgttggtaaccctcatgtagtatatttttgcgaggatatagaaaaaataaatttaaaaaaatatggaccattaattgaaaatcatgaagttttccctgaaaaatgcaatgtcacagtagctcaaaaaattagtgaacaacattacaaaattaaagtttgggagaggggtgctggtttaacaaaatcttgtgggactgcagcatgtgcaacagcagttgcagctaatttaaatcgactacaaaatagtaattcaaaaattgagttttcaacaggaattttaaatattcaaattgataatgaattaaatataaaaatgagaggtcctgtatctgaaattgaaaaaattaatatcaaaatatgat

SEQ ID NO: 289488 - DNA, 826 bp, Unknown
  Bacterial polypeptide expressing nucleotide sequence isolated from the Sargasso Sea
tatggatataagggcttttaaaatggatggattaggtaatgattttgtaataattgataatagacaaaagattaccaatttgactaaagatcaaatcataaaaatttgtgatagaaattttattggctgtgatcaattaatatttattgaatctagcaaatcaagtgatgcaaatttaaaattttttaattctgatggaggagagtctggtgcgtgcggaaatggtactagatgtgttgcaaaattaatctccgaggagacaaaatctgaaaatatcattttatcaacttcaaatggaaatttagagtcaaaaatattagataaaaacattgttacgactgaaattggtaaagctaagttacaatggaacgaaattcctttatcagaaaaactagatacgaaaaatttaaatattaagattattgattcaaataacaaagaacattcaggtgggacggcagttaatgttggaaatccacatattgttttttttgtaaacgaaattgaaaattttaatattgaaaaaattggacccgaaattgaaaatcataaaatttttccagaaaaatgtaatgttacaattgctacaataattaataaaaatttaattagagtgaaggtatgggagagaggagcggggctgaccaaagcatgtggaacagctgcatgtgcaacagcatttgctggtaaattaaatgatcttactgaaaataaaacagacatagaatttcaaacaggtaaattatcaattcttatagatgataaaaattcaatccacatgaaaggacccgtttcagaaataaaagaaattgagttcaaactataa

SEQ ID NO: 289489 - DNA, 826 bp, Unknown
  Bacterial polypeptide expressing nucleotide sequence isolated from the Sargasso Sea
tatggaatttaaagcttataaaatggatggtcttggcaatgattttgtaattattgaccaaagacaaaaaaatatagaattaagcaaagatcaaattgttaagatttgtgatagagattttattggctgtgaccaactaatttatattaacaatagtaatgatgctgatgctgaactagtattttataactctgatggctctggatcagatgcatgtggaaatggcacaagatgtgttgcgtacttactatcaaaagaaaaaaacaaaaaaaatataaaccttcgagtagcatcaaaacagttaaattcaaacctacttgatgatggtcaagttgaaacaataattggtgtaccaaaaacaaattggaaagaaattcctttatctgaaaatctagatactaaaaatttaggtataagtataagagataataacaaccatgaaatatctggtggtattgctgtaaatgtaggtaatcctcatactattttctttgttaatgaaatagcaaattttaatatagagaaaattggacctgagattgaaaatcatgaattatttccacaaaaatgcaatttaacactcgcacaaaaaataaatagaaattattataaagttaaagtttgggaaagaggtgcaggcttgacaaaagcatgtggaaccgccgcttgtgcaacagcagtagcagcaaatttagaaaatttagaaaatacaagaactgaaattgaatttagtttaagcaaattagtaatttctattgacgaaaatcaacaaattcatatgaaaggtccagtgtctagtatcaaagaaatagacataaatatctaa

SEQ ID NO: 289490 - DNA, 826 bp, Unknown
  Bacterial polypeptide expressing nucleotide sequence isolated from the Sargasso Sea
tatggaatttaaagcttttaaaatggatggccttggaaatgattttgtaattattgataatagatcaaataatgtcgaattaaccagggatcaaataattagaatttgtgatcgaaaatttattggttgtgatcaactaatatttataaacaaaagtaataaaggtgatgctgaaatggaattttataattctgatggaagtatttcaggcgcatgtggaaatggtacaagatgtgtagcatttttaatttttaaagaaacagacaaaaaagttgtagatctgtttgtaggatccaatcaattaaaatcaaaaatactagagaatagtgaagttgaaacaattataggagtaccaaaaactcattggaaagatattccaatgtctaaaaatcttgataccaaaaatttaggtattgaaattagtgataaaaataattcaagctcaaaaggaggtatagctgtcaacgttggaaaccctcatgtgatttttttcgtagataatattgatgattttgatttaaaaaaaattggtccaatggttgaaaataacagtttatttccagagaaatgtaactttacacttgcaaacaaaatcggaaataatcattataaagttaaggtttgggaaagaggagcagggttgaccaaagcatgtggtacagcagcatgtgcaacggcagttgctgcaaatttagaaaaattagaaaattcatctacagaaattgaatttagcttaggcaaattaataattaatattgatcaagacaaaaaaatccatatgaggggaccagtttcagagataaaagaaataaaaataaacatataa

SEQ ID NO: 289491 - DNA, 826 bp, Unknown
  Bacterial polypeptide expressing nucleotide sequence isolated from the Sargasso Sea
tatggaattcaaagcttataaaatggatggtctaggaaatgactttgtaattattgacagaagagaagatgatgtaaatctctctaaagaacaattaataaaaataggcaatagaaacaatgttggattcgatcaaataatctttattgaaaaaagggtcaaagatgcctttccaattaaaatttataatccagatggtattgaggtaggtgcatgtggaaatgggagtagatgtattgcttatttaatctcaaaagaaaataatcaaaaaaaaataaaattggaagcagacaaaagaattttagaagcagaaattttaggtgaaaaaatggtaaaaataaatatgggtttcacaaagtttaagggatggaaagatataccacttaaagagggattggatccaaggaaagtttcgatagattttgtagaaaaagaatatggacttggttactgcgtaaatgtaggcaatcctcatattgttttttttgttaaagattgcgaaaaagtagatattgaaaaaattggacctaaaattgaaaaccatcattattttcctgaaagagtaaacgtaacttttgcagaggtagcagacgattttaaaaatataaaagtaaatgtttgggaaagaggagcaggcaaaactaaagcttgtggaacggctgcatgtgcaactgtagtagttggatatctaaatggtttaacagaaagaatttgcaatgttcattttaaagaaggggcactggagattttttctgatatgggtaattgtaacgtacatatgactggacctgtatctgatattaaagagataaaattaaaaatttaa

SEQ ID NO: 289492 - DNA, 826 bp, Unknown
  Bacterial polypeptide expressing nucleotide sequence isolated from the Sargasso Sea
tatggaattcaaagcttttaaaatggatggtctaggaaatgattttgttatcattgatcaacgacaagatcaaattgagttaagcaatgatcaaataaaaaaaatatgtaatagaaattttattggctgtgatcaacttatatttataaaaaaaaatgaaaaaattgatgccgatatagaattttataactcagatggtagtttttcaagtgcatgtgggaatgggactaggtgtgtagcttatttattgtcacaagaaatgggcaaaaataaaattatactgggtactgaatcaggaaatttagaatcaaaaattttagataagcaattagtagaaacaaaaataggaccagcaaaaactaattggaatgaaattcctttggtagaaaaattagatacaattaatttaaattataaaattgttgataataataataaagaacattttggtggtacagtagtaaatgttggaaatccacatatcgtcttttttgtaaataatatagaagattttaatttagaaaaaattggaccagaaattgaaaacgataaattatttcctgaaaaatgtaacgttactttggcaaaaataattaatgaaaatcatattaaagttaaagtgtgggaaagaggtgcaggactaacaaaagcttgtggtactgctgcttgcgcaacagcttatgctgcaaaaattaatggtaagattaaaaataaaactgaaatagagtttgaactaggaaaactatcaatctttatagatgaaagtaaaaatatttctatgactggacctgtttcaaatattgatcaaattaagataaaaatttaa

SEQ ID NO: 289493 - DNA, 826 bp, Unknown
  Bacterial polypeptide expressing nucleotide sequence isolated from the Sargasso Sea
atggaattcaaagcttttaaaatggacggcctaggaaatgattttgtaatcattgatcaaagacataatcatattgaattaacaaatgatcaaataaaaaaaatatgtaatagaaattttattggctgtgatcaacttatatttataaaaaaaaatgaaaaaacagatgctggtatagaattttataattcagatggaggtacatctggcgcctgtggaaatggaactagatgtgtagcttatttattatcaaaagaaatgaataaagataagattgtgttagaaactgaatctggaaatttagagtcaaaaattttaggagaaaaattggtagaaacaaaaattggcttggcaaaaactaaatggaatgaaattcctttaataaaagagcttaatactaataatttaaattacaaaattatcgataaaaataataaagaacattttggaggcactgcagtaaatgttggaaatccacatattgttttttttattaataatatagaagattttaatttagaaaaaattggaccagaaattgaaaatgataaattgtttcctaaaaaatgtaatgtcactttagcaaaaataattgatgagaatcacattaaagttaaagtatgggagagaggtgctggcctaacaaaagcctgtgggacagcagcatgtgcaactgcctatgctgcaaaaattaatggtaaagtaaataataaaactcaaatagaatttgaactaggaaagctatcaatttacatagatgaaagtgaaaatatttcaatgagtgggcctgtttctagtataaatcaaatcaaaattaaaatttaat

SEQ ID NO: 289494 - DNA, 826 bp, Unknown
  Bacterial polypeptide expressing nucleotide sequence isolated from the Sargasso Sea
atggaatttaaagcttttaaaatggatggtcttggaaatgattttgtaattattgataataggtcaaataatgtggaattaaacaaggatcaaattattaaaatttgcgatcgaaactttattggttgtgaccaactagtctatattaacaacagtgataatgctgatgctgatctagagttttataattctgatggttcggcagctgacgcatgtggaaacggtacaagatgtgtagcctttttattatcaaaagaaaaaaatacaaaaaatataagcgttcaagtagcatcaaaacagttgaattcaaagttacttgatgatggtcaagttgaaacaataattggtgtaccaaaaactaattggaatgaaattcctttatctaaaaaactaaacactaaaaatttaggaattattatagaagataacaataaccaagcagtgagtggcggtatagctattaacgtaggtaatcctcatgctattttttttgtaaatgatgtagaaaatttcaatttagaaaaaattggacctgagatcgaaaatcatgaattttttccggaaaaatgtaatttcacccttgctcaaaaattaaatgaaaatcattataaaattaaagtttgggaaagaggtgcaggtttaacaaaagcatgtggaactgctgcgtgcgcaacagcagtggctgcaaatttagaaaaattagaaaattctagaactgaaattgaattcagtttaggaaaattaataatttctattgatgaaagtcaacaaattcatatgaaaggacctgtatctagtatcagagaaatagatataaatatctaat

SEQ ID NO: 289495 - DNA, 826 bp, Unknown
  Bacterial polypeptide expressing nucleotide sequence isolated from the Sargasso Sea
atggaattcaaagcatttaaaatggacggtctaggaaatgattttgtaatcattgatcaaagatatgatcatattgaattaacaaatgatcaaataaaaaaaatatgcaatagaaattttattggttgtgatcaacttatatatattaagaaaaatgaaaaaattgatgctgatatgaaattttataattcagatggaagcgtttcaggagcttgtggtaatggaaccaggtgtgtggcttatttattgtcaaaggaaattagtaaaaataaaattgtactaggtactgaatctggaaatttagaatcaaaaattttagaagaaaaattagtagaaacaaaaattggcttagcaaaaactaattgggatgaaattcctttggcaaaagagttggatactattaatttagaatataaaattattgataataataataaagaacattttggtggtacagcagtaaatgttggaaatccacatattattttttttgtaaataacatagaagattttaatttagaaaaaattggaccagaaatcgaaaacgataaattattccctgaaaaatgtaatgttactttggcaaaaataattaatgaaaatcttattaaagttaaagtgtgggaaagaggtgctgggctaacaaaagcttgtggcactgctgcgtgtgcaacagcttttgctgcaaaaattaatggtaaaattaaaaataaaactgaaatagaatttgaactaggaaaactatcaatttttatagatgataatggaaatatttttatgactggacctgtttcaaatatagatcaaattcaaataaaaatttaat

SEQ ID NO: 289496 - DNA, 862 bp, Unknown
  Bacterial polypeptide expressing nucleotide sequence isolated from the Sargasso Sea
atgaaaagaattactttcattaaaatgaatggtttgggaaacgactttgttattatggatagtcgttatctcaatttatcattagagactttaagtatcgatttaatttgtgatcggtatcgagggattggttgcgaccagttgctaattttgagtgagtcaaatagtgaagccgatgtaaatatgctcatttttaatgctgatgggactgaggctgaagcatgcggaaatggcttaagatgcgttgcaagttatgtaatgaatcttttaaatagccaacatgtggtgatagagaccactgcgggccttcttcctgcttggcgtcaatcgaatggggatattagggtaagtatgggaatacctaaatttgattggaattcaataccattagcgaaagaatgcgatccccttgcggctcctatatctcgtggagctttgaaatcaccaacgtgtatcaacataggaaaccctcatgcggtcttttttgttgatgatgcagactccgtcaatcttgttgaactaggtcctgagttagaggtccatcctatgtttccaaatcggtcaaacatagaagttgtatcaattttagataaaaatacaattaggatgagagtttgggagcggggtgcaggtgtcactgcagcctgcggatctggggcatgtgccgcaatggtggcggcaaatataaggggattagttggaagcagcgctaagattaagttagatggtggaattttgagagtggaattagaggagaatggagcggtttttttgtcaggacctattgcaactagtttctcaggagttatcgagcccccttacatcagtgattatataatagaagagacttcgaatgagtaaa

SEQ ID NO: 289497 - DNA, 406 bp, Unknown
  Bacterial polypeptide expressing nucleotide sequence isolated from the Sargasso Sea
atggaacttgaatttacaaaaatgcacggtctcggcaatgattttatgataattcattggccagatggtatggctttaccaagcaaggatattgtgcgccgtttggcggatagacgtatcggtataggttttgatcagctattagttctgcaaacacccattcaatcaggcgttgctgtttattatcgaatattcaattcagatggttcagaagttgaacagtgcggtaatggcgcacgatgcatagcctggcatcttgccgcagaatcagaaagcagcgaattagtactggaaagcatggccgggatagttgaggctaaattacagtctgatgatacggtggcgatcaaccttggtgagccaaattttatgccgacggcgctgccatttcttgtggatgctgaat

SEQ ID NO: 289498 - DNA, 615 bp, Unknown
  Bacterial polypeptide expressing nucleotide sequence isolated from the Sargasso Sea
aacagtgcggtaatggtgcacgttgctttgcacgttttgtgcgtatgaaaggcctgactaacaaacataaaattagtgtatcaaccaaatcaggtaacttaacgctctatatagaaaaagacggccaagttacggttaacatggggcaccctaattttgagccaagcaaaataccgcttaaagccagcaaacgtgaactcacctacattataagggctgaagaacacaccgtatttagtggcgcagtatctatggggaatccacactgcgtgcttgaagttgacgatattacgacagcgcaggtcgatgtattgggtccactgcttgaaaaccacgaacgttttccacagcgcgctaacattgggtttatgcaagttatatcgcaagagcatataaagctaagagtatgggagcgcggcgtaaacgaaacgctcgcatgcggcactggcgcgtgtgcagcgatggtcattggccatatgcaaagcaagctttcaagcgcggtacaagtcgacctacctggtggaacacttcaaatacgttggagtggagaaggtcatccagtacgaatgacaggccctgctgaacacgtattcgatggacaagtagcgttatgag

SEQ ID NO: 289499 - DNA, 817 bp, Unknown
  Bacterial polypeptide expressing nucleotide sequence isolated from the Sargasso Sea
tatgactataccatttataaaaatgcatggccttggaaacgatttcgtgatcatagatcaccgactatctactaacgtattagactcctctcaaatcactcatcttgggaatcggcgacgcggaattggctttgatcaacttttgacaatttttcctgcccgaggcgatggggatgtctttttgaagataaacaatccagacggaagtgaagccgaggcctgtgggaatgggacgcgatgcgttgcggacttagtaatgcgtgaaggcaatctttcaaaaattacaatagagaccgtcgccggcaagctttactgtcataggacccgtgataacaatgtttccgtcaatatgggcatagtaaaaactaactgggacgaaatccctctaatccaacctgcggacacatcgcgagttcaattagaagacgccccctttactgaatgttgttgtgtcaatatcggaaacccacatgctgtatttttttgcgatgacgctgacgctgtagatttacgtgcaattggaccgatcctggaaaaaaataaaatgttcccaaaaggagcaaatatcgaattcgcaacggtacaatcaaataatcaaatacggatgcgcgtatgggagcggggagcagggatcactgaagcttgtggttcaggcgcttgtgcggttttagtcgcctcagcccgaaacggcctaaccggacgaagggctgaagtaattctcgatggaggaagcttggatattgaatgggttgacgatggatcaatactaatgactgggccaacaacagtcagttttcgaggaaaaatctctgtttga

SEQ ID NO: 289500 - DNA, 688 bp, Unknown
  Bacterial polypeptide expressing nucleotide sequence isolated from the Sargasso Sea
atgcacgggttaggtaatgactttatggtgatagacgccgtcagccaaaatgtgtttttaaccaaagaacaaattaaaaagctggccgatcgcaattttggtgtaggttttgaccagttgctgatggtagaaccgccttatgatccggatctggattttcattaccgcatttttaatgccgatggctctgaagtcgagcaatgcggtaacggagcccgctgttttgccaagtttgtccgacataaaggcctgaccaataaatacaaaatttccgttagtactaaatccggcaaaatcactttgtatatagaacaggatggtcaggtcacggtcaatatgggcgtgccacagtttgatccggttaaggtgccttttaaggctcagaagcaggagctaaactatattttgcacagtgaagatgccaccactttatgtggtgtggtgtcgatgggcaatccgcacgcagtgatactggtggatgatattcaaacggcaccagtgcatcagtggggaccggtttttgagaatcacgaacgcttccctgagcgtgccaatataggttttatgcaggtgctgtcgccttctcatgtcaaattaagagtatgggaaagaggcgcaggtgaaactctggcttgcggtacaggcgcatgcgctgctgctgtggtaggccaaatgcagaaaaaattac

SEQ ID NO: 289501 - DNA, 892 bp, Unknown
  Bacterial polypeptide expressing nucleotide sequence isolated from the Sargasso Sea
gggcttggcaatgacttcctgatcttggagggtcgggcaggtcagctcccgtcattgattacgagccccgatccggattgggtgcgtttgatctgcgaccgtcgttttggcgtaggggcggatggactcatcctggcgttgccagctgacggtgaagcggatctacgcatgcggatcctgaatgctgatggatctgaagccgagatgtgtggcaacggcattcgctgtctggctcgtttcctcgcagatagtgatggcaatccgcctggaaccatctggtcgatagagaccctggctggcgtgatcagaccccagctgcagagcgacggtcaactctgtgtggatatgggccctcccttccttcagccgggtgacattccaacgacgttggagatggggccccggggatgtcctcagggggttgcagtcgtcggtgacgacgaacttgagattgctgccgtcggcatgggaaatccccacgtaattgtgccagtgcaggatcttcagtccatcccatttgatcgctgggggcatgagcttgaacaacatccgttgtttccagcgaaaaccaatgtccacttcctccagatccactcatcccgctcgttagagattcgtgtttgggaacgcggtgctggcccaactttggcttgcggtaccggcgcctgcgccacgctggtcgccgcatccctgcttggcctttgcgacgacagcgctgaggtgatgctcccaggtggtccgcttcaaatcagctggcctgatcgacagggccctgtgttgatgaccggtcctgccaaggctgcgttcgattgtgttctgagtcctgatctgatgccaagcaatggcgccatcgactccgccgtctctgttggcacggtccaggccgcttcac

SEQ ID NO: 289502 - DNA, 823 bp, Unknown
  Bacterial polypeptide expressing nucleotide sequence isolated from the Sargasso Sea
tatgcaaaaaataaattttatcaaaatgcacggcctaggtaatgattttgtcatcattgatagaagagtcaatgaaattaacattacaaaagagttaataagcaaattaagtgacagaaaaagtggtgctggttgtgatcaattaatcactattaataacagtagtgagaaagataatgatatagatgctgaaataaaaatatataatcctagtggtgatcaagcagaagcttgtggtaatgggactagatgtgtagcaaaattattatttgaagagttaaataaaaataatatcaaaatactctctgacgctggaattctagtagctaaacaaaaagataacaatgttagtgtcaacttaggaaagcttacaactaattggaaaaaaatccccataataaaagatatggataccatgaatgttccaataacaataaatgactttagtaatggagtagctgtaaatattggcaatcctcatttagttttttttggacaaaatataaatgatgtggatttagaaactataggacctaatatagaaaatcataagttttttcctaacaaaataaatgttgagcttgtggaaatcataaatagaaataaaattaaattaagagtatgggagcgaggagctggacttacactagcttgtggaagtggagcttgtgcttcagtatatgctggaatgttaaaaaatcttcttgaaaatgatgttgaagtaattttagaaagaggatcattgtatataaacatagttaatgatgaagcaataatgacaggtccagcagagataagtttttatggaagtttagattactaa

SEQ ID NO: 289503 - DNA, 583 bp, Unknown
  Bacterial polypeptide expressing nucleotide sequence isolated from the Sargasso Sea
catgacagcgtttttaaaaatgcatggtctcggcaatgatttcattgttcttgatgcgcgcgaacccgctacgggcatccccgatgtgatcagcgaggctgcgtcaaccgcgcttgctgaccgtcattttggcattggctgtgatcaaattcttgtgatccggtcttcacagaaggccgatattttcctgcagatcctgaatagtgatggcagtgtggcgatggcatgcggcaatggcacaagatgcgttgccgatcatattatgcaagagtgtgagcaggaccggcttagtattgagactgatgttggcattctgcaaagctggcggccagctgaatatcctaaccagattgctgttgatatggggccggcctatcttgactgggcggccgtgccattggccagcgaggcaaatacattagcagtggatcttgggccgcttgcaccagcgacagcggtttgtcattcgctaggaaacccccatgcagtgttgtttgttgatgatgctgaagcggtagatcttgataatgttggcccacagttggaacatcacccgctattcccagaacgggcgaatatttcc

SEQ ID NO: 289504 - DNA, 598 bp, Unknown
  Bacterial polypeptide expressing nucleotide sequence isolated from the Sargasso Sea
aatggaaatcccgtttaccaaaatgcatggactgggcaacgactttgttgttgttgataaccaatcattagagtttaggctaactaagccttccgtacaaaaaatagcagatcggcgacgaggtattggttttgatcagcttttaactattgagcctgctcgccgcaatggcgacctttttcttgatattaaaaatccagatggcactagcgccgaagcttgcgggaatggaacgcgatgcgtcgcatcactgataatgagcaaaagacaagctaacacactccgcatagaaactgttggtggactgctaatttgtgaaagaactaaaacaggagatgtaacggtcgacatgggtgaacctagtaccgagtggcatgaaataccactagctcgagaagctaacacgaaagacttagttttggaaaatatgccccaccagatattcacatgtgtgaatatgggaaatccacacgccgttctgttcagtgagaattgcgagttatttgaattagaaaaaattgggccaaaaatagagtgccacgaaatgttccctgataaaataaatgtcgaggttgcaacggtagagaataaaaataaa

SEQ ID NO: 289505 - DNA, 685 bp, Unknown
  Bacterial polypeptide expressing nucleotide sequence isolated from the Sargasso Sea
atgaaaatatccttcacaaagatgcacggccttggaaacgactttatgattttggactcaacgggaaaatccttagagctttcggctgaaaaaattaaagttctctcaaatagaaattttggtgttgggtttgaccaactcctattgattgaaaaagctacttccgaaacagtggatttccattatcgaatattcaacatagatgggagtgaagttcaacattgtggtaacggcgctcgttgttttgccacctatgtccatgaaaagggattaacagataaaaaccctatcaaagtgtcaactactaatcgtactctatctctgactattaatgatgatggagaagtctctgtcgacatgggatcaccggagtttaaccccgccatgattccattcctaagtgcatcaaaactcccaatctatgaaagatccattgagatttctggcgaagaatcagtaattttattctcggctttatccatgggcaacccacatgcggtaattagtgttgaagacctgacaaagactgccgtaaaagatattggagaggctctgtgcaatcattcggattttcctgagggcgtgaacgtaaattttatggaaattctgtcaagaaatgaaattcggctccgagtcttcgaaaggggcactggagaaacgctcgcgtgcggaaccggagcatgcg

SEQ ID NO: 289506 - DNA, 769 bp, Unknown
  Bacterial polypeptide expressing nucleotide sequence isolated from the Sargasso Sea
tttcaactcagacctaagctcattagaaaactctcggatagaatttttggcgtcggattcgaccaattactgctggtcgagaaagcatcaacaagtgaggtagatttccactatagaatctttaatacagatggaacagaagttgaacactgcggcaacggagctcgctgcttcgcaacattcgttcgggataaaggattatcaaataaggatttgatagatgtgtcaacaattaatcgtaatttaaagttgactttccatgatgatggagaaatctcagtagatatgggacacccagagtttgatccatcaaaaatcccattcttatgtgactcaagactgaatatttatgaaagattcatcaaaatttcaggtgtaaaaacaacgatttctttttctgtattatctatgggaaaccctcatgcggtagtatgtgttgaagacgtagcgaatactgccgtaaaagatattggaaaagctctcggtagtcatccggattttactgagggagtcaacgttggatttatggaaatactttcaagggatacgatccaacttcgcgtttttgaaaggggtacgggtgaaactcttgcgtgcggaagcggagcatgcgcagcagtcgtggtgggaagactccttgaaaaacttaattcgaaggtcatcgtcaatctacccggcggacaattaactgtatgctgggatttgagtagctcagtaataatgaaaggaccaacccaaacagtttatgaaggaacaatagaaatatgaa

SEQ ID NO: 289507 - DNA, 487 bp, Unknown
  Bacterial polypeptide expressing nucleotide sequence isolated from the Sargasso Sea
tcagcgtcaacatggggcgcaccgcgcctgagcccggcgcaagtccccttccaggccgaacagcaggcgctcagctacccggtcgaagtcgatggccagagcgttgaattggccgccgtgtccatgggcaacccgcatgccgtgctgcgcgtcgacagcgtcgagcaagctccggtgcacagcctcgggccgaagctcgaacaccacccgcgcttcccgcaacgggtgaatgtcggcttcctccaggtgctcgaccgcaagcacgccaagctgcgcgtctgggaacgcggcgccggggaaacccaggcctgcggtaccggcgcctgcgctgcggccgtggcggcgatcagccagggttggatggattccccgctgcagatcgaactaccaggcggcaaactgagcatcgagtgggcaggtccgggacagcccgttatgatgaccggacccgccgtacgggtgtacgaaggacaagtccgcttatgac

SEQ ID NO: 289508 - DNA, 586 bp, Unknown
  Bacterial polypeptide expressing nucleotide sequence isolated from the Sargasso Sea
tgcgcgctttgttcgtaataaagggctgacgaataagaataaaattcgcgtgagcacctctgcgggtaagatgactcttcgcctcgaacgtgacggcaccgtcactgtgaacatgggtgtgcccgtgctcgacccaagccaaattcctttcaaagccaaaaaggccgaaaaaacctacttgctgcaaacaccacaacaaacctttttatgtggtgcggcctcgatgggcaacccccattgcgtgctcgatgtcgaagatgttgctaacgccaatgtcgccgaaattggtgcgctgctcactaagcatgagcgcttcccgcgcggagtaaacgtcggctttatgcaggtggtaaattcgggccatatcaagcttagagtttatgaacgtggtgcggccgagaccttagcctgtggtactggcgcttgtgccgctgtggtggttgggcaaatccaaggcaaactcgatcaacaggtacgtgtcgacttgccgggtggcaccttaaccatcaattgggaaggcgaaggcaaacccctgtggatgacggggccggcgcagcacgtttacgatggacaaattcagttatga

SEQ ID NO: 289509 - DNA, 829 bp, Unknown
  Bacterial polypeptide expressing nucleotide sequence isolated from the Sargasso Sea
cttgatccaattcactaagatgcacggacttggcaacgattttatggtggtcgatggtgtcacgcagaacgtgttcttttcgcctgagcagatccgccgtttagctgaccgtaactttggcatcggtttcgaccaactcttgctggttgagccaccctatgatcccgacctcgactttcattatcgcatctttaatgccgacggtggtgaggtcgaaaactgcggcaatggcgcccgttgctttgcgcggtttgtccgtaataaggggctgacgaataagaataaaattcgtgtaagtacctctgcgggtaagatgacactgcgccttgagcgcgatggtactgtcactgtgaatatgggcgtgcccgtgctcgaacctagccaaatcccctttaaagccaaaaaggccgaaaaaacctatctgctgcaaacgccgcaacaaacctttttgtgtggtgcggcctccatgggcaatccccattgcgtgctcgatgtggaagatgttaccagcgcgaatgtcgccgaaatcggtgcgttactcaccaagcatgagcgattcccgcgcggagtaaacgttggttttatgcaggtggtgaactcgggtcatatcaagcttagagtttacgaacgtggtgcggctgagactttagcctgcggcacaggtgcttgtgctgccgtagtagtcggacaaattcaaggtaaactcgatcaacaagtacaagtggatttaccgggcggcagcttaaccatcaattgggaaggtgaaggcaaaccgctgtggatgacaggccctgcgcagcacgtttatgatggacaaattcagttatga

SEQ ID NO: 289510 - DNA, 518 bp, Unknown
  Bacterial polypeptide expressing nucleotide sequence isolated from the Sargasso Sea
gatgcatggtttaggaaacgattttattatttttgataatataaagaattctaaaattcatgacccaaaatttattaataaagtaagtaatagacgcataggaattggttgtgatcaagtattgattattgaaaatacaaatactcctgaaaattttaaagttaaaatttacaattctgatggctcagaaactggtgcttgcggaaatggtacaagatgtgtagctgattatctaatgaaaaagaatgacctaaaatctttaactattaaaagtgttagtaatgaattatattgttctaaaaccaacaatttagtcactgtaaatatgggtgtgcccaaatttagctggaatgaaataccattatcaaagaaacaagatacgcaaaatgtcaaattagacgagtttgaagctttttgtttatctatgggaaatccacacgcagttatttttataaataatttagaagagcttgagaatttgaatataaactctattggtcctcgtttagaaaacattc

SEQ ID NO: 289511 - DNA, 910 bp, Unknown
  Bacterial polypeptide expressing nucleotide sequence isolated from the Sargasso Sea
catgctgcagttcagcaaatatcagggacttggcaatgacttcctgatcctggaagggcggcaagggcagttgccgcaatcggtcgttgagccggaccccgtctgggtgaggcagctctgcgaccgacgcttcggaatcggtggtgacggcgtgattcttgcgctgccgccccaggggcagggtgatctgcgcatgcggattttcaacgccgacggcagcgaggcggagatgtgtggcaatggcatccgctgcctggcacgttttcttgccgacagcgacggtgacgctcctggcaaacgctgggcgatcgaaacgccggcgggcctgatccgtccggagctgcaaagcgatggtcagttgcgcgtcgacatgggtgctcccttcctggaaccctcaagcattcccacaactctcccgctggtggacgggttggcgaggggatcggccgatcttgcggatcgagcgctggaggtggcagcggttgggatgggaaatccccacgtcgtggtgccggtggaggacctcaacgcgattcccttcgacgcatggggggcggccctggaggttcaccatctgttcccggccaaaaccaacgtgcatttcctgcaggtgcacgcccgcaaccgtctggagatccgtgtgtgggaacgcggtgctggaccgacgctggcctgtgggacaggtgcctgcgccacccttgttgctgctgtcctgctgggactggctgacgaccatgccgaggtgatgctgcccggcggtccactccagattgcctggcctggacgtcatggtgctgttctgatgacgggtcccggccgtgtcggtgttcgatggggtgttgtcaccggatctgatgccggttggagagtcacccgttgcagagccgttgacgccagatgccgcggataa

SEQ ID NO: 289512 - DNA, 811 bp, Unknown
  Bacterial polypeptide expressing nucleotide sequence isolated from the Sargasso Sea
atgcacggtttgggcaatgactttatggtgatagacgctgtcagtcaaaatgtgttcttaaccaaagaacaaatcaaaaagctggccgatcgcaactttggtgtgggttttgaccagttgctgatggtggaaccgccatacgatccggatttggattttcattaccgtatctttaatgctgatggttctgaagttgaacaatgcggcaatggtgcacgctgttttgctaagtttgtcaggcataaaggcctgaccaataaatacaaaatttcggttagcaccaagtctggcaaaatcactttatatatagagcaagatggtcaggttacggtcaatatgggcgtgccgcagtttgatccggctaaagtgccttttaaagcacagaagcaagagctgaactatattttgcacagtgaagatgccactactttatgtggtgtggtgtctatgggtaatccgcatgcagtgatactggtcgatgatattcagacggctccagtgcatcagtgggggcctgtgtttgaaaatcacgaacgtttccctgaacgcgccaatataggttttatgcaggtgctgtcgccttctcatgtcaaattaagagtatgggaacggggcgctggtgaaactctggcttgcggcacaggtgcttgcgctgctgcagtcattggtcagatgcagaaaaaattacaaacccaggtaagggtagatttaccaggcggctcgttgcagatccgctggcaagggcctggccaacccgtcaaaatgacagggccagccgaacatgtttttgatggacaattattcttatgag

SEQ ID NO: 289513 - DNA, 829 bp, Unknown
  Bacterial polypeptide expressing nucleotide sequence isolated from the Sargasso Sea
ttgatccaattcactaagatgcacggactgggcaacgattttatggtggtcgatggtgtcacgcagaacgtgttcttttcgcctgagcagatccgccgtttagccgaccgtaactttggcataggtttcgaccaacttttactggttgagccgccctatgatcctgatttggattttcactatcgtatctttaatgccgacggtggtgaggtcgaaaactgcggtaatggcgcccgttgttttgcgcgctttgttcgcaataaagggctgacgaataagaataaaattcgcgtgagcacctctgcgggtaagatgactctgcgcctagaacgtgacggcaccgttactgtgaacatgggcgtgcccgtgctcgaccctagccaaattcctttcaaagccaagaaggctgaaaaaacctatctgctgcaaacaccacaacaaacctttttatgtggcgcggcctctatgggcaacccccattgcgtgctcgatttcgaagatgttgctaacgccaatgtcgccgaaattggcgcactgctcactaagcatgaacgcttcccgcgtggagtaaacgtcggctttatgcaggtggtaaattcgggccatatcaagcttagagtttatgaacgtggtgcggccgagaccttagcctgcggcactggggcttgtgccgccgtggtggtagggcagatccaaggtaaacttgaccaacaggttcgtgtcgacttgccggggggcaccttaaccatcaattgggaaggcgaaggcaaaccgttatggatgacggggccggcgcagcacgtttacgatggacaaattcagttatgac

SEQ ID NO: 289514 - DNA, 688 bp, Unknown
  Bacterial polypeptide expressing nucleotide sequence isolated from the Sargasso Sea
atgcaaaaaatagaatttacaaaaatgcatggacttggaaatgattttgttatcatagataaaaggtcaaatacggttgaaataaatgataatttaattaaaaaattaagcgatcgcagaactggtgctggatgtgatcaattaataaccattaatgaaccaaaaaataataatgcagatattagcattgatatttttaatccagccggagataaagctgaggcatgtggtaacggaactagatgtgttgcaaaaattctttttgatgaaaataatgacaaagcatctttaaaaatcttatcggacgctggcacactaattgcaaaaaaagtgggagatcaaataagtgttaatatgggcattattacaactgactgggaaaaaataccgcttagtaaagaaacaaatacattaaatgttccaatccacgttgaaggatttgatgttggggttgcagtaaatattggtaatcctcacatagtcttttttggcaaatcaattgaaaatgttaatttaagtgaaatcggtcctaaaatagaacaacatcacttgtttcctaataaaactaatgttgaattcattgaagtagtaaattcaaataaaattaaaatgaaggtatgggaaagaggggctggaataacacttgcatgtggaagtggagcttgcgctgcggtttatgctggatgaa

SEQ ID NO: 289515 - DNA, 931 bp, Unknown
  Bacterial polypeptide expressing nucleotide sequence isolated from the Sargasso Sea
catggcgcggcgtcgagcacgccgcgctgaccgcctcgttcgccatggaaatccggacccagtgaaactctcgttcaccaagatgcacggcgcgggcaacgacttcgtcgtgctcgacggctattcgcgcgcactgccgccgctcaccgaagcgcaggtgcgtgcgctcgccaatcgtcacttcggcatcggcgccgaccagctgctgctcgtcgaaaaaccgaccgtcgacggcgtcgatttcaagtaccggatcttcaattgcgacggcggcgaggtcgaacactgcggcaacggcgcgcgctgcttcgtgaagttcgtcagcgaccgcggcctgaccgacaagcgcagcgtgcgcgtgcaggtgatgaagggcctgatcacgctgacgatgcaggacaacggcgaagtcgtcgtcgacatgggtgcgcccgtgttcacgccggcgcaggtgccgttcgacgcagcgggcctcgaaggccgcaccgagggccgcgacacgctgtggccgctcgacgtcggcggcgcgacacgctggatctcgacggtgacgatgggcaacccgcacgcggtgcaggtcgtcgacgacaccgaagcgtatccggtgctggaagaaggcccgctgatcgagcatcacgcgcgcttcccggagcgcgtgaacgccggcttcatgcagatcgtgtcgcgcagcgaggtgaagctgcgcgtgtacgaacgcgcggcaggcgagacgctcgcgtgcggcaccggcgcatgcgcggcggtcgcggccggcatccggcgcggcctgctcgattcgcccgtgaccgtgcacacgcacggcggcacgctgacgatcagctgggacggcgcgcgcgacgaagccgccgcgctgatgatggccgggcccgccacgaccgtgttcgaaggcgagatcgacctgcccgcctga

SEQ ID NO: 289516 - DNA, 829 bp, Unknown
  Bacterial polypeptide expressing nucleotide sequence isolated from the Sargasso Sea
cttgatccaattcactaagatgcacggacttggcaacgattttatggtggtcgatggtgtcacgcagaacgtgttcttttcgcctgagcagatccgccgtttagctgaccgtaactttggcatcggtttcgaccaactcttgctggttgagccaccctatgatcccgacctcgactttcactatcgcatctttaatgccgacggtggtgaggtcgaaaactgcggcaatggcgcccgttgctttgcgcgctttgtccgtaataaggggctgacgaataagaataaaattcgtgtaagtacctctgcgggtaagatgacactgcgccttgagcgcgatggtactgtcactgtgaatatgggcgtgcccgtgctcgaacctagccaaatcccctttaaagccaaaaaggccgaaaaaacctatctgctacaaactccacaacaaacctttttgtgtggtgcggcctccatgggcaatccccattgcgtgctcgatgtggaagatgttgccagcgccaatgtcgccgaaatcggggcgctactcaccaagcatgagcgattcccgcgcggggtaaacgttggttttatgcaggtggtgaactcgggtcatgtcaagcttagagtttacgaacgtggtgcggctgagactttagcctgcggcacaggtgcttgtgctgccgtggtagtcggacaaattcaaggtaaacttgaccaacaagtacaagtggatttaccgggcggcagcttaaccatcaattgggaaggtgaaggcaaaccgctgtggatgacgggcccagcgcagcacgtttatgatggacaaattcagttatga

SEQ ID NO: 289517 - DNA, 811 bp, Unknown
  Bacterial polypeptide expressing nucleotide sequence isolated from the Sargasso Sea
atgcacggtttgggcaatgactttatggtgatagacgccgtcagccagaatgtgttcttaaccaaagaacaaattaaaaaactggcagaccgcaactttggtgtcggatttgaccagttgctgatggtggagccaccttacgatccggatctggattttcattaccgcatctttaacgccgacggttcagaagtagaacaatgcggcaatggtgcgcgctgttttgctaagtttgtccggcataaaggcctgaccaataaatacaaaatttccgttagtactaaatccggcaaaatcactttgtatatagaacaggatggtcaggtcacggtcaatatgggcgtgccacagtttgatccggttaaggtgccttttaaggctcagaagcaggagctaaactatattttgcacagtgaagatgccaccactttatgtggtgtggtgtctatgggcaatccgcacgcggtgatactggtggatgatattcagacggctccagtgcatcaatgggggccggtgtttgaaaatcacgaacgcttccctgagcgtgccaatataggttttatgcaggtgctgtcaccttctcatgtcaaattaagagtatgggaacgtggcgcaggtgaaactttggcttgtggtacaggcgcttgcgctgctgcagtcattggtcagatgcagaaaaaattacaaacccaggtaagggtagatttaccgggcggctctttgcagatccgctggcaagggcctggccaacccgtcaaaatgacagggccagccgaacatgtttttgatggacaattattcttatgag

SEQ ID NO: 289518 - DNA, 832 bp, Unknown
  Bacterial polypeptide expressing nucleotide sequence isolated from the Sargasso Sea
atgcaggttcaattttctaaaatgcacggtttgggtaacgatttcatggttattgataacgttactcagaacgtctttttctctaaagaaaaaattcagcaactggctaaccgaaacttcggcattggcttcgaccagctgttgatggtggaaccgccttacgatcctgaacaagacttccactatcgtatcttcaacgcggacggttcggaagtagagcagtgtggcaatggcgcgcgctgcttcgcacgttttgttaagcaaaaaggtctcattaatcgcaacaaaattgtcgtaagcaccaaagctggaaaaatggtgctgtatcttgagaaagatggtcaggttactgtgaacatgggtaaacctgaattcgaacctgcgaatattccacttaaagccaataagcaagaaaacacctacatattgcgagtcggcgagagcacgctattcattggttcggcatcgatgggtaacccacattgcgtgatggaagtcgacgacgttgatactgctaatgtggccgagattggtccgcttgttgaaaagcacgaacgcttccctgaaggcgtaaacgttggctttatgcaaataatcaatgagtcacatattaaacttcgcgtatttgaacgaggttcaggtgagaccttggcctgtggtagcggcgcttgtgcagcggttgcaattggccagattcagggtaaattaggaaaagacgtgcgggtggacttacccggaggcagtttacgtatacgctggcctggcccagataacgtgttaaaaatgacagggcctgctgagcacgtgtacgacggacatataaatctatgag

SEQ ID NO: 289519 - DNA, 754 bp, Unknown
  Bacterial polypeptide expressing nucleotide sequence isolated from the Sargasso Sea
atgcaaaaaataaattttatcaaaatgcacggcttaggtaatgattttgtcatcattgacaaaagggtcaataaaattaccattacaaaagaattaataagtaaattaagtgatagaaaaagtggcgctggttgtgatcaattaatcactattaataacagtagtgagaaagataatgatatagatgctgaaataaaaatatataatcctagtggtgatcaagcagaagcttgtgggaatggaactaggtgtgtagcaaaattattatttgaagagttaaataaaaataatatcaaaatactctctgacgctggaattttagtagctacacaaaaagataaaaatattagtgttaatttaggaaagcttacaactaattggaaaaagatccctatgacaaaagatatggataccatgaatgttccaataaaaataaatgattttagtaatggagtagcagtaaatgttggtaatcctcatttagttttttttggacaaaatataaatgatgtggatttaggaattataggacctaatatagaaaatcataatttttttcctaacaaagtaaatgttgagcttgtagaaatcataaatagaaataaaattaaaataagggtatgggagcgaggagctggacttacactagcctgtggaagcggagcttgtgcttcagtatatgctggaatgttaaaaaatcttcttgaaaatgatgttaaagtaattttagaaagaggatcctattgtatataaa

SEQ ID NO: 289520 - DNA, 850 bp, Unknown
  Bacterial polypeptide expressing nucleotide sequence isolated from the Sargasso Sea
tatggcaggaatggtaaattttacgaaaatgcatggaataggaaatgattttgttattattgattgccgtgatggtattgagttaaacgaaattgtggcaaaaaaaattgcaaacagaaggtttggaataggttgtgatcaaataatattacttaaaaatccattattaggtaatgacatcttattagaatttattaataatgatggttcgttatcttcagcttgtggtaatggaacaagatgcgcagcaaaacttatattcatagaaaattcaacaaataatatcaacattgagacaaacgcagggatattagaagcgtggaaagataataactcaaatttgatttcagttaatatgggtaaaccaaattttatttggaatgaaataccattatctaaaaatattgatcatacaaatgttgatttaggatttgagaaaggcaataatgctttttgtttgtcaatggggaaccctcatgcagtgttttttgtagatagtgttgaaagtgtaaatgtttctttggttggtccaaagcttgaaaatcatcctattttccctgaaaaagctaatatttcattcgcagaggtcaaatctaagtcaaaaataaaaatgaaagtatgggaaagaggagcaggacaaactgcggcatgtggaagtggagcatgtgctgtagcagttgcagcaaaacaactatccaaaattgataataattgtgagataattcttgacggtggtatcttgaatgtaacaattcttgatgatgaaagtatagttttaaaaggaccaactgaaatttcgtttcaaggcacgtttggtgacagaattaacaagttaattaaatctaattaa

SEQ ID NO: 289521 - DNA, 819 bp, Unknown
  Bacterial polypeptide expressing nucleotide sequence isolated from the Sargasso Sea
tgcaaaaaatagaatttacaaaaatgcatggtttaggaaatgattttgttatcattgatagaagatcaaaaaagattgaaataaatgataatttaattcaaaaattaagtgaccgcagaacaggtgctggttgtgaccaactaattactattaatgatccaaaaaaaaatgatgttgatgttagtattgatatttttaatccagcaggtgataaagcagaagcatgcggaaatggcactaggtgcgttgcaaaaattctttttgatgaaaataatgaaaaagaaactctaaaaattatttcagacgcagggagtttgattgctaaaaaagctggtgatgaaattagtgttaatatgggtaaaataacaactgactggaaaaaaataccgcttagtaaagaaatggattcattaaatattccaattcatgttgaaggatttgataaaggagttgcagtaaatatagggaatcctcatattgttttttatgggaaatcaattgaaaacgtggatttaaatgcaataggaccgatggtcgaaaaacatcatttttttccaaataaaactaatgttgaatttatcgaagtagtaaattcgaatacaattaaaatgaaggtttgggaaagaggagcgggagtaacacttgcatgtggtagtggtgcttgcgctgctgtttatgctggatggaaaaaaaaattgatagaaaaaaattctcaagttcagcttgaaaaaggctctttacacataaatatagatgcagatgaagctatcatgactggtccagcagaaattagttacaatggttatattgaaatttaat

SEQ ID NO: 289522 - DNA, 832 bp, Unknown
  Bacterial polypeptide expressing nucleotide sequence isolated from the Sargasso Sea
atgttgatagatttttccaagatgcacgggctggggaacgacttcatggtggtggatggcgtcacccagaaggtgtttttcagcaatgaggtcatcaagaagctggcggatcgccacttcggcatcggcttcgaccagctgctgctggtggagccgccctatgatcccgagctcgactttcactaccgcatcttcaatgccgatggcagcgaggtggagcagtgcggcaacggtgcccgctgtttcgcccgtttcgtgcgcctcaaggggctgatcaaccgggatcgcatcgcggtgagcacggcgcgtggccgcatcgtgctgcagctggaaggggagaaccaggtcacggtcaacatgggggtgccccagttcgagccgggcaagatcccgttccgggcccagaaggcggaaaaaacctacctgctgcgggcccaggagcatactgtgatgtgcggggccgtctccatgggcaatcctcactgcgtcatcgaggtgccctctgtggccgatgcaccggtggcgaccctgggtcccatcatggagcgacacgagcgctttcccgagcgggtcaacgtcggcttcatggagatggtgaacgccagcgagatcaagctgcgggtgttcgaacgcggggtgggcgagaccctggcctgcgggaccggcgcctgcgcggccgtggtggtgggcatcagccagggcaagctcaaggagcgggtcaccgttaccctgccggggggcaagctgaccatcgcctggaaggggccgggtcagccggtctatatgaccgggccggccgagcacgtatttgacggtcagatagagttatagg

SEQ ID NO: 289523 - DNA, 646 bp, Unknown
  Bacterial polypeptide expressing nucleotide sequence isolated from the Sargasso Sea
aatggctagatgtttggttacaggacacagaggttatattggaagtcgactctttaaaaagctagaagagttagggcacgaagttgtcggaatcgatcgcttcgaagggatcgatattaatagcgtgtccggattgatcgaggcggaagacggtttatttcacccacactgggtcaattttaagcctgagtacgtttttcacctggcatgcatacctcgggttgcctatagcatagaaaggcccgttatgactatgaaaaacaacgttatagcgggaagcaatgcgttgaattttgcaagaaaaattggtgcaaagcgttttatatattctagttcttcgtcgatcaacggaaacggaaatggaccaactaatccttatgggctacaaaaaatggtgaccgaggtagaaactcgtctttattcagagctatatggattagatactgtttcattgaggtatttcaatgtatattctaaagaccaaaaagcgtcaggtccatatgcaactgcagtttcaaattggatgcaacatataagagacggcaagaatcctttcattactggagacggagaacaaagaagggacatgcttcatctagacgatgcggtatcggctaatatttttgccatggaatacgaagataat

SEQ ID NO: 289524 - DNA, 593 bp, Unknown
  Bacterial polypeptide expressing nucleotide sequence isolated from the Sargasso Sea
aatggcaagatgtttagttacaggtcatagaggctatattggctctaggctttttaaaaaattaaagcaattaggacacaaagttcaaggtatagacttacttgatgatgaatggaggggtcaggctggttatggcaaaaatgttattactacattatctgaaggtagtgatggcctttttcatccacattattttaatttcaaacctgagtatgtatttcatatggcttgttggccaagagttggatacagtgtagaaaatcctgtaaaaacagcaaaaaataatattcttgctggttctgtagttttaaattttgcacgcaaagttggcgcccaacgcgttgtatattccagctcttcatcggttgttggaaacggaaatggaccagcgagtccgtatgcacttcaaaaatatacaactgaattagaatgtaggatgtatcccgagctttatggaatggatacagtatctcttagatattttaatgtctattcttacgatcaagaggcatcaggcccatatgcaacagcagtttgcaattggatgaaagctgttagagagaatattgatccatttatcactggagatggtg

SEQ ID NO: 289525 - DNA, 778 bp, Unknown
  Bacterial polypeptide expressing nucleotide sequence isolated from the Sargasso Sea
atgaaatcaatagtaactggtggttgtggatttattggaacacatcttgtaaatcgtttggttaagttggggcatgaagttatagttttagatagagttcaacctaatgatataaatccaaaagtaagatattatcttcaagacctttcagaaaaatattcaaaatatattcatctctttgaaagtgttaataatgtatttcatttagcatctgaggtttctattccatattgtgtggaaaaacctaatgaaagtatggcaaataatgttttgtcaactatgaatgttcttgagtgtgcaagaatccacaatattgataagtttatattctcatctacctctgcggtgtatgggaatacaatgtttaatccaaactatgaaacaaatcaggtacaatgtctgaatacttattctatctctaagtattcaggtgagcagttgtgtaagatgtattatgagttgtatggacttaagacagtaatttttaggtattttaatgtttatggtgaaggacagcataagactggtcaatatgctcctgtaatgtctatatttaaaaggcagaaagacaataaggaaccactgacagttattgaacctggatatcagactagagactttgtacatgtttctgatgttgtttatgcaaatatccttgcatcacaaaaagatattgatgtctatggtgaagtatttaatattggtactgggactagaactgaaattcaagagattgctgatttgatgtcaaattatcaaattaaaatacccgaaagac

SEQ ID NO: 289526 - DNA, 679 bp, Unknown
  Bacterial polypeptide expressing nucleotide sequence isolated from the Sargasso Sea
atgctttcagattttaagcttgctccatcaattttatcagctgacttttcagacctaagaaatgcgctaaagatttgtgatgaaggcggggcagattggattcatgtagacgttatggacaatcagtttgttccgaaccttactataggtcctcctgtggttaaatcattgaggtccgttacagataagtttattgatgttcatatgatggtcatcgatccagaaaaattggtcgagccttttgcgagagctggagcagataatattacatttcatattgaggcgacagatgatccagagggtgttatagatttaatcagatcaactggtaaaatggtaggtatatcgttaaagccatcaactccctttgaaatgatcattccatttcttgagaaaattgatctaattctagtaatgagtgtagagcccggctttggtggacagggttacattgcacaatcaactgaaagaataatgcaaataagaaaatatctatcagagcagtgcttagatagaatacagatagaagtagatggagggatcaaacttcataacgctcaggaggttatttcggctggtggagatatactcgtcgcagggtcagaggtttttggctctgaagatccgcagagaattattaaagaattttattcagctgccaaaactattatttcttaat

SEQ ID NO: 289527 - DNA, 679 bp, Unknown
  Bacterial polypeptide expressing nucleotide sequence isolated from the Sargasso Sea
tatgctttcagatttcaagcttgctccatcaattttatcagctgacttttcagacttaagaaatgcgctaaagatctgtgatgaaggtggggcagattggattcatgtagacgttatggacaatcagtttgttccgaaccttactataggtcctcctgtggttaaatcattgaggtccgtcacagataagtttattgatgttcatatgatggtcatcgatccagaaaaattggttgagccttttgcgagagcaggagccgataatataacatttcatattgaggcgacagatgatccagagggagttatagatttaatcagatcaactggtaaaatggtaggaatatcgctaaaaccatcaactccctttgaaacaatcattccatttcttgagaaaattgatctaattctagtaatgagtgttgagccaggctttggtgggcagggttacattgcagaatcaactgaaagaataatgcaaataagaaaatacctatcagagcagtgcttagatagaatacagatagaagtagatggagggatcaaacttcataatgctcaggaggttatttcggctggcggtgatatactcgtcgcagggtcagaggtttttggctctgaagatccaaagggagtaattaaagaattttattcagctgccaaaactattatttcttaa

SEQ ID NO: 289528 - DNA, 379 bp, Unknown
  Bacterial polypeptide expressing nucleotide sequence isolated from the Sargasso Sea
tatgagtaaaaaatttaaattagctccttctatcttatccgctgatttttcaaatttacaatcagccttagatatatgttataatggaggagcccattggatccatatagatgttatggataatcaatttgttccaaatttaacgatagggccccctgttgttaaatctttgaggccaaaaacaaaaaagtttattgatgtccacatgatggttattgaacctgaaaaacttgtggaaccttttgcaagagccggagcagataatatcacattccatattgaaagtgttgataatccaaaacccattattgaccttattaagtcctgtggatgtaaagttggagtatctttgaaaccaagaacaccattatctgaaatc

SEQ ID NO: 289529 - DNA, 325 bp, Unknown
  Bacterial polypeptide expressing nucleotide sequence isolated from the Sargasso Sea
atgacccagaaatccttagtcatttcaccctcgattctttccgccgacttctcccggcttggtgaagacgtcaaggctgttgatcaggccggtgctgactggatccacgtggatgtgatggatggccgcttcgtgcccaacatcacgatcggaccgatgatcgtggaagcccttcgccctgtgaccacaaagcctcttgatgttcacttgatgatcatcgagccggaaaaatacgttgaggacttcgccaaagccggggctgacatcatcagtgtccaggtagaggcctgtacccacttgcaccgcaaccttgcccagatcaggg

SEQ ID NO: 289530 - DNA, 168 bp, Unknown
  Bacterial polypeptide expressing nucleotide sequence isolated from the Sargasso Sea
tatgagtgaccagaaaaatataattgcaccttctatcttagcatctgattttgcaagacttggagaggaggtacgtaatgttcttgatgcaggagctgattgggttcattttgatgtaatggataatcattatgttccaaatcttactatcggaccaatggtttgcaa

SEQ ID NO: 289531 - DNA, 205 bp, Unknown
  Bacterial polypeptide expressing nucleotide sequence isolated from the Sargasso Sea
ctgctcgcctccgaccttgcaaacctggccgccgagtcgaaggcggtgctggccgccggcgcagatgagctgcacatcgacgtcacggacggccacttcgtgccaaacatcacgttcagcacgccggttgtcgcatcgctccgcaaaaacatccccgacgccttcttcgactgccacatgatggtcagcaaaccatcgcagtgat

SEQ ID NO: 289532 - DNA, 205 bp, Unknown
  Bacterial polypeptide expressing nucleotide sequence isolated from the Sargasso Sea
tatgagtgactcaaaatacataatagcaccttcaatattagcctctaattttgctactttaggagaagaggttaagaatgtcttaagtgctggagccgattgggttcattttgatgtaatggataatcattatgttcctaatttaacaataggtcctatggtatgtaaatcattaagggattacggtattacagaatttatagat

SEQ ID NO: 289533 - DNA, 544 bp, Unknown
  Bacterial polypeptide expressing nucleotide sequence isolated from the Sargasso Sea
aatgcgatccggatttaaactagcaccttcaattttatctgcagatttctctgatcttagatctgccttagacatctgcaatgcgggaggtgcacactggattcatgtggatgttatggataatcaatttgtacctaatctgaccattggcccacccgtagtaaggtcattaagaccagtcacacaaaaatttatagatgtgcatatgatggtaattgaccccgaagaactagttgaaccctttgcaaaagctggtgctgataatattacctttcatatagaagccaccaatgacccagagggtattattgatcttattagatcttgcggtagtaaggttggagtatctataaagccaaagacccctttagaagatatttttcctatcttagataaggttgatgtagtactggtaatgagcgttgagccaggatttggtggtcaaggatatctaccgggatcgaatgaacgtattggacggataaggtcttatttagaggaaaattgtttagaccgagttctcatcgaagtagatggaggtata

SEQ ID NO: 289534 - DNA, 860 bp, Unknown
  Bacterial polypeptide expressing nucleotide sequence isolated from the Sargasso Sea
tgccggatcggcgcctcgatgctcgcgtgcgacctggcgtcgctcgcgtcggaggcggcgcgcgtgctggctgccggcgccgactacctccacctcgacgtgatggacggccactttgtgcccaacctctcgtggggcatgcccgtgatcaaggcgttgaggaagcacacatccggccacctcgacgtgcacctgatggtggcggagccggagaagtgggtcgagcagatcaagctcgccggcgcggacacgttcaccttccacctcgaggcgtgcaattccgccgccgccgtcctctcgctcatcgagcgctgccgccacctcggcatgaaggtcggcatcgccatcaagcccggaacgcaggcggaggccatcaagccttatttgagcctgatcgacctcgcgctcgtgatgacggtcgagcccggctttggcgggcagccgttcctcggcgagatgtgcgccaagatcgagcaggtccgcgcgtgggcgccgccgacgctcgacgtccaggtcgacggcggcctcacacccgagacggccacgagggcggccaaggcgggtgcgaacgtcctcgtcgccggctcgtcggtcttcaaagggcagccggaggaggcgatccaggcgatgcgcgacgcggtcgccaccgccgtgacaccggccacggaggcagcagcagcaacaacagcagcagcagcaggagcaggagcagcaggagcagcaggagcagcagcagaagaagagtcgggattgtcgtcgtcggaggaggctctgaagcgcgcggcaggctaccattccatcgacgcgcatgtacggagcggcatggccgtcggccttggcaccggctcgaccgcgtatta

SEQ ID NO: 289535 - DNA, 453 bp, Unknown
  Bacterial polypeptide expressing nucleotide sequence isolated from the Sargasso Sea
catgtccgatgtgttgatagcaccatcaatattatcatcaaatttttcatgtttagctgatgaaattaaagctattgataaagcaggtgcagattggatacatttggatgttatggatgggcacttcgtaccaaatcttacatttgggcctccaattattaaatccataagagattattcaaaaaaaccttttgatgcccatctaatggttactaacccagatgatcttttagaagaatacgtgaatgctggagttgatatgataactgttcacaaagaagtcactccacatttagatagaactttgaatcgtattcgtgaattaggatgtaaagcaggcgtttctattaatcctgccacctctatttcaggtctagagtttttgttagataaattagatctgattcttgtaatgacggttaacccgggttttggtggtcaagttttcattga

SEQ ID NO: 289536 - DNA, 270 bp, Unknown
  Bacterial polypeptide expressing nucleotide sequence isolated from the Sargasso Sea
tatgataaaaattgcaccctctattcttgctgccgatttacttaatattaagcacgaaatttcaagcgttgataaagctggagctgaatatattcatattgatgtaatggatggacattttgtcccaaatttatcttttggtcataatatggttagaagtctgaggccaattacaaaaaaaattctagatgttcatttaatgatcagccccgtaaaaccttatattgaagatttcataaaagctggagctgatataattagttttcatcc

SEQ ID NO: 289537 - DNA, 658 bp, Unknown
  Bacterial polypeptide expressing nucleotide sequence isolated from the Sargasso Sea
atgactgaggacctgattgttgcgccctctattctggctgctgattttagtagaatcggagatgaggtgaaagccgttgatgttgcaggtgctgattggattcatcttgatgttatggatggacattttgttcccaatttgacatttggaccgcccctgatcagagctttgcgtccgcacagcaagaaaacttttgacactcatctgatggtgtcaaacccagatgcattgctagatgaatatgcttctgccggatcagatatcatcactgttcatgctgaggcatgcccacaccttgatcgcacgctgagtcatattcgtgagcttggatgtaaagccggtgtctcgctgaatccgcatacgccaattgatgctttgcagcatgtgcttgataggctggatttgatccttgtgatgacggttaatccgggatttggaggacaaagcttcatcaataagatgctggataaaattactaaaatcagatcattgataggtgatcgtcccattgtcattgaggttgatggtggggtaacggctgataatgcaggcaaaattgtggcgtcaggggcgaaggcactagttgccggatcatcaatttttagaggaccgtcctatgcggataatattgctgccatccgcgctgctaccgcctaaa

SEQ ID NO: 289538 - DNA, 420 bp, Unknown
  Bacterial polypeptide expressing nucleotide sequence isolated from the Sargasso Sea
aatgcagaaagttcaaattgcgccatccatactctcagcagacttttcaaatcttgagagtgaaattcgaaccatagataaagctggagcagatatgctacacattgatgttatggatggacattttgtaaataatattacttttggtccagctctagtaaaatcaattcgaaacaagacgaacctcccattcgatgtacatcttatgattgatcctgtaattaaatatataacagaatttgctgatgcgggtgccgatataataactgtccatttagaagccaaagatgacacacggggagcaattgaattagttcgatcacttggaaaaaaagctggtattgccatcaatcctgaaactaaaattgatacgatcataccgtttcttgatgttattgatcaggtaattgtgatgtcggt

SEQ ID NO: 289539 - DNA, 427 bp, Unknown
  Bacterial polypeptide expressing nucleotide sequence isolated from the Sargasso Sea
tatgaaaaaaaataaacaatcaaattttatagcccctagtattttatctgcaaattttttgtctttaggtgaagagatagctgcgttagaaaaagctggtgctgattatattcattttgatgttatggataatcattttgttccaaatcttacgtttggtcctttgatttgccgagcagttcgatcaatagttaaagtccccatcgacgttcatctcatggcttctcctgttgataaattaatagaggattttattgacgctggagcaagtataatcacctttcatcctgaggcctcaaatcatattgacagaagtttgtccattgctcgtgctaatggctgtaaaactgggttagttttaaatcctgctacgtccatcgaatgtcttgattgggttctacctaaacttgacataatattaataatg

SEQ ID NO: 289540 - DNA, 676 bp, Unknown
  Bacterial polypeptide expressing nucleotide sequence isolated from the Sargasso Sea
catggacatctggatatcgccatcaattctcgccgctgatttttcacgattaggccaagaggttgaggatgttctcaatgcaggcgccaactcgatacactttgatgtgatggataaccattacgtgccaaaccttacgatcggcccgccggttctgtccgcgctgagacaattcggcatttctgcaacaatcgacgcccatcttatggtttcaccagccgatagactgataggggacttcatagaagctggcgcggattacgtttcgattcaccctggcacgactgaaaatctggaggccagcttactcagaataaaatcagaaggagcaaaggctggcatcgtttttaacccggacgaggaattggatctaccggactcattgaccgagattgtagacctaatcctcattatgtcggtctatccaggatttggaggccagtcattcattgacgcaagtcttgacaaagtagaggccgcgagaaaagtaatcaatcgctgtgaaaggtctattcggctgcaagtagacggaggaatcaaatcaagcaacattagcgaggtagccaaagctggagcagatacctttgtggcaggcacggcaatattcggcacttctgactacgcagccacaataaaagagttgaaacaaaaggttgctgaagtcaacgatgcctga

SEQ ID NO: 289541 - DNA, 250 bp, Unknown
  Bacterial polypeptide expressing nucleotide sequence isolated from the Sargasso Sea
tatgacttcggaattcaaattatctccatcaattttatctgctgacttttctaatcttcagcaagctttggatcaatgcagagatgggggtgctccctggatacatgttgatgttatggacaatcaatttgtacccaaccttactattggtccgcccgttgtaaaatctctccgatctaaaacagaaaagattcttgatgtccacatgatggttgttgaacctgaaaaattagtagaaccgtttgctaaa

SEQ ID NO: 289542 - DNA, 649 bp, Unknown
  Bacterial polypeptide expressing nucleotide sequence isolated from the Sargasso Sea
gttgatagcaccttcaatattatcagctaatttttcctatttagcgcaagaaatccaatcaatagataaggctggagctgactggatacatctagatgttatggatggtcattttgttccaaaccttacatttggacctccaattataaaatcgataagaccgtattcaaaaaagccatttgatgcacatttgatggtaacaaacccagacgatcttttagaagaatatgttgcttcaggtgttaatagaattacagttcataaggaggttacaccccatttagatagaactctaacgcgtatacgtgaattaggatgcaaggctggagtttcaatcaatcctggtactcctatttctgggttagaatttttattagataagttagacttgattcttataatgactgttaatcccggttttggtggtcagtcatttattaatacttcaatagataaaattaaattggtaagtgagttggttggaattagacccattaatattcaagttgatggaggtataaataaagaaattgttccaaaggtagttaaagcaggtgccaatgtacttgttgctggctcagccgtttttaaaggtggaaacattaaaagttatgaaaaaaatataaaagctcttcgttttaaatcttaa

SEQ ID NO: 289543 - DNA, 457 bp, Unknown
  Bacterial polypeptide expressing nucleotide sequence isolated from the Sargasso Sea
tatgaataattttatttcagcatctataatagcagcagatttctggaatcttgaacgagaatacaaagaattaaataaaactaaagtcgaatggatacactatgatattatggatggtcattttgtcccaaatattacaattggttcgtgtgaactagactccttagttaataagtcaaatatcgctatagatatacactttatggtttcaaatccagactatattgttccttactttgtagaaaaatataaaggtacaattgtaaaaaatataactgtacattctgaagtttgtattaatgtaaaaaaactctcagaaattgttagaaaaaatggaataaattttggtctagctattaaacctaagacatcaataaatagaatagttgagaatataggttttattgatttggcattggttatgactgttgaacctggttttgctgggcatcattaa

SEQ ID NO: 289544 - DNA, 313 bp, Unknown
  Bacterial polypeptide expressing nucleotide sequence isolated from the Sargasso Sea
tgcatcaaggacattacgtacctcctctccaagtcttgcaaagctttaagagaatacggcataaaagaatttattgatgttcatttaatgatagatccagtagatgaattggcccaaagctttatagatgctggagcagacttaattagttttcatcccgaagcaaccaaacatatccatagatcaattcacgcaataaaagacaaaggttgtaaagcaggacttgtttacaatcctgcaactccacttcacacgttagagagtgttcttgaggatctagatttagtattaattatgagcgtaaatcctggtt

SEQ ID NO: 289545 - DNA, 670 bp, Unknown
  Bacterial polypeptide expressing nucleotide sequence isolated from the Sargasso Sea
catgaggcgatctgtctggttggctccgtcgattttgtcggcaaattttgcttatttggcgcaggatgtgcaggctgttttggcggctggtgcagatgtgatccattttgatgttatggataatcattttgtgcctaatttaactataggccctatggtttgtcgtagtttgcgagatgctggaattaaggctcctatagacgtgcatttaatggtgcagccggtggatgacatgattgatgcgtttgccaaggctggtgctagtatgatttcgtttcatccccaggctagctgtgattgtcataaaagtttagcgcttattaaaaagttgggctgccaagctggcctggcgcttaatcctggtcatagtatagatgatttgctgccttatcttgatatgttggatttggtgctgcttatgtcggttgagcctggttttggtgggcaaaaattgattcctagtatttatgatagcttggttgaggcaagggggttgttggatgatgcgggttctaaagctcgtttatctgtagatggtggtgttactttagaaaatgttgggcgtttggtggctaatggtgcggatatgattgtggcgggttcggctatattctcttctgatgattatcttgcgcgttgtgctgcatttcgtgaggcttggtctgagtaa

SEQ ID NO: 289546 - DNA, 313 bp, Unknown
  Bacterial polypeptide expressing nucleotide sequence isolated from the Sargasso Sea
atgagtgaccaaaagtacataatagctccttcaattctggcatctgatttcgctagattaggagatgaagtaagaaatgttctagatgcaggcgcagactgggttcattttgatgttatggataatcactatgtacctaatctgactatcggaccaatggtatgtaaagctttaagagaatatggaattaaagaattcatagatgtgcatttaatgattgatccagttgatgaattggcacaaaggtttattgaagctggtgctgatttaataagctttcatccagaagcgtcgacccagttcatagatcaat

SEQ ID NO: 289547 - DNA, 181 bp, Unknown
  Bacterial polypeptide expressing nucleotide sequence isolated from the Sargasso Sea
atgagtgatcaaaattacataatcgcgccttctatattagcttcagatttcgcaagattaggtgaagaagtaaggaatgttcttgatgctggagcagattgggttcattttgacgttatggataatcactatgttccaaatttaacaatcggtccaatggtctgcgaagcactaagaaaat

SEQ ID NO: 289548 - DNA, 649 bp, Unknown
  Bacterial polypeptide expressing nucleotide sequence isolated from the Sargasso Sea
tctcgctgctgatttttcacgtttaggtcaagaggttgaagatgttctcgatgcaggcgccgactcgatacactttgatgtaatggataaccattacgtgccaaaccttactattggcccaccggttctgtccgcgctgcgaaaattcggcatttctgcaacgatcgacgcccatcttatggtttcaccagccgatagacttatcggggattttatagaagccggagcagattacgtttcgattcaccccggcacgactgaaaatctcgaggtcagcttactcagaataaaatcagagggagcaaaggctggcatcgttttcaacccggatgaggaattggatctaccggactcaataaccgagattgtagacctaatcctcattatgtcggtctacccgggatttggaggccaatcattcattgacgcaagtcttgacaaggtagaggccgcgagaacagttatcgatcgctgtgaaaggcctattcggctccaagtagacggtggaatcaaatcaagcaacattggcgaggtagccaaagctggagcagatacctttgtggcaggcacggcaatattcggcacttctgactacgtcgccacaataaaagagttgaaacaaaaggttgctgaagtcaacgatgcctga

SEQ ID NO: 289549 - DNA, 442 bp, Unknown
  Bacterial polypeptide expressing nucleotide sequence isolated from the Sargasso Sea
tatgacctcggaattcaaattatccccatccattttatcagctgatttttctaatttacaatcagccttagatcaatgcgccaagggtggagccccttggatacatgtcgatgtcatggataatcaatttgttcccaacctcacaattggaccaccggttgttaaatccttacgctccaaaacaaataaatttttagatgtacatatgatggtcatcgagccagaaaaattagtggagccttttgcaaaagctggggcagatatgattacgtttcatattgaagcaaccgataatccgcaaagcgttattgatttaatacgttcaacaggtaaacaggtcggtatttcattaaagccatcaactccagtctcagaagtagaacctttctttgagcatattgatctcattcttgttatgagtgtggagcccgggttttggcgg

SEQ ID NO: 289550 - DNA, 515 bp, Unknown
  Bacterial polypeptide expressing nucleotide sequence isolated from the Sargasso Sea
tatgtcaaatattgtcgcaccatcaattttatctgccgactttggaaatttagcaaatgacatctcaatgctcaacagtagtaaagcggattggatacatatagacgttatggatggtcactatgtaccaaatatttcatttggtatgccaataattgatagcattaatgctatttcaaataaaccgctggatattcacttaatgatatcaaaaccagaaaggtatatcgaaaaatttttaaaatataacattaaagtattaactattcatttggaagcaagtagacatcttcacagaacaattcaagaaattaaatcaaagggagttatggcaggcgtagcaatcaatccacacacagatgtcaatcatttaagtgagattataaatgatattgatatagtttgtgtaatgagtgtaaatccaggatttagtggtcagaattttattgaaaactcatacaataaagttaaaaaactaaagaaaataattctagaaaaaaaatctaactgtaaaa

SEQ ID NO: 289551 - DNA, 547 bp, Unknown
  Bacterial polypeptide expressing nucleotide sequence isolated from the Sargasso Sea
ggatggtcactttgtaccaaatataactataggatctagtgttattaaaaaattaaggcctttcacaaaaaaaacatttgatgtccatttgatgattgccccagttgataagtacatagaaccattttcaaatgctggtgcagatataattacttttcatcctgaagctactaataatatctctggtactattgatttaattaaaaaaaataaaaaaaaggttggtatttcgttaaagccaaactcaagtatagatttaattttagattacttaaataatattgatttagttctgataatgagtgttgaacctggttttggaggacaaaaatttattccagaagttttggataaggttaaaaaaataaaaaagataattacagaaaagaaattaaatattgatatagaaattgatggcggaattaattttaagaactcgcaattagttaaaaatgctggtgctaatattttagtatcaggatcaacaatatttaatgaaaataacggagatttaaaaaaaaatataggattgcttcgttcaaattga

SEQ ID NO: 289552 - DNA, 160 bp, Unknown
  Bacterial polypeptide expressing nucleotide sequence isolated from the Sargasso Sea
atgaaagaagttcttattgcaccctcaatattatctgctgactttggttcattagcaaatgaagtaaaattgattgatgaagctggtgccgattggatacacttggatataatggatggtcattttgtaccaaaccttactttcggtcctccaattatta

SEQ ID NO: 289553 - DNA, 598 bp, Unknown
  Bacterial polypeptide expressing nucleotide sequence isolated from the Sargasso Sea
agcggcgcggattggatccatgtggacgtcatggatggacgcttcgtccccaacatcacgatcggccccctgatcgtcgaagccctgcgtcccgtgacccagaagcccctcgacgttcacctgatgatcgttgagcctgaaaagtacgttcccgacttcgccaaggccggcgccgacatcatttcggttcaggtggaagcatgccctcacctgcatcgcaaccttgcccagatcaaagatctcgggaagatggccggtgctgtgctgaaccccagcacccccctggacacgctggagtactgcctcgagctctgtgatctggtgctgatcatgagcgtgaaccccggcttcggtggtcagagcttcattgagaaccaggttcagaagatccgcgacctgcgccgcatgtgcgacgagcgaggcctggatccctggatcgaagtggatggtggcgtcaaagccggcaatgcctggaaggtgatcgaagccggagccaacgccatcgtgtccggttccggtgtgttcaatcagccggactacgccgaagccatcaaggccattcgcaacagcagcagcaaggaagctgtcctggtgtgag

SEQ ID NO: 289554 - DNA, 505 bp, Unknown
  Bacterial polypeptide expressing nucleotide sequence isolated from the Sargasso Sea
tcgagattacggaattaaagcgcctattgatacccacctcatggttaagcctgttgataagttaatagaaagttttgccgaggcgggttcaacttatataacttttcatccagaagcgtccgaccatgtagatagatctatcgaacttataaaaagtcttaaatgtaaggcaggcttggtactcaatccagcttcaccagttagcttgctagaagagtcaattgaaaaactagatatggttttattaatgtctgtaaatcctggatttggaggtcagaaatttattgattcagttttaaataaagtaacaaaggttcgttctttaatagacagacataatttaaatattaggttagaagtagatggtggaataaatttagataatatatcaaaggtagcatccgccggagctgacacattcgttgcgggatcagccatcttcaatcaagcagattatattgattctattaagcagatgagagcctctttaaaatctgtaggatag

SEQ ID NO: 289555 - DNA, 428 bp, Unknown
  Bacterial polypeptide expressing nucleotide sequence isolated from the Sargasso Sea
acgctggcgccagctacatcacttccacccggaagcctccgagcacgtcgaccgctcgctgcaactgatcaagcccggcggcgccaaggcgggtctggtgttcaatccggccaccccgctggacgtgctcaagtacgtgatggacaaggtcgacatgattctgctgatgagcgtcaaccccggtttcggcgggcagaagttcatccccggcaccctcgacaagctgcgtgaagcccgcgcgctgatcgacgccagcggccgcgagatccgtctggagatcgacggcggcgtcaatgtgcagaacatccgcgagatcgccgaggcgggcgcggacacctttgtcgccggctcggcgatcttcaaccagccggactacagggcggtgatcgatgccatgcgcgccgaactggcccaggtgcgtggatgaa

SEQ ID NO: 289556 - DNA, 294 bp, Unknown
  Bacterial polypeptide expressing nucleotide sequence isolated from the Sargasso Sea
tatgagtgaccagaaaaatataattgcaccgtctatcctagcatccgattttgcaagacttggagaagaggtacgtaatgtccttgatgcaggagctgattgggttcattttgatgtaatggataatcactatgttccaaatctcactatcggaccaatggtttgcaaagctttaagagaatatggcataaaagaatttattgatgttcatttaatgatagatccagtagatgaattggcccaaagctttatagatgctggagcagacttaattagttttcatcccgaagcaac

SEQ ID NO: 289557 - DNA, 620 bp, Unknown
  Bacterial polypeptide expressing nucleotide sequence isolated from the Sargasso Sea
gtggattcatcttgatgtgatggacggaaattttgtgccaaatatcacttttggtgctgtagcgatggaatctttcagtaaaccggaggggtgtgtttttgatactcatctgatggtggtcaatcctgaaaagcatattccttcattcataaaagccggtgcagatgtcatcagcattcacgctgaagcgaccgaacacctccaatatggattgaagatgattcgggatcatggagccaaggccagtgtggctttgaatcctgcaactcccttggaggcaatagactgggtttaccctgatctcgatatggtgcttctgatgtcggtcaatccgggatggggcggacagtccttcattgctcaagtttttgataaaatcagcaatctgcggcaacgacttcaagatcgaggaatagacataccgattcaagtcgacggaggaatcaacctgaaaaccattgcccatgcttccctggcaggcaccacccattttgttgcaggaactgctgtttttactgtgaaagcaggtgatggattggatgaaaaagatcgtttggaaacctacagaaagaatataaatgggctcatagaagaggccacaaaagatcaatcggtttaag

SEQ ID NO: 289558 - DNA, 379 bp, Unknown
  Bacterial polypeptide expressing nucleotide sequence isolated from the Sargasso Sea
aatgcgatccggatttaaactagcaccttcaattttatctgcagatttttctgatcttagatctgccttagacatctgcaatgcgggaggtgcacactggatccatgtggatgttatggataatcaatttgtacctaatctgaccattggaccacccgtagtaagatcattaaggccagtcacacaaaaatttatagatgtgcatatgatggtaattgaccccgaagagctagtcgaaccctttgcaaaagcaggtgccgataatattacctttcatatagaagccaccaatgatccagagggtattattgatcttattagatcttgtgggagtaaggttggagtatctataaagccaaagacccctttagaagatatt

SEQ ID NO: 289559 - DNA, 554 bp, Unknown
  Bacterial polypeptide expressing nucleotide sequence isolated from the Sargasso Sea
tttagatgttatggatggccacttcgttccaaatttaacttttggccccccattaataagatctatccgaggattaacaaaattagtctttgatgttcatttaatggttagtaatccagattttttgttagatgaatacattgatgcaggcggggatattattacagttcatattgaagcttgtaatcatttggatagaactttgaattatattaaatcaaaaggatgtaaagctggagttgctttaaatcctcattcagatattaactttcttgaaaatgttttagatgagatagacttaatactaattatgacagttaatccaggttttggtggtcaaaagtttattaaaagtatgctaaaaaaaatagctttaacgaaaacattgatagataatagagatattttgttagaagtagatggaggaataagtccattaaactctaaagatgtaattaatgctggagcaaacgtattggttgcaggcagttctatatttgcctcaaacagaagtgctgattattcaaaaaatatagcagcattaagaagttaat

SEQ ID NO: 289560 - DNA, 541 bp, Unknown
  Bacterial polypeptide expressing nucleotide sequence isolated from the Sargasso Sea
cattttgttccaaatttaactattggtcctccagtaattaagtccctaagaaaacacagttctctaaaatttgatgtacatttaatgatttcaccagtccataaatacatagaagcttatgcgaatgctggggcagatataattacaatccacccagaagctactcaaaacttagctgactctattaaagcgattaaaaatttaaataaaaaggttggggtttcccttaatccagagtcaaaaattgaattaattgctgaatttttagatcaaatagatttagttttaatcatgagtgttaatccaggttttggaggtcaaaaatttatgccagaagtgctagataaaataaaagaacttaaaaaaattcaacaagaaaaaaatttgaactttgatattgaaatagatggtggaataaattttgaaaattgcaaaattgctattgatgctggagcaaatattcttgtttcaggtacaactatattcaaaagtaatgatggagatataaaaaagaatattaatttattaaaactaaaataag

SEQ ID NO: 289561 - DNA, 685 bp, Unknown
  Bacterial polypeptide expressing nucleotide sequence isolated from the Sargasso Sea
atgacagatgcttcaaacaaaaaagatttttggatatgtccatcaattttatcagcagattttgcgcacttggcagatgatataaatgctgtattagcagctggcgctgatagaatccatgtggatgttatggataatcattatgttcctaacttaacctttggccctttaatatgtaatgctataagaaaagccggaatagctgcgccaatggatgttcatttaatgattgagccagttgatgatcttataccaaaatttattgaagcaggagctgattgtatagtttttcaccctgaagcaagcaagcatgttgatagaagtttgcgtttaataaaagaatctggggtaaaggcaggtttagcaattaatcctgcaacatctgaacatgttttagataatgttttagatttagttgatagagtcctggttatgactgtaaatcctgggttcggtgggcaaaagtttattaaaaatactattcctaaaataaagagaataaaatcaattatagatacctgccctcatgaaataagattagaagttgatggtggagtgaatgtagataacataagatctttagctgatataggagttgatacttttgttgcaggttctgcaatttttaatcaaccagattacgcaaaggttatctctcaaatgcgagataatcttgctggttaag

SEQ ID NO: 289562 - DNA, 556 bp, Unknown
  Bacterial polypeptide expressing nucleotide sequence isolated from the Sargasso Sea
aatgagtataaaaaatattaagctagctccatcaattttatctgctgatttttctaaattaggtgaagaagttgcattggcaactgaatccggagcggatatgattcacatagatattatggatgggaaattcgttccaaatataactttcggagcatccatggtttcagcaatacgacgctggactaatttgccactagatatacatatgatggtaacagaacctgaaaaacaaattccattatttattgatgctggagcagatataattaatgtacatattgaaacttgtacacatctacacagaatcatccaaatgatcaaatcaaataacataagggcaggaattgctttaaaccctggaactgctataactactctttctgaagttattgaagaattagaccaaattgtaattatgtcagtaaatcctggattccctgggcaaaactttatccccaaaacattaaataaggtctcagatttaagaaaccaaatcaataaagatggtctcaatactgatattgaaattgatggtggaataaataaatcgagt

SEQ ID NO: 289563 - DNA, 353 bp, Unknown
  Bacterial polypeptide expressing nucleotide sequence isolated from the Sargasso Sea
aatgaagaatagaaatatatctccatcactattatcagcagatttttcaaaattaaaagaagagatagatgtcgttcttaatgctggtgcatcaagactacatcttgatgtgatggatgggcactttgttccaaattttacttttggcccttttatagttaaagcaattagaaaattaacttctgcgcatcttgaaacgcatttaatgatttcaaaccctcacaaatacatacctgaatttattgatgctggagcagacactttaatatttcactatgaggctagtacagatatagatagagatatcaatatgattaaagatagtaatatagatgtaggtattgctctaaacc

SEQ ID NO: 289564 - DNA, 316 bp, Unknown
  Bacterial polypeptide expressing nucleotide sequence isolated from the Sargasso Sea
atgaccgatgtgttgatagcaccatcaatattatcatcaaatttttcatgtttagctgatgaaattaaagcaattgataaagcaggtgcagattggatacatttggatgttatggacggtcacttcgtaccaaatcttacatttgggcctccaattattaaagccataagagatttatcaaaaaaaccttttgatgcccatttaatggttactaacccagatgatcttttagaagaatgcgtgaatgctggagttgatatgataactgttcataaagaagtcactccacatttagatagaactttgaatcgtattc

SEQ ID NO: 289565 - DNA, 667 bp, Unknown
  Bacterial polypeptide expressing nucleotide sequence isolated from the Sargasso Sea
catgtccgatgtgttgatagcaccatcaatattatcatcaaatttttcatgtttagctgatgaaattaaagctattgataaagcaggtgcagattggatacatttggatgttatggacggacacttcgtaccaaatcttacatttgggcctccaattattaaatccataagagattattcaaaaaaaccttttgatgcccatctaatggttactaacccagatgatcttttagaagaatacgtgaatgctggagttgatatgataactgttcacaaagaagtcactccacatttagatagaactttgagtcgtattcgtgaattaggatgtaaagcaggcgtttcaattaatcctgccacctctatttcaggtctagagtttttgttagataaattagatctgattcttgtaatgacggttaacccgggttttggtagtcaagttttcattgaatcgtctttgaataaaattaaattaattaaagaattaattaacgataaacctataaaaattcaggttgatggtggcattaataaggtggttgccccaagggtgattgaagcaggtgcaaatgtagttgttgcaggttcagctgtctttaatggagatggtatcgagagttattcaaaaaatatagaagctcttcgttataaaattaaaaaatga

SEQ ID NO: 289566 - DNA, 154 bp, Unknown
  Bacterial polypeptide expressing nucleotide sequence isolated from the Sargasso Sea
gctgatgatgaagcccaactaccgcattgccccctccatcctcagcgccgacttcgcgtgcctcggccaggaggtgcaggatgtgcttgacgcaggcgcggacgtggtgcacttcgatgtgatggacaaccactacgtgcccaacctgacgatc

SEQ ID NO: 289567 - DNA, 658 bp, Unknown
  Bacterial polypeptide expressing nucleotide sequence isolated from the Sargasso Sea
tatggtcaaaatagctccttctatacttgctgcggacttattagatattaaaaatgaagtgattaatgtagatgatgctggagctgaattcattcatattgatgtaatggatggtcattttgttccaaatctttcttttggttataatatggttaaaactcttagacctattactaaaaaaattttagatgttcatttaatgataagtccggtagagccatttattaaagaatttataaatgcgggatctgatattataagttttcacccagaagcagataaaaatacaaaagaaattatatcaataataaaaaaatctaattgcaaagttggaatagctgttcatccaaatataaaaatagaagaaataaaagagtttcttaatgatgtagatttagtcattataatgactgtgatcccaggttttggaggtcaaaaatttttagaggaacaagtacaaaaaatttctgaattaaaagaaattcgaaaaaatataaatgcaaattatgaaatagagattgatggtggtattaattatcaaacaagtaaaatctgcatagataaaggtgcagatattcttgttgcaggatcatatgtatatggtgccccaaaagaagaatataaagataaaattaattcaattagacatttgacttaa

SEQ ID NO: 289568 - DNA, 661 bp, Unknown
  Bacterial polypeptide expressing nucleotide sequence isolated from the Sargasso Sea
atgaaaaatttaatagcgccatcaattttatctgcaaattttgctgaacttggtaaagaagttcatgctgtaattgatgctggtgcggacataatacattttgatgtaatggacaatcactatgtgccaaaccttacaattggcccaatggtttgtaaatctctaatcgaatatggaatatctaagccaatagatgtacatttaatgacagagcctgtagatgatttaattaataactttgctaaagctggagcaagttggatttcctttcatccggaagccagtaagcatatagatcgaagcttaagccttattaaagaacacaattgcaaagctggactcgctttaaatcctgcaacccctatttcatgtttagagcatgtaattgaaaaaattgattttgtactgctcatgacagtaaatcctggctttggtggacaaaaatttataaaaggcatgcttcaaaagatcaaagaatgtaaagaacttatttcttcaactagtaatgaagttcaaatcgaagttgacgggggaatcgatttgaaaaatattaaagaagtgagcgaagcaggtgcaaatatttttgtatcaggctcaacaattttcaactcatcagactattcttcaacaatcaaagaaatgaaaagtttagttagttaat

SEQ ID NO: 289569 - DNA, 670 bp, Unknown
  Bacterial polypeptide expressing nucleotide sequence isolated from the Sargasso Sea
atgcgatcaggatttaaactagcgccatcaattttatcggcagatttctctgatctaaggtcagctctggatatatgtaatgcaggaggtgcacactggatccatgttgatgtaatggataatcagtttgtgcctaatctgaccatcggtccacccgtggttagatcattacggcctatcacgaaaaaatttttagatgtacacatgatggtagttgatcctgaaaaattggttgaaccttttgcaaaggctggtgccgataacattacattccatatagaggctactagtgatccagatggaatcattgacctaataagggcttgtggtagtaaggttggtgtatctatcaaaccaaaaactccattagaacatatttttcctatacttgataaggttgatgttgtactggtgatgagtgtcgaaccaggttttggaggtcaaggatatttgccgggatcaaacgaacgtataaaacagataagatctttcttaatagaaaattgtttagaccgtgtacttattgaagtggatggaggtataaaactgcataatgcaaagcaggttatagatgctggcgcagatgtcttggttgcgggatcagaagtattcaagtctgattccccgattgatataataaaagatttttatcaactttcaagccaataac

SEQ ID NO: 289570 - DNA, 264 bp, Unknown
  Bacterial polypeptide expressing nucleotide sequence isolated from the Sargasso Sea
catgaaagaatctatcattgctccatcaatattatcctcaaattttggcagattaactgaggaagtgaattctgttatagacgctggagcagattggattcattttgatgttatggataaccattatgtaccaaatttaactatcggacctatggtatgtgaatcactaagaaaagatggaataaaagattttatagatgtgcatctgatgattgagccagtggataaattagcagaaagctttattaaggcgggtgctgatct

SEQ ID NO: 289571 - DNA, 331 bp, Unknown
  Bacterial polypeptide expressing nucleotide sequence isolated from the Sargasso Sea
catggccaaagaattcaaaattgcaccctcaattctgtctgctgatttcgccagattgggcgaagaagttgagagcgtaatcgctgcaggcgctgattttgttcactttgatgtcatggacaatcactatgtaccaaatctcactttcggttcagtgatttgtaagtctttgagggattttggcatcgaagcccccattgatgtccatcttatggtgcaaccggtggatagattgatcgctgattttgcggaagctggcgcaacatacatttcatttcatccagaagcttccgaggacatcggtgccacaatagatctaataagatcaaat

SEQ ID NO: 289572 - DNA, 688 bp, Unknown
  Bacterial polypeptide expressing nucleotide sequence isolated from the Sargasso Sea
gatgaagtttggaaaccgcgccatcatctcacccagcctcttgagctgtgacttcgcccgcatggcggacgagtcgcgtaaagtcatcgagtgcggcgccgattggttacacctcgacgtcatggatgggcacttcgtccccaacctcacgttcggcgcgcccgtgttggcgtcgctgcgtccgcacgtgccggaggcatattttgacgtccatctcatggtgtccaacccgagggattacgtcgaaccgatggccaaggtgaagacgaacatgtttacatttcacgtcgaggcgtgcgccggggaggcggacgtcgagacgctctgcgccgaggttcgaaaggctggcatggaggttggcgtcgccattaaaccgggaacgagcgcagagtccgtgtgtgcgttcgtggagaagggattggtggacatggtgctcgtgatgacggttgaaccgggattcgggggacaaaagtttaatcccgagtgcgcgaaaaaggcggcgacgcttcgcgccaagtttccggatttgaagattcaagtcgacggaggattggcgccatcgacgatcgaggtcgcggcggaggctggggcgaatgtgatcgtcgccggaagcagcgttttcggaagcgaggattggacgcgcgcaatcgatacgttgcgcgccggggtgaagaagtttaacgaatga

SEQ ID NO: 289573 - DNA, 523 bp, Unknown
  Bacterial polypeptide expressing nucleotide sequence isolated from the Sargasso Sea
attggtcctatggtttgctctgctctaagggaatatgggattaaggctccaattgacgtccatcttatggttcaacctgtagatagactaattgacgacttcgtagaggctggagcaacttatataacttttcatcctgaggcatcacaacatatagatcgatctttgcagataattaaatccggtggttgcaaatctggtttagtgctaaatccagcttcacccattaatctaattgaagattgtcttgaaagtttagatatgatccttttaatgtctgttaaccctggattcggaggtcaaaaatttatcccttcagttcttaataagcttagaaaattaagaaaaataattgacgataacaatctagatataaggctggagatagatggcggtgtgaaattagagaatatttctgaaatatcagaagcaggagctgatacttttgttgctggctctgcaatcttttctcaaaacaactatgagaaagttatttctgaaatgcgtagttctattaaatagt

SEQ ID NO: 289574 - DNA, 372 bp, Unknown
  Bacterial polypeptide expressing nucleotide sequence isolated from the Sargasso Sea
tttgggcctctcgtgcctattttctgccaacacaaagaccaccggttcagcggaggctcacgtggccgacggcatcatcatcgccccttccatccttgcatcggacttttctcgtctcgccgacgaggtgtccgccgtcgaccgcgccggcgcggattggattcatcttgatgttatggatggccatttcgtgccgaacctgacctttggcccgcccgtgatcaaggcgctacgccatgttaccgaaaagctgttcgatgcgcatctgatggtatccaatccggacgcgctgctggatgcgtatgccgacgccggtgccgagatcatcaccgtccatgccgaggcctgcccgcatctgggaccgcacgtttg

SEQ ID NO: 289575 - DNA, 166 bp, Unknown
  Bacterial polypeptide expressing nucleotide sequence isolated from the Sargasso Sea
tatgacctcggaattcaaattatccccatctattttatcagctgatttttttaatttacaatcagctttagaccaatgcgctaagggtggagctccttggatacacgtcgatgtcatggataatcaatttgttcccaaccttacgatcggaccacacggtagttaa

SEQ ID NO: 289576 - DNA, 670 bp, Unknown
  Bacterial polypeptide expressing nucleotide sequence isolated from the Sargasso Sea
attgaaaaaaaataacacacttatatctccttctattcttgcagctgacttttcaatgttaggccaagaagttgcaaatatagataacgcaggggccgattggatacatttagatattatggatggtcattttgttcctaatctaactattgggcctgacgtagtatcaaaccttagaaaatatactaaaaaattatttgatgtacacttaatgactaaacctgcagataattggattaaaccattttctgaagcaggggccgatataattaccattcatttagaggccgaggaaaatattaaaaaaactcttaaaaccattcgagatatggggttaaaagctggaatatcaataaagccttctacttctgaaaatgaacttgaaccatatctagctttttgtgatttagtattagtaatgactgttaatcctgggtttggtggacaaaaatttatgccctctcagttaaaaaaaattagtaatattaataaattaataaataataaaaaattgaacactttaatagaagtagatggtggaataaatttagaaacatcaaaattatgtatagaagctggagcagatatattggttgcaggaagtgctattttttcagaagagaaatccaattactctcaaataattcaatctcttagaaatgagagctaa

SEQ ID NO: 289577 - DNA, 664 bp, Unknown
  Bacterial polypeptide expressing nucleotide sequence isolated from the Sargasso Sea
tatgacctcggaattcaagctagcaccttcaattttatctgctgatttttcagatttaaaattagcattatctcaatgcgaagctgggggagctcattggattcatgtagatgtgatggacaatcaatttgttcctaatcttactattggtcctcctgtagtaaaatctcttagaccaaaaacgaataaattccttgatgtacatatgatggtaattgagcctgaaaatttagttgaaccatttgccaaagctggagcagatcaaatcacatttcatattgaagcaaccgataatccacaaagtgtaattgatcttatcaaatctactggctcaagagttggaatatcaataaagccttctactccattatctgagatagaaccattttatgatcaaattgatttgatcttagtaatgagtgtagagccaggattcggagggcaagggtatatagagggttccacggaacgtataaaaaatataaaacaaaaattaactgaagaatgtcttcaagacagagttttaattgaagttgatggtggtataaaattacataatgcaaaagaagtgattgatgctggggcagatgttcttgtcgcaggctcagctattttcaaaactgatgatccagttcaaacaattaaagatttttattcattataa

SEQ ID NO: 289578 - DNA, 538 bp, Unknown
  Bacterial polypeptide expressing nucleotide sequence isolated from the Sargasso Sea
ttttgttcctaatctcacaattggtccaccagtcattaaggcacttagaaaacattgttcattgaagtttgatgtacacttaatgatatccccggtacataaatatataaaagacttttcagatgcaggggctgatatcattacatttcatccagaagcaacagaaaatatgagagaaacaatatcattaattaaaagtttggataaaaaagtaggtgtttcattaaatcctgatacgaaaattaaaacaatatctgactactatgacaatattgatttagtattaataatgagcgtatttcctggttttggaggtcaaaaatttataccagaagtattagataaaataaaatcgctcaaagaaataaaagataaaaataattataattttgatattgaagttgacggtggagttaatttttcaaactctaaagatattctgaatgctggagcaaatatattggtctctggtactacaatttttaaagaaaatagaggggatattaaaaaaaatattgagacactaagattagtgtaa

SEQ ID NO: 289579 - DNA, 670 bp, Unknown
  Bacterial polypeptide expressing nucleotide sequence isolated from the Sargasso Sea
atgaaaaagaacattcttatatcgccctccgttcttgcagctgacttttcaaagcttggtgaagaaatacagctggtttccgaagagggagcggatcttatacatttagacgttatggatgggcattttgtaccaaacctatcttttggcgctgatattataaaagggattaggggatttagtaatttaccatttgatgtgcatttaatgatcgaaaaccccgaacattacgtagatgcctatgtggaagctggggcaaatttcataacagtacatccggaagctacacctcatattcatagtgttctgcagaaaattcataaagcaggcgtaaaaacgggaattgcgttaaatcctggaacccctattgaggcattagaaaatgtaatagatattattgacttgatcattgtgatgaccgtcaaccctggttttgggggacagtcctttttatcaagtcagttgcccaaaatttctaagataagaaccataatagatgacggcggccactctatagatctctccgtagacggaggaattaacccaataaccgccaaattagctattgatgcgggcgccaatatattagtcgccggaacttcgatttttaaagccggcgatgaaacgtattcaaagagcattaaaagattaaggaatttaaatccttgaa

SEQ ID NO: 289580 - DNA, 670 bp, Unknown
  Bacterial polypeptide expressing nucleotide sequence isolated from the Sargasso Sea
atggttgataaaaactacataattgctccctctatactcgcgtcagattttgcgagattgggtgacgaagtccgtaacgtattagatgcaggtgctgattgggttcactttgatgttatggataatcactatgttccaaacttaactattggacccatggtgtgtaaggcactcagagattttggaatcaaagaattcattgatgtacatctaatgattgatcctgtggatgagctagctcaaagttttattgaggctggagcagacctaataagctttcatcctgaagcgagtaaacatattcatagatcaattcatgcaattaaagaaaaaaattgcaaagctggattagtttttaatccagcaacacctcttcaaactcttgaaagtgttattgaagacatcgatctcgtcctcataatgagtgttaatcctggttttggtggtcagaaattcatacatagttcaatagataagatttccaaggttagaaaaatgatagatgattctgggagagatattcgtcttgaagtggatggtggtattaatagtgaaactattggtctagcatcagaagctggtgcagataccttcgttgctggctcagcaatttttaatacagagaattatgagcagacaatatcagaacttcgttcaaaaatcgtttaag

SEQ ID NO: 289581 - DNA, 237 bp, Unknown
  Bacterial polypeptide expressing nucleotide sequence isolated from the Sargasso Sea
catgactaattctattaaaatttcgccatctattttatctgctgactttagtaaattaggaagcgaggtgatatcactagaaagagccggggctgattatattcacattgacgttatggatgggcattttgtaccaaacttaactataggacctgaagtaattaagaaactgagaccgctgacagaaaagacttttgatgttcacttaatgatttcaccggttgacaaatttattaa

SEQ ID NO: 289582 - DNA, 358 bp, Unknown
  Bacterial polypeptide expressing nucleotide sequence isolated from the Sargasso Sea
aatgaaaaaaatacaaatatctccatctattcttgccgctgactttagtcagctagacaaagaaattaaaaaattagaagagggtggagcggacatgatacatattgatgttatggatggacactttgttccaaacttaacaattggaccacctgtaattaaagctttaaggaactgcacaaaaattccttttgatgttcatttaatgatttctcctgtacataaatatataaaaaatttttctgaggctggatctgacataattacaattcatccagaagcaacggaaaatctttcagaaacgataaaattaattaaaaaattaaataaaaaagttggagtatcattaaatcccaga

SEQ ID NO: 289583 - DNA, 567 bp, Unknown
  Bacterial polypeptide expressing nucleotide sequence isolated from the Sargasso Sea
taattcatgtagatgtaatggatggtcactttgttccaaatttaacaataggacctcccgttataaaaaacctaagaaaatataccaaacttccatttgatgtacacttaatgatttctccagtacacgaatttatagaaagttatgcagatgctggtgctgatataatcactattcatcctgaggctactgaaaacttaaaagagtctataaatttgataaaaaaatttggcaaaaaagttggtgtgtctttaaatccaaaaactgagatagatactttaattgatgaaatagaaaatattgatttagttctagttatgagtgttaatcctggttttggtggtcaaaaatttatgcctgagatattatataaaattaaggaattgaaaaagataaaagacaaaagtaaatatcgctttgatattgaagttgatggaggaattaattttagtaattcaaaaatagttttagaggctggagctgatattttggtatctggaaccacagttttcaaggagaatgatggtaatatcaaaactaatattgaaaaactaaaatcaatgtaaa

SEQ ID NO: 289584 - DNA, 163 bp, Unknown
  Bacterial polypeptide expressing nucleotide sequence isolated from the Sargasso Sea
atgaaaaaaatacaaatatcaccatctatactttctgctgattttagccagttaggaaatgagattaaacgtttagaaaaaggaggagcagatttaatacatgttgatgtaatggatggtcactttgtacccaaccttacaattggtcctcccagtaattaag

SEQ ID NO: 289585 - DNA, 556 bp, Unknown
  Bacterial polypeptide expressing nucleotide sequence isolated from the Sargasso Sea
atgaaactcgatcccgtgatcgccccatcgatattgtctgccaactttgctcgtttgggtcaggacgttgcggacgtcattcaagccggtgccgactggatccatttcgatgttatggataaccattacgtgcccaatctcacgatcgggccgatggtattggaggcgctgatcaaagacggcgtgacttgtccggttgatgtgcatttgatggtctctccggtcgatcgactgatcgatgaattcgcggccgccggcgccagtgttatcacctttcaccctgaagcaagccagcacatcgatcgcaatctgcagcaaatccgagatgccggatgtcaggcggggctggtattcaacccggcggcgccactggatgccatgaattacgtgatggataaactcgacattgtattgttgatgtcggtgaaccccggttttggcggccaggcattcatcccgtcagtactggaaaagctcagcgaagcaagacagcgcatcgacaactcgggtttacccattcgcctggaaatagatggcggcgtaaaggtcgacaata

SEQ ID NO: 289586 - DNA, 661 bp, Unknown
  Bacterial polypeptide expressing nucleotide sequence isolated from the Sargasso Sea
atgaaaaaaatacaaatatctccctcaattttatctgcggactttagtcaattaggcaatgaaattaagagactggaagatggaggcgctgatatgattcatgttgatgtaatggatggtcattttgttccaaatttaactataggaccaccagtaattaaggctttaagaaattatacaaaactaccttttgatgttcatttgatgatatctccagttcataaatatattaaaaattatgctgaagctggtgctgatattataacaattcatcctgaagcaaccaataacttaaaagaatcgattaatcatataaaaaaattaggaaagaaagtaggagtttctttaaatcctgatacaaaaattaataaaataaaagaacttttgtctcaaataaatttggttttaattatgagtgttcatcctggttttggaggacaaaaatttatacctgatgttttagaaaaagtaaaagaattaaaaaaaataaaagatcaaaaaaatttaaattttgacattgaagttgatggaggaattaattttgataacagtaaacttgcaatagaagctggggcaaatattcttgtgtcaggcacaacaatttttaaaaacaacaacggtaatattaaaaaaaatattgatactttaaaagcaagttaaa

SEQ ID NO: 289587 - DNA, 468 bp, Unknown
  Bacterial polypeptide expressing nucleotide sequence isolated from the Sargasso Sea
atgttcatttaatgatagatccagtagatgaattggcccaaagctttatagatgctggagcagacttaattagttttcatcccgaagcaaccaaacatatccatagatcaattcacgcaataaaagacaaaggttgtaaagcaggacttgtttacaatcctgcaactccacttcacaccttagaaagtgttcttgaggatctagatttagtattaattatgagcgtaaatcctggttttggcggccaatcgtttattcatagctctcttgaaaagattactcaagttagaaaaatgatagatgagtcaggaaaagatgtccgcttggaggtagatggtggaataaacaaagataccattggtctagcatctgaggcaggcgctgatacatttgtagcaggctcagctatattcaatactgaaaattatgagcaaacaatatctgaacttcgttcaaaaattgtttaag

SEQ ID NO: 289588 - DNA, 663 bp, Unknown
  Bacterial polypeptide expressing nucleotide sequence isolated from the Sargasso Sea
tatgacggatcacaaatatataattgcaccttcaattctggcatctgattttgctaggttgggtgatgaggtaagaaatgtcctagatgcaggtgcagactgggttcatttcgatgtaatggataatcactatgttccaaatttaaccattggcccaatggtatgtaaggctcttagagattttggtataaaagaatttatagacgttcacttaatgattgatccagttgatgagctagcacaaagttttatcgaggcaggtgcagatcttatcagttttcatcctgaagcatcgaaacatattcatagatcaattcatgctattaaagataaaggttgtaaggcaggtctcgtctttaatccagctacatcactaagcgctcttgaaaatgttttagatgatatagaccttgttttaataatgagtgtaaatccaggctttggtggacaatctttcattcacagttctttagacaaaataactcaagtaagaaagatgatagatagctccggaaaggatattcgtcttgaggttgatgggggaatcaataaagaaaccattggccttgcctctgaagctggtgccgatacatttgttgctggctcagcaatttttaatacagaaaattatgagcaaactatatctgagcttcgttcaaaaat

SEQ ID NO: 289589 - DNA, 183 bp, Unknown
  Bacterial polypeptide expressing nucleotide sequence isolated from the Sargasso Sea
aatgagcagtaaagactacataattgcaccatcaatattatctgcagacttcgctcgtcttggagaggagtccaaaaatgttttagatgctggcgcagattggatccattttgatgtgatggataatcactatgttcctaatctaactataggacctatggtctgtaaggcgcttagagatta

SEQ ID NO: 289590 - DNA, 661 bp, Unknown
  Bacterial polypeptide expressing nucleotide sequence isolated from the Sargasso Sea
aatgaaaaaaatacaaatttcaccttcaatactttcagcggattttagtcaattaggtaaagaaattaaaagattagaagaaagtggagcagatttaattcatgtggatgttatggatggtcattttgtccccaacataacaattggacctccagtgataaagacgcttcgaaaatatacaaatttgccatttgatgttcatttaatgatttcaccagttcataaatacataaaaaattttgctgatgcaggatcagatattataacaattcatcctgaggcgactgaaaatttagttgattctataaaacttataaaacatttaaaaaaaaaggtaggcgtatcattaaatccagatacagaaatagacattatagaaaaatacttaggagaaattgatttgattttaattatgagcgtatatccaggctttggtggtcaaaaatttataccaaaaattatagaaaaaattaaaaaaatttatcaaataaaaaaaaaaaatgatctaacatttgatattgaagttgatggtgggattaatttctcaaactcaaaagaagttatatcagcaggagcgaacatattagtatcagggacaacaatatttaaagaaaataatggtaacataaaaaaaaacatagaaactctaagatcgatgtaa

SEQ ID NO: 289591 - DNA, 294 bp, Unknown
  Bacterial polypeptide expressing nucleotide sequence isolated from the Sargasso Sea
gatgaaacagtatttgattgccccctcaatcctgtcggctgattttgctcgcctgggtgaggacaccgcgaaagctctggctgccggtggtgacgtcgtgcattttgacgtcatggacaaccactatgtaccgaatctgaccatgggtccgatggtactgaaatccctgcgtaaatatggcattacggctcccatcgatgtgcatctgatggtgaaacctgtcgatcgaatcatcccggatttcgcagccgcgggcgccagcatcattacctttcatccggaagcctccgaaca

SEQ ID NO: 289592 - DNA, 583 bp, Unknown
  Bacterial polypeptide expressing nucleotide sequence isolated from the Sargasso Sea
agatggtggcgctgatttaattcatgtagatgtaatggatggacattttgttcccaatattacaattggaccccctgtgataaaaacacttagaaaatataccaaattaccttttgatgtacatttaatgatctcgccagtacataaatacattaaaaattttgcagaagccggatccgatataataactattcacccagaagctactgataatttgattgagtcaattcatctgataaaacaattaaagaaaaaagtaggtatatctttaaatccaaacacagaaatagacgtcataaaaaaaaatttaaaagaaattgatttggttttaataatgagcgtatatccaggttttggtggccaaaaatttataccagaagtcattgaaaaaattaaaagactttatcaaataaaaaaggataataacttaaaattcgatattgaggttgatggtggaataaatttttctaattcaaaagatgttatatcagcaggagcaaatattttggtttctggaacaaccatattcaaagaaaacgacggcaatattaaaaaaaatatagaaactttaaaatcaatgtaa

SEQ ID NO: 289593 - DNA, 268 bp, Unknown
  Bacterial polypeptide expressing nucleotide sequence isolated from the Sargasso Sea
atgaatacatcaataaaaatttcaccatctattttatcatctgactttagtaaacttggagaagaagttaaggccttagaaaaggcaggtgcagactacattcatgtagatgttatggatggacactttgtaccgaacttaacaattgggccagaagttataaaaaatataagaccttttagtaaaaaaattttcgatgttcacttaatgatatcacccgtaaataaatacattgaaaaatttgcagatgcaggcgctgatataatca

SEQ ID NO: 289594 - DNA, 592 bp, Unknown
  Bacterial polypeptide expressing nucleotide sequence isolated from the Sargasso Sea
gtacttgaggctggtgccgactgggtgcactttgatgtcatggataatcactatgtgccaaacctaaccattggacccatggtttgtaagagtcttagagattttggaattgatgcttttatagatgtccatctgatgattgatcctgtagatagacttgcccaagattttattgatgcaggcgcttcacttgtcagctttcatcctgaggctacaaaacatgttcataggtcagtatccgcaatcaaagataggggttgcaaagccggattagttcttaatcctgcaactcaagtgaatgtattagaagatgtattagaagatttagatctagtcttaataatgagcgttaatcctggatttggtggacagtcctttattgagtcatcgcttaaaaaggtcgaaaaagtaaggaaaatgattgattcgtctggtaaagacattaaattagaaattgatggtggcattaataaggatactattgcatcagcatatagcgcaggagcagatacgtttgtagctggctcagctatttttaacagcaataattatgaagaaacaatctccttatttagaaagctggcttcttagc

SEQ ID NO: 289595 - DNA, 374 bp, Unknown
  Bacterial polypeptide expressing nucleotide sequence isolated from the Sargasso Sea
tatggacaactggatagcaccgtcgattctctcagcagatttttcacgtctaggtgaagaagtaaacagtgtgctagcagctggcgccgatattattcatttcgatgttatggataatcactatgtgccaaatcttactatagggccattagtattagcgtccctgagacaatctggaattgacgcaatgatgtatgtgcatcttatggtcaaacccgtagaccgcataattccagacttcattgatgcgggagccgatatcataagcatccacccagaaagtactgaacatctacatagaacgttacagttaatacgggatggtggagctaaaccaggaatagtttttaatccaactaccccactaacttatc

SEQ ID NO: 289596 - DNA, 661 bp, Unknown
  Bacterial polypeptide expressing nucleotide sequence isolated from the Sargasso Sea
aatgaaaaatatacaaatttcaccttcaatactttctgcagattttagccaattaggtgaagaaattaaaagattagaagatggtggcgctgacttaattcatgtcgatgtaatggatggacattttgttcccaatattacaattggtcccccagtgataaaaacacttagaaattatacaaaattaccttttgatgtacatttaatgatctcaccagttcataaatatataaaaaattttgctgaagcaggatctgatataataacgattcatcctgaagcaactgataatttaattgagtcaattcaacttataaagcaattaaagaaaaaagtgggagtatctttaaatccaaatacggaaataaatatcatagaaaaacttttaaaagatattgatttagttttaatcatgagtgtacatccaggatttggtggtcaaaaatttatgccagaggtaattgaaaaaattaaaaagcttttccaaattaaaaaagataataaattaaactttgatattgaagttgatggtggaattaacttttctaattcaaaggaagttatatcagcaggagcaaatatattggtttcaggaacaactatatttcatgaaaataatggcgatattaaaaaaaatatagaaacgctaagatcaatgtaa

SEQ ID NO: 289597 - DNA, 202 bp, Unknown
  Bacterial polypeptide expressing nucleotide sequence isolated from the Sargasso Sea
atgaaaaatatacaaatatcaccctcgattttatcagctgattttagccaattaggtaatgaaataaaaagacttgaggaaggtggagctgatatgattcatgtagatgttatggatggacactttgttccaaacttaacaataggtcctcccgtaattaaagctctcagaaaacattgttcattaaaattcgatgttcatt

SEQ ID NO: 289598 - DNA, 670 bp, Unknown
  Bacterial polypeptide expressing nucleotide sequence isolated from the Sargasso Sea
tatgagtgaccaacaatatataattgctccttcaattctagcttctgattttgctagattaggagatgaggttagaaatgttctagacgcaggtgctgactggattcattttgatgtaatggacaatcattatgtacctaatttaactattggcccaatggtatgtaaggcccttagagaatatggaattaaagaattcatagatgtgcatttgatgattgacccggttgatgatttggcacagagttttataaaggcgggagctgatttaattagctttcatccggaagcatcatcacatatacatagatcaattcatgcaattaaagataaagattgcaaagcagggcttgtatataatcctgcaacaccacttaacactctagagaatgttttagatgatttagatcttgttctaataatgtctgtcaatccaggttttggagggcaatcatttattcatagttcgatagataaaatctctcaagtaagaaagatgatagatgattcaggtaaggatattcgtctcgaagttgatggaggaataaataatgataccatcggtttggcatcagcagctggcgctgatacttttgttgctggctcagctatctttaatacagaaaactatgagcaaactatatctgagcttcgttcaaaaatcgtttaa

SEQ ID NO: 289599 - DNA, 239 bp, Unknown
  Bacterial polypeptide expressing nucleotide sequence isolated from the Sargasso Sea
tatgtcggttaaagtttcgccttcgatactagcatcaaacttttcatctcttggtgatgaggtgcaaagtataacgaaagccggtgcagattacattcatgttgatgtgatggatggacattttgttcctaatttaacaattggtcctgatgttgttaagtccataagagataagtctgacattccatttgatgttcatttaatgattgatccagtacaaccttacattgaagggtttg

SEQ ID NO: 289600 - DNA, 301 bp, Unknown
  Bacterial polypeptide expressing nucleotide sequence isolated from the Sargasso Sea
atgagcggtctaatcaaaatatcaccttccatactttcagcagatttcagtaagctaggcgaagaggtcattgcgttagaaaaagctggtgctgactatatacatattgacgttatggatggccactttgttccaaatttaacaattggaccggaagtaattaaaaaattaagaccccttacaaaaaaagtgtttgacgttcacttgatgatatctcccgtagataatttcattaaagatttttcaaaagctggcgcagatattattattttcatccggaagctactccgagacatatcaa

SEQ ID NO: 289601 - DNA, 595 bp, Unknown
  Bacterial polypeptide expressing nucleotide sequence isolated from the Sargasso Sea
tatgacagatcacaaatatataattgcaccttcaatcctggcgtctgattttgctaggttgggtgatgaggtaagaaatgtcctagatgcaggtgcagactgggttcatttcgatgtcatggacaatcactatgttccaaatttaaccattggcccaatggtatgtaaggctcttagagattttggaataaaagaatttatagacgttcacttaatgattgatccggttgatgagttggcacaaagttttatcgaggcaggagcagatcttatcagctttcatcctgaagcatcgaaacatattcatagatcaattcatgctattaaagataaaggttgtaaggcagggctcgtttttaatccagctacatcattaagcgctcttgaaaatgttttagatgatatagaccttgttttaataatgagtgtaaatccaggctttggtggacaatctttcattcacagttctttagataaaatagctcaagtaagaaagatgatagatgactccggaaatgatattcgtcttgaggttgatggaggaatcaataaagaaactattggccttgcctctgaagctggtgccgatacattg

SEQ ID NO: 289602 - DNA, 583 bp, Unknown
  Bacterial polypeptide expressing nucleotide sequence isolated from the Sargasso Sea
aagagtggagctgacttaattcatgtagatgtaatggatggtcattttgtgcctaatcttacaattggtcctcctgttattaaaaacttaagaaaatttactaaacttccatttgatgtacaccttatgatatctccagttcatcaatatatagaaagttattcaaatgctggagcagatataataacaattcatcctgaggctactccaaatttaaaagatacaattaaacttatcaaaagttttggtaaaaaagctggggtatctctaaatcccaaaacagggattggtactttaattaatgagattgaaaatattgatttaatattggttatgagtgttaatcctggatttggtggtcaaaaatttttacctgaggtattagacaaaataaaagaattaaaaaaaattaaggataaaaatcattataactatgacattgaagttgatggtgggattaattttactaattcaaaaatagttttagaagctggagctaatattttagtatcagggactacaatatttaaagaaaacaatggaaatatcaaaagtaatattgaaaaactgaaatcaatgtaaa

SEQ ID NO: 289603 - DNA, 334 bp, Unknown
  Bacterial polypeptide expressing nucleotide sequence isolated from the Sargasso Sea
atgaaaaaaatacaaatttcaccttctatattatctggagattttagtcagttaggaaatgaaattaaaagattagagttggctggagctgacatgattcatgtagatgttatggatggtcattttgttccaaacttaactataggccctccagtaattagggctctaagaaattatacaaaaataccttttgatgttcatttaatgataaaaccagttcacaaatatatcaaagattatggagaagcaggggctgatattataacaatacatccggaagcaacaaataatttaaaagactctatcaatcatattaaagatttaggaaaaaaag

SEQ ID NO: 289604 - DNA, 661 bp, Unknown
  Bacterial polypeptide expressing nucleotide sequence isolated from the Sargasso Sea
aatgaaaaaaataaaaatttctccgtcaattctttctgctgattttagtcagctaggaaaagaaataaataatttagaaaaaggtggagctgatctgattcatgttgatgttatggatggacattttgttcctaatttaacaattggaccaccagtaataaaagctttgagaaaatatactaagataccatttgatgtgcatttaatgatttccccagttcataaatatatcaaagattttgcaaatgctggatcggatataataacaattcatcctgaagcaacaaaagatttaaaagaatctatttctttgattaaagacttaaacaaaaaagttggtgtatcattaaatccaaatactaaaataaatgttattgagtcttatttaaaatatatagatttagttttaataatgagtgttttcccagggtttggaggccaaaagtttataccagaaactattaataaaattaaagatttgaaaaaaattaaggataaaaataattatagttttgatattgaagtagatggaggtattaacttttcaaattccagagatataattaatgctggagcaaatattttagtttctggaacaacaattttctcagagaacaatggggacataaaaaaaaatatagaaacactaaagtcagtgtaa

SEQ ID NO: 289605 - DNA, 226 bp, Unknown
  Bacterial polypeptide expressing nucleotide sequence isolated from the Sargasso Sea
atgaaaaaaattcaaatttcaccatcaattttatcagcagattttagtcaattggctaatgaaataaaacgacttgaggaaggtggggctgacatgatccacgtcgatgtgatggatggacatttcgttcctaacctcacaattggtccaccagtcattaaagcacttagaaaacattgctcattgaagtttgatgtacacttaatgatatccctcagtgcataaa

SEQ ID NO: 289606 - DNA, 246 bp, Unknown
  Bacterial polypeptide expressing nucleotide sequence isolated from the Sargasso Sea
aatgaaaaaaatacaaatttcaccatcaattctatcagctgatttcagtcagttaggagatgaaataaaaagattggaagaaggtggggccgatatgattcatgtagatgttatggatggtcattttgttcctaatcttacaattggtccacctgtaattaaaaggttgcgtaattgtaccaagctaccttttgatgttcatttgatgatatctccagtacataaatatattgaagattattcaaa

SEQ ID NO: 289607 - DNA, 382 bp, Unknown
  Bacterial polypeptide expressing nucleotide sequence isolated from the Sargasso Sea
gatgaaaaaaatacaagtttcaccatcaattctatcagctgatttcagtcagttaggtaatgaaattaaaagactagaagaaggtggtgctgatatgatccatgtagatgttatggatggccactttgttcctaatttaactatgggtcctcctataattaaagatctaagaaaatttacaaaattaccatttgatgttcatttaatgatttctcctgttcataaatacattaaagattatgcggatgctggagcagatataattacaatacatccagaagctacagaaaatttgaaagattcaattaagtgtataaaaaaactaggaaaaaaagctggtgtttctttaaatccagaaactaaaacagatattgtgatggaa

SEQ ID NO: 289608 - DNA, 673 bp, Unknown
  Bacterial polypeptide expressing nucleotide sequence isolated from the Sargasso Sea
atgaaagattataaaattgccccatctatactatctgctgacttctctaggttgggagaagatgtgcccaatgttattactgcaggagcagacatggtgcattttgatgtaatggataatcattatgtcccaaacttgacctttggacccatgatatgctcagcattaagagattatggcattacaagtcctattgatgttcatctcatgattaaaccggttgatagaatcattccagattttgctagagctggagcaagctacataacatttcaccccgaagcttctgatcatgttgataggacaattgatctgataaaggaaaatggctgcaaagcaggaatcgttcttaatcctgctacacctattagccatcttgattattgcttggataatctagatatggttttattaatgtctgttaatccaggctttccgggccaaaaatttattgaaggcaccttagaaaaaataacaaaagttagagatctcattgataaagaagaaaaagatataaggctagaaattgatggaggtgtaaatttacagaatctacagaagatagcaaacgctggagctgacacatttgtcgcaggctcagcaatttttaaatcagaaaactataaaagcaccattaattctatgagagatatactagctaaaaataattagc

SEQ ID NO: 289609 - DNA, 474 bp, Unknown
  Bacterial polypeptide expressing nucleotide sequence isolated from the Sargasso Sea
catgtcggttaaaatatcgccttcaatactagcatctgatttttcatcattgggcgaggaagtcgtcaacatcaccaaagcaggtgctgactatattcatgttgatgtcatggatggacactttgtgccaaacttaaccattggacctgacatagttaaatcaatcagagataaatcatcccttccttttgatgttcatttaatgattgatcctgttcaaccttatattgaaaagtttgttgaagcgggagctgatattgtatccgttcaccctgaagccaatgacgatacacaagcctgtattgataaaataaaatctttgaatgtaaaagcaggacttgcaattaatcctgatacagaatgggaagtagttaaaccatttatggatcagttggatcttattttggtgatgagtgtgcatccaggttttggtggacagaaatttattccaacggctcttaataaacttgagaa

SEQ ID NO: 289610 - DNA, 586 bp, Unknown
  Bacterial polypeptide expressing nucleotide sequence isolated from the Sargasso Sea
cggagtagattatatccatgtagatgtcatggacggccatttcgttccgaatattaccatcggtccactggtagtgaaagctttacgttcaattacaaaactgccacttgatgtacacttaatgattgagaatcctgagttctatatagaagatttcagtaaagcaggagctaatattattactgtgcaccaagaagcaacgccccaccttcaccgtactattcagcagatacaaaatttaggtatcaaggccggtgtaagtatcaacccttctacctctgtcaaaactttagatgaaataatttgcgatgtagatcttatattggttatgtctgtcaatccgggattcggaggtcagtcttatattcattcatgtacaaacaaaattcgtaaggttcgtgaaatgcttgatgaacgaggtgtttcagcagatttagaggtggatggcggtgtcaatgtagacacagtatgcgaagtaattagtgcgggagcaaatgcatttgttgcaggttcagcaattttcaacgacaaaaacagtgttgcagaaaatgtttcagctcttcgtgaaaaaataaaaacttcttaa

SEQ ID NO: 289611 - DNA, 613 bp, Unknown
  Bacterial polypeptide expressing nucleotide sequence isolated from the Sargasso Sea
agtcaactaggaaaagagataaagcgcttggaagaggctggtgctgacatgatacatgtggatgtaatggatggtcactttgttccaaatctaactataggtcctcctgtgataggtgcactcaggaaatatacaaagttaccttttgacgttcatttaatgatttctccagttcataagtacattaagtcatatgctgaaaatggggcagatataatcaccattcatccagaggcaactgagtctctggaaaaatcaattaatgaaatcaaaagttttagaaaaaaagttggattatcactaaacccagagtcaaaaattgatttaatttcagactatctccatgagatagacctggttttagtaatgagtgttcatccaggttttggagggcaaaaatttatcccaaaaactttagagaaaattaagacgttaagagatttaaaagaagagaaaaaactggattttgaaatcgaagtagacggaggagtaaatttttcaaatttcaaatcaatattaaatgctggggcaaacattttggtttcaggtacaacaatttttaaagaaaataacggtaatgtaaaaaaaaatattaatttttttaaaacttagt

SEQ ID NO: 289612 - DNA, 659 bp, Unknown
  Bacterial polypeptide expressing nucleotide sequence isolated from the Sargasso Sea
aatgaaaaaaatacaaatttcaccatcaattctgtcagctgatttcagtcagttaggaaacgaaataaagagattagaagaaggtggggcagatatgattcatgttgatgtgatggatggtcattttgttcccaacctcacaattggtcctcctgtaattaaaagattgcgtaattgtaccaagctaccttttgatgttcatttaatgatatctccggtacataaatatattgaagatttttcaaaagcaggggcggatataattacgattcatccagaagcaaccgataatttaattgaatcaatcaatcttataagaaaactaaataaaaaaattggagtttctttaaatcccaacacaaaattaagtgttatagaaaacattttagatcaaatagatcttgttttaattatgagtgtttatcctggatttgggggtcaaaaatttatgcccgaggttatagaaaaaattaaaaatttaaaaaaaataaaagaggaaaaaaaacttaattttgatattgaagttgacggtggtattaactttgaaaatagcaaaattgtaatagaagcaggagctaatattttagtttcaggaacgactatttttaaagaaaataatggcaatgttaaaaaaaatattgattctttgaaattagtat

SEQ ID NO: 289613 - DNA, 619 bp, Unknown
  Bacterial polypeptide expressing nucleotide sequence isolated from the Sargasso Sea
atgaaaaaaatacaaatttctccatcaattctatcagctgattttagtcagctaggaaaggaaattaaaaaattagaagatggaggtgctgatttaattcatgttgatgtaatggatggtcattttgttccaaatttaacaattggtccaccagtaattaaatctttgagaaagtatacaaaattaccatttgatgtgcatttaatgatttcacctgtacataaatatattaaaaattttgctgatgctggatcagacattataacaattcatcctgaagcaacaaaaaatttaaaagagtctgtttcccatattaaggaattaaataaaaaagctggagtttcattaaatccaaatactgaaataagtataattgaacctcaattagataatttagatttagttttagtaatgagtgtatttcctggttttggtggacaaaaatttataccagaaacagtaaaaaaaattaaacacttaaaagaaataaaagataaaaataattatagttttgatatagaagttgatggaggtattaatttttctaattccagagaagtaataaatgctggagcaaatattttagtttctgggacgacaattttcaaagaaaatagag

SEQ ID NO: 289614 - DNA, 175 bp, Unknown
  Bacterial polypeptide expressing nucleotide sequence isolated from the Sargasso Sea
aatgaaaaaaattcaaatttctccatcaatattatctgctgacttcagccagcttggtagtgaaattaagaaattagaagaaggtggagctgacttaattcacgtcgatgtaatggacggtcactttgtgccaaatttaacaataggaccaccagtaataaaaaacttaagaaaa

SEQ ID NO: 289615 - DNA, 520 bp, Unknown
  Bacterial polypeptide expressing nucleotide sequence isolated from the Sargasso Sea
aatgaaaaaaataaagatatcaccttctattctagctggagattttagccagttaggaaacgaaataaaaaaacttgaaaaaggtggggcagatatgattcatgtcgatgtaatggatggacattttgttccaaatttaactattggtcctacggttatcaaggcattaagaagtcatacaaaaataccttttgacgttcacttaatgatttctcctgtgcataaatatattggtgcatatgcagatgcaggtgcagatataattacaattcatcctgaatctactgacaatttaatagactctataaatcacataaaaaaattcaaaaaaaaagttggtgtttcattgaatcctgacaccaacattaatgttatactagatcaacttgataaaattgatcttgtattaattatgagtgtttttccaggatttggtggtcaaaaatttataccagaagtaataagtaaaattgttgagttaaatagaattaaaacagaaaaaaaattaaattttgatatt

SEQ ID NO: 289616 - DNA, 421 bp, Unknown
  Bacterial polypeptide expressing nucleotide sequence isolated from the Sargasso Sea
atgaaaaaaatacaaatttcaccttcaattttatctgctgattttagcaacttaggtgaagaaatacgaaaattagaaaaagctggtgcagacatgatccatgtggatgtaatggatggtcattttgttccaaatcttactattgggcctcctgtaattaaagctttaaaaaaatatacttcattgatttttgatgttcatttaatgatttcaccagtgcataaatacatagaggcttactcagactcaggtgcagatatcattactatacaccctgaagcaacagacgatttaagcgcatctattttaaagataaaagaattaaaaaaaaaggttggtgtttctttaaatcctgaaaccaaaattgatacaattttaaagcacttaagcaaaattgatttagtattaataatgagtgtaa

SEQ ID NO: 289617 - DNA, 250 bp, Unknown
  Bacterial polypeptide expressing nucleotide sequence isolated from the Sargasso Sea
tatgtctagatcaattaagatttctccttctatactctcatgtgattttagtaaaattggtaaagaagtagaggccttagagaaggctggtgctgactatattcacgtagatgttatggatgggcattttgttccaaatcttactattggtcctgatgtcataaagaatataaggcctttcagcaaaaaaatttttgatgtccatttgatgatttcgccagttgataaatatattaaacaattttgctga

SEQ ID NO: 289618 - DNA, 661 bp, Unknown
  Bacterial polypeptide expressing nucleotide sequence isolated from the Sargasso Sea
aatgaaaaaaataaaaatttcaccttcgatactttctgctgattttggtcaactaggaaatgaaattaaaagactagaagatggtggggctgatttgatacatgtagatgtaatggatggtcactttgttccaaacttaacaattggacctccagtaatcaaaagattaagaaaatatacaaaacttccatttgatgtacacttgatgatttcacctgtacataaatatattgaagattatgcagaagctggcgccgatataattaccatacatcctgaagcaactgaaaatcttaaagagtctattaaccttattaaaaaattaaataaaaaagttggcgtatcattaaatcctgatactaaaatagatattataaaagaacatatttcagaaattgaattaattttggttatgagtgtatatccgggatttggtggacagaaatttatttcggaagtgatttcaaaaattaaagttttgaaacaaataaaggaagcaaataaatttacatttgatattgaagtagatggtggaataaatttttcaaattcaaaagaagttataaaagctggtgcaaatattttagtttctggaactacaatttttaaagaaaataatggagatataaaaaaaaatatagaaatacttaaagcagtgtaa

SEQ ID NO: 289619 - DNA, 382 bp, Unknown
  Bacterial polypeptide expressing nucleotide sequence isolated from the Sargasso Sea
aatgaaaaaaattcaaatttcaccatctattcttgctgcagattttagccaactcggtaatgaagtaaatcgcttagaaagggctggtgcagacatgatacatgtggatgttatggatggacattttgttcccaatttaactattggacctccagtaatcaaagcattaagaaactacaccaaacttccatttgacgttcatctaatgatatcgcctgtgcataaatatattaaaaattttgctgaagcaggttcaaacataatcacaattcatccagagactacagataacgtggaagattctataaaacttataaaaagtcttaacaatcaagttggtttgtcaattaatcctgatattccgttagattcaataaaaaaa

SEQ ID NO: 289620 - DNA, 147 bp, Unknown
  Bacterial polypeptide expressing nucleotide sequence isolated from the Sargasso Sea
tatgaaaaaaatacaaatttctccctcgatattatctgctgacttcagtcaattaggaattgaaattaagaggctcgaggacgcaggtgcagatatgatacatgttgatgtaatggatggtcatttcgttccaaatttaactattgg

SEQ ID NO: 289621 - DNA, 250 bp, Unknown
  Bacterial polypeptide expressing nucleotide sequence isolated from the Sargasso Sea
tatgactaaagttaaaatatcaccatcaattttgtcagcagattttagtaaacttggtaacgagattcagagcttagaaaaggctggcgcagatttaattcatattgatgttatggatggacactttgtaccaaacattactataggtccagaggtaatttcaaaacttcgaaaacacactgcgttaccctttgatgttcatttaatgatttcaccagtcgataattttattaaaaattttgcagatgcg

SEQ ID NO: 289622 - DNA, 697 bp, Unknown
  Bacterial polypeptide expressing nucleotide sequence isolated from the Sargasso Sea
catggtcaattcgctctctccgcgcatagcaccctcaatccttgctgccgatttcgcaaatctcggcaaggaaatcacggccattgacatagccggagcggattgggtccacatagacgtaatggatggccattttgttccgaatattactattgggccagccgttattaaatcgcttaggcactacaccgaattaccatttgatgttcatctaatgatttctcctgttgatcccatgattgaggcttttgctgaagctggtgctgatactatctccgttcatcctgaatcaggtcccaatttacaccgcactctgcaaaccatacggaacttaaaaaaacgtgctggaatagtattaaatccagcgacaccaataaataacattgatcaagttatcgatattgtggaccttattttggtaatgactgtaaaccctggttttggtggtcagaaattcatctcaagccaactaaataaaatcaggtctattagaaaaataatagatcagcacgttagtaaaggcggcgcttccatagatttagaggtcgatgggggaatagatgcaaaaacctcaaaactagctatacaggcaggggcagatgccctagtagctggaaccgcagtctttagcggggggccagattgttatgctgaaaatattaattccctaaggggtaattcggctaagtatcaatga

SEQ ID NO: 289623 - DNA, 616 bp, Unknown
  Bacterial polypeptide expressing nucleotide sequence isolated from the Sargasso Sea
tagtaaattaggtgaagaagtaattgctcttgaaaaagcaggtgctgattatattcatattgacgttatggatggacattttgttcctaacctaacaattggtccggaagtaattaaaaaactcagaccattaacaaaaaaaatttttgacgttcatttaatgatatctccagtagataattttattaaagatttctcaaaagctggagcagatataataacttttcacccggaagctaccccaaacatattaaatacgattaatttaattaagaaagaaggaaaaaaagttgggatatccttaaagcctaaatcaaaaattgaattaattgagaaatatatagatcaagttgatctggttcttattatgagcgtcgaaccaggtttcggaggtcaaaaatttatgccagaagtcttagataaaacaaaaaagatcaaagaattagtggataaaaaaaacttgaaaaccgaaatagaaatagacggggggattaattttgaaaattgcacccaagcaaaaaaggcaggcgcaaacgttctcgtttctggctcaactatctttaaagaaaataaaggtgacctaaaaaagaatataggaattcttagaacaaattag

SEQ ID NO: 289624 - DNA, 352 bp, Unknown
  Bacterial polypeptide expressing nucleotide sequence isolated from the Sargasso Sea
atggactcaataataaaaatatcaccatcaattttgtcagctaattttagtaaattaggtgatgaaattttatctttagaaaaagcaggtgctgattatattcatattgatgtcatggatggacattttgttccaaacataactattggcccagaagttattaaaaaacttcgtccaataactaaaaaaacattcgatgtacacttaatgatttctccagttaataattttataaaagattttgccgaggctggggcagatattattacttttcatcctgaagctaccgaaaatattagtgaaactattaaattaattaaaaaatataaaaaaaaagttggaatttctttaa

SEQ ID NO: 289625 - DNA, 599 bp, Unknown
  Bacterial polypeptide expressing nucleotide sequence isolated from the Sargasso Sea
aattaaaaaattagaagaaggaggggcagacctaattcatgttgatgtaatggatggacattttgttccaaatcttacaataggtcctcctgttattaaagcattaagaaattatacaaaattaccttttgatgtgcatttgatgatttcaccagtacacaaatatattaaagattatgctgatgctggagccgacataatcacaattcatccagaggcaactgaaaatttaaaaaattcgattgaacaaataaaaaaattaaaaaaaaaagtcggcatatctttaaatcctaatacagaaattagtgtattggatgaaaacatttctgatatagatttaattttaataatgagtgttttccctggttttggtggtcaaaaattcattcctgaagttatagaaaaaattaaaaaactaaaaaaaattaaagatgaaaaaaaatataatttcgatattgaagttgatggaggaataaatttttcaaattctaaagatgttttaaatgctggggcaaatattttggtctctgggacaacaatatttaaagaaaataatggagatataaaaaaaaatatagaaaaactcaaatctctttaaa

SEQ ID NO: 289626 - DNA, 238 bp, Unknown
  Bacterial polypeptide expressing nucleotide sequence isolated from the Sargasso Sea
aatgaaaccattcctaattgctccatcaatactatcggccgatttcgctcgacttggcgaagacgtagaaaaggtattagaggctggcgctgatgtggtgcatttcgatgtaatggataaccactatgtacccaatcttacgtttgggccaatgatttgcgaggcgttaagaaactacggcattactgctcctattgacgtgcacctaatggtgaaacccgtcgatgacttaattgaa

SEQ ID NO: 289627 - DNA, 391 bp, Unknown
  Bacterial polypeptide expressing nucleotide sequence isolated from the Sargasso Sea
aatgtcggttaaaatatcaccttctatactagcatcagacttttcatcattaggggatgaggtcgttaatatcactcaagccggagcagactacatacacgtagatgtaatggatggacactttgttcccaatctcacaataggaccagatgtggttaaatcaataagagataaatcttcattaccatttgatgttcatttgatgatcgatcctgtacagccttatattgagaagtttgttgaagctggagctgatattgtttcagttcatcccgaggcaaatgatgacacagaggcatgtttgaataaaattaaatcgttaaatgcaaaggctggacttgcaatcaacccagatactgaatgggaagcggtgaaaccctttatggataaa

SEQ ID NO: 289628 - DNA, 635 bp, Unknown
  Bacterial polypeptide expressing nucleotide sequence isolated from the Sargasso Sea
tatgagttcttcgataaaaatatctccttcaatattgtcgtctgattttagtaagttgggggaagaggttgtctctctagacaaagctggagccgattatattcatgtagacgtcatggacggacattttgttcctaatataacaattggaccagcaattataaaaaaaattagacctctaacaaagaaaatttttgatgttcatttaatgatctcaccagtggacaaatatattgatgaatttgcaaaagctggctcagatattattacttttcatccagaagcaacgagtgatattaataagacaatagggctaattaaaaaaaattcaaaaaaagtaggagtatcattaaaaccaaatacaaaaattgacaccattattgatcatttaaaaaatatagatcttattttaataatgagcgtagagcccggatttggtggacaaaaatttatgcctgaggttttaaaaaaattagaacaattaaaaaaaattatagatgaaaaaaaacttaatattgatttagaaatagatggtggaattaattttgaaaactgtaaactagctaaaaaagctggagcaaatatattagtttctggctctacaatttttgcagaaaataatggcaacctaaaaa

SEQ ID NO: 289629 - DNA, 235 bp, Unknown
  Bacterial polypeptide expressing nucleotide sequence isolated from the Sargasso Sea
aatgtcggttaaaatatcaccttctatactagcatcagacttttcatcattaggagatgaagtcgttaatatcactcaagccggggctgactacatacatgtagatgtaatggatggacactttgttcctaatctcacaataggtccagatgttgttaaatctataagagataaatcttcattgccgtttgatgttcatttgatgatcgatcctgtgcggccttatatgaaaagt

SEQ ID NO: 289630 - DNA, 661 bp, Unknown
  Bacterial polypeptide expressing nucleotide sequence isolated from the Sargasso Sea
atgaaaaaaattcaaatatctccatcaattctctcagctgatttcagtaatctagaaaaagatattaaaaaacttgaaatagcgggagcagacatgattcatgttgatgtaatggacggccacttcgtaccaaatataactattggtccacctgttataaaagctttgagaagtaaaacatcgcttccatttgatgttcatttaatgattagtccagttcataaatatataaaagattttgcgaatgcaggagcagatattattacaattcatccagaggctacttctaatttacaagagtccattgatgaaataaaaagttttaaaaaaaaggtaggcatatctttaaatccagataccaaaattgatattgttgaagattatctagataaagtagatctaatacttatcatgagtgtttatcccggttttggtggtcaaaaatttataactgatgttttggaaaaaattaaaagtttaaaaaatttaaaagataaaaaaaaatttaattttgatattgaagttgatggtggaattaatttttcaaatttcaaatcagtaattgatgcaggcgccaatgtcttggtatcaggtactacaatttttaaagagaacaatggagatataaaaaagaatatagattttctaaaatcgatttgat

SEQ ID NO: 289631 - DNA, 370 bp, Unknown
  Bacterial polypeptide expressing nucleotide sequence isolated from the Sargasso Sea
aatgaaaaaaatacaaatttcaccctcaatcttatctgctgactttggtcagttgggtgttgaaattaacagattaaaagatgcaggtgcagatatgatccatgtggacgtaatggatggccattttgttccaaatttaacaataggaccccctgtgataaaagcattgaaaaaacaatcttctatgatttttgatgttcatctaatgatttctcctgttcataaatacattgaggcttatgcagatgctggggcagatataattacaatccatcctgaggctacagatgatttaaattcatcaattttaaaaattaaagaattaaataaaaaagttggtttgtccctcaatcctaaaactaaaatgata

SEQ ID NO: 289632 - DNA, 613 bp, Unknown
  Bacterial polypeptide expressing nucleotide sequence isolated from the Sargasso Sea
aatgaaaaaaatacaaatttcaccttcaatccttgctggggattttagcaagctaggatctgagattaaaaaattagaggatggtggagcagacatgatacacgtggatgttatggatggacacttcgttcccaatttaactattggaccccctgtcataaaatctcttcgaaaatatacgaatttaccttttgatgtacatttgatgatatcacctgttcataaatatataaaaaatttctcagacgcgggtgcagacataattacaatacatccagagactacaaaaaatttaaaagagtctattgaattaatcaaaagcttggggaaaaaagtaggtttatcgctaaatccagaaacctcaatagaaaccatagaaaaatatttacaagaaataaacttagttcttgttatgactgtacatcccggttttgggggccaaaaatttatatcaaaagtattggacaaaattaaaaatttgaaaaaaattaaagatgaaaaaaaaattaattttgaaatagaggtagatggaggaattaattttgataataataaacttgttattcaggctggagctaatattcttgtttcaggtacaactatttttaaaaat

SEQ ID NO: 289633 - DNA, 625 bp, Unknown
  Bacterial polypeptide expressing nucleotide sequence isolated from the Sargasso Sea
gctgattttagtcaattagggaatgagattaaaagactcgaagatgcaggagcagatatgatacatgtcgatgtaatggatggtcactttgttcctaatttaactattgggcctccagtcattaaggctcttagaaaatattcagaattaacctttgatgtgcatttgatgatttcgccagtccataaatatataaaagattttgcagatgcgggagctgatataattactatccaccctgaggcaactgataatttaaaagaatcaataaaacatattaaaagtttcaaaaaaaaagttggtatttcacttaatccaaatactgaggtcaacataattaaaaatgaattagaaaatgtagatttagttttagtcatgagtgtacatccaggttttggagggcagaaatttattcctgatgttattaaaaaaattgaattattaaaaaaacttaaagataataagaattataagtacgatattgaagtggatggtgggataaatttttcaaattcaaaggatgtaatatatgcaggggcaaatattcttgtgtcaggaactacaatatttaaagaaaacaacggaaatattaaaaaaaatatagaaacacttaaagaagtgtaga

SEQ ID NO: 289634 - DNA, 473 bp, Unknown
  Bacterial polypeptide expressing nucleotide sequence isolated from the Sargasso Sea
tatgaaaaaaatacaaatttccccctcaatattatctgctgactttggtcaattagggaatgaggttaaaagactcgaggatgcaggggcagatatgatacatgttgacgtaatggatggtcactttgttcctaatttaactattgggcctccggtaattaaaacactcagaaaatattcagaattaacatttgatgttcatttaatgatttcaccagtccataaatatataaaagattttgcagatgcaggagctgatataattactatacaccctgaagctactgataatttagcaaagtcaattaagcatattaaaagttttaaaaaaaaggttggtatttctctaaatccaaatacagaggtcaaaataattgaagatgaattaaaaaatgtggatttaattttagtcatgagtgtatatcctggttttggggggcagaaatttattcctgacattattaaaaaaattg

SEQ ID NO: 289635 - DNA, 349 bp, Unknown
  Bacterial polypeptide expressing nucleotide sequence isolated from the Sargasso Sea
atgaaaaaaatacaaatttcaccatcaattctttcagctgatttcagccagctaggaaatgaaataaaaaaattagaagaaggtggggcagatatgattcatgtggatgttatggatggtcattttgttcctaatcttacaattggccctcctgtaattaaaaggttacgcaattgtaccaagctaccttttgatgttcatttgatgatatctcccgtacacaaatatattgaagattattcaaaagcaggggcagatataattacaatacatccagaagccacagataatttaatagattcgattgatcatatcagaaagctaaataaaaaaattggagtttctttaa

SEQ ID NO: 289636 - DNA, 664 bp, Unknown
  Bacterial polypeptide expressing nucleotide sequence isolated from the Sargasso Sea
tatgtcatctattataaaaatatctccatcgattctttctgcaaattttgctaaattgggagaagaaatagttgctttggataaagctggagctgactatatacatgttgatgtaatggacggtcattttgtccccaatattaccatcggcccagaggtagtaaaaaaattaaggcccttttctaaaaaaatttttgatgtgcatttaatgatttctccggttaacaattatattagacaatttgcagaagcaggcgcagatataattacctttcatcctgaagccacagataatattaaagaaacaataaatcttattaaaaaatatggaaagaaagttgggatatctctcaaacctaaatcagaaatcaaacttattgagaattatttagatgacattgatcttgttcttattatgagcgtagaaccaggatttggagggcaaaaatttatgcctgaggtaattgaaaaattaaaaaatataaaaagactagcagatgaaaagaaattaaaaattgatattgaaatagatggtggaataaactttgagaatagcaaatcagttattgaggcaggagcaaatgttcttgtctcagggtcaacaatattcagagagaataaaggtgatttaaagaaaaatataggattacttaaatcaaattag

SEQ ID NO: 289637 - DNA, 343 bp, Unknown
  Bacterial polypeptide expressing nucleotide sequence isolated from the Sargasso Sea
aatgaaaaaaatacaaatttcaccatcaattttgtctgcagatttcagccaactgggaaatgaaatagcaaaacttgccaatgctggagcagatatgatccatgtagatgttatggatggacattttgttccaaatttaacaattggtccaccagtaataaaagctttaaaaaagaatacatctataccattcgatgttcatttaatgatatcaccggttcataagtatattgaagcctatgctgaagctggcgcagatattattacaattcatccagaagcaacagatgatctcgaagagtcaatcaataaaataaaaaaattagaaaaaaaaagtaggtgt

SEQ ID NO: 289638 - DNA, 321 bp, Unknown
  Bacterial polypeptide expressing nucleotide sequence isolated from the Sargasso Sea
aatgtctaaacaatcaaacgtaatagcgccctcaattttatcagctgattttgcaaggttaggcgaagaagtaaaagatgtgctcagagccggagcagactggattcacttcgatgttatggataatcattttgtcccaaacctgactgttggcccaatggtttgtgaatctttgagaaaaaatgatatcaattgtcccattgacgtccacttaatggtagagccagtagatgacctcattaaaatgtttgcagacagcggtgctacttctatcacctttcatcctgaagcatctaagaatcctgagaagtctctcgagct

SEQ ID NO: 289639 - DNA, 456 bp, Unknown
  Bacterial polypeptide expressing nucleotide sequence isolated from the Sargasso Sea
gatgaatacctcaattaagatatcaccatcaattttggcgtgtgactttagtaaaattggaaaagaggttgaggctctggaaaaagctggggctgactacattcatgttgatgtgatggatggccactttgttccaaaccttaccattggtcctgacgtaataaaaaaaataagaccttttagcaagaagatttttgatgttcatcttatgatttccccagtagataattatattgaacaatttgcaaatgcaggtgcagatattattacctttcatccagaagcaacgaaagatacaggtgcaacaatagagctaattaaaaagtttaaaaagaaagttggaatatcacttaaacctaaaagtgaaattgatcttattaaagactatatgcacaaaatagatttaatattaatattgagtgttgagcctggctttgggggacaaaaatttatgcc

SEQ ID NO: 289640 - DNA, 421 bp, Unknown
  Bacterial polypeptide expressing nucleotide sequence isolated from the Sargasso Sea
atagatgctggagcagacttaattagttttcatcccgaagcaaccaaacatatccatagatcaattcacgccataaaagacaaaggctgtaaagcaggacttgtttacaatcctgcaactccacttcatacgctagaaagtgttcttgaggatctagatttagtattaatcatgagtgtaaatcctggttttggaggccaatcgtttattcatagctcgcttgaaaagattgctcaagttagaaaaatgatagatgaatctggaaaagatgtccgcttggaggtagatggtggaataaacaaggatactatcggccttgcatctgaagcaggcgctgatacatttgtagcaggctcagctatattcaatactgaaaattatgagcaaacaatatctgaacttcgttcaaaaattgtttaag

SEQ ID NO: 289641 - DNA, 599 bp, Unknown
  Bacterial polypeptide expressing nucleotide sequence isolated from the Sargasso Sea
aattacatctttggataaagctggagcagattatattcatgtggatgttatggatggccactttgttccaaacctaacgataggacctgaggttataaaaaaacttagaccattcaccaaaaaagtgtttgatgttcatttgatgatatcgccagttgatcaatatatcgaagcatactctaaagcaggagcagatataataacttttcaccctgaggcaacagaagatacttcaaaaacaataaatttaataaagaaacttaaaaaaaaagttggaatttctcttaagcccgaatctagtattgatttaattaaagaccatctgagtaaaattgatttaatactaataatgagtgttgagccaggttttggaggacaaaaatttatgccaaaagttttggacaaacttaaaaatattgcaaaaatagtctctgaaaaaaaattaaatatagatatagagatcgatggcgggataaattttgaaaattgtagattagctaaagaagctggagcaaatgttttggtttctggttcaactatttttaaagaaaataaaggggatttaaaaaaaaatattggcatactacgttcaaattaat

SEQ ID NO: 289642 - DNA, 349 bp, Unknown
  Bacterial polypeptide expressing nucleotide sequence isolated from the Sargasso Sea
atgaaaaaaaaaatacaaatttcaccctcaatcttgtctgctgactttggtcagttgggtgttgaaattaacagattaaaagatgcaggtgcagatatgatccatgtggacgtaatggatggccattttgttccaaatttaacaataggaccccctgtgataaaagcattaaaaaaacaatcttctatgatttttgatgttcatctaatgatttctcctgttcataaatacattgaggcctatgcagatgctggggcagatataattacaatccatcctgaggctacagatgatttaaattcatcaattttaaaaattaaagaattaaataaaaaagttggtgtgtccc

SEQ ID NO: 289643 - DNA, 406 bp, Unknown
  Bacterial polypeptide expressing nucleotide sequence isolated from the Sargasso Sea
tatgagtaagtttgtaaaaatttcaccttcaattctttcagcggactctagtaagttgggagaggaagttatttctcttgataaagctggtgcagattacattcacgtagatgttatggatggtcactttgtgccaaatataacaataggaccaggagttataaaaaaaatcagaccatttactaaaaaaatttttgatgttcacttaatgatatcaaatgttgataagtatattgaaaaatttgcagaagcaggttcagatataatcacttttcatcccgaagcaaccagcaacacttcaaaaacgattgatttgataaaaaaacaaaagaaaaaagttggtatttcattgaaaccgaattcaaatattaatttaattatagatcatttaaataatattgattta

SEQ ID NO: 289644 - DNA, 334 bp, Unknown
  Bacterial polypeptide expressing nucleotide sequence isolated from the Sargasso Sea
tatgaaaaaaataaaaatttccccctcaatattatctgctgactttagtcaattaggaaacgagataaagaggctcgaggatgcaggtgcagatatgatacatgttgatgtaatggatggtcatttcgtccctaatttaacaattggacctccagtcataaagactcttagaaagcactctgagttaacctttgatgtgcatttaatgatttcaccagtccataaatatatcaaagattttgcagatgcaggagctgatataattactatacaccctgaagccactgataatttaacagaatcaattaaacatattaaaaatttgaaaaaaaag

SEQ ID NO: 289645 - DNA, 265 bp, Unknown
  Bacterial polypeptide expressing nucleotide sequence isolated from the Sargasso Sea
atgaaaaatatacaaatttcgccttcaatactctctgctgattttagccaattaggtaaagaaataaaaagattagaagatggtggtgcagatttaattcatgttgatgtaatggatggacattttgttcccaatataacaattgggcctccagttataaaaacgctaagaaattataccaaattaccttttgatgtacatttaatgatctcaccagtgcataaatatattaaaaattttgctgaagctggatttctgatataat

SEQ ID NO: 289646 - DNA, 208 bp, Unknown
  Bacterial polypeptide expressing nucleotide sequence isolated from the Sargasso Sea
atggatacttctataaaaatttcaccctctattttatcaagtgactttagcaagcttggcgaagaggtgaaagcattagaaaaagctggtgcagattatatccacgttgatgttatggatggccactttgttccgaacttaactattggtcctgatgtaataaaaaaaattagacctttaaccaaaaaaatttttgacgttcatttaa

SEQ ID NO: 289647 - DNA, 655 bp, Unknown
  Bacterial polypeptide expressing nucleotide sequence isolated from the Sargasso Sea
aaaaatacaaatttcgccgtcaattctatctgctgattttagtcagctaggaaatgaaattgaaaaattagaaaagggaggtgctgatctaattcatgttgatgttatggatgggcactttgttcccaatctaaccattggaccccctgttattaaaactttgagaaattacaccaaattaccatttgatgtgcatttaatgatttctcctgtacataaatatatcaagaattttgcagaagctggttcagatataattacaattcatcctgaggcaactgaaaatttaaatgaatcaatttctctaattaaaaaattaaataaaaaagttggagtatcattaaatccaaatacagaaataaatatcattgagtctcaattaaagaatatagatttagttttaataatgagtgtttttccaggatttggaggacaaaaatttatacctgatactataaaaaaaattaaggctctaaaaaaaattaaggataataataattatatttttgatatcgaggtagatggtggtattaacttttcaaattcaaaggaagtaattaatgctggtgcaaatattttagtttctggaacaacaattttcaaagaaaataatgggaatataaaaaaaaatatagaaacacttaaaactgtgtaa

SEQ ID NO: 289648 - DNA, 544 bp, Unknown
  Bacterial polypeptide expressing nucleotide sequence isolated from the Sargasso Sea
catgagtgagataataattgccccatctattctttctgctgattttgcaaggttaggtgaagaagtcgagcatgttcttgaggctggtgctgattgggttcactttgacgtgatggacaatcactatgttcctaatctgacaattggaccgatggtatgtaaaagtttgcgtgagcacggcatagaagctttcatcgatgtgcatttaatgattgagccggtggatgcattggcagcagattttgccaaagctggagcatcgttaataagtttccatcctgaagcctcgaatcatgtccaccgttccattcatgcaattaaagatgctggttgtcaggttggcttggttttaaatccggcaacaaatgtaaatgttttggacagtgtgctggaggacatcgacttagttctcattatgagtgttaacccaggttttggtggacagtcctttatccatagttcactggaaaagattgctgcggtcagaagtctaattgaccaaagtgggaaatcgatccgttggaggtcgatgggggaatcaata

SEQ ID NO: 289649 - DNA, 466 bp, Unknown
  Bacterial polypeptide expressing nucleotide sequence isolated from the Sargasso Sea
aatgaaaaaaatacaaatatctccatcaatattatcagcagattttggtcaactagaaaatgaaattataaaattagagaagggtggcgcggatctaattcatgttgatgttatggatggccattttgttccaaatttaacaattggaccacctgtaataaaagccttacgaaaatgtacatcattaccttttgacgtacatttgatgatttcgcctgtacataaatatataaaagatttttcagatgctggcgctgacataatcacaattcatccagaggcaacagaaaatttagaagactcaattaaattaattaaaacattaaaaaaaaaagttggagtatctttgaatccaaatacacaaattaatgttatagaaaaaaattttgataagatagatttagttttagttatgagtgtatttcccaggatttggaggtcaaaaatttataccagaaacaattaa

SEQ ID NO: 289650 - DNA, 280 bp, Unknown
  Bacterial polypeptide expressing nucleotide sequence isolated from the Sargasso Sea
atgaatcagattaagatatgcccttcaattttgtctgcggactttactcgtcttgctgagcaagttcgtgaagctgaagatgcgggagttgactatatacatgtagatgttatggatgggcattttgttcctaatattaccatcggtcctttgattgtaaaagctttgcgtcctgttacccaactgccgctagatatacacttaatgatagataatcctgagctctatatagaagattttagtaaagcaggagctgatataattactgtgcaccaggaag

SEQ ID NO: 289651 - DNA, 148 bp, Unknown
  Bacterial polypeptide expressing nucleotide sequence isolated from the Sargasso Sea
atgaaaaaaattcaaatatctccatcaattctttcagctgatttcagtaatttagaaaaagatataaagaaacttgaaacggcaggagcagacatgattcatgttgatgtaatggacggccactttgtacccaatatcactattggtc

SEQ ID NO: 289652 - DNA, 188 bp, Unknown
  Bacterial polypeptide expressing nucleotide sequence isolated from the Sargasso Sea
aatgagcagtaaagactacataattgcaccatcaatattatctgcagacttcgctcgtcttggagaggagtccaaaaatgttttagattctggtgcagattggatccattttgatgtgatggataatcactatgttcctaatttaactataggacctatggtctgtaaggcacttcgagattacggaa

SEQ ID NO: 289653 - DNA, 487 bp, Unknown
  Bacterial polypeptide expressing nucleotide sequence isolated from the Sargasso Sea
atgaatgattatattatagccccatctattctatcagcagactttgcaaatttaggcaaggatgtttctgaggttattgacgcaggcgcagattttattcattttgatgtcatggacaatcactatgtcccaaatctcacagttggtcctatggtttgtaaatctctccgagattatggtatcaatgccactatagatgtgcatcttatgatcagccctgtcgatgagataatacctgacttcgccaaagcaggagctaattacattacatttcatcctgaggctactaagcatgttgatcgaacgatcaaacttatcaaagatcatggttgtcaacctggagtagttcttaaccctgctactaatgcttcaatccttgaatactgtttggatcaaatagatatggttttgttgatgtctgttaatcctggatttgcaggtcagaaatttattgagtctacatatgacaaaatcattgagggagaga

SEQ ID NO: 289654 - DNA, 333 bp, Unknown
  Bacterial polypeptide expressing nucleotide sequence isolated from the Sargasso Sea
aatgaaaaatatacaaatttcaccttcaatactctcagcaaattttagtcagttaggtaatgagattaaacgactagaggatggtggtgcagatttgatacatgttgatgtaatggatggacattttgttccaaacatcacaataggtcccccagtgataaaaactttaagaaattatacaaaattaccctttgatgtacatttgatgatctcgccggttcataaatatattaaaaattttgctgaagcaggatctgatataataacaattcatcctgaagcaactaataatttaattgagtcaattcaacttataaagcaattaaagaaaaa

SEQ ID NO: 289655 - DNA, 547 bp, Unknown
  Bacterial polypeptide expressing nucleotide sequence isolated from the Sargasso Sea
tatgagtgaaaagaattacataatagctccctcaatcttagcttcagattttgcaaggcttggtgatgaggtaaaagacgttttaaatgctggagcagactgggttcattttgatgttatggataatcattatgtgccaaatcttacaattggacctatggtttgtaaggcacttcgtgactatggaatcaaagaatttatagatgtccatttgatgatcgatcctgtcgatgaattggctcaaagttttataaaagcaggagcagatctaataagttttcatccagaagcatccaaacatattcatagatcaattcatgcaattaaagataaggaatgcaaagtaggacttgtatacaatcctgcaactccattgcataccctagaaaatgtaattaatgatattgaccttgttttaataatgagcgttaatcctggatttggcggacagtcctttattcatagttctttggaaaaaatttctcaagttagaaagatgattgatgattctggaaaagatattcgtcttgaagttgatggcggcatt

SEQ ID NO: 289656 - DNA, 443 bp, Unknown
  Bacterial polypeptide expressing nucleotide sequence isolated from the Sargasso Sea
ggatgaattggcccaaagctttatagatgctggagcagacttaattagttttcatcccgaagcaaccaaacatatccatagatcaattcacgcgataaaagacaaaggctgtaaagcaggacttgtttacaatcctgcaactccacttcacacgttagagagtgttcttgaggatctagatttagtattaatcatgagtgtaaatcctggttttggaggccaatcgtttattcatagctcgcttgaaaaaattgctcaagttagaaaaatgatagatgaatctggaaaagatgtccgcttggaggtagatggtggaataaacaaagataccattggtctagcatctgaagcaggcgctgatacatttgtagcaggctcagctatattcaagactgaaaattatgagcaaacaatatctgaacttcgttcaaaaattgtttaag

SEQ ID NO: 289657 - DNA, 601 bp, Unknown
  Bacterial polypeptide expressing nucleotide sequence isolated from the Sargasso Sea
tgaaattaaaagactggaagatggaggagcagatttaatacatgtcgatgtaatggatggtcattttgttcctaacctaactataggtcctccagttataaaaaatttaagaaaatatacgaacttaccttttgatgtgcatttgatgatatctccagttcataaatatttaaaagattatgcggacgcaggagctgatattataacaattcatcctgaagcaacagataatttaaaagactcaattaacttaattaaaaatttaaataaaaaagtcggagtatcattaaatcctaatacaaatttagatgtattaatgagtgaaataaaaaatattgatttaattttaataatgagtgtttttcctggttttggaggtcaaaaatttataccaaaagtaattgagaaaattaaaaaattaaaaaaaattaaagaggaagaaaaaattagttttgatattgaagtagatggtggaattaatttttcaaattttagagaagttttagatgctggagcagatattcttgtctcaggtacaacaatttttaaagaaaatgatggaaatataaaaagaaatatagaaactctaaaatctatataa

SEQ ID NO: 289658 - DNA, 331 bp, Unknown
  Bacterial polypeptide expressing nucleotide sequence isolated from the Sargasso Sea
atggctaatattaaaatttcaccatcaattttatcagcagattttagtaaattaggtaatgaaattcaggacttagaaaaagctggggctgactttatacatatcgatgtaatggacggacactttgttcctaatattactattgggccagaagttattaacaaactgcgtaagcatacatcattaccatttgatgtgcatttgatgatttcgccagttcatgatttcatcaaaaattttgctgaagccggtgcggatatcattactattcatccagaagcaacaaaaaatctaccagattcaataaaaaaaattaggtcttataacaaaa

SEQ ID NO: 289659 - DNA, 574 bp, Unknown
  Bacterial polypeptide expressing nucleotide sequence isolated from the Sargasso Sea
gctgacatgatacacgtagatgtaatggacggtcattttgttccaaaccttactattggtccacctgttataaaatctttgagatctcatacaagtcttccatttgacgttcatttaatgatatcacctgtgcataagtatattaaaaatttttcagatgcaggggcagatattattacaatccatcctgaagcaactgataatttaattgactcaataaatcatattaaaaatttaaaaaaaaaggcaggagtttcattaaatcctgatacaaaaatctctgttgtagaaaaatatttagataaaattgatcttattcttatcatgagtgtctatccaggatttggtggtcagaagtttattcctgaagtagtttcaaaaataaaaacattgagtgaaataaaaaaaaataaaaatttaaattttgatattgaagttgatggaggaataaactttgaaaactcaaagtttgtagttgaagcaggtgcaaatatattagtatctggtacaacaatatttaaagaaaatagtggtaacgtaaaaaaaaacattgaaactttaaaatcaatttaaa

SEQ ID NO: 289660 - DNA, 568 bp, Unknown
  Bacterial polypeptide expressing nucleotide sequence isolated from the Sargasso Sea
tatgattcatgttgatgtcatggatggccattttgttccaaaccttacaattggtcctcctgttatcaaaagtttgagaaagtatacaaaattaccttttgatgttcatttaatgatcgaccctgttcacaaatatatcaaagattatagtgatgctggcgctgacataataacattccatcccgaagctacagaaaatattttggaaacaatagatctgattaaatctttagacaaaaaagttggaatatcccttaatcctgatactgagataactgctgctgaggaacacttagataaaatcgacttagttttaataatgagtgtatatccaggttttggaggtcaaacatttataaataaagttgtaaaaaaagttgaagacttagaccagatcagaaaagaaaggaaactaaattttaaaatagagattgatggtggtataaattttgagacttcaaaaattgcagtagaagctggtgttgatatattagtttcaggcacaacagtatttaaagaaaataacggagatttaaaaaaaaatattaaaaccttaaaacaaatctaa

SEQ ID NO: 289661 - DNA, 394 bp, Unknown
  Bacterial polypeptide expressing nucleotide sequence isolated from the Sargasso Sea
atgaaaaatatacaaatatcaccctcgattttatcagctgattttagtcagttaggtacagaaataaaaagacttgaagaaggtggggccgatatgattcatgtggatgtgatggatggccattttgttcctaatttaacaataggtcctccggtaatcaaagcccttcgaaaacattgttcattaaaatttgatgttcatttaatgatttctccagttcataaatacatagaagcttatgctaatgcaggagcagatataattactattcaccctgaagcaactgataatttagaaaattcaattaaaaaaataaaagaaaaaaataaaaaagttggagtttcgctaaatcccgaaactaaaattaatttaattttaaattttctagatcaaa

SEQ ID NO: 289662 - DNA, 537 bp, Unknown
  Bacterial polypeptide expressing nucleotide sequence isolated from the Sargasso Sea
aatgaacagagttaaaatatcaccatccatcttatcagcagattttagcaagcttgcagaagaggtgagggcagtagacaaagctggagcagactatattcatattgatgtgatggatggccattttgtacctaatattagttttggaacaccaataattaaggatatcaggccacatacaaaaaaagtatttgatgttcatttaatgattgagccagcgaccccatacctagagtcgtttgctaactcaggagctgatattataaccgtccacgctgaagccgataagcatcttgatagaaatttagagtgtataaagagtcttgggaaaaaagcgggtgtttctctaaatccttcaaccccgcccaccgcaattgagcaagttattgataagcttgatcttatattagttatgacagtaaaccccggtttttcaggtcaaaaatttatttcttcccaactgcaaaagatagcaatgattaaagaattgattggtgagagacgtatagaattgtcggtagacggcggagtaaatgc

SEQ ID NO: 289663 - DNA, 604 bp, Unknown
  Bacterial polypeptide expressing nucleotide sequence isolated from the Sargasso Sea
aatgaaataagaaagctagaactaggtggagctgacttaattcatgtcgatgtaatggatggtcactttgttccaaatttaacaataggacctccagtaataaaaaacttaagaaaatataccaagcttccatttgatgtgcacttaatgatttctccagtacatgattacatcgaaaattatgcaaatgctggttctgatataataacaattcatcctgaagcaactaaaaacttaaaagagtctataaatttgataaaaaaatttggtaaaaaagttggtgtatctttaaatccaaaaactgaaataaaaactttaattggtgaaatacataatattgatttagtgcttgttatgagtgttaaccctggttttggtgggcaaaagtttatgcctgaagtattagataaaataaaagaattgaaaaaaataaaagatgaaaaccaatttcactttgatattgaagtagatggaggaattaattttagtaattataaaatagttttggaagctggtgctgatattttagtatctggaaccacagtttttaaggagaacaatggggatattaaaaccaatattgaaaaactaaaatcaatgtaaa

SEQ ID NO: 289664 - DNA, 205 bp, Unknown
  Bacterial polypeptide expressing nucleotide sequence isolated from the Sargasso Sea
aatgaaaaaaattcaaatttcaccttcaattttatctgctgattttagtcagctaggaaatgaaatcacaagattagaaaaaagtggagccgacatgatacatgttgatgtgatggatggtcattttgtaccaaaccttactatcggcccgcctgtaataaaaaacttaagaaattatacaaaattaccttttgatgtacattta

SEQ ID NO: 289665 - DNA, 598 bp, Unknown
  Bacterial polypeptide expressing nucleotide sequence isolated from the Sargasso Sea
atgtctagatcaattaagatttctccttctatactctcatgtgattttagtaaaattggtaaagaagtagaggccttagagaaggctggtgctgactatattcacgtagatgttatggatgggcattttgttccaaatcttactattggtcctgatgtcataaagaatataaggcctttcagcaaaaaaatttttgatgtccatttgatgatttcgccagttgataaatatattaaacaatttgctgatgctggatcagatataataactttccatccagaagcaacagataatatgggaaaaactattgatttaataaaaaaatgtaagaaaaaagttggtgtttctctaaaaccaaaaagtaaaattgaattaataaaagactacctgaaacaaattgatttggtattaataatgagcgttgaaccaggttttggtggccaaaaatttatgccagaagttcttccgaaattaaaagagttaaaaaaaattattgagaaagaaaaattgaatattgaccttgaaatagatggaggtattaactttgaaaactcaaaaattgctaaagaggcaggtgcaaacatattagtatcaggtt

SEQ ID NO: 289666 - DNA, 672 bp, Unknown
  Bacterial polypeptide expressing nucleotide sequence isolated from the Sargasso Sea
aattagttatggatagttctataaagatttcaccttcaattctagcgtgtgactttagcaaactcggcgatgaggttaaggctttagaagaagctggagctgattatattcatgtagatgtaatggacggtcacttcgttcctaatttaacaataggcccagatgtaataaaaaaaattagaccattgagtaaaaaaatttttgatgttcacttaatgatttcaccggtagacaaatatattgaacaatttgcaaatgctggagctgatataattactttccatcctgaggcaacagaggatacagaaaaaacaattgagttaataaagaaatttaataaaaaagtcggtgtatctttaaaacccaaaagtaatattagtcttataaaaaactatttagataaaatagatttggttttaataatgagtgtagaaccaggttttggtgggcaaaaatttatgcctgaagtattacctaaattaaaagagttaaggaaaattatagatgagaaaaaatataaattggacttggagatagacggaggtattaattttaaaaactcgaaggatgttaaagaggctggggccaatatacttgtttcggggtccactatatttaaagaaaataaaggggatttaaaaaaaaatatcacattacttcgtaaaaattgat

SEQ ID NO: 289667 - DNA, 670 bp, Unknown
  Bacterial polypeptide expressing nucleotide sequence isolated from the Sargasso Sea
atgagtgaccaaaaaaatataattgcaccgtctatcttagcttcagattttgcaaggcttggagaagaggtacgtaatgtacttgatgcaggagctgattgggtccattttgatgttatggataatcactatgttcctaatctcactatcggaccaatggtttgcaaagctcttagagaatacggcataaaagaatttattgatgttcatttaatgatagatccagtggatgaattggcccaaagctttatagatgctggagcagacttaattagttttcatcctgaagcaaccaaacatattcataggtcaattcatgcaataaaagataaaggctgtaagacaggacttgtttataatcctgcaactccacttcacacgttagaaagtgttcttgaggatttagatttggtattaattatgagtgttaatcctggttttggtggccaatcgtttattcatagctctcttgaaaaaattgctaaagttaggaaaatgattgacgaatctggaaaagatgtccgcttggaggtagatggtggaataaacaaggatactattggtcctgcgtctgaggcaggcgctgatacatttgtagcaggctcagctatattcaatactgaaaattatgagcaaacaatatctgaacttcgttcaaaaattgtttaaa

SEQ ID NO: 289668 - DNA, 556 bp, Unknown
  Bacterial polypeptide expressing nucleotide sequence isolated from the Sargasso Sea
tatgacttcagttaagatatcaccatcaattctatcttgtgattttagtaagattggttcagaagttgaagcattagaaaaagctggtgcagactacattcacgttgatgtaatggatggtcactttgttccaaatttaacaattggtccagatgttataaaaaaaattagaccctattcaaaaaaaatttttgatgttcacttgatgatttctcctgttgataaatatattgaacaatttgcaaacgctggttcagatattattacctttcatcctgaagcaaccgaaaatattgatcatacgattagtttgattaaaaaatttaacaaaaaagttggtatatcattaaaacccaaaagtgaaattagtcttataaaaaattttctaaaaaaagtagatttggtccttattatgagcgtagaaccaggttttggtggtcaaaaatttatgccagaagttttacctaaattagaggaattaaaaaaaattatagacaatgagaaatacaaaatagatttagaaatagacggtggtattaattttaaaaattcttaa

SEQ ID NO: 289669 - DNA, 673 bp, Unknown
  Bacterial polypeptide expressing nucleotide sequence isolated from the Sargasso Sea
atgaaagattacaaaatagctccttcgattctatcagcagatttttcgcggttaggcgaggacgttagcaatgtagttaaagctggagctgatattattcattttgatgttatggataatcattatgtaccgaacttaacatttggcccaatgatctgttcagccctaagagattatggtatagctgctccaatagatgttcatctgatgatcaaacctgtggatcgcataatacctgactttgcaaaagctggcgctaattacattacatttcatccagaagctactgatcatattgacaggactattggattaataaaagaacatgattgtaaggctggaatagtattaaatccagctactcctttaagttttttagaacattgtttagaaaacctagacatggtcttattaatgtctgtgaacccaggattccctggtcaaaaatttattgatggaacatataataaaatatccttagtcagagagctaatagacaaagccaataaaaatgtccggttggaagttgatggaggaatcaatctggataatattgcaaaggtggcatcagcaggagctgatacatttgtagctggttcagcaatttttaactctaaggattataaaaacacattaaactcaatgagagatcttttaagtcagatcaagtaaa

SEQ ID NO: 289670 - DNA, 414 bp, Unknown
  Bacterial polypeptide expressing nucleotide sequence isolated from the Sargasso Sea
aatgaaaactattaaaatttcaccatcaattctatcagcagattttagtaatcttggaagtgaaattcaaaatttagaaaaaggtggagctgacttaatacatattgatgtaatggatggacattttgttccaaatattactattggtccaggagttattaaaaaactaagaaattatacatcactgccatttgatgtacatctaatgatttctcctgtagataattttataaaaaactttgctgatgcaggtgctgatattataacaatacaccctgaggcaactgataatttaaataattcaataaataaaattaaatcttttaataaaaaagttgggatatcacttaatcctgaaacttctatagaaaaagtaatcccagttttaaatgttattgatttagttttaataat

SEQ ID NO: 289671 - DNA, 667 bp, Unknown
  Bacterial polypeptide expressing nucleotide sequence isolated from the Sargasso Sea
tatggatagaaatgtaaaaatcgcaccatcaatattatcggcagattttgcggaactgggcaaggaaatccaaaatattgatgctgccggagcggactatatccatatcgacgtgatggatgggcactttgttccaaacatcactattggtcctggagtggtaaaggcacttcgcccacacagcaacaaaccctttgatgtgcacttaatggtggctccagtcgatccctatataagtgcttttgctgaggctggagcagatataataacggtccacgcagaggctggaccacacacacaccgaaccatccaaggcataaagaaccttggcaagaaagccgggctttcgctcaatcctgccaccccggtgaatgtgatcgataatcttatcgatcaactggatctcatcctcgtgatgacggtaaatcctggtttcggtggccagaaatttattgaaaaccagattgaaaaaatctacgaaatacgccgtcgaatcgatgaatctggtttttcgattgatttagaagttgatggtggtatcgaccttttgacagcgaaacgggtcatcgccgcaggtgctgatgtccttgtagccggtacagcctcattccgcggcggcgttaattgctataaagacaatattagtcaattgcgcgcctcaaactaa

SEQ ID NO: 289672 - DNA, 595 bp, Unknown
  Bacterial polypeptide expressing nucleotide sequence isolated from the Sargasso Sea
atgaaaaaaataaaaatttctccctctatcctttcagctgattttagtcagcttggaaaagaaataagtaatttagaaaaaggaggagctgacttaattcatgtagatgttatggatggacattttgttcctaatttaacaataggtccacctgttataaaagctttgagaaaaaacacaaaattaccgtttgatgtacatttaatgatttctccagttcataaatatattaaagattttgctgatgctggatcagatataattacaattcatcccgaagcaacaaatgatttaaaagaatctatttctcatattaaagaactaaataaaaaggttggagtatcattaaatccgaataccaaaattgagataattgaatcccacttaaataatattgatttagttttagtaatgagtgtttttccaggatttggaggtcaaaaatttataccagaaactatgaaaaaaattattaatttaaaaaaaattaaagatgaaaaaaattatagttttgatattgaggttgatgggggtgttaatttttcaaattctaaggatataattaatgctggtgcaaatattttagtttctggga

SEQ ID NO: 289673 - DNA, 232 bp, Unknown
  Bacterial polypeptide expressing nucleotide sequence isolated from the Sargasso Sea
aatgaaaccattcctaattgctccatcaatactatcggccgatttcgctcgacttggcgaagacgtagaaaaggtattagaggctggcgctgatgtggtgcatttcgatgtaatggataaccactatgtacccaatcttacgtttgggccaatgatttgcgaggcgttaagaaactacggcattaccgctcccattgatgtgcacctaatggtgaaacccgtcgatgactta

SEQ ID NO: 289674 - DNA, 529 bp, Unknown
  Bacterial polypeptide expressing nucleotide sequence isolated from the Sargasso Sea
gatgaatctttcaccagtgatcgcgccctccattttgtcagcggattttggaaatgtgtcacgtgaaattgagcgtatccaccaggccggtgcatcgtgggttcatcttgatgtgatggacggaaattttgtaccaaatatcacttttggtgctgttgcaatggaatctttcagtaaaccggaggggtgcgtttttgatactcatctgatggtggtcaatcctgaaaagcatattcctgcattcataaaatccggtgcagatgtcatcagcattcacgcggaagcgactgaacacctgcaatatggattgaagatgattcgcgatcatggtgccaaggccagtgtggctttgaatcctgctactcccttggaggcattggactgggtttaccctgatctcgatatggtgcttctgatgtcggtcaatccgggatggggcgggcagtccttcattgctccagtttttgataaaatcaggagtctgcggcaacgacttaaagatcgagggattgacataccgattcaggtc

SEQ ID NO: 289675 - DNA, 370 bp, Unknown
  Bacterial polypeptide expressing nucleotide sequence isolated from the Sargasso Sea
atgaaaaaaatacaaatttccccctcaatattatctgctgactttagtcaattaggaaatgagattaagagactcgaggatgcaggtgcagatatgatacatgttgatgtaatggatggtcatttcgttcccaatttaactattggaccaccagtcattaagactcttagaaaacattcagaattaacctttgatgtacatctgatgatttcacctgtccataaatatataaaagattttgcagatgcaggagcagatataattactatacaccctgaagccacagataatttagcagaatcaattaaacatattaaaagttttaaaaaaaaaggttggtatttctctaaatccaaataccgagataacg

SEQ ID NO: 289676 - DNA, 294 bp, Unknown
  Bacterial polypeptide expressing nucleotide sequence isolated from the Sargasso Sea
gtaagaaatgtcctagatgcaggtgcagaatgggttcatttcgatgtaatggataatcactatgttccaaatttaaccattggcccaatggtatgtaaggctcttagagattttggtataaaagaatttatagacgttcacttaatgattgatccagttgatgagctagcacaaagttttatcgaggcaggtgcagatcttatcagttttcatcctgaagcatcgaaacatattcatagatcaattcatgctattaaagataaaggttgtaaggcaggtctcgtctttaatcca

SEQ ID NO: 289677 - DNA, 220 bp, Unknown
  Bacterial polypeptide expressing nucleotide sequence isolated from the Sargasso Sea
tatgagttctattaaaatttcaccatcaattttatcggcagactttagtaagttgggtagtgaaattcaggatttagaaaaagcaaaagcagatttaattcatattgatgtcatggatgggcattttgttcctaatattactattggtccagaagtaataaaaaagctaaggaaatatacttcattgccattcgatgtacatttaaatgattctcctgtt

SEQ ID NO: 289678 - DNA, 430 bp, Unknown
  Bacterial polypeptide expressing nucleotide sequence isolated from the Sargasso Sea
cccaagctttatagatgctggagcagacttaattagttttcatcccgaagcaaccaaacatattcatagatcaattcacgcaataaaagacaaaggctgtaaagcaggacttgtttacaatcctgcaactccacttcacacgttagaaagtgttcttgaggatttagatttagtattaattatgagtgtaaatcctggttttggaggccaatcgtttattcataactcgcttgaaaaaattgctcaagttagaaaaatgatagatgagtttggaaaagatgttcgcttggaggtagatggtggaataaacaaggataccattggtcttgcatctgaggcaggcgctgatacgtttgtagcaggctcagctatattcaatactgaaaattacgagcaaacaatatctgaacttcgttcaaaaattgtttaa

SEQ ID NO: 289679 - DNA, 662 bp, Unknown
  Bacterial polypeptide expressing nucleotide sequence isolated from the Sargasso Sea
gaaaaaaaaattactaattgcaccatctattctgtcttcaaatttctctcgattaggggaagaaattaaagatattcctgaagctggagcagatttgattcatatcgatgttatggatgggcattttgttccaaaccttacaatcggacctagtattataaaatcaactagagaacatactgatttagagtttgatgttcacctgatgattgaaaatgttgatcggtatatacctagctatgctaaggcaggagctgatataatcactattcactctgaagtaagcaaggatatttcaaaatctattgaaataattaaagatcatggaaaaaaagctgggttagcatttaacccaaaatcttctattaatatgcttagtcaatttataaataaactagatcttgttttaataatgactgtaaatccaggttttggcggacaaacctttattgaaagccaaatagaaaagattaaagctacaaagaaaattattgatatgagtaaaagatcagtacttcttgaagtagatggaggtataaatgaaagaaatattaaaaatgttgttgattctggagcaaatttaattgttgctggttcagcgatttttaatggtaaaaaaaatgaatataaactaaacatagaaaaacttaggattcactagt

SEQ ID NO: 289680 - DNA, 184 bp, Unknown
  Bacterial polypeptide expressing nucleotide sequence isolated from the Sargasso Sea
atgaatcgtatgattaagatcgcgccgtctatactctcggcggattttgcaaatttgggggcggaggtagaatccatcgacgctgctggatgcgactacgtacatattgatgttatggacgggcatttcgtgcccaaccttactttcggcccaccggtcatcgagtgcatccgtccttgcacga

SEQ ID NO: 289681 - DNA, 263 bp, Unknown
  Bacterial polypeptide expressing nucleotide sequence isolated from the Sargasso Sea
tatggcaacttcaataaagatttcaccatcaatcctatcatgtgatttcagcaaattaggtgaggaaattcaatcattagaaaaggctggcgccgactatattcatgtagatgttatggatggtcactttgttcccaatttaacgattggtcccgatgtaataaaaaaaattaggcctttcagcaaaaaaatttttgatgttcatttaatgatttcgcctgtaaataattacatagaacaatttgcaaaagcaggtgctgaca

SEQ ID NO: 289682 - DNA, 661 bp, Unknown
  Bacterial polypeptide expressing nucleotide sequence isolated from the Sargasso Sea
atgaaaaaaattcaaatatcaccttctattctatcagctgattttagtgagcttggaaatgaaattaaaaagttagaaaaaggtggtgcagacatgatacatgtagatgtcatggatggtcattttgttccaaatttaactataggcccacctgtaattaaaagtttaagaaaatttacaagtattccttttgatgtacatttaatgatatctccagttcacaaatatataaaagattttgctgaagctggcgcagatataattacaattcatccagaggcaacagaaaatttaaatgattccatcaaagaaattcgaaattttaataaaaaagttggagtatcattaaatccagacacagaaataaacttaattgaaagcaatcttgaaaatattgatttggttttaattatgagtgtttacccaggatttggaggtcaaaagtttatatctagtgtaattgaaaaaataaaaaaattggatgttattaaaaaaaaactaaatttgacttttgatatagaggttgatggaggaattaatttttctaatgcagaaactgtaattaatgctggggcaaatattttggtatccggaactacaattttcaaagaaaataatggaaacgtaaaaaagaatattgaattgctaagaaaattttaaa

SEQ ID NO: 289683 - DNA, 649 bp, Unknown
  Bacterial polypeptide expressing nucleotide sequence isolated from the Sargasso Sea
aatgaaaaaaatacaaatttcaccatcaatattatcggcaaacttcggtgaactaggtgatgaaattaaaaggttggaagcaggaggtgcggacatgatacatgttgatgtaatggatggacattttgtccctaatctaacaattggacctccggttattaaaagtttaagaaattttacaaaattaccatttgatgttcatttaatgattgatccagtacataaatatataaaagattatgcagaagcaggcgcgaatatcataacaatacatccagaagcaacagaaaatttagaggagtcaattaattatataaaagaattaggaaaaaaaattggagtatcattaaatccaaatactccaattaaagttattgaaaatttattagataaaataaatttagttttagttatgagcgtatatcctggttttggcggacaaaaattcattccagaagttatagataaaattaaagatttaaaaacaataaaagataaaaggaaattaaattttgacattgaagttgatggaggaattaattttctaaatagtaaaactgtaattgaagctggagctaatatacttgtttccggaactacaatttttaaaagcaacaaaggtgatattaaaaaaaatatagagacttta

SEQ ID NO: 289684 - DNA, 715 bp, Unknown
  Bacterial polypeptide expressing nucleotide sequence isolated from the Sargasso Sea
atgaatctttcaccagtgatcgcgccctccattttgtcagcggattttggaaatgtgtcccgtgaaattgagcgtatccaccaggccggtgctacgtggattcatcttgatgtgatggacgggaattttgtaccaaatatcacttttggtgctgttgcaatggaatctttcagtaaaccggaggggtgtgtttttgatactcatctgatggtggttaatcctgaaaagcatattcctgcattcataaaagccggggcagatgtcatcagcattcacgcggaagcgaccgaacacctccaatatggattgaagatgattcgggatcatggagccaaggccagtgtggctttgaatcctgcaactcccttggaggcattagactgggtttaccctgaccttgatatggtgcttctgatgtcggtcaatccgggatggggcgggcaatccttcatttctccagtttttgataaaatcagcagtctgcggcaacgacttcaagaccgaggaattgacataccgattcaggtcgacggaggaatcaacctgaaaaccattgcccgtgcttccctggcaggcaccactcattttgttgcaggaagtgccgtttttaatgtgaaagcaggagaggcattggatgaaaaagatcgtttggaaacctacagaaagaatataaatgggctcatagaagaggccactaaggatcagttggtttaag

SEQ ID NO: 289685 - DNA, 235 bp, Unknown
  Bacterial polypeptide expressing nucleotide sequence isolated from the Sargasso Sea
aatgaaaaaaattcaaatttcaccatcaattttatcagcagattttagtcaattggctaatgaaataaaacggcttgaagaaggtggagcagacatgatccacgttgatgtgatggatggacatttcgttcctaatcttacaattggtccaccagtcatcaaggcacttagaaaacattgttcattgaagtttgatgtacacttaatgatatccccagtgcataaatatataaaa

SEQ ID NO: 289686 - DNA, 661 bp, Unknown
  Bacterial polypeptide expressing nucleotide sequence isolated from the Sargasso Sea
aatgaaaaaaatacaaatttcaccatcaattctctctgctgattttagtcaattaggaaatgaaattaaaagacttgaagaaggtggggcagatatgattcatgttgacgttatggacggtcactttgttcctaatcttacaattgggcctcctgtaataaaggcgttaagaaaatatacaaagttaccattcgatgttcatttgatgatatctcctgtgcacaaatatatagaagattatgcaaaagctggtgcaaacataattactattcatcctgaggctactaataatttaaaagagtctatagatcttattaaaaaattaaatgtaaaagttggtgtttcattgaatccagatactaaaatagatgtaattgaaaacattttagatcaagtagatcttgttttagtcatgagcgtttatccaggtttcggtggtcaaaaatttattcctgatgttgtcagaaaaattgaaaatttaggaaaattaaaaaaagataaaaatcttaattttgatattgaagttgatggaggaattaattttgaaaataataaaatagtcataaaagcaggtgcaaatatattggtttcagggacaactatttttaaagaaaataatggtaatataaaaaaaaatattgattttcttaaattagattaa

SEQ ID NO: 289687 - DNA, 382 bp, Unknown
  Bacterial polypeptide expressing nucleotide sequence isolated from the Sargasso Sea
atgaaaaatatacaaatttcaccatcaattttatctgctgattttagtcagttgggagcagaaataaaaagacttgaagagggtggggctgatatgattcatgtagatgtaatggatggtcattttgttcctaatctaacaatagggccacctgtaattaaagctctccgaaaacattgttcattaaaatttgatgttcatttgatgatatcaccagtgcataaatacatagatgcttacgctgatgcaggtgcagatataattactattcacccagaagcaactgataatttagaaaattcattaaaaaaaataaaaggaaaaaataaaaaagttggagtttcacttaatccaaaatctaaaattgatttaatattaaatt

SEQ ID NO: 289688 - DNA, 580 bp, Unknown
  Bacterial polypeptide expressing nucleotide sequence isolated from the Sargasso Sea
catgtcggttaaaatatcaccttcgattctagcatctgatttttcatcattgggcgaggaagtcgtcaacatcaccaaagcaggtgcggactatattcatgttgatgtcatggatggacactttgtgccaaacttaactattggacctgacattgtaaaatcaattagagataaatcatcactgccatttgatgttcacttaatgattgatcctgttcaaccttatattgaaaaatttgttgaagcgggagctgatattgtatcagttcaccccgaagccaatgacgatacgcaagcttgcattgataaaataaaatctttgaatgtaaaagcaggtcttgcgattaatcctgatacagaatgggaagtggtcaaaccatttatggatcaattagatcttattttggtgatgagtgtgcatccaggctttggtggacaaaaatttattccaaccgctcttgataaacttgagaagcttcgaaaagaaatcgatcaatcgggtagagaaattgatttagaaattgatgggggaatcaactttgaaaatattcaatcagtcattgacgctggagcaaacatg

SEQ ID NO: 289689 - DNA, 344 bp, Unknown
  Bacterial polypeptide expressing nucleotide sequence isolated from the Sargasso Sea
catgagtgaaataattattgcaccatcaattctctcagcagattttgcaagacttggtgatgaagtaaaagatgtacttgaggctggtgccgactgggtgcattttgatgtcatggataatcactatgtaccaaatctaaccattggacccatggtttgtaagagtcttagagattttgggattgatgcctttatagatgtacatcttatgattgatcctgtagataggcttgctcaagattttattgatgcaggcgcatcacttgtaagctttcatcccgaggcttcaaaacatgtgcatagatcagtatcagcaattaaagatagaggttgcaaagctggat

SEQ ID NO: 289690 - DNA, 625 bp, Unknown
  Bacterial polypeptide expressing nucleotide sequence isolated from the Sargasso Sea
gcagactttagcaggttaggagatgaaattaaacgattagaagacaatggtgctgacatgatacatgttgatgtaatggatggtcattttgttccaaatctcacgattggacctccagtaattaaaaccttaaggaaatatacaagtttgccttttgatgtacatttgatgattgacccagttcataagtatattaaggactacagtgatgcaggggcagatattataacttttcacccagaggcaactgaaaatatttctgaaacaataaatttaattaaatcattaaataaaaaagttggaatttctttaaatcctaatactgaaatcaaagcagccgaagatcatttagataaagtttatttaatattgataatgagtgtttacccaggttttggaggtcaaaaattcataagtgatgttgttcaaaaaatcaaagatttagatcaaattagaaatgaacgtaaattaaattttaaaattgaaattgatggaggaataaatttcgaaacttctaaagtagctattgaagctggagtcgatattttggtttcaggaaccacggtttttaaagaaaataatggagatttaaaaaaaaatatcaaaattttaaaacaaatctaaa

SEQ ID NO: 289691 - DNA, 271 bp, Unknown
  Bacterial polypeptide expressing nucleotide sequence isolated from the Sargasso Sea
atggattcttcaattaaaatttcaccttcaattcttgcgtgtgatttcagtaagctcggtaaagaggttgaggctttagaaaaagctggcgctgattatattcacgtagatgttatggatggccattttgttcccaatttaactataggtccagatgttataaaaaaaataagacctttgagcaaaaaaatattcgatgtgcatttaatgatttctccggtagataaatacattgagcaatttgcaaatgcgggggctgatataattacat

SEQ ID NO: 289692 - DNA, 568 bp, Unknown
  Bacterial polypeptide expressing nucleotide sequence isolated from the Sargasso Sea
catgattcacgttgatgtaatggatggccactttgtcccaaatttaactattggtccaactgtgattaaggcacttagaaaatattcttcaattatgtttgacgtgcacttaatgatttcacctgtacacaaatatatagaggattattctaatgctggtgcagatatcataacagtacatcctgaagctacagaaaatctagaaacctcaattttaaaaattaaagaactaaaaaaaaaagttggagtttctttaaatcctgaaacaaaaatagatttaattcttaatcaattaagtaaaattgatttaattctcataatgagtgtaaatccaggatttggtggacaaaaatttatgcctgaagtcttagaaaaaataaaaaaattaaaagaaataagagaaaaagaaaatttaaatttcgatattgaaattgatggtggaataaattttgaaaattcaaaattagcaatagaagctggtgcaaatatattagtatcaggaacaactatatttaaaagcaataatggagatataaaaaaaaatattgaattactaaaatcaaaataa

SEQ ID NO: 289693 - DNA, 548 bp, Unknown
  Bacterial polypeptide expressing nucleotide sequence isolated from the Sargasso Sea
catggataaaaaggtgaaagttgcaccatccattctttcagcagatttttctcagttagggaatgaaatagaagaattagataatactaattgtgattatatacatattgatgtaatggacggacactttgtacctaaccttacaataggacctgatatagttagatcgatcaggaaatatacaaaaaaattattcgatgtacatttgatgattgatccagtaaacaaatatattcctgaatttgcaaaggccggagctgatataataacaattcatgaagaaatcagtgaagaagtactcgaatcgttaagtttaataaaaaaatataaaaaaaaagctggaatttcattaaaaccctctacacctgcaaaaaatattgaaaaatatatcgatcatgttgatttaatattagtaatgactgttgaaccaggttttggaggccaaaactttttaaatgaccaattaaaaaaaattagagtcattaaagaaatgataggaactaaaaaagtcgatatagaggttgatggtggaattaacctttcaacag

SEQ ID NO: 289694 - DNA, 534 bp, Unknown
  Bacterial polypeptide expressing nucleotide sequence isolated from the Sargasso Sea
aatgaaaaatatacaaatttcaccttcaattctctcagcagattttagtcagttaggtaatgagattaaacgactagaggatggtggtgcagatttgatacatgttgatgtaatggatggacattttgttccaaacatcacaattggtccaccagtgataaaaactctaagaaattatacaaaattaccctttgatgtacatttgatgatctctccggttcataaatatattaaaaattttgctgaagcaggatctgatataataacaattcatcctgaagcaacaaataatttaattgagtcaattcaacttataaagcaattaaagaaaaaagtaggaatatctttaaatccaaatactgaaataaatatcatagaaaaacttttaaaggatattgatttagttttaataatgagtgtacatccaggatttggtggccaaaaatttatgccagaggtaattgaaaaaattaaaaagctttatcaaataaaaaaagataacaaattaaactttgacattgaagtcgatggtgg

SEQ ID NO: 289695 - DNA, 706 bp, Unknown
  Bacterial polypeptide expressing nucleotide sequence isolated from the Sargasso Sea
tatgaaaaaaaataaacattcaagttttatcgctccaagtattttatctgcagattttttgtctttgggcgaagaaataaatgctgtggaaaacgctggagctgattatattcattttgatgttatggacaaccattacgtcccaaatcttacttttggacctatggtttgtaggtcggttcgctctaaaataaaaatccctattgatgttcatcttatggcttcgccggtagatagtctgatcgaggattttgttgatgctggtgccaatattattacttttcaccctgaggcatccaaacatgttgatcgtagtctaactttagtcagagaaaagggttgcaaaacaggtttagttcttaacccatcaactccaatcgaatatcttgattgggttatgcctaagttggatatgatactcatcatgtcagttaaccctggtttctccggtcaaaagttcataaataatatttattcaaaaataagagcagttaggtcaaaaattgatgaattctgtctcagcggtggtcaaccaattaggcttgaggtcgatggtggtataaaggttgaaaatatcaaatctatcaaagaagcaggtgctgatacttttgtcattgggtcggggatttttggacatccggattcgagtaatcataaaagttatacaaaaataatgcaagcttatagaagagaactggaattttga

SEQ ID NO: 289696 - DNA, 421 bp, Unknown
  Bacterial polypeptide expressing nucleotide sequence isolated from the Sargasso Sea
catgacgcaatttcgcatcgcccccagcattctgtccgccgatttcgcccgtctgggcgaagaagtccgcaacgtggtcgccgccggcgccgactggattcacttcgacgtgatggacaatcattacgtgccgaacctgacgatcggcccgctcgtctgcgaagcaatccgtccgcacgtagacgtgccgatcgacgtgcacctgatggtgcgcccggtcgaccggatcgtgccggacttcgccaaggccggcgcgaatctgatcagcttccacccggaaggctcggaccatatcgaccgcacgctgtcgctgattcgcgaccacggctgcaaggccggcctcgtcttcaacccggcgacgtcgctgaatcatctggactatgtgatggacaaggtcgacctcgtgctgatcatgtcggta

SEQ ID NO: 289697 - DNA, 643 bp, Unknown
  Bacterial polypeptide expressing nucleotide sequence isolated from the Sargasso Sea
atgtcggttaaaatatcaccttctatactagcatcagacttttcatcattaggagatgaagttgttaatatcactcaagctggagctgactatatccatgtagatgtaatggatggacactttgttcccaatcttacaattggtccagatattgttaaatctataagagataaatcatcattgccttttgatgttcatttgatgatcgatcctgtacaaccttatattgaaaagtttgttgaagctggagctgacattgtttcaattcacccagaggcaaatgatgatacagaagcatgtttgaataaaattaaatctttaaatgtaaaagctgggcttgcaatcaacccggatactgaatgggaagtggtaaaaccctttataaataaacttgatctcattttagtaatgagcgtccaccctggttttggtggtcagaaatttattccaacggctcttgataaattatcaaaccttagagaagaaattaataagtctggtagggaaatttatttagaagttgatgggggaattaattttgaaaatgttcaatcagtaattgatgctggggccgatatgattgttgcaggtaccacaacctttaaaggtggtccaagtgagtatgcaaataatattgaaaaac

SEQ ID NO: 289698 - DNA, 661 bp, Unknown
  Bacterial polypeptide expressing nucleotide sequence isolated from the Sargasso Sea
aatgaaaaatatacaaatttcgccttcaatactttctgcagattttagccaattaggtgaggaaattaaaagattagaagatggtggcgctgacttaattcatgtcgatgtaatggatggacattttgttcccaatattacaattggtcccccagtgataaaaacactcagaaattacacaaagttaccttttgatgtacatttaatgatctcaccagttcataaatatataaaaaattttgctgaagcaggatctgatataataacaattcaccctgaagcaaccgacaatttgattgagtcgattaaacttattaaacaattaaataaaaaagtaggcatatctttaaatccaaatacggaagtaagtgtcattgaaaaattattaaaagaaatagatttagttttaattatgagtgtatatcccggttttggtggtcaaaaatttataccagaagtaattgaaaaaattaaaaaactatatcaaataaaaaaagatagtaaattaaaatttgatattgaagttgacggtggaataaatttctctaattcaaaagaggttatatcagcaggagcaaatatattagtttctggaacaacaatattcaaagaaaataatggtgatataaaaaaaaatatagaaactctaaaatcaatgtaa

SEQ ID NO: 289699 - DNA, 658 bp, Unknown
  Bacterial polypeptide expressing nucleotide sequence isolated from the Sargasso Sea
atgaaaaaaatacaaatttcaccctcaattctggcaggcgatttcagtcaacttggatcagaaattaaaaaattagaaattggtggtgcagacatgatacatgtagatgtgatggatggacattttgttcctaatttaactattggaccaccagttattaaagctcttagaaaatatacaaaattaccttttgatgttcacttgatgatatctccagttcataagtatataaaaaatttttctgatgcaggatcagatattattaccattcatcctgaggcaactgaaaatttaaaagactcgattgatttgataaaaaatttagggaaaaaagttggaatatcgcttaatccagatactcctattgataaaattgttaaatatcttaacgagattaatctagttcttgttatgacagtatatcctgggttcggtgggcaaaaatttatatcaaagatattagataaaattaaaaatttaaaaaaaataaaagacgaaaaaaattttgattttaaaatagaggtcgatggtggaattaattttgaaaataataaattagtgattgcagctggtgctgatattctagtttctggtacgactatttttagagataataatggagatataaaaaaaaatatagaattactcagaacttaat

SEQ ID NO: 289700 - DNA, 385 bp, Unknown
  Bacterial polypeptide expressing nucleotide sequence isolated from the Sargasso Sea
aatggttgataaaaactacataattgcaccctctatactcgcttcagattttgcgagattgggtgacgaagtccgtaacgtattagatgcaggtgctgattgggtgcactttgatgttatggataatcactatgttccaaacttaactattggacccatggtgtgtaaggcactcagagattttggaatcaaagaattcattgatgttcatctaatgattgatcctgtggatgagctagctcaaagttttattgaggctggagcagacctaataagctttcatcctgaagcgagtaaacatattcatagatcaattcatgcaattaaagaaaaaaattgcaaagctggattagtttttaatccagcaacacctcttcaaactctt

SEQ ID NO: 289701 - DNA, 649 bp, Unknown
  Bacterial polypeptide expressing nucleotide sequence isolated from the Sargasso Sea
aatgaggaatatttcaccttcaattttatcagcagatttcactataatacaaagtcagattaaggaagttgaagatgctggtgcagatagattgcatatagatgttatggatggtcattttgtaccaaatttgacatttggcccattcataataaagcaattaagaaaaatttcaaatattcattttgaaacacacttaatgatagagcagcctgataaatatttgcaggactatatagatgccggatcagatacggttatttttcactatgaagcatcaagcaatattaatagagatattaagattataaagaaaaataataaattagctggaattgcaattaacccagatactaatcccaatgttttaaaaaaatatataaatgatatcgactatatattagtaatgtcagtttttcctggatttggagggcaatcatttatagaaaacacattagaatccatgaagagattggatgacttaagaggggatagaaatattctgataggtgttgatggaggtgttaacttgaaaacgataagtagagtctatgatacaggtgtagatgttaccattgttggatctggcttgtataaagccccagatattaaagaaagatttgatgaattaatgacaataggaaaatag

SEQ ID NO: 289702 - DNA, 676 bp, Unknown
  Bacterial polypeptide expressing nucleotide sequence isolated from the Sargasso Sea
aatgcatagccctgtaattgctgcctcaatattatctgccgatatgtccaaacttggtgaagataccagaactgttttggaagcaggcgcagattttatccatgtcgatgtaatggataatcactatgtacctaacttaacctttggcccaatagtcgtcaaagctttacgtgattttggtattacatcaacattagatgtacatttgatgattaagcctgttgacagaataattccagaatttgccaaagctggggctgactatattacttttcatcctgaagcatcagaaaatgttgaaaatacgctaaatttaatccgcgagtgtaaatgtaagccaggtttagttttcaacccaacgacatcactcgatattctcgagcacacattagataaaatagatatcgtactattgatgtcagttaatcctggatttgggggacaatcttttattggatctgtttttgataaactcaagattgcgagaaaaattattgacgaatcgaaatatgatatccgtcttgaaattgatggtggggtaaaagttgacaatattcgcaaaattgcagaagcaggagctgatacttttgttgcaggatcagcaatttttggtgcagaagattataaatcaacaatcaagatgatgagagaacaaatagccctagcaaaaaactaa

SEQ ID NO: 289703 - DNA, 568 bp, Unknown
  Bacterial polypeptide expressing nucleotide sequence isolated from the Sargasso Sea
aatgaaaaaaatacaaatttcaccatcaattttgtcagctgattttagtcagttaggaaatgaaataaagagattagaagaaggtggagcggatatgattcatgttgatgttatggatggtcattttgttcctaatcttacaattggtccacctgtaattaagaggttgcgtaattgtaccaaactgccttttgatgttcatttaatgatatctccagtacacaaatatattgaagatttttcaaatgcgggagcagatataattacaattcatccagaagcaacagataatttaactgagtcaataaatcttataagaaaacttaataaaaaaattggagtttctttaaatcctgacacaaaattaagtgttattgaaaatattttagatcaaatagatcttgttttaattatgagtgtttttcctggatttggtggtcaaaaatttatgccagaaattgtaacaaaaattaaaaatttaaaaaaaataaaagaagaaaaaaaatttaactttgacatcgaagtagatggtggcattaattttaataataataaaattgtaatagag

SEQ ID NO: 289704 - DNA, 661 bp, Unknown
  Bacterial polypeptide expressing nucleotide sequence isolated from the Sargasso Sea
aatgaaaaaaatacaaatttcaccttcaattttatcagcagactttggccaattggcgagtgagattaaaagacttgaagatggtggcgcagatatgattcatgttgatgttatggatggacattttgttccaaatctaaccattggcccaccagttataaatagattaagaaattgtactaaattaccttttgatgttcatttaatgataacgccagtacacaagtatataaaggattacgcggccgcgggtgcagatattattacaattcaccctgaagccacaaataatctaaaagattctattgaacatattaaaagtttcaaaaaaaaagttggagtttctttaaatccagacacaaaaatagatattattgaagaagtaataagtgaagtagatcttgttttagtaatgagtgtttttccaggatttggtggccaaaaatttatgcctgaggtagtagataaaataaaaaatttaaaaaaagagaaagacaaaaaaaatctaaattttgatatagaagtagatggtggaatcaattttcaaaataataaaatagttattgaagctggagcaaatattttagtttctggaacaactatttttaaagaaaataatggtaacattaaaaaaaatattgatgcgctaaaattaatttag

SEQ ID NO: 289705 - DNA, 661 bp, Unknown
  Bacterial polypeptide expressing nucleotide sequence isolated from the Sargasso Sea
atgaaaaatataaaaatttcaccatcaattcttgctgctgactttagtcagcttggaaaagaaattaataatttagaaagaggaggggctgatctaattcatgtagatgtcatggatggacattttgtacctaatttaacaattggaccaccagtaataaaagctttaagaaaatatactaaattaccatttgatgtacatttaatgatttctccagttcacaaatatattaaggattttgccaatgccggatcagatataattacaattcatcccgaagcaactgaaaatttagaaaaatctatatttcacattaaagaactaaacaaaaaagttggggtatctctaaatccagatacgaaaataaacgttattgagtctcacttaaataacattgatttagttttgataatgagtgttttcccaggttttggaggtcaaaaatttattcctgaaactataaaaaaaattaaagatttaaaagaaattaaagataaaaataattataattttgatattgaagttgatggaggtgttaactttttaaattccaaagatataataaatgctggtgcaaatattttagtttcaggaacaactatttttaaagaaaataacggggatataaaaaaaaatatagaaacactaaagtcagtgtaat

SEQ ID NO: 289706 - DNA, 565 bp, Unknown
  Bacterial polypeptide expressing nucleotide sequence isolated from the Sargasso Sea
tcacatagatgttatggatggacactttgtgcctaaccttactatcggcccagatattattaaatcaataagagcctatacccaactagaatttgacgtgcaccttatgatagaaaatgtggacagatatatacctgactatgctaaagctggggcagacataattactattcactctgaggtaagtaaagatattataaaaacaatagatataattaggcatcatggtaaaaaagttggtttagcatttaacccatcttcacctattacaattcttaatcaaattatagagaaactagacctggtgttaataatgactgtaaatccaggctttggaggtcaggtatttatggaagaccaaatagaaaaaattatttccacaaaaaaaattattgatatgagtcaaaaagaagttcttcttgaagtagatggtggaattaatgaaaataatattaaaattgttgctgaatcgggcgcttctataattgttgcaggttcagcaatctttaaaggtaataaagataattataaattaaacatagaaaaactaagaaactacaactag

SEQ ID NO: 289707 - DNA, 667 bp, Unknown
  Bacterial polypeptide expressing nucleotide sequence isolated from the Sargasso Sea
aatggacaaaaaaattaaaattgctccatcgatattagcagcagatttttcaaaacttggggaagaaatttcagcaattacagttgcgggagcagattatgtacatgttgatgttatggatggtcattatgttccaaatttaacgatcggtccggaagttatcaaagatataagaaagtgtaccgaaatcccctttgatgtccatctaatgataacccctgtaaatcctttgctagaagactttgcaaaatctggatcagatattataacattccaccctgaagcagaagatgatccaaatcaaactatacaaatgataaaatcttttggctgcaaagtaggcatatcactaaatccagcaaccaaaattaatgttttggataatataattgatgatatagatctagtgcttgttatgacagttgtccctggttttggtggacaaagtttcatgcacgatcaactagaaaaaattgaaaatatccgaaaattaattgatgcaactggaaaagatattgagcttgaagtagatggtggtataaattttgaaacatcacaattagctattaatgctggcgctgatgttcttgttgccgggacatcaacttttaatggtggacaagataattatgcaaacaatatttccaaattaagattacggaactaa

SEQ ID NO: 289708 - DNA, 499 bp, Unknown
  Bacterial polypeptide expressing nucleotide sequence isolated from the Sargasso Sea
aatgaaaaaaattaaaatttcaccatcgatattatcagctgatttcagtcaattaggaaacgaaataaaaagattagaggaggctggagctgacatgatacatgtagatgtgatggatggtcactttgttccaaatttaactattggtccacctgtaattaaaagtttaagaaaatatactaatctaatttttgatgtccatttaatgatatctcctgttcataaatatataaaagattttgctgatgctggagcaaatattataactattcacccagaggcgactgaaaatttgaaggaatctattaatcttataagaagcttaaataaaaaagttggagtatctttaaatccaggctctaagattgatttaataaaagatatattagaagatatagatttagttttgataatgagtgttcatcctggatttggtggacaaaaatttatacctgatgtaattaaaaaaattgaaaaactaaaactaattaaaaatgaa

SEQ ID NO: 289709 - DNA, 664 bp, Unknown
  Bacterial polypeptide expressing nucleotide sequence isolated from the Sargasso Sea
aatgtctaataaaatcaaagtttctccatcaatcttagcatccaacttttccatgttgggtgaagaagttgaacatatatcaaaagcaggtgcagattatattcatgtcgatgtcatggacggtcattttgttccaaatctaacaattggtcctgatgttgttaagtccataagagacaaaactgctgtcccttttgatgttcacttaatgattgatccaatcgagccctacattgatggctttgtaaacgctggggcagatattatttcaattcatcctgaagccaatgatgatactaaaaaatgtctggataaaataaagtcactcaatgtcaaagcaggattagcaattaatcctgatactgattgggaagttgttaaaccatacatgaatgttttagatctaatacttgtaatgagtgttcacccaggattcggtggtcagaaatttataagttcagcaattgataaattaaaatccttaagaaaagaaattgatcaatctggaagagaaattgaattggaagttgatggtggtattaattttgaaaatatacagtctgtgattgacgcaggagcaaatgtgattgtcgctgggacaacaacgtttaaaggtggacaatcagagtacagaaataatatcgaaaaattacgaggtcattaa

SEQ ID NO: 289710 - DNA, 661 bp, Unknown
  Bacterial polypeptide expressing nucleotide sequence isolated from the Sargasso Sea
aatgaaaaaaataaaaatttcaccatcaatactttctgctgactttagtcaattgggaaaagaaataaaaagattagaagaggcaggagctgacatgatacatgtagatgttatggatggtcattttgttccaaatttaacaattggcccaccagtaataaaaagtttaagaaagtatacaagtcttatttttgacgttcatttaatgatatctcctgttcataaatatattaaagattttgctgatgctggtgcaaatcttattacaatacatccagaagccactgaaaatttaaaagagtcattagatttaataaaaagtttaaataaaaaagttggggtatctttaaatccagattcgaagattgaattgattgaagaaaatttgaaagatattgatttagttttagtaatgagtgttcatccagggtttggtggacaaaaattcatacctgaagttgttgataaaattaaaaaattaagagaaataaaagataaggaaaatcttaaatttgatattgaagttgatggtggaatcaattttgaaaatagtaaaactgtaattgacgctggggcaaatatacttgtatctggaacaacaatttttaaaagtaataatggtgatataaaaaagaatatagatactctaaaatctagttaa

SEQ ID NO: 289711 - DNA, 676 bp, Unknown
  Bacterial polypeptide expressing nucleotide sequence isolated from the Sargasso Sea
atgaataattataagattgcaccttcgatactgtccgcagatttttcaagattgggtgaagacgtttccaatgtgattaaagcaggggcagatttaatacattttgatgtcatggataaccactatgttccgaatctaacatttggcccaataatttgttcgtctctgaaatcttatggaattactgtgcctgtagatgttcatttaatgattaagcctgtcgatagaattatcccagatttcgcagaagcaggcgcggactacatcactttccatcctgaggcctctgaacacattgatcgaactattaatcttataaagcaattaggttgcaagcccgggattgtcttaaaccccgctacatctgtacactgtcttgagaattgtattgatgatgtggatatgattctgctaatgtcagttaatcctggttttgctggccaaagcttcatagagggtacttataaaaaaattgagcaagttagaaaattaatagactcagttggaaaagagataaggctagaggttgatggaggcatcacaatcgataacattgcaaagattgctaacgcaggagcagatacatttgttgctggctcttcaattttcaaatctaatgactacgcagcaactatcaaagcaatgaaaggtcagttagctcaaataaaaaaataaa

SEQ ID NO: 289712 - DNA, 353 bp, Unknown
  Bacterial polypeptide expressing nucleotide sequence isolated from the Sargasso Sea
attgaaaccatacatagcgccatcaattctttctgctgatttttctcgtttgggagaagaagttgattcagtaattcaagctggagcggatattattcattttgatgtcatggataatcactttgtcccaaatcttactattggacctttggtttgcgagtcgctgagaaaatacggtatcaaagcacctattgatgttcatttaatgactgagccagtagattccctgattaaagattttgctactgcaggggccacttatataacttttcatcctgaagcgagcacgcacattcatagatcgctagagcttattaggagcctcggttgtaaatctggtctcgtattcagcc

SEQ ID NO: 289713 - DNA, 661 bp, Unknown
  Bacterial polypeptide expressing nucleotide sequence isolated from the Sargasso Sea
atgaaaaaaataaaaatttctccttcaattttatctgctgactttagtcaattaagttctgaaataaaaaaattagaaaaaggaggagctgacatgatccatgttgatgttatggatggtcattttgttcccaacctaactattggtccgcctgtgattcaatcattaagatcacacactaagctaccatttgatgtacatttaatgatatcacctgtacataaatatattaagaatttttctgatgcaggtgctgatattattacaattcatcctgaagcaactgataatttaaatgactcaataaatcttatcaaaaatttaaaaaaaaaagttggtgtttcattaaacccaaatacagaaatatctattgtagaaaaaatcttagataatattgatttggttcttattatgagtgtttatccaggttttggtggtcaaaaatttattccagatgtagtttcaaaaataaaaaaattaaatgaaataaaaaaaaataataatttaaaatttgatattgaagttgatggaggaataaatttcagtaattcaaaatctgtaattcaagctggagcaaacatattagtttcgggaactacaatatttaaagaaaatagtggagatattaaaaaaaatattgagattttaagatcaatttaaa

SEQ ID NO: 289714 - DNA, 682 bp, Unknown
  Bacterial polypeptide expressing nucleotide sequence isolated from the Sargasso Sea
atgactaaagaattcaaaattgcaccatcaatcctctctgctgactttgctagattgggcgaagaagtcgagagtgtaatcgctgcaggcgctgattttgttcactttgatgtcatggacaatcattatgttccgaatctgacatttggcccagtgatttgtaaatccttaagggattatggcattgaagcaccaattgacgtgcatttaatggtgcaaccagtagatagattgatcgccgattttgctaaagctggcgcaacatatattacatttcatcctgaagcttccgatgacattggaggcactttagatttaatcagatcaaatgattgcctgcctggattagcgattaatcctccgacgcccctcagttatgtcgaggagtatctcgatcaaatcgacatcataactatgatgtctgtgaatccaggatttgcaggacaaagtttcattcctgaagtgctggataagttgaccgagaccagagcgatgatcgagaaatcaggtcgagaagtttttctagagattgatgggggagtgaaggccaataatattggtgacattgcttcttatggtgcagatgtttttgtttctggttccggtatttttgggacagatgactatcgcgataccattgatgagatgagacaaaatctcgcacctcatttgaatcagtaat

SEQ ID NO: 289715 - DNA, 658 bp, Unknown
  Bacterial polypeptide expressing nucleotide sequence isolated from the Sargasso Sea
atgtcggttaaaatatcaccttctatactagcatcagacttttcatcattaggagatgaggtcgttaatatcactcaagccggggctgactacatacacgtagatgtaatggatggacactttgttcccaatctcacaataggtccagatgttgttaagtctattagagataaatcttcattaccgtttgatgttcatttgatgatagatcctgtacagccttatattgaaaagtttgttgaagctggagcagatattgtttcagttcaccctgaggcaaaagatgatacagaagcgtgtttaaataaaattaaatcattaaatgtaaaagctgggcttgcaatcaacccggacactgaatgggaagtcgttaaaccttttatggataaacttgatctcattttagtaatgagtgttcatcctggttttggcggtcagaaatttattccaacagctcttgataaattatcaaatcttcgagaagaaattaataagtctggtagagagattcatttagaagttgatgggggaattaattttgaaaatgttcaatcagtaatcgatgctggggctgatatgattgttgcaggcaccacaacctttaaaggtggtccaagtgagtatgcaaataacattgaaaaactaagaggccactaaa

SEQ ID NO: 289716 - DNA, 670 bp, Unknown
  Bacterial polypeptide expressing nucleotide sequence isolated from the Sargasso Sea
atggttgataaaaactacataattgcaccctctatactcgcgtcagattttgcgagattgggtgacgaagtccgtaacgtattagatgcaggtgctgattgggtgcattttgatgttatggataatcactatgttccaaacttaactattggacccatggtgtgtaaggcactcagagattttggaatcaaagaattcattgatgtacatttaatgattgatcctgtggatgagctagctcaaagttttatagaggctggagcagatctaataagctttcatcctgaagcgagtaaacatattcatagatcaattcatgcaattaaagaaaaaaattgcaaagctggattagtttttaatccagcaacacctcttcaaactcttgaaagtgttattgaagacatagatctcgtcctcataatgagtgttaatcctggttttggtggtcagaaattcatacatagttcaatagataaaatttccaaggttagaaaaatgatagatgattctgggagagatattcgtcttgaagtggatggtggtattaatagtgaaactattagtctagcatcagaagctggtgcagataccttcgttgctggctcagcaatttttaatacagagaattatgagcagacaatatcagaacttcgttcaaaaatcgtttaag

SEQ ID NO: 289717 - DNA, 670 bp, Unknown
  Bacterial polypeptide expressing nucleotide sequence isolated from the Sargasso Sea
aatgaaagattataaaatagctccatccattctatccgcagactttgctaatcttggaaaagatgtgtcagatgttgtagaagcgggagcagattttatacattttgatgtgatggacaaccattatgtgcctaatttaacgataggccctctagtttgtgaagctcttcgtaattatggaataaagtcgatcattgatgttcacttaatgattagtcctgtagatgaaataatacctgattttgcgagagctggagctaattacatcacatttcacccagaagcatcaaaacatgtagacagaacaattaagttgatcaaagacaatggatccatgcctggtatagttcttaatccagctactaatgtatctattcttgaatattgtcttgatcagatagatatggttttgcttatgtcggtaaaccctggttttgcaggacaaaaattcattgagtcaacatatgacaaaattattgaagtaaaagaaatgatcgatgcagttaatccaaatattagattagaagtggatggtggaattaatctaaagaatataggtaaagttgcagagtgtggcgcaaacacatttgtagcagggtcagcaatctttaattcagataattataaaaaaactatttctcaaatgagagaaattatttctaaatcatag

SEQ ID NO: 289718 - DNA, 661 bp, Unknown
  Bacterial polypeptide expressing nucleotide sequence isolated from the Sargasso Sea
atgaaaaaaatattaatttctccgtcgattttatctgctgactttagtcaattaggcattgaaataaagagactggagcaaaatggtgcagatatgattcatgttgatgtaatggatggacattttgttccaaacttaactataggtccacccgtaataaaagctttaagaaatcatacaagcttaccttttgatgttcacttaatgatatcacctgtacataaatatattaaagactttgctgaagcaggtgcagatataataactatacatcctgaagcaactgatgatttagataaatcaattaaactcatcaaacattttaaaaaaaaagttggaatttctctaaacccggataccaaaatagaaattattaaagattatttaagtgagatagatcttgttttagtaatgagtgtttatccaggttttggaggacaaaaatttataccagaaattttaaaaaagattgaaaatttaaaaaaaataaaagatgataaaaatttgaattttaatatcgaggtagatggaggagttaattttgacaatagcaaatccataataaatgcgggagcaaatattcttgtttcgggcactacaatttttaaagataataatggagatattaaaaaaaatattgatactttaaagacaatgtaag

SEQ ID NO: 289719 - DNA, 667 bp, Unknown
  Bacterial polypeptide expressing nucleotide sequence isolated from the Sargasso Sea
atggaaaatcaatcactcattgcgccatctatcctatctgcaaactttgcacggttgggagaagaagtaaactccgttatgcatgctggagccgattggattcattttgatgttatggataatcattatgtaccaaacttaactattggccctatggtgtgtaaatctctaagagatgacggcattaaaaactttattgacgttcatttaatggttgagccggttgatgaaattgcaaaaagttttgctaatgcgggtgcagacttaattagttttcatcctgaagccactaaacatgttgcaagaactatagatttaattaaaagccttggctgcaaagttggcattgcattaaatccagccacctcagtatctgttttagataatattattcaggacatcgatttagttttattaatgagtgtaaacccaggatttggtggacagaaattcattccaagcacattaaaaaaaatacaagacgttaaagcgatgattgatctccaagataaactgatctatttagaggttgatgggggcattaatcttgatactattgctagtgtctctgaggctggagctaatgtatttgttgcaggatcagcaatttttggatcaccagattatgaagaaactattcagagtttccgtcaaaaaatttcttagc

SEQ ID NO: 289720 - DNA, 163 bp, Unknown
  Bacterial polypeptide expressing nucleotide sequence isolated from the Sargasso Sea
aatgaaaaatatacaaatttcaccgtcaattttatctgctgattttagtcaattaggtactgaaattaaaagattagaggaaggtggagcagacatgattcatgtggatgtcatggatggtcattttgttccaaatctaaccattgggtcccccagttattaa

SEQ ID NO: 289721 - DNA, 661 bp, Unknown
  Bacterial polypeptide expressing nucleotide sequence isolated from the Sargasso Sea
aatgaaaaaaataaaaatatcaccatctatcctgtcggctgattttagtcagttaggtagtgaaataaaaagattagaggaaggtggagccgatatgatacatgttgatgtaatggatggacattttgttcctaacttaacaatagggccaccagtaattaaaaatttgagaaaatataccaatataccttttgatgttcatttaatgatttctccagttcataaatatattaaggattatgctgatgctggagcagatataattacaattcacccagaggcaacagattctttagaagattcgataaaagaaattagaaattacaaaaagaaagttggtgtttctttaaatccagatactaaattagaagttatagaaaaaaatttagataaaatagatttagtattaattatgagtgtgcatccaggatttggaggacagaagtttatttcagatgttttaaataaaattaaaaaattaagtaatattaaaaaagaaagaaaattagaatttgatatagaagtagatggtggaattaatttttctaattcaaaagatgtaataaatgcaggtgcaaatatattggtatctggaactacagtctttagagaaaataatggagatttgaaaaaaaatattaaaacgcttaaattattttag

SEQ ID NO: 289722 - DNA, 664 bp, Unknown
  Bacterial polypeptide expressing nucleotide sequence isolated from the Sargasso Sea
atggataatgatataattattgccccttcaatactatctgcagatttttctaatcttggtcaggaaattagtgatattgatgaagctggagctgattggatgcacttagatgtaatggatggtcattatgttcctaacttaacttttgggccaccaataatatccaaaataagaaagtttacaaaaaagatttttgacactcatcttatggtatccaatccagatgatttacttgagtcatataaagatgctggttcagactcaataacagttcataaagaagtatgtgatgacctagataaaacattatctagaattagacaattaggttgtaaggcgggtgtttcaataaatccagaaacaagcttttctggtcttgaaaaatttttagataagttagatctgattttagtaatgtcagtaaaccctggatttggaggtcaaaaatttatcccttcatctatagaaaaaattaaaaacattaaatcattaattggtaatagacaaattcttttggaagttgacggaggtgttaatgatactaatgctccaaaattagttaaggctggagcagatattcttgtagcaggttcttttgtttttaatggaaataacatctctgattacaaaaagaacatttctttattaagaaatagtttttgat

SEQ ID NO: 289723 - DNA, 682 bp, Unknown
  Bacterial polypeptide expressing nucleotide sequence isolated from the Sargasso Sea
catgaccaaagaattcaaaattgcaccctcaattctctctgctgatttcgccagattgggcgaagaagttgaaagcgtaatcgctgcaggcgctgattttgttcattttgacgttatggacaatcactatgtgccgaatctgactttcggttcagtgatctgtaaatctttgagagattttggcatcaaagcccccattgatgtgcatcttatggtgcaaccggtggatagattgatcgctgattttgcggaagctggcgcaacatacatttcatttcatccagaagcttccgaggacatcgatgccacactagatctaataagatcaaatgattgccttcctggtttagcaattaatcctgctacacccctcagttatattgaggaatatcttgatcagatcgagattattaccatgatgtcagttaatccagggtttgcaggacaaagttttatccctgaagtgctcgacaaattgacggagaccagagcgatgatcgagaaatcgggtcgaaaagtccttcttgagattgatgggggagtgaaggccaacaatattggtgacattgcttcatatggcgcagatgtttttgtttcgggttctgggatattcggaacagataactatcgcgacacgattgatgagatgaggcaaaatctggccccgcatttgaatcaataa

SEQ ID NO: 289724 - DNA, 778 bp, Unknown
  Bacterial polypeptide expressing nucleotide sequence isolated from the Sargasso Sea
cttgccgcaatggatctcgacgcctgagcgcggctcactgtatcagtggttgccgaggtccctaaaatcaccgcgcattccgcgctccttctccatgagcaccaagcccctggtgatctctccgtcgatcctgtcggctgatttctcccgtctcggcgatgaagtgaaggctgtggatgaggccggcgcggactggatccatgtggacgtgatggatggacgatttgtccccaacatcacgatcggacctctgatcgtcgaagccctgcgcccggtgacccagaagcccctcgacgttcatttgatgattgttgagcccgagaagtacgttcctgacttcgccaaggccggcgctgacatcatttccgttcaggtggaagcatgcccacacctgcatcgcaacctggcccagatcaaggatctcggcaaaatggctggtgctgtgctgaacccaagcacccccctcgacacccttgagtactgcctcgagctctgtgatctggtgctgatcatgagcgtgaaccccggcttcggtgggcagagcttcattgagaaccaggttcagaagatccgcgacctgcgccgcatgtgcgacgagcgtggtttggatccctggatcgaagtggatggtggcgtcaaagccggcaatgcctggaaggtgatcgaagccggcgccaacgccatcgtgtccggttccggtgtgttcaaccagccggactacgcggaagcgatcaagggcatccgcaacagcagcagcaaagaggcggttctggtctga

SEQ ID NO: 289725 - DNA, 661 bp, Unknown
  Bacterial polypeptide expressing nucleotide sequence isolated from the Sargasso Sea
atgaaaaatatacaaatttcaccttcaatactttcggcggattttagtgaattaggtaaagagattaaaagattagaggacggtggcgcagatttaattcatgttgatgtaatggatggacattttgttcccaatataactattgggcccccagtaataaaaacacttaggagctatacaaaattaccttttgatgtacatttaatgatctcaccagttcacaaatatattaaaaattttgctgaagctggatctgatataataacaattcaccctgaggccactgataatttgattgagtcaattcatctgataaaacaactaaagaaaaaagtaggtatatctttaaatccaaacacagaaataaacgtcatagaaaaaattctaaataaaattgatttagttttaataatgagcgtatatccaggttttggtggtcaaaaatttataccagaagtcattgaaaaaattaaaagactttatcaaataaaaaaggataataacttaaaatttgatattgaggttgatggtggaataaatttttctaattcaaaagaagttatatcagcaggagcaaatatattagtttctggaacgactatttttaaagaaaacgaaggtaatattaaaaaaaatatagaaactttaaaatcaatgtaag

SEQ ID NO: 289726 - DNA, 580 bp, Unknown
  Bacterial polypeptide expressing nucleotide sequence isolated from the Sargasso Sea
atgtcggttaaaatatcaccttctatactagcatctgatttttcatcattgggcgaagaagtcgtcaacattaccaaagcaggcgctgactatattcatgttgatgtcatggatggacacttcgtgccaaacttaactattggacctgacattgtaaaatcgatcagagataaatcttcacttccctttgatgtccatttaatgatcgatcccgttcaaccctacattgaaaaatttgttgaagcaggggctgatattgtatcagttcaccctgaagccaatgacgatacgcaagcatgtattgataaaataaaatcattaaatgtaaaagcaggacttgcaattaatcctgatacagaatgggaagttgtgaaaccgtttatggatcaattagatcttattttggtaatgagtgtgcatccaggttttggaggacaaaaatttattccaactgcacttaataaacttgaaaagcttcgaaaagaaatcgatcaatcaggtagagagattgatttagaaattgatggaggaatcaatttgaaaatattcaatcagtcattgatgctggggcaaacatgat

SEQ ID NO: 289727 - DNA, 186 bp, Unknown
  Bacterial polypeptide expressing nucleotide sequence isolated from the Sargasso Sea
aatgagcagtaaagactacataattgcaccatcaatattatctgcagacttcgctcgtcttggagaggagtccaaaaatgttttagatgctggcgcagattggattcattttgatgtgatggataatcactatgttcctaatttaactataggacctatggtctgtaaggcgcttagagattacgg

SEQ ID NO: 289728 - DNA, 412 bp, Unknown
  Bacterial polypeptide expressing nucleotide sequence isolated from the Sargasso Sea
atgaaaaaaataaaaatttcgccttctatactttctgctgatttcagtcagcttggaaaagaaataaataatttagaaaaaggtggggccgatctaattcatgttgatgtaatggatggacattttgttcctaatttaacaataggaccaccggttataaaggctttgagaaaatatactaaattaccatttgatgtacacttaatgattaaaccagttcataaatatattaaggattttgcaaatgctggatcagatataattacaattcatcctgaggcaacaaataatttaaaagaatctatttttcatataaaagaactaaataaaaaagttggagtatcgttaaatccagatacgaaaataaatgtaattgaatctcatttaagtaatattgatttagttttagtaa

SEQ ID NO: 289729 - DNA, 715 bp, Unknown
  Bacterial polypeptide expressing nucleotide sequence isolated from the Sargasso Sea
gatgaatcttttaccagtgatcgcgccctccattttgtcagcggattttggaaatgtgtcccgtgaaattgagcgtatccaccaggccggtgctacgtggattcatcttgatgtgatggacgggaattttgtaccaaatatcacttttggtgctgtagcgatggaatctttcagtaaaccggaggggtgtgtttttgatactcatctgatggtgctcaatccagaaaagcacatacccggatttataaaagccggtgcagatgtcatcagtattcacgcggaagcgaccgaacacctgcaatatggattgaagatgattcgcgatcatggagccaaggccagtgtggctttgaatcctgcaactcccttggaggcattggactgggtttaccctgatctcgatatggtgcttctgatgtcggtcaatccgggatggggcgggcagtccttcattgctccagtttttgataaaatcaggagtctgcggcaacgacttcaagatcgaggaattgacataccgattcaagttgacggaggaatcaacctgaaaaccattgcccgtgcttccctggcaggcaccacccattttgttgcaggaagtgccgtttttactgtgaaagcaggagatgcattggatgaaaaagatcgtttggaaacctacagaaagaatataaatgggctcatagaagaggccattaaggatcagatggtttaa

SEQ ID NO: 289730 - DNA, 661 bp, Unknown
  Bacterial polypeptide expressing nucleotide sequence isolated from the Sargasso Sea
aatgaaaaaaattcaaatttctccatctatactatctgctgattttagtcagctaggaaatgaaattaaaaggttagaacaaggtggtgccgatatgattcatgtagatgttatggataatcattttgttcctaatttaactattggaccaccagtaattaaaagtttgagaaaacatacaaagctaccttttgatgttcatttgatgattgatccagttcataaatatattaaaaactttgcggaagctggttctgatataatcactattcatccagaagcaacaaaaagtttggaagaatctattaatctcattaaaagttttaagaaaaaagtaggagtttctttaaacccagatacaaaaattgatgttataaaagatgtattaagtcaaatagatttagttttaattatgagtgtttacccaggttttggtggacaaaaatttatgccagaagttatagaaaaaattactaatttaaagagaataaaagatgatatgaaattaaattttgatattgaagttgatggtggggtaaattttgataataatcaaatgattattgaagcaggagcaaatattcttgtttctggaactacaatttttaaagaaaataatggagatgtcaaaaaaaatattgatttgttaaaaataaaataa

SEQ ID NO: 289731 - DNA, 661 bp, Unknown
  Bacterial polypeptide expressing nucleotide sequence isolated from the Sargasso Sea
aatgaaaaaaatacaaatttcaccatcaattctatcagctgattttagtcagttaggaaatgaaataaaaagattggaagaaggtggggccgatatgattcatgtagatgttatggatggtcattttgttcccaatcttacaattggtccgcctgtaattaaaagattacgtaattgtaccaagctaccttttgatgttcatttgatgatatctccagtacataaatatattgaagattattcaaaagcaggagctgatataattacaatacatcctgaggcaacaaataacttaatagattcaattgatcatattagaaagttaaataaaaaagttggagtttctttaaatccagatacaaaattaaatgtaattgataatgttttaaataaaatagatctagtattaattatgagtgtttttccaggatttggtggtcaaaaatttatgcccgaagttgtagaaaaaattaaaaacttaaaaaaattaaaagaggaaaaaaaattaaattttgatatcgaagtagatgggggtattaattttgaaaataataaaattgttattgaagctggtgcaaatattttagtatcgggaacaactatttttaaagaaaataacggaaacattaaaaaaaatatagactctcttaaactagtataa

SEQ ID NO: 289732 - DNA, 661 bp, Unknown
  Bacterial polypeptide expressing nucleotide sequence isolated from the Sargasso Sea
aatgaaaaaaatacaaatctcaccgtcaattttatcagctgattttagtcagttaggaaatgaaataaagagattggaagaaagtggagcggatatgattcatgttgatgttatggatggtcattttgttcctaatcttacaattggtccacctgtaattaaaagactacgtaattgtaccaagttaccttttgatgttcatttaatgatatctccagtacataaatatattgaagactttgcaaatgcaggagcagatataattacaattcatccagaagcaacagataatttaattgaatctatcaatcttgtaaaaaaacttaaaaaaaaaattggagtttctttaaatcctgacaccaaattaagtattatagaaaatattttagatcaaatagatcttgttttaattatgagtgtttttcctggatttggaggtcaaaaatttatgccagaagttatagaaaaaattaaaaatctaaagaaaataaaagaaggaaaaaaatttaattttgatattgaagtagatggtggcattaactttgataataataaaattgttatagaagctggtgccaacattctagtttcgggaacaactatatttaaagaaaataatggtaatataaaaaaaaatattgattttcttaagttaatataa

SEQ ID NO: 289733 - DNA, 667 bp, Unknown
  Bacterial polypeptide expressing nucleotide sequence isolated from the Sargasso Sea
atggacaaaaaaattaaaattgctccatcgatattagcagcagatttttcaaaacttggagaagagatttcagcaattacaattgcaggagcagactatgtacatgttgatgttatggatggacattatgttccaaatttaactattggccctgaggtaattaaagatataaggaaatgtaccaaaatcccatttgatgttcatttaatgataacccctgtgaatcctttattagaagattttgctaaatctggatcagatatcattacttttcatcccgaagcagaagataatcctaaggggaccatagagataatcaaatccctgggttgtaaagtgggaatatcattaaatccatcaaccgaaattaatgtcttagataaaataattgaagatattgatttaatacttgttatgactgttgttcctggttttggaggacaaagcttcatgcatgatcaattagaaaaaattgaaaatattcgaaaattaattgatgcaactggaaaagatatagagcttgaagtagatggaggtataaattttgaaacatcacaattagctataaatgctggcgctgatgttcttgttgcaggaacttcaacttttcagggcggacaagataattacgccaacaatatctctaaattaagatctcggagttaat

SEQ ID NO: 289734 - DNA, 430 bp, Unknown
  Bacterial polypeptide expressing nucleotide sequence isolated from the Sargasso Sea
atgacggatcacaaatatataattgcaccttcaatcctggcgtctgattttgctaggttgggtgatgaggtaagaaatgtcctagatgcaggagcagactgggttcatttcgatgtcatggataaccactatgttccaaatttaaccattggcccaatggtatgtaaggctcttagagattttggaataaaagaatttatagatgttcacttaatgattgatccggttgatgagttagcaaaaagttttatagaggcaggtgcagatcttataagttttcatcctgaagcatcgaaacatattcatagatcaattcatgctattaaagataagggctgtaaggcagggctcgtttttaatccagctacatcattaagtgctcttgaaaatgttttagatgatattgatcttgttttaataatgagtgtaa

SEQ ID NO: 289735 - DNA, 460 bp, Unknown
  Bacterial polypeptide expressing nucleotide sequence isolated from the Sargasso Sea
gatgaaagattttaaaatagcaccatcaatactatctgcagatttctccaaacttggagaggatatagataatgtattagatgctggagcagatataatccatttcgatgtcatggataatcattatgtaccaaatttgactttcgggccattgatctgtgagagcctaagaaattacggaattaaggcccctattgatgttcacctcatgataaagcctgttgatagaattatccctgactttgcaaaagcgggtgcaaattatataacttttcacccagaagctagtgatcatattgatcgtacaattaatcttatcagggaaaatggatgtaagcctggtgttgtattaaatcctgctactcctgttagttgcttagaacaagtattagataatctagacatgattttattaatgtcagtgaaccctgggtttgcaggtcaaaaatttatgaaaaaa

SEQ ID NO: 289736 - DNA, 658 bp, Unknown
  Bacterial polypeptide expressing nucleotide sequence isolated from the Sargasso Sea
atgaaaaaaatattaatttccccatctattctggctggagactttagccaacttggtaaagatatacaaaaattagagaatgctggcgcagatatgatacacgttgatgtaatggatggtcattttgttccaaatataacaatcggccctccagtaattaagtccctacgtaaatatacagatctaccttttgatgtacatttgatgatatctccagtgcataaatatatagaagatttttcaaaagcaggttcagatattattacaattcatcctgaagcgactgaaaatgtaaaagattctattgaccttattaaaagtttaggaaaaaaagttggattatctctaaatcctgatactccaattgataaaattgaaaaatacttagaccagatcgatctagtattagtaatgacagtctatccaggctttggtggtcaaaaatttatatctaaagttttgaacaaaataaaaaatcttaaaaatattaaagatgagaataaatttagttttgacatagaagttgatggaggagtaaattttgaaaataacaaactagcgattgaagctggagctaacatcctagtttcaggcacaactatatttaaaaataatgatggagatataaagaaaaatatagatttgcttagaacttaat

SEQ ID NO: 289737 - DNA, 685 bp, Unknown
  Bacterial polypeptide expressing nucleotide sequence isolated from the Sargasso Sea
atgtcacagaaatccctggttatctctccatcgattctttccgctgacttctccaagcttggagaggacgtccgggcggttgaccaggcaggtgctgactggattcacgtggatgtgatggatggtcggtttgtgccgaacatcaccatcggtccaatgatcgttaaggcgcttcgcccagtaaccagcaagccgctcgatgttcacttgatgattgttgagcctgagagatacgtcgaagacttcgccaaagccggagccgacatcatcagcgtgcaagtagaagcgtgcacccatttgcaccgcaacttggcgcaaatcaaggacctggggaaaaaagccggggcagtgctgaaccccggcactccaatcgacacgctcgagtattgcctggaactctgcgacttggttttggtgatgagcgtgaaccctggctttgggggccagagcttcatcgaaaaccaagtagataagatccgcaacctgcgccgcatgtgcgatgagcgcggccttgatccctggattgaggtcgatggaggaatcaaagcagccaatgcttggaaggtgatcgaagcaggcgccaacgcgattgtttcgggttctggggtgttcaaccaacccaactacgccgatgccatccaaggcatcagggacagcaagcggcccgaattggccgctgcctgat

SEQ ID NO: 289738 - DNA, 404 bp, Unknown
  Bacterial polypeptide expressing nucleotide sequence isolated from the Sargasso Sea
aatgaaaaaaataaaaatttcaccatcaattttatcggctgattttagtcaattagggaatgaaataaaaagattagaagaaggtggagctgatatgattcatgttgatgttatggatggtcattttgttcctaaccttacaattggtccacctgtaattaaaagtttacgtcattttactaaacttcctttcgatgttcatctaatgatatcgccagtacataaatatattaaagattattcaaacgcaggggcagatataattacaatacatcctgaagcaacagaaagtttaatagactcaattaatcttattaaaaaattaaatagaaaagttggagtttctttaaatccagatactaatttaaatataattaataacgttttaaataaaatagacttag

SEQ ID NO: 289739 - DNA, 279 bp, Unknown
  Bacterial polypeptide expressing nucleotide sequence isolated from the Sargasso Sea
aatgaaaaatatacaaatatccccgtcaattttatcagctgattttagccaattaggtaaagaaataaaaagactcgaagaaggtggagctgatatgattcacgtagatgtaatggatggccactttgttccaaacttaacaataggtcctccagtaattaaagctctcagaaaacattgctcattaaaatttgatgttcatttaatgatttctcctgtgcacaaatatatagaagcttatgctgatgcgggagcggatataattactatacatcctga

SEQ ID NO: 289740 - DNA, 550 bp, Unknown
  Bacterial polypeptide expressing nucleotide sequence isolated from the Sargasso Sea
gatgaatctttcaccagtgattgcgccctccattttgtcagcggattttggaaatgtgtcccgtgaaattgagcgtatccaccaggccggtgctacgtggattcatcttgatgtgatggacgggaattttgtgccaaatattacttttggtgctgtagcgatggaatctttcagtaaaccggaggggtgtgtttttgatactcatctgatggtggtcaatcctgaaaagcatattcctgcattcataaaagccggtgcagatgtcatcagcattcacgctgaagcgaccgaacacctccaatatggattgaagatgattcgggatcatggagccaaggccagtgtggcattgaatcctgcaactcccttggaggcattggactgggtttatcctgaccttgatatggtgcttctgatgtcggtcaatccgggatggggcggacaatccttcatttctccagtttttgataaaatcaggagtttgcggcaacgacttcaagaccgaggaattgaaataccgattcaggtcgacggaggaatcaacctgaaa

SEQ ID NO: 289741 - DNA, 191 bp, Unknown
  Bacterial polypeptide expressing nucleotide sequence isolated from the Sargasso Sea
tatgacctcaattaaaatttcaccatcaattttatcggcagattttagtaagttgggagatgaaataaaaaatttggagaaggccaaagctgatttgatacatatagatgtaatggacggacactttgttccgaacattaccattggtccagacgtaataagtaaacttaggaaatacacctctctaccat

SEQ ID NO: 289742 - DNA, 304 bp, Unknown
  Bacterial polypeptide expressing nucleotide sequence isolated from the Sargasso Sea
atgtcggttaaaatatcaccttcgatactagcatctgatttttcatcattgggcgaggaagtcgtcaacatcaccaaagcaggtgctgactatattcatgttgatgtcatggatggacactttgttccaaacttaactattggacctgacattgtaaaatcaatcagagataaatcatctctgccttttgatgttcacttaatgatcgatcctgttcaaccttatattgaaaagtttgttgaagcaggagctgatattgtatccgttcaccctgaagccaatgacgatacacaagcttgcatag

SEQ ID NO: 289743 - DNA, 661 bp, Unknown
  Bacterial polypeptide expressing nucleotide sequence isolated from the Sargasso Sea
aatgaaaaaaataaaaatatcaccatcaattttatctgcggactttagtcaacttggtgaagaaataaaaaaactagaagttggcggagctgacatgatacatgtggatgtaatggatggtcactttgttccaaatttaacaataggaccaccagtaataaaggccttaagaaaatatacatctttaccttttgatgttcacttaatgattaatccagtgcataaatatataaaagattatgcaaatagtggagcagatataattacgatacatcctgaatcatgtgaatcagtatctgattcaatatcagaaataaaaaaattcaaaaaaaaggtagggttgtctttaaatcctgatacagaaatagatgtaatcaaagatcatcttggtgaaattgatatggttttaataatgagtgtctttcccggatttggaggtcaaaaatttattaatgatgttctagaaaaaattagaaatttatcgctgatcaaaaaaaatcttaatttaaaatttgatatagaggtagatggtggaataaatttttcaaattttaaagatgtacttaacgcaggtgcaaatattttagtatccggaacgacaatttttaaagaaaataacggagatataaaaaaaaatatcgattttttaaaatcaatataa

SEQ ID NO: 289744 - DNA, 661 bp, Unknown
  Bacterial polypeptide expressing nucleotide sequence isolated from the Sargasso Sea
atgaaaaaaatacaaatatctccctctatattatctgcagattttagcaaacttggtgatgaaattgtaaaattggaaaatgggggagctgatatgattcacgtagatgttatggacggacatttcgttccaaatttaacaataggacctcctattataaaatcattaagaaaatatactaaacttccatttgatgtacatttaatgatatcacctgtacacaaatatattaaaaattacgctgatgctggcgcagatataattacaatacatcctgaggctacagatgatttaagtgagtcaatagaacttattaaatctttaaacaaaaaaattggagtttcattaaatccagatacacctattgataaaattaaaaacattttatctaaagttgatttaattcttattatgagcgtttatccaggatttggtggtcaaaaatttatgccagaggtattagataaaataaaaactttaaataaactaaaaataaataataaatttaatttcaatattgaagttgatggaggtattaattttgaaaattccaaatttgtaattgatgctggtgcagatatattagtttcaggaactacaatttttaaagaaaatgagggaaatattaagaaaaatattgaaactttaagaatttcttaag

SEQ ID NO: 289745 - DNA, 661 bp, Unknown
  Bacterial polypeptide expressing nucleotide sequence isolated from the Sargasso Sea
aatgaaaaaaataaaaatatcaccttcaatactttctgctaattttagtgaattaggcaatgagattaaaagactagagcaagggggtgctgacatgatacacgtcgatgttatggatggtcattttgttccaaatttaacaataggtcctcctgttataaaaaatttaagagaaataaccaaacttccatttgatgttcatttgatgatagatcctgttcataaatacatcaaagattatgctgatgctggagcagatataattacaattcatccggaagcaactgaaaatttaagtgaatcaattaaccatataaaaagttttaaaaaaaaagtaggtgtgtctttaaatccaaatactgagttaaatttagttttagattatttagacaaaatagatttaattttaattatgagtgtttatcctggctttggtggacaaaaatttatgccagaaatcattaaaaaaataaaagatttggataatattaaaaaagataaaaatttaaattttgatattgaagttgatggtggaattaacttttcaaatgctaaaaaagttttagatgctggagcaaatatacttgtttcgggaacaacaatttttaaagaaaataatggagatattgaaaaaaatattaaaactctaagaacagcttaa

SEQ ID NO: 289746 - DNA, 541 bp, Unknown
  Bacterial polypeptide expressing nucleotide sequence isolated from the Sargasso Sea
aatgaaaaaaatacaaatttcaccatcaattctttcagccgatttcagtcagttaggaaacgaaataaagagattagaagaaggtggggcggatatgattcatgttgatgtaatggatggtcattttgttcccaaccttacaattggtcctcctgtaattaaaaggttgcgtaattgtaccaagctaccctttgatgtacatttaatgatatctccagtacataaatatattgaagatttttcaaatgcaggtgcagatataattacaattcatccagaagctacggataatttaattgaatcaattaatcttattagaaaactaaataaaaaaattggagtttctttgaatcctgacacaaaattaaatattatagaaaatattttagatcaaatagatcttgttttaattatgagtgtttatcctggatttgggggtcaaaaatttatgcctgaagttgtagaaaaaatcaaaaatctaaaaaaaataaaagaggaaaaaaaatttaacttcgatatcgaagtagacggtggaattaac

SEQ ID NO: 289747 - DNA, 658 bp, Unknown
  Bacterial polypeptide expressing nucleotide sequence isolated from the Sargasso Sea
atgtcggttaaaatatcaccttctatactagcatcagacttttcatcactaggtgatgaagtcgttaatatcactcaagccggggcagactacatacacgtagatgtaatggatggacactttgttcccaatctcacaataggtccagatgtggttaaatcaataagagataaatcttcattaccatttgatgttcatttgatgatcgatcctgtacagccttatatcgaaaagtttgttgaagctggagcagatattgtttcagttcatcccgaagcaaatgatgatactgaagcatgtttgaataaaattaaatcattaaatgtaaaggctggacttgcaatcaacccagatactaaatgggaagttgtaaaaccctttatggataaacttgatctgattttagtaatgagtgtccacccaggttttggtggtcagcaattcattccaacagctcttgataaattatcaaaccttagagaagaaattaataagtctggtagggatattcatttagaagttgatggaggaattaattttgacaatgttcaatcagtaattgatgcaggtgccgatatgattgttgcaggtaccacaacttttaaaggcggcccaagtgaatatgcaaataatattgaaaaactaagaggccattaaa

SEQ ID NO: 289748 - DNA, 630 bp, Unknown
  Bacterial polypeptide expressing nucleotide sequence isolated from the Sargasso Sea
tatctgctgactttagtcaactaggaaatgagattaagagactcgagaatgcaggggcagacatgatacatgttgatgtaatggatggtcacttcgttccaaatttaactattggacctccagtcattaaaaatcttagaaagcattcagaattaacctttgatgtgcacttaatgatttcacctgtccataaatatataaaagattttgcagatgcaggagctgatataattactatacatcctgaagccactgataatttatcagaatcaattaaacatattaaaagttttaaaaaaaaagttggtatttctctgaatccaaataccgagatcaacataattgaaaatgaattaaaaaatgtggatttaattttagtcatgagtgtttatccaggttttggagggcagaaatttatacctgacgtcattaaaaaaattgaactattaaaaaaaataaaagatgataaaaattatgagtacgacattgaagtagatggaggaataaatttttcaaactcgaaagatgtaataaacgcaggcgcaaatattcttgtatcaggaactacaatttttaaagaaaacaacggaaacattaaaaaaaatatagaaacacttaaagaagtgtaga

SEQ ID NO: 289749 - DNA, 664 bp, Unknown
  Bacterial polypeptide expressing nucleotide sequence isolated from the Sargasso Sea
attgcaaaagcctgtaagaatcgccccatcaatactttctgccgacttttcatgtttaggaaatgaaatatctgccgtatctgaagcaggagctgactggatccatatagatgtcatggatggtcatttcgtgcccaatattaccattgggccacaagtaatcaatgctatccgagaagtatcgcccctgccttttgatgttcatttgatgattgcacctgtcgatccatacattcaacaatttgccgacgcgggtgcagatattattactgcgcatattgaggcgtgcgaacatatccatcgaacaatacaatttatcaaaggtttggggaaaagggctggaatatcgcttaatccatccacccctgcttcttcaattctccatctcatcgacatagtagacttagtattagtcatgaccgtcaatccaggctttggcggacagagttttatcgaaaatcaattatccaagattcaagaaattagaaccatgattgacagaagtgggcgtgatatagatttggaagtcgacggtggtatcaacactcatacagcacagaaaacgattgaagcaggagctgacgttctcgttgctggaacagccgtttttaaagaaaggcttggaggataccgagagaatattacaaaacttcgtggcatatga

SEQ ID NO: 289750 - DNA, 670 bp, Unknown
  Bacterial polypeptide expressing nucleotide sequence isolated from the Sargasso Sea
tatgagtgaccaaaaaaatataattgcaccgtctatcttagcttcagattttgcaaggcttggagaagaggtacgtaatgtacttgatgcaggagctgattgggtccattttgatgttatggataatcactatgttcctaatctcactatcggaccaatggtttgcaaagctcttagagaatacggcataaaagaatttattgatgttcatttaatgatagatccagtggatgaattggcccaaagctttatagatgctggagcagacttaattagttttcatcctgaagcaaccaaacatattcataggtcaattcatgcaataaaagataaaggctgtaagacaggacttgtttataatcctgcaactccacttcacacgttagaaagtgttcttgaggatttagatttggtattaattatgagtgttaatcctggttttggtggccaatcgtttattcatagctctcttgaaaaaattgctaaagttaggaaaatgattgacgaatctggaaaagatgtccgcttggaggtagatggtggaataaacaaggatactattggtcctgcgtctgaggcaggcgctgatacatttgtagcaggctcagctatattcaatactgaaaattatgagcaaacaatatctgaacttcgttcaaaaattgtttaa

SEQ ID NO: 289751 - DNA, 670 bp, Unknown
  Bacterial polypeptide expressing nucleotide sequence isolated from the Sargasso Sea
tatgagtgaaaagaattacataatagctccctcaatcttagcttcagattttgcaaggcttggtgatgaggtaaaagacgttttaaatgctggagcagactgggttcattttgatgttatggataatcattatgtgccaaatcttacaattggacctatggtttgtaaggcacttcgtgactatggaatcaaagaatttatagatgttcatttgatgattgatccagtcgatgaattagctcaaagttttataaaagcaggggcagatctgataagttttcatccagaagcttctaaacatattcatagatcaattcatgcaattaaagataaggaatgcaaagtaggacttgtatacaatcctgcaactccattgcataccctagaaaatgtaattgatgatattgatcttgttttaataatgagtgttaatcctggatttggcggacagtcattcattcatagttctttggaaaaaatttctcaagttagaaagatgattgatgattctggaaaagatattcgtcttgaagttgatggcggcattaacaaagatactattggtttagcatctaaagcaggcgcagatacatttgttgctggctcagctatttttaatacagaaaattatgagcaaactatatctgaacttcgttctaagattaattaa

SEQ ID NO: 289752 - DNA, 145 bp, Unknown
  Bacterial polypeptide expressing nucleotide sequence isolated from the Sargasso Sea
atgaaaaaaatacaaatttcgccatccattctatctgctgattttagccagctaggaaaagagattaaaaaactagaagatggaggtgctgatctaattcatgttgatgtaatggatggtcattttgtgcctaatttaacaattg

SEQ ID NO: 289753 - DNA, 226 bp, Unknown
  Bacterial polypeptide expressing nucleotide sequence isolated from the Sargasso Sea
aatgacaactaaagaatacataattgcgccttctatcttgtcagcagactttgctcgcctaggcgaagaatctaagagtgtcttaaattctggtgctgactggattcattttgatgttatggacaaccactatgtgcccaatctaactatagggcctatggtatgtaaggcactgcgagattatggaatcaaagcacctatagacactcatttgatggtcaaacca

SEQ ID NO: 289754 - DNA, 595 bp, Unknown
  Bacterial polypeptide expressing nucleotide sequence isolated from the Sargasso Sea
attgtccaaaccttcaataaaaatagctccctctatcttgtcagcagattttgcaaactttgggaatgagattcaggcaattgagagtcaaggatgtgattgggttcatattgacgtcatggacggtcattttgtacctaatattacttttggccctcaaacctgtaaagcaatcagacctcacataaaaacattcatggatgtgcatttaatgatatccccagtagatcagtatctggaagcttttgctgagtccggggcagatatgataaccgctcatgtcgaggcgacccctcatattcatagaacattgcaagcgataaaatctttaagtgttaaggcaggtcttgctattaatccaggcacatccattgacagggttgaacatctcttggatcatattgatttagtttgtgttatgacggtaaaccctggttttggtggtcagaagtttattcattctcaattagaaaaaatagaaaagttatctgaactcagaaagaaaaaagatttccttatagaagtagacggaggcgtaactgaagaaacagctcccgttggttgtcaaggctggagcaaatgttttagtagcagg

SEQ ID NO: 289755 - DNA, 273 bp, Unknown
  Bacterial polypeptide expressing nucleotide sequence isolated from the Sargasso Sea
aatgaaaaaaatacaaatttcaccttcaattttatctgctgactttagtaagttgggagatgatataaaaaggttagaagacaacggtgctgatatgatacatgttgatgtaatggatggtcattttgttccaaaccttacgattggccctccggtaattaaaagcttaagaaaatatacaagtttaccatttgatgtacatttgatgattgatccggtccataagtatatcaaggattacagtgatgcaggtgctgatattataacttttca

SEQ ID NO: 289756 - DNA, 633 bp, Unknown
  Bacterial polypeptide expressing nucleotide sequence isolated from the Sargasso Sea
aatgaaaaaaataaaaatatctccgtctatattatctgcagattttagtatattaggaaatgaaattaaaagacttcaaaaagctaaagcagatcttattcatgtagatgttatggatggtcattttgttccaaatttgaccattggaccacctgtcatcaaggaactaaaaaaacactctaaaattccatttgatgttcatttaatgatatcgccagttcatagatatataaaagattatgcattagcaggcgctgatattataacaattcatcctgaagccacaaaaaatgtaggctcatcaattaatttaattaaaaaattaaaaaagaaagttggattatcactaaacccaaactctaaaattgaaattattagcaaatacttagcaaatattgatttggtattaattatgagtgttcatccaggttttggtggtcaaaagtttattccaaaagttttagaaaaaataaagaaattaaaaaaattgaaggataaaagaaagcttagatttgatattgaagtcgatggaggaataaatttttcaaactcaaaaattgtaaaagatgctggagcaaatattcttgtttcaggaactactgtatttaaagaaaacaatggaaatttaaaaaa

SEQ ID NO: 289757 - DNA, 364 bp, Unknown
  Bacterial polypeptide expressing nucleotide sequence isolated from the Sargasso Sea
aatgaaaaaaataaaaatttctccttctatcctttcagctgattttagtcagcttggaaaggaaattaataatttagaaaaaggtggagctgatctaattcatgttgatgttatggatgggcattttgttcctaatttaacaatagggccaccagttataaaagctttgagaaaatatactaaattaccatttgatgtgcacttaatgattagtccagttcataaatatattaaggattttgcaaatgctggttcagatatcataacaattcatcctgaggcaacaaaaaatttagaagaatctatttttcataaaaagaaactaaacaaaaaagttggtgtatcattaaaccctgataccaaa

SEQ ID NO: 289758 - DNA, 661 bp, Unknown
  Bacterial polypeptide expressing nucleotide sequence isolated from the Sargasso Sea
atgaaaaaaataaaaatttctccttcaatactttctgctgatttcagtcagcttggaaaagaaataaataatttagaaaaaggtggggccgatctaattcatgttgatgtaatggatggacattttgttcctaatttaacaataggaccaccggttataaaagcgttgagaaaatatactaaattaccatttgatgtacacttaatgattaagccagttcataaatatattaaggattttgcaaatgctggatcagatataatcacaattcatcctgaggcaacaaataatttagaagaatctatttttcatataaaagaactaaaaaaaaaagttggagtatcgttaaacccagatacgaaaataaacgtaattgaatctcatttaagtaatattgatttagttttagtaatgagcgtttttccagggtttgggggtcaaaaatttatacccgaaactataaataaaattaaagatttaaaagaaattaaagatagaaataattttagttttgatattgaagttgatggggggattaatttttctaattcaaaagatgtaataagtgctggtgccaatattttggtttctggaacaacaatctttaaagaaaataacggggatatacaaaaaaatattgaaacactaaaatcagtgtaat

SEQ ID NO: 289759 - DNA, 661 bp, Unknown
  Bacterial polypeptide expressing nucleotide sequence isolated from the Sargasso Sea
aatgaaaaaaatacaaatttccccatcaattctatctgctgattttagtcagctaggaaaagaaattaagaaattagaagaaggaggtgctgatttaattcatgttgatgtaatggatggacattttgtgcctaatttaacaattggacctcctgtgattaaaactttaagagagcatacaaaattaccgttcgatgtacatttaatgatttctcctgttcataaatatataaaaaatttcgctgaagctggatcagacataattacaattcatcctgaggcaacagaaaatttaaaagagtctataactctaattagagaatttaataaaaaagttggagtatcattaaatccaaatacagaaataaatctaattgaatctcaactagataatatagatttagttttaataatgagtgtttatcctgggtttgggggacaaaaatttataccggaaaccattaaaaaaattaaagatctaaaaaaaattaaagatgataataattatagttttgatattgaggttgatggaggtgtcaacttttcaaattctaaagatataattaatgcaggtgcaaatattttagtttctggaacaacaattttcaaagaaaataatggggatataaaaaaaaatatagaaatattaaaatctgtataa

SEQ ID NO: 289760 - DNA, 367 bp, Unknown
  Bacterial polypeptide expressing nucleotide sequence isolated from the Sargasso Sea
tatgaaaaagacggattttattgctgcttcgattctatcggctaatttcgctcgtctcggggaagaggttgaagaggctatcagtgccggcgtagacatggtgcactttgatgtaatggataatcactatgtgccaaacctcacaattgggcctatggtatgccaagcattaagggatcatggagttaaagcattgatcgacgttcatttgatggtttcgccagtagaccgtcttattaaagactttgcaaaagcaggggcaagctacataacatttcatcctgaagcaacagatcacatcgacagaagcctgcaatcaattcgtgagttaggctgcaaacccagggcttcgtgtttaatcctgcaa

SEQ ID NO: 289761 - DNA, 685 bp, Unknown
  Bacterial polypeptide expressing nucleotide sequence isolated from the Sargasso Sea
atgggctttgatcgttcaataaaaatagcaccttctattctttcagcagattttgcaaattttggtcaagaaattgaagctgtagaaagccaaggtgcagactggatacatgttgacgtaatggatgggcattttgtacctaatataacttttgggccaccactttgcagtgctattcgttcccatataacaaaaattatggacgtacatttgatgatttcgaatgttgatgattatatcacaacttttgctaaaacaggcgctgatataataactgcacatattgaagctggaaaccattcacacagaaccatgcaagctatcagatcctctggttgtaaggcaggaatagcactaaacccgtccactcccgcagagagtatagaatacctgctggatgaaattgatttagtttgtgttatgacagtgcagcctggctttggaggtcagaagttcattaattcacagctaacaaagataaaaaccctaagagaaatgatagcagatcgaccaatccacttggaagttgatggaggtataactactgaaaccgctcctctttctgctcaggcgggtgcaaacatacttgttgcgggatctgctgtatttaaaaatggatcagtattgaaccctgatccatatggggaaaacttaaaatctattagggccgcctgtgaggtttgat

SEQ ID NO: 289762 - DNA, 661 bp, Unknown
  Bacterial polypeptide expressing nucleotide sequence isolated from the Sargasso Sea
atgaaaaaaatacaaatatctccatctattctgtctgctgattttagtcagcttaagaatgagataaaaaaattagaacaagcgggtgccgacatgatacatgttgatgtaatggatggacattttgtacccaatcttacaattggtccgccagttataaaaagtttaagaggtcatacaaatttaccttttgatgtacatctaatgatttcaccagttcataaatatataaaagattatgctgatgctggagctaatattattaccattcatcctgaggcaactaacgatttgaaggagtcgattaaacacattagagatttgggaaaaaaagttggtgtttctctaaatccagaaactccgctggaaattatagaaaattttttacaagatattgatttagtattaataatgagtgtccatccaggatttggtggacaaaaatttatgccagaagttttggagaaagttaaaaaattaagaaatattataatcgagaaaaaattaaaattagatattgaaattgacggagggatagattttgataataataaaatggttattgaagcaggtgctaatatattagtatctggaacaacagtttttaaaaaaaataacggtgatattaagaagaatatcgatattttaaaaactatgtaga

SEQ ID NO: 289763 - DNA, 682 bp, Unknown
  Bacterial polypeptide expressing nucleotide sequence isolated from the Sargasso Sea
gatgagccgcacattccgaatcgccccctccatcctctctgccgactttgcccgcctgggcgaagaagtgcgcaatgtcattgccgctggcgccgactggatccatttcgacgtgatggacaaccattacgtgcccaacttgacgtttggccccatggtctgccaggccttgaagcctcacgccaaaacgcctgcgggtgcggccgtgccgattgacgtgcacctgatgattcagccggtggacgctctggccgctgcgtttgccgacgcgggggcggactacatcagctttcaccccgatgcctcgggccacgtgcaccgcagcatccaggccatccgttccaagggcgtcaaacccggcctggtgttcaacccggctgagcctctggatgtgctggactgggtgatcgacgacatcgacctcatcctgatcatgagcgtgaaccctggctttggcggccagagcttcatcgactctgcactgcgcaagatcgaagccgtgcgcaagcgcatcgatgcctcgggcaaggacatccgcctggaggtggatggcggcatcaagaccgacaacatccgccgcgtggctgacgcgggcgctgacacctttgtcgcaggcagcgccatctttggcaagccggactaccggggcgtgatcgacgcgatgcgtgtcgccttgggctga

SEQ ID NO: 289764 - DNA, 406 bp, Unknown
  Bacterial polypeptide expressing nucleotide sequence isolated from the Sargasso Sea
atgggtaacgtgatcaaaatttcaccgtctattttatcagctgactttagcaaacttggtagtgaagtaatctctttagaaaaagcgggtgccgattacatacatatcgatgttatggatggtcatttcgttcctaatcttactattggtccagaagttattaagaaattaagaccactaactcaaaaaacttttgatgtgcacttaatgatatcgccagtagataactttattaaggactttgcaaatgcaggtgcagatatcataactttccatcctgaagctacaaaagacacactaaatacgattgaacttattagaaaagaaaataaaaaagtaggaatttcattaaagccaaaatcaaaaatagatcttattgaaaaatatttagataaaatagatttag

SEQ ID NO: 289765 - DNA, 664 bp, Unknown
  Bacterial polypeptide expressing nucleotide sequence isolated from the Sargasso Sea
aatgagcggaactataaaaatttcaccttctattttatctgcagattttagtaaattgggcgaagaaataatatccttagataaggctggcgcagattatatacatgtagatgtgatggacggacattttgttcccaatattactattggtcctgaagtaataaaaaaacttagaccattaacaaaaaaaacttttgatgttcatttaatgatatcaaatgttaataaatatatagaggcattttcgaatgcaggttcagatataattacttttcatccagaagcaactgataacacttcagaaacaataaaattaattaaaaaacataaaaagaaagttggaatttctctaaagccaaaatctagtattaaattaattgaagatcaccttgatgatatagatctagtccttattatgagtgtagagccagggtttggagggcaaaaattcatgccagaagtaattagtaaacttaaagaaataaaaaaaataatatctgaaaagaaaataaatatagatattgaaatagatggtggaataaatttcgaaaactgcaagttggctaaagaggctggggctaatgttttagtatcaggttctacaattttcaaagaaaatagtggaaatttaaaaaagaatattagtttgttgcgatcaaattag

SEQ ID NO: 289766 - DNA, 661 bp, Unknown
  Bacterial polypeptide expressing nucleotide sequence isolated from the Sargasso Sea
atgaaaaaaatacaaatatcaccttcaattctatctgctgattttagccagttaggtaatgaaattaaaaggttagaagaaagtggagctgatatgattcatgtagatgttatggacggacattttgttccaaatttaacaataggcccacctgtaattaaagcattaaaaaaaaatacttctatgatttttgatgtccacctaatgatttcaccggttcataaatatattgaagcttattcagatgcgggagcagatataatcacaattcatccagaagctacggacgatctcaaaacttcgatttcaaaaattaaagaattaaataaaaaagtcggtatttcactaaatcctgaaactcaaactgatgtgatcctgaattatttagatcaaattgatttggttcttattatgagtgtaaatcccggatttggtggacaaaaatttatgccagaagttttacccaaagtaattgaattaaaaaaaattcaacatgataaaaatttaaattttgatatagagattgatggaggaattaatttcgataatgccaaacgagcattggaagctggagctaatattctagtatctggtactacaatttttaaaagtaataatggagatattaagaaaaatattgaattactaaaatcaaaataac

SEQ ID NO: 289767 - DNA, 670 bp, Unknown
  Bacterial polypeptide expressing nucleotide sequence isolated from the Sargasso Sea
tatgagtgaccagaaaaatataattgcaccttctatcctagcatctgattttgcaagacttggagaagaggtacgtaatgtccttgatgcaggagctgattgggttcattttgatgtaatggataatcattatgttccaaatctcactatcggaccaatggtttgcaaagctttaagagaatacggtataaaagaatttattgatgttcatttaatgatagatccagtagatgaattggcccaaagctttatagatgctggagcagacttaattagttttcatcccgaagcaaccaaacatattcatagatcaattcacgcaataaaagacaaaggttgtaaagcaggacttgtttacaatcctgcaactccacttcacaccttagaaagtgttcttgaggatctagatttagtattaattatgagcgtaaatcctggttttggaggccaatcgtttattcatagctcgcttgaaaaaattgctcaagttagaaaaatgatagatgagtctggaaaagatgtccgcttggaggtagatggtggaataaataaggataccattggtctagcatctgaggcaggcgctgatacatttgtagcaggctcagctatattcaatactgaaaattatgagcaaacaatatctgaacttcgttcaaaaattgtttaa

SEQ ID NO: 289768 - DNA, 445 bp, Unknown
  Bacterial polypeptide expressing nucleotide sequence isolated from the Sargasso Sea
aatgaaaaatatacaaatatccccgtcaattttatcagctgattttagccaattaggtacagaaataaaaagacttgaagaaggtggggctgatatgattcacgtagatgtaatggatggccactttgttccaaacttaacaataggtcctccagtaattaaagctcttagaaaacattgctcattaaaatttgatgttcatttgatgatttctcccgtgcataaatacatagaagcttatgctgatgcgggagcagatataattactgtacatcctgaagcaactgataatttagaagactcaataaataaaataaaagatctaaagaaaaaagtaggagtttctctcaatcctgaaacaagtataaatttaattaaaaatctattagataaaattgatttagttttaataatgagtgtaaatcctggatttggtggacaaaaa

SEQ ID NO: 289769 - DNA, 589 bp, Unknown
  Bacterial polypeptide expressing nucleotide sequence isolated from the Sargasso Sea
atgagtgaccagaaaaatataattgcaccgtctatcctagcatctgattttgcaagacttggagaagaggtacgtaatgtccttgatgcaggagctgattgggttcattttgatgtaatggataatcactatgttccaaatctcactatcggaccaatggtttgcaaagctttaagagaatatggcataaaagaatttattgatgttcatttaatgatagatccagtagatgaattggcccaaagctttatagatgctggagcagacttaattagttttcatcccgaagcaaccaaacatatccataggtcaattcacgcaataaaagacaagggctgtaaggcaggacttgtttacaatcctgcaactccacttcacacgttagaaagtgttcttgaggatctagatttagtattaattatgagtgtaaatcctggttttggagggcaatcgtttattcatagctcgcttgaaaaaattgctcaagttagaaaaatgatagatgagtctggaaaagatgtccgcttggaggtagatggtggaataaataaggataccattggtctagcatctgaggcaggcgctgata

SEQ ID NO: 289770 - DNA, 658 bp, Unknown
  Bacterial polypeptide expressing nucleotide sequence isolated from the Sargasso Sea
aatgaataattcggttaaaatatcgccttcaattttatcagcagactttagtaaattgggccaagaaattatttctttagataaagctggagcggattacattcatgtcgatgtaatggacgggcattttgttccaaatattactatcggacctgaggtcattaaaaaattaagaccattaacaaaaaaaatttttgatgttcatttaatgatttcgcccgtagataaatatattgaagcattttcaaatgcaggatcagacataattacttttcatcctgaagctactacggatagtctaaatacgataaaattgattaaaaaatttaaaaaaaaagttggtatttcactcaaaccaaagacaaaaataaatttgatagaaaaacatttgaacgaaatcgatctaattttagttatgagtgtagagccaggatttggtggccaaaagttcatgccagaagtaattgataaattaaaaagtattaaaaaaattatttcagaaaaaaaattaaatatagatttagaagtcgatggaggcataaattttgaaaattgtaaaattgtgaaagaagctggcgctaatgtgcttgtatcaggatcaacaatttttaaatcaaatagtggtaatttaaagaagaatataatctacttagatcaa

SEQ ID NO: 289771 - DNA, 649 bp, Unknown
  Bacterial polypeptide expressing nucleotide sequence isolated from the Sargasso Sea
atgcccgatgttaaaatttcaccatcaatactatcagctgactttggcaagttaagtagtgaaattcagaatttagaaaaagcaaaagcagatttaattcatattgatgttatggatggccattttgtacctaatataacaatagggcctgaagttataagtaaattacgtaagtctacatctttaccttttgatgttcatttaatgatatcgccagttcataattttataaaaaattttgcagaagctggtgccgatattattactatacatcctgaagctaccagtaatttaataagttcaataaatgaaattaaatcatttaataaaaaagttgggatatctttaaatccaggaacttcaattgataaagtgttaccagttttaaatttaatagatttagttttggttatgagcgtaaatcccggtttcggtggccaaaaatttatgcctgaaactttagaaaaagtaaaaaccttaagaaaggaaattgatacaaaaaaaattaaaacacagattgaaatagacggtggaattaattttgaaaatgcaaaagtagcagttaaagctggggtagatatattagtttctggaacaactatttttaaggaaaatggaggagacctaaaaaaaaatattcaattgtaaa

SEQ ID NO: 289772 - DNA, 448 bp, Unknown
  Bacterial polypeptide expressing nucleotide sequence isolated from the Sargasso Sea
atgaatgaaaatctgattgcgccttcgattctctcggcggactttgcccgcctcggtgaagaagtcgacaacgtgctcgcctcgggcgccgatatcgtgcactttgatgtcatggacaaccactatgtccccaaccttaccatcggcccgctggtgtgtgaggcgttgcgcaagcatggcatcaccgcccctatcgatgtccatctgatgattaagccggttgaccggatcgtgcccgactttgcatcagcaggcgcctcctacattacctttcatccggaagcgagcgagcacgtcgaccgcactttgcagttgatcgccagcgagggctgcaaagcgggtctggtattcaatccggcgacgccgctcgatgtgctggagcacgtcatcgataaggtcgatatggttctgctgatgtcggtcaaccccggctttggcgggcagagtt

SEQ ID NO: 289773 - DNA, 664 bp, Unknown
  Bacterial polypeptide expressing nucleotide sequence isolated from the Sargasso Sea
atgactgaaactatcaaaatttcaccgtctatattatctgcagattttagtaaattaggtagtgaagtgatctcactggaaaaagctggtgcagattacattcacattgatgttatggatgggcattttgttccaaatttaactataggccccgaagtaataaaaaaacttagacctcttacaaaaaaaatatttgatgtacacttaatgatatcgccagtagataattttattaaagattttgctaatgctggggctgatattattacttttcacccagaggcaaccaaagacacagcgaaaacgattgatcttattaaaaaagagggaaaaaaagtaggaatttcacttaagccaaattctaaaatagatttagtggaagaatatttagatgatattgatttagttttaataatgagtgttgaaccaggatttggtggccaaaaatttatgcctgaagttttagaaaaaactaagcgactaaaagaaattattaataataaaaaattagatgtagatatagaaattgacggaggtattaattttgaaaattgcacattagctaaacaggctggggctaatattcttgtttcaggatcaacaatcttcagagaaaataaaggtgatctcaaaaaaaatatagaaattcttagaaaaaattgat

SEQ ID NO: 289774 - DNA, 544 bp, Unknown
  Bacterial polypeptide expressing nucleotide sequence isolated from the Sargasso Sea
atgaaaaatatacaaatttctccatcaattttatctgctgattttagtcagttaggaacagaaataaaaagacttgaagaaggtggagctgatatgattcatgtagatgtaatggatggtcattttgttcctaatttaacaatagggccacctgtaattaaggctcttcgaaaacactgttcattaaaatttgatgttcatttgatgatatcaccagtgcataaatatatagatgcgtatgctgatgcgggagcagatataattactattcatcccgaagcaactgataatttagaaaattcaattaaaaaaataaaagaaaaaaataagaaagttggagtttcacttaatcctgaatctaaaattgatttaatattagatctattagatcaaattgatttagttttaattatgagtgttaatcctggatttggaggtcaaaaatttatgccagaagttttagataaaattaaagaactaaaaaaaataaaagaacaaaaaaaaatggcttttgacatagaaattgatggtgggatccaatttt

SEQ ID NO: 289775 - DNA, 640 bp, Unknown
  Bacterial polypeptide expressing nucleotide sequence isolated from the Sargasso Sea
ccatcaattttatcagctgattttagtcagctgggcaaagaaataaaaaggcttgaagaaggtggcgctgacatgatccatgtagatgtaatggacggtcattttgttcctaatttaacaataggaccacctgtaattaaagctcttcgaaaacactgttcattagaatttgatgttcatttaatgatttcaccagttcataaatacatagacgcttacgccgaagcaggagcagatataattactattcatccagaagcaactgatagtttagaaaattcaataaaaaaaataaaagaaaaaaacaaaaaagttggagtttcacttaatcccgaatctgaaattgatttaattttagatttattagatcaaatagatttagtgttaattatgagtgtaaatcctggatttgggggtcaaaaatttatgccagaagttttagataaaattaaagaactaaaaaaaataagagagcaaaaaaagatggcttttgacatagaaattgatggtggaatcaattttgataattgtaaaagtgcaatagatgctggcgcaaacattcttgtttccggtactacagtgttcaaaagtaatgatggagatataaagaaaaatattaatttattaaaattaaaataag

SEQ ID NO: 289776 - DNA, 547 bp, Unknown
  Bacterial polypeptide expressing nucleotide sequence isolated from the Sargasso Sea
aatgaaaaatatacaaatttcaccatcaattttatctgctgactttagtcaattaggttcagaaattaaaagactcgaagaagctggagcagatatgattcatgtagatgtaatggatggtcattttgttcctaatttaacaattgggccacctgtgattaaagctcttcgaaagcattgttcattaaaatttgatgttcatttgatgatatcaccagtacacaaatacattgaagcttacgctgatgcgggagcagatataattactattcatcccgaagcaactgataatttagaaaattcaattaaaaaaataaaagaaaaaaataaaaaaaatggagtttcacttaatcccgaaactaaaattgatttaattttagatttattagatcaaatagatttggttttaattatgagtgtaaatcctgggtttggggggcaaaaatttatgccagaagttttagataaaattaaagaactaaaaagaataagagagcaaaaaaagttagattttgacatagaaattgatggtggaataaattttgat

SEQ ID NO: 289777 - DNA, 472 bp, Unknown
  Bacterial polypeptide expressing nucleotide sequence isolated from the Sargasso Sea
aatggctcaagaaaatccggaagtaattattgctccctccattctttcagctgattttggtcgtctgaacgatgaggtaagggcggttgagcaggctggtgctgactggattcatgtggatgttatggatggacattttgttcccaacattactatcggaccagcagttgtggagtctgttcgtaaggcaaccgaattgccgctagatgtacatttgatgatagaaaatgcggattcttatataaaggattttgctagcgcaggatctgacattattactgttcatgtggaagcgtgtcctcacctgaatcgcactattcagctaataaaagaacaaaaggtcagagctggggtggtactcaaccctgcaactcccttatcatctattgaagaaattcttcatgaaatcgatatggtcttattgatgtgcgtcaaccctggttttggcgggcaatcgtttattccttccatg

SEQ ID NO: 289778 - DNA, 622 bp, Unknown
  Bacterial polypeptide expressing nucleotide sequence isolated from the Sargasso Sea
aatgaaaaatatacaaatttcaccctcaattttatcagctgattttagtcagttaggattagaaataaaaagacttgaagaaggtggggctgacatgattcatgtagatgtaatggacggtcatttcgttccaaatttaacaataggaccacctgtaattaaagctcttcgaaaacattgttcattaaaatttgatgttcatttaatgatttcaccagttcataaatacatagaagcttacgctgatgcaggagcagacataattactattcaccctgaagcaacagataatttagaaaattcaataaaaaaaataaaagaaaaaagaaaaaaagttggagtttcgctcaatccggaaactaaaattgatttaattttagattttctagatcaagtagatttaattttaattatgagtgtaaaccctggatttggaggtcaaaaatttatgccagaagttttagataaaattaaagatctaaaaaaaataagacaagaaaaaaacctggattttgacatagaaattgatggaggaataattttgataattgcaaaagtgcaattgatgctggtgctaacattcttgtttctggtactacggtgtttaaaagtaatgatggag

SEQ ID NO: 289779 - DNA, 661 bp, Unknown
  Bacterial polypeptide expressing nucleotide sequence isolated from the Sargasso Sea
aatgaaaaatatacaaatttcaccatcaattttatccgctgactttagtcaattaggtgctgaaattaaaagactagaagaaggtggtgcagatatgattcatgtagatgttatggatggtcattttgttccaaatctaactattggtcctccaataataaaggcgcttcgaaaacactgctctttaaagtttgatgtacatttgatgatatcaccagtgcaaaaatatataaaagcttatgctaatgcaggagcagatattattactattcacccagaagcaacacaagacttagctgagtctattaagacaattaaagatttaaataagaaggttggagtttctcttaatccagaaactaaaattgaattaattaatgaatttttagatcaaatagatttagttttaatcatgagtgtaaatccaggtttcggaggtcaaaaatttatgccagaagttctagataaaattaaaaaacttaaaaaaattcaacaagaagaaaatttaaattttgatattgaaattgatggtggaattaattttgaaaattgcaaaaccgctgttgatgcaggagcaaatattcttgtctcgggtacaactgtgtttaaaagtaatgatggagatataaaaaaaaatattgatttattaaaactaaaataa

SEQ ID NO: 289780 - DNA, 601 bp, Unknown
  Bacterial polypeptide expressing nucleotide sequence isolated from the Sargasso Sea
atgaataattttatcaaaatatcaccttctattctctcagctgattttagtaagttgggaagcgaggtaatttctcttgaacaagcaggggcggattatatccatatcgacgttatggatgggcactttgttccaaatttgactattggtcctgaggttataaaaaaactacgtccactaacaaagaaaatatttgatgttcatttaatgatctcgccggtagacaactttataaaagattatgctgatgcaggtgctgatattataacttttcatccagaagcaaccagcgacacttcaaaaactattcaattaataaaaaatgaaaataaaaaagttggtatttcactaaaaccaaaatcaaaaattgacttaattgaaaaacatttaaatgaaatagatttggttttagttatgagtgttgaacctggttttggtgggcaaaaatttatgccagaggtccttgataaaacaaaaactttaagaaacataattagtaaaaaaaatttaaaagtagatatagagattgatggaggaattaattttgaaaattgcaccttggcaaaaaaagctggtgcaaatattcttgtttcagggtcaa

SEQ ID NO: 289781 - DNA, 664 bp, Unknown
  Bacterial polypeptide expressing nucleotide sequence isolated from the Sargasso Sea
aatgacaagttcaattaaaatctctccttcaatattgtctgcagattttagtaagttgggtgaagaaatagtatctctagataaagcgggagcagactatattcacgtagatgttatggacggacactttgttcctaatttgactattggacctgaagttgtaaaaaaattaagatcttttactaaaaaaatttttgatgttcatctaatgatatcaccagttgataaatatataaaagcattctcagaagctggttcagatataattacttttcatccagaagctacagacaatacagccaacacaattggtttaattaaaaaatacaaaaaaaaagttggtatttcgttaaaacctaaatcaagtatagagctgattaaagaatacattgatgaaattgatttaattttggtcatgagtgtcgaaccaggtttcgggggtcaaaagtttatgccggaagtgcttgataaagtaaaaaatttaaaaaaaattatatcagaaaaaaatttaaatattgatattgaaatcgatggtggaataaattttaaaaattcaaaacaagtaaaggatgcaggggctaatatattagtttcaggttccactatttttaatgaaaataatggggacttaaaaaaaaatattggattactacgttctagttaa

SEQ ID NO: 289782 - DNA, 670 bp, Unknown
  Bacterial polypeptide expressing nucleotide sequence isolated from the Sargasso Sea
tatgagcgaggactggatagctccatcgattctctccgcagattttgcgcggcttggcgaggaggtggatgccgtgctcaaggccggcgcagacttggtccatttcgatgtgatggacaaccattacgttccgaatctgaccatcgggccaatggtttgtgaggctcttcggaaacacggggtttccgcacctatcgatgtccaccttatggtcactccggtggatcggttggtcgaggactttgcggccgcgggcgccagttacatcagttttcatcctgaagccagccttcaccctgatcgcacgctgcaacttattcgcgatgccggatgtcgcagcggcctcgtgttcaatccggccacaccgcttagctggctcgatcatctgatggacaaggtggacatgattctattgatgtccgtcaatcctggatttggtggtcaggctttcattgaaacgactctgacaaagcttgcgacggctaggcgcctcatcgaagaatccgattgttctattcgtctggaggtggatggtggggtgaaggtcgacaatatcggtcggatcgctcaggctggagcagacaccttcgttgcgggctcggccatctttggggccggggattacacgcagacaatcaaccagatgcggagtgagatcgccgcggttcga

SEQ ID NO: 289783 - DNA, 505 bp, Unknown
  Bacterial polypeptide expressing nucleotide sequence isolated from the Sargasso Sea
atgaaaaatatacaaatctcaccatcaattttatcagctgactttagtcaattaggttcagaaattaaaagactcgaagatggtggagctgatatgattcatgtagatgttatggacggtcattttgttcctaatttaacaataggaccacctgtaattaaagcccttcgaaaacactgttcattaaaatttgatgttcatttaatgatttcaccagtacataaatacatagatgcttacgctgatgctggggcagatataattactattcaccctgagtctactgataatttagaaagttcaattaaaaaaataaaagaaaaaaataagaaagctggagtttcacttaatcctgaatctaaaattgatttaatattagatctattagatcaaattgatttagttttaattatgagtgtaaatcctggatttggaggtcaaaaatttatgccagaagttttagataaaatcaaagatctaaagaaaataaaagagcaaaaaaaga

SEQ ID NO: 289784 - DNA, 664 bp, Unknown
  Bacterial polypeptide expressing nucleotide sequence isolated from the Sargasso Sea
tatgtcatccaatataaagatatcaccttcaattttgtcagctgatttcagcaaacttggtgatgaaataatttcattagacaaggcgggggctgattatatacatgttgatgtaatggatgggcactttgttcctaatattacaattggaccagaaattataaaaaaattaagacctgtaaccgaaaaaacttttgacgttcatttaatgatcgagccagtagataaatatattaaggactttgctgatgctggtgcagatattattacatttcatccagaagcaactccaagcacagaagaaacaatcaatctaattaaaaaatttaataaaaaagttggtatatctctaaaaccaaagtctgatattaatttaattgaaaaacatcttgaaaaaatagatttagtattggtcatgagtgtagagccgggatttgcaggtcaaaaatttatgccaaatgttttgccaaaattaaaaaaactaaaagagatcattgctaataagaaattaaaaatagatctggagatagatggtggtataaattttgaaaattcaaagactgtgataaacgctggtgctaacgttttagtttcgggttctactatttttaaacaaaataatggggatttaaaaaaaaacattagcttattaagatcgagttaa

SEQ ID NO: 289785 - DNA, 463 bp, Unknown
  Bacterial polypeptide expressing nucleotide sequence isolated from the Sargasso Sea
aatgaatcaaataaaaatttcaccatcgattttgtctgctgattttacaaggcttgctgaacaggtcattgaagcggaagaggctggagttgattatgttcatgtagatgtcatggacggacattttgttccgaatattactataggtcctcttattgttaaagctttacgtggtgttaccaatataccacttgatgtacacttaatgattgagaatccagacctatacattgaagatttcagtaaggcaggagcagatataattactgtacatcaggaagcaacgcatcaccttcaccgcactattcaaaagatacatgatttaggtattaaggcgggtgtaagtataaatccctctacatcagtcagcactttagatgaaataatttgtaaagttgacttggttttagttatgtcagtcaatccgggattcggtggtcagtcttatattccatcgtctacc

SEQ ID NO: 289786 - DNA, 657 bp, Unknown
  Bacterial polypeptide expressing nucleotide sequence isolated from the Sargasso Sea
tatgagtgaccagaaaaatataattgcaccgtctatcctagcatctgattttgcaagacttggagaagaggtacgtaatgtccttgatgcaggagctgattgggttcattttgatgtaatggataatcactatgttccaaatctcactatcggaccaatggtttgcaaagctttaagagaatacggcataaaagaatttattgatgttcatttaatgattgatccagtagatgaattagctcaaagctttatagatgctggagcagacttaattagttttcatcccgaagcaaccaagcatatccatagatcaattcacgcgataaaagacaaaggttgtaaagcaggacttgtttacaatcctgcaactccacttcacacgttagaaagtgttcttgaggatctagatttagtattaattatgagtgtaaatcctggttttggaggccaatcgtttattcatagctcgcttgaaaaaattgctcaagttagaaaaatgatagatgagtctggaaaagatgtccgcttggaggtagatggtggaataaataaggataccattggtctagcatctgaggcaggcgctgatacatttgtagcaggctcagctatattcaatactgaaaattatgagcaaacaatatctgaacttcgttc

SEQ ID NO: 289787 - DNA, 661 bp, Unknown
  Bacterial polypeptide expressing nucleotide sequence isolated from the Sargasso Sea
atgaaaaaaattaaaatttctccatctatattatctgctgacttcagccagcttggtaatgaaattaagaaactagaacaaggtggagctgatttaattcacgtggatgtaatggatggtcactttgtaccgaacctaacaataggtccaccagtgataaaaaatctaagaaaatacaccaaacttccgtttgatgtacatttaatgatctcaccagtgcataaatatattgaaaattatgcagaagctggcgctgatataataactattcatcctgaagctactgacaatttaaaggagtctataaatttgataaaaaagcttggcaaaaaagttggtatatctctaaatccaaaaactgaaataaaaactttaattgatgaaatacaaaatattgatttagttctagttatgagtgttaatcctggttttggtggacaaaaatttatgcctgaagtattagataaaattaaagaattaaaaaagataaaagacaaaaaacaatatcaatttgatattgaagttgatggaggaattaattttagcaattcaaaaatggttttagaagctggagctgatattttagtatctggaaccacagtgttcaaagaaaaccatggtaatatcaaaactaatattgaaaaactaaaatcaatgtaaa

SEQ ID NO: 289788 - DNA, 661 bp, Unknown
  Bacterial polypeptide expressing nucleotide sequence isolated from the Sargasso Sea
aatgaaaaatatacaaatttcatcgtcaattttatctgctgattttagtcaattaggtactgaaattaaaagattagaggaaggtggagcagacatgattcatgtggatgtcatggatggtcattttgttccaaatttaactatcggtcctccggttattaaagctcttagaaagcactgctctttaaaatttgatgtacacttgatgatttcgccagtgcataaatacataaaagcatatgcagacgcgggagcagatatcattacaattcacccagaagctactcaaaacttaaaagaatcgattaaaatgattaaagatttaaaaaaaaaagtcggagtttcacttaatccagagtcgaaaattgaactaattactgaatttttagatcaaatagatttggttttaatcatgagtgttaatccaggttttggaggtcaaaaatttatgccagaggttctagataaaattaaacaacttaaaaaaattcaacaagaaaaaaatttgaactttgatattgaaatagatggtggaataaattttgaaaattgcaaaattgctattgatgctggagcaaatattcttgtttcaggcacaactgtattcaaaagtaatgatggagatataaaaaagaatattgatttattaaaactaaaataa

SEQ ID NO: 289789 - DNA, 453 bp, Unknown
  Bacterial polypeptide expressing nucleotide sequence isolated from the Sargasso Sea
catgagtagtcctattaaaatatctccatcgatcttatctgctgattttagcaaattaggagaggaagttatcgcattagagaaagctggtgcggattatatacatattgatgtaatggatgggcactttgttcctaacttaacaatagggccagaggtgattaaaaaattgagaccacttacaaaaaaaacgtttgatgtccatttaatgatttctccagtagataattttataaaagatttttcaaatgcaggagcagatataattacttttcatccagaagcaacgccaaatatatcaaatacaataagtcttatcagaaaagaaaaaaagaaagttggaatatcattaaaaccaaagtcgaaaattgatttaatagagaaatatattgatcaagtagatctaattttgatcatgagtgttgagccaggtttcagtggtcaaaagtttat

SEQ ID NO: 289790 - DNA, 334 bp, Unknown
  Bacterial polypeptide expressing nucleotide sequence isolated from the Sargasso Sea
atgagtgatttaataaaaatatctccctctattttgtctgctgatttcagcaaattaggtgacgaagttatctcattagaaaaagctggtgcagattatattcacattgatgttatggatggacactttgttcctaatcttactatagggccagaagtaataaaaaatctaagacctctcacaaagaaaatatttgatgttcatttgatgatttcaccagttgataattttataaaagagtttgctgacgcaggtgctgatattatcacttttcatcctgaagcaacctgtgatgtttctaaaacgataaaattaattaaagacctaaacaaaa

SEQ ID NO: 289791 - DNA, 568 bp, Unknown
  Bacterial polypeptide expressing nucleotide sequence isolated from the Sargasso Sea
aatgaaaaaaatacaaatttcaccatcaatattatctgctgattttagtcaactaggttctgagattaaaaaattagaggaatgcggcgctgacatgatacatgtagatgtaatggatggtcattttgttccaaatttaactataggtcctcctgttattaagtctttaaagaaacattcatcactcattttcgatgtacatttaatgatttctccagttcataaatatattgatgattacgcgaatgccggagctgatattataactatacatcctgaagcaacagataatttggcggagtcaattttaaagattaaaaaattaaataagaaagttggtttatctcttaacccaggaacaaaaatagatgttatattgaaatttttagatcaaattgatttagttctcataatgagtgtaaatccaggatttggtggacagaaattcatgcctgaagttttgactaaggtaaaagacttgacagctattaaagaggataaaggtatgaaatttgacattgaaatagatggagggattaactttgaaaattcaaaagctgcaataaaa

SEQ ID NO: 289792 - DNA, 604 bp, Unknown
  Bacterial polypeptide expressing nucleotide sequence isolated from the Sargasso Sea
aatgaaaaaaatacaaatttcaccttcaattttatctgctgattttagcaacttaggtgaagaaatacaaaaattagaaaaagctggtgcagacatgatccatgtcgatgttatggatggtcattttgttccaaatcttactattgggcctcctgtaattaaagctttaaaaaaatatacatcattgatttttgatgttcacttaatgatttcacctgtccataaatatataaaggcttattcagactcaggtgcggatatcattactatacaccctgaagcaacagatgatttgaatgcatctattttaaaaataaaagaattaaaaaaaaaagttggtgtttctttaaatcctgaaactaagattgatacaattttaaatcacttaagcaaaattgatttaattttaataatgagcgttaatccaggttttggaggtcaaaaatttatgcctgaagttttagagaaagtaaaaaaattaggaaaaattagagatgaaaaaaaactcaattttgatattgaaatcgatggtggaataaattttgaaaactcaaaaattgcaatagaggctggtgtaaatattctcgtgtcaggcacaacaatt

SEQ ID NO: 289793 - DNA, 664 bp, Unknown
  Bacterial polypeptide expressing nucleotide sequence isolated from the Sargasso Sea
tatgaacaatcctatcaaaatttcgccttcaattttatcagctgatttcagcaagctggggaatgaagttatctcattagagaaagcaggggctgattatattcatattgatgttatggacggacactttgttcctaatttaactattggtccagaggtcataaagaaactaagaccgcttacaaaaaaaatattcgatgttcatttgatgatttctccagtaaataatttcattaaagactttgcaaatgcaggtgcagatattattacttttcatcctgaggctacaaaagataccttggaaacaattaaaattatcaaaaaagaaaataaaaaagttggaatatcacttaaaccaaaatccaagatcgatcttgttgaaaatcacctagaggagatcgatctagttttaattatgagtgtagagccaggttttggaggtcaaaaatttatgcctgaagttttggaaaaaacaagacagcttagagatataattgagagaagaaaactaaatgtagatatagaaattgatggaggtataaactttgaaaattgtacgcttgcaaaaagagcaggcgcaaatattcttgtgtctggatctactatatttaaagagaataaaggcaatctaaaaaaaaatatagaaattttaagaaaaaattaa

SEQ ID NO: 289794 - DNA, 558 bp, Unknown
  Bacterial polypeptide expressing nucleotide sequence isolated from the Sargasso Sea
aatgaaaaaaattaaaatttctccatcgattttatcagctgatttcagtaatcttaggactgaaattcaaagacttgaaagtggtggagcagatatgatccatgtagatgttatggacggacattttgtgccaaatcttacaataggtcctcctgtcattaaagctcttaaaaaacattcatcattactttttgatgtccacttaatgatttctcctgttcataaatatattcagtcatattctgaggcaggagctgatattattacaattcatccagaagcaactgaaaatttaaactcgtcaattttaaaaataaaagaattaagaaaaaaagttggtatttctcttaatcccgaaacaaaaattgatgtcatcctagattttttggaaaaaattgatttagttctaatcatgagtgtaaacccaggttttggtggccaaaaatttatgcctgaagttttgagtaaagtaaaagaacttaaaaaaattcaatcagaaaaaaaacttaattttgatattgaaatagatggtggaataaattttgaaaattcaaaaaa

SEQ ID NO: 289795 - DNA, 664 bp, Unknown
  Bacterial polypeptide expressing nucleotide sequence isolated from the Sargasso Sea
tatgagtaattcgattaaaatttcaccctctattttatcagctgattttagcaagttgggtagtgaagttgttgctctcgaaaaagccggtgctgattatattcacatagacgttatggatgggcactttgttccaaatttaactattggacctgaggtaattaaaaaactgagacctttgaccaaaaaaacttttgatgttcatttaatgatatcgcccgtcgataattttgtaaaagaatttgcaaatgctggtgctgatataattacttttcatccagaagcaacaagtaacatttcaaacactatcaatcttattaggaaagaaaataaaaaagttggaatttccttgaagcctaattcaaggattaatcttatagaaaatcatctagacgaaatcgatttggtgctaataatgagcgttgaacctggctttggcgggcaaaaatttatgcctgaagtattagaaaaaacaaaattattgaaagacttaattgagaaaaaaaatcttaaagtggatattgagattgatggtggaataaattttgaaaattgttccttagcaaaaaaagctggagcaaatattttagtttcaggatctactatatttaacgagaataaaggtgatctaaaaaaaaatatagaaattctaagaaaaaattaa

SEQ ID NO: 289796 - DNA, 445 bp, Unknown
  Bacterial polypeptide expressing nucleotide sequence isolated from the Sargasso Sea
atgagtagtaatattaaaatttctccttcaattttatctgctgatttcagcaagttaggtaatgaagttatttctttagaaaaagcaggagcggattatatacacattgatgttatggacgggcattttgttcctaatctcactattgggccagaagtaataaaaaaactgagaccgcttacaaaaaaaacatttgatgttcatttaatgatttctcctgttgataattttataaaagatttcgctgatgctggagcggacataataacttttcacccagaggctaccccggatgtttctacaacgataagaatgataaaagatcaaaataaaaaagttggtatttctttaaaaccaaaatcaaaaattgatttaattaaagatcatttaaatcaaattgatttagtcttaattatgagtgttgagcctggctttggtggtcaaa

SEQ ID NO: 289797 - DNA, 661 bp, Unknown
  Bacterial polypeptide expressing nucleotide sequence isolated from the Sargasso Sea
aatgaaaaatatacaaatttcaccttcgattttatctgctgactttagtcaattaggtactgaaattaaaagactagaggaaggtggtgcagatatgatccatgtggacgtaatggatggtcattttgttccaaatttaactattggtccaccagtaatcgaagctctacgaaaacactgctctttgaagtttgatgtacacttgatgatttcaccagtgcataaatatatagaagcttacgcggatgcaggagcagatatcattaccattcacccagaagctactcaaaacttagaagattcaattaaaaagattaaagatttaaaaaaaaaggtaggagtttctcttaatcccgagtcgaaagttgaattaattacagaatttttagatcaaataaatttggttttaatcatgagtgttaatccaggttttggaggtcaaaaatttatgccagaagttctagataaaattaaacaacttaaaaaaattcaaaaagaaaaaaatttgacctttgatattgaaattgacggtggaataaattttgaaaattgcaagagtgctattgatgctggagcaaatattcttgtttcaggcacaactgtattcaaaagtaatggcggggatataaaaaagaatattaatttattaaaactaaaataa

SEQ ID NO: 289798 - DNA, 661 bp, Unknown
  Bacterial polypeptide expressing nucleotide sequence isolated from the Sargasso Sea
atggctttaattaaaatttcaccctcaattctatcagcggattttagtaaactaggaaatgaaatccaggatttagagaaagcaaaagcagatttaatacacatagatgtaatggatggacattttgtgccaaatataactattggtccagaagtaataaaaaaattaagaaaatatacatcattaccgtttgatgtacatttaatgatttcccctgttcataatttcatcaaaaattttgcagaagctggttcagacattattaccatacatccagaagctaccgacgacttactaagctcaattaagaaaattaaatcatttaataaaaaagcaggagtttcgttaaatccagaaacaccggtagataaagttttacctgtattaaaattaattgatttagttttagtaatgagtgtaaatccaggattcggtggacaaaagtttataaaagaaaccttaaataaggtaaaaatactaagaaaagaaattgatgcgcaaaaattaaaaactcaaattgaaatagatggtggaataaattttgaaaatgcagcaatggctaagaaagctggggtagatatattagtttccggcactacaatttttaaagaaaatggaggagacttaaaaaaaaatatccaattgcttagaacaggataaa

SEQ ID NO: 289799 - DNA, 582 bp, Unknown
  Bacterial polypeptide expressing nucleotide sequence isolated from the Sargasso Sea
aatggctaaaaaactcgctccatcaatactctccgcggattttgctcgcttaggagaagaagtctctgaggtagtaaatgccggcgcagacattattcattttgatgtaatggataatcactatgtgcctgtcctaacttttggaccgaagatctgcgctgatctcagagcctatggggtttcggccccgatagatgttcacttgatggcgaaacccgttgatgacctaatcaaagcttttggagatgccggagcagattttataacttttcacccggaagcatcggaacatatcgatcggtctttgagacttatagagcaagctggttgcaaagctggactggttttcaaccccgctacaccgctcgactacctagaatacgtcatcgaccagattgatatgattcttattatgtccgttaatcctggttatgggggacagaaatttatctcaacgacctacaaaaaaattaaggatgctaaaaagcttatatctaagctgggagccgagatcttggtagaggtcgatggagggataaatctgtctaatatttcagaaatttcttcagccggagctgatat

SEQ ID NO: 289800 - DNA, 661 bp, Unknown
  Bacterial polypeptide expressing nucleotide sequence isolated from the Sargasso Sea
atgaaaaaaattcaaatttctccatctatattatctgctgacttcagtaaacttggtagtgaaattaagaagcttgaagaaggtggggctgacttaattcatgtcgatgtaatggacggtcactttgttccaaatttaacaataggacctccggtaataaaaaatctaagaaaatacactaagcttccatttgatgtgcacttaatgatttctccagtacatgaatacattgtaaattatgcaaatgctggcgctgatataataactattcatcctgaagccactgaaaacttaaaagaatctttaaatctgataaaaaatctaggtaaaagagttggtgtatctttaaatccaaaaactcaaataaaaactttaatagatgaaatagaaattattgatttggttctcgttatgagtgttaatcctgggtttggtgggcaaaaatttatgcctgaggtattaaataaaataagagaattaaaaacaataaaagacaatggtcaatataaatttgatattgaagttgatggaggaattaattttagtaattcaaaaatagttttagaggcaggagctaacattttagtatctggtactactatttttaaagaaaacgatggcaatatcaaaacaaatattgaaaaacttagatcaatgtaaa

SEQ ID NO: 289801 - DNA, 640 bp, Unknown
  Bacterial polypeptide expressing nucleotide sequence isolated from the Sargasso Sea
ccctcaatattatctgctgattttagtcagcttagtcttgaaattaaaaaacttgaagatgcgggggctgacatgattcatgtagatgtaatggatgggcactttgtgccaaatttaacaattggacccccggtgataaaatctttaagaaaacatactaatctaatatttgatgttcatctaatgatttcgccagttcataaatatattgagagtttttctaatgcaggtgcggatataattacatttcaccccgaagcaactgaaagcatgaatgaaacaatcagtcttattaaaaaattgaaaaaaaaagttggagtatctttaaatccgcaaacttcaattgatttagttaaagacttcttggataaaatagatcttgttttagttatgagtgtacatccaggttttggtggccagaaatttatgccggaaattctagataagattgaagatctatcaaaacttagaaaagaaaaaaaacttactttcgatatagaggttgatggtggtatagattttgataactctaaattagttaaaaaagctggagcaaatattcttgtatctggaacaactatattcaaaaataacaacggtgatataaaaaaaaatattgatgctttgagaactgggtaat

SEQ ID NO: 289802 - DNA, 445 bp, Unknown
  Bacterial polypeptide expressing nucleotide sequence isolated from the Sargasso Sea
aatgaaaaatatacaaatttctccatcaattctttcagctgattttagtcagttaggaaaagaaattaaaagacttgaagaaggtggagccgacatgattcatgtagatgtaatggatggtcattttgttcctaatttaacaattgggccacctgtaattaaagcccttcgaaagcattgttcattaaaatttgatgttcatttgatgatatcaccagtacacaaatacattgaagcttacgctgatgcgggagcagatataattactattcatcccgaagcaactgataatttagaaaattcaattaaaaaaataaaagaaaaaaataaaaaaattggagtttcacttaatcccgaaactaaaattgatttaattttagatttattagatcaaatagatttggttttaattatgagtgtaaatcctgggtttggggggcaaaaa

SEQ ID NO: 289803 - DNA, 664 bp, Unknown
  Bacterial polypeptide expressing nucleotide sequence isolated from the Sargasso Sea
gatgagtaatttaatcaaaatttcaccttctattttatccgctgattttagtatgttaggaaatgaagtcatttccctagaaaaggccggagctgattatattcacatagacgttatggatggacactttgttcctaatttgactattggaccagaggtaataaagaaactgagaccccttacgaaaaagacatttgatgttcatttaatgatttcgccagttaataatttaataaaaaattttgctgatgctggagctgacataattacatttcatccagaagccactgataataccttagaaactataaaattaataaaagcacaaaataaaaaagttggaatttcactaaaacctaactctaaattaagtctaatagaaaattatttagataaaatagatttagttttaattatgagcgtagaacccggttttgcagggcaaaaattcatgccggaagtcttagaaaagataaagaaactcaaagaaattattgagaaaaaaaacttaaatgttgatattgaaatagatggagggataaattttcaaaattgtagtctagcaaaaaaagctggggctaatatattggtatctggatcaactatttttaaagaaaacaacggtgatctgaaaaaaaatatagaaattcttagaaaaaattaa

SEQ ID NO: 289804 - DNA, 493 bp, Unknown
  Bacterial polypeptide expressing nucleotide sequence isolated from the Sargasso Sea
atgaaaaaaatacaaatttcaccttcaattttatctgcagattttagtcaattaggaaaagaaataaaaaaattagaagacgcaggtgcagatatgattcatgttgatgtaatggatggtcactttgtacctaatttgactatcggacctcctgtaattaaggcactaaaaaaaaattcattactaccctttgatgttcacttgatgatctcaccagtccataagtatattgagagctacgcgattgcgggtgcagatattataactattcatccagaggcaactaatgatcttttgggatcaataaataaaattagagaatttaaaaaaaaggtaggtgtatcattaaatccggagacaaaaattgaaatcattaaggagcatttaaatcaaatagatttggtcttgataatgagcgtaaatccaggttttggaggacaaaaatttatgcctgaagttttgaataaggtaaaaaaattagatgaaattcgaa

SEQ ID NO: 289805 - DNA, 655 bp, Unknown
  Bacterial polypeptide expressing nucleotide sequence isolated from the Sargasso Sea
atgaaaaatatacaaatttcaccttcaattttatctgctgactttagtcaattgggtactgaaattaaaagattagaggaaggtggtgcagatatgatccatgtagatgtcatggatggtcattttgttccaaatctaaccattggtcccccagttattaaggctctaagaaaacattgctctttaaaatttgatgtacacttgatgatttcgccagtgcataaatacataaaagcatatgcagatgcaggggcagatatcattacaattcacccagaagcaactcaaaacttgagagaatcaattaaaacgattaaagatttaaaaaagaaggttggggtttctcttaatccagagtctaaaattgaattgattactgaatttttagatcaaatagatttggttttaatcatgagtgtaaatccaggttttggaggtcaaaaatttatgccagaggttctagataaaattaaacagcttaaaaaaattcaacgagaaaaaaatttgaattttgatattgaaatagatggtggaataaattttgaaaattgtaaaattgctattgatgctggagcaaatattcttgtttcaggaacaactgtattcaaaagtaatgacggagatataaaaaagaatattgatttattaaactaaa

SEQ ID NO: 289806 - DNA, 556 bp, Unknown
  Bacterial polypeptide expressing nucleotide sequence isolated from the Sargasso Sea
aatgaaaaaaatacaaatttcaccctcaatcttgtctgctgattttggtcaattgggtattgaaattaaaagattagaagatgcaggggcagatatgatccatgtagatgtaatggatggtcattttgttccaaatttaacaataggacctcctgtaataaaagcattgaaaaaacaatcttctatgatttttgatgttcacctaatgatttctcctgtccataaatacattgaggcttattcagatgctggggcagatataattacaatccatcctgaggctacagatgatttaaattcatcaattttaaaaattaaagaattaaacaaaaaagtcggtgtgtctctcaatcctgaaactaaaattgatattattatcgaacacctaaaaaaaattgacttagttttaattatgagtgttaatccaggattcggtggtcaaaaattcatgcctgaagttttagaaaaaataaagagacttaaaaaaattcaagaaaaagaaggattaaattttgatattgaaatagatggcggtattaattttgataattcaaaa

SEQ ID NO: 289807 - DNA, 553 bp, Unknown
  Bacterial polypeptide expressing nucleotide sequence isolated from the Sargasso Sea
atgagtaacttaatcaaaatttcaccctcaattttatcagctgattttagcagactaggaagtgaagtaatatcattagagaaagcaggagcagattatattcatatagatgttatggatgggcattttgtgccaaatttaactattggcccagaagtaattaaaaaactaagaccacttacaaacaaagtatttgatgttcatttaatgattactccggttgataaattcataaaagattactcaaatgcaggtgcagatattattacatttcatccggaagctactgagaatactacaaaaacaattcagctaataaaaaaagaaaaaagaaaagttggtttatctttaaaaccaaattcaaaaatagatttgatagaaaaacatttaaacgatattgacctggtcttgataatgagcgttgaaccaggttttggtggtcaaaagttcatgccagaggttttggaaaagacgagaaagttaaaagaaataattgaacaaaaaaatatgaatatagatatcgaaattgacggtggaataaatttcgaaaact

SEQ ID NO: 289808 - DNA, 513 bp, Unknown
  Bacterial polypeptide expressing nucleotide sequence isolated from the Sargasso Sea
aatgaacaattcgatcaaaatatctccttcgattttatcagctgattttagtaaattaggcaatgaggtgatctctttagagaaagctggggccgactatattcatattgatgttatggatggacactttgtaccaaatcttacaattggaccggaggtcataaaaaaacttagaccccttaccaataaagtttttgacgtacacttgatgatttctccagttgataactttattaaagaatttgccagagctggttcagatattattacttttcatcccgaagcaacgcatgatactgcaaaaacaatcgagttaattagaaaagaaaataaaaaagttggcatttcattaaagccaaactcatctatagatcttattaagaattacttggagcaaattgatttagtgttgattatgagtgttgaacctggttttgctggtcaaaaatttatgccgcaagttttggaaaagactaaaaatctaaaagaaattattaataaaaaaaatttaaa

SEQ ID NO: 289809 - DNA, 664 bp, Unknown
  Bacterial polypeptide expressing nucleotide sequence isolated from the Sargasso Sea
atgtcttcatatgtgaaaatttcaccctcaatactatcagcagattttagtaaattaggtgaagagataatttcattagataaagctggggctgattatattcatgttgatgttatggatggacattttgttcctaatataactatagggcctgagataataaagaaaataagacctgtaactaaaaaaatatttgatgttcatttaatgatagaacccgtagataaatacattaaagattttgctgatgctggggcagatataataacatttcatccagaagcaactcctaacactttggaaacaataaatctgattagaaagtataataaaaaagttggtatttcactaaaaccaaggtcagaaataagtttaattgaaaaatttttagataaaattgatttgatattggtgatgagtgtagaaccaggatttgctggtcaaaaatttatgccagaagttttaccaaagttaaaaaatcttaaagaaatgatttctttaaaaaaactaaaaatagatttagaaatagatggaggtataaattttgaaaatagcaaaattgctattgaagctggtgcaaatattttagtttctggctcaacaatatttaaaaaaaataatggggacctaaagaaaaatatttcactactaagatcgatttaga

SEQ ID NO: 289810 - DNA, 580 bp, Unknown
  Bacterial polypeptide expressing nucleotide sequence isolated from the Sargasso Sea
aatgaaaaatatacaaatatcaccatcaattttatcagctgattttagccaattaagaacagaaataaaaagacttgaggaaggtggagcagatatgattcatgtagacgtaatggatggtcattttgtacctaacttaacaataggtcctccagtaattaaagcacttagaaaacattgctctttaaaatttgacgttcacttaatgatttcaccggtacataaatatattgaggattatgctaatgcaggagcagatataataaccatccatcctgaggcaactgaaaacttggaggtttcaataaataaaatacaagatttaaagaaaaaagtaggagtttcacttaatcctgaatcgaatatagatttaattaagaatttattaagtcaaattgatttagttctaataatgagtgtaaatcctggatttggtggacaaaaatttatgccagaagttttagaaaaaataaaagaattaaaaaaaattagagaaatagaaaaacttgactttgatattgaaatagatggcgggataaattttgacaattgcaaaatagcaattgaagctggtgctaat

SEQ ID NO: 289811 - DNA, 461 bp, Unknown
  Bacterial polypeptide expressing nucleotide sequence isolated from the Sargasso Sea
gatgacaagttctattaaaatttcaccctcaattttatcagcagattttagtaaattagggcaagaaatcatatcattggacaaagctggagcagactatattcatgttgatgtaatggatgggcactttgttccaaatataactatcggtcccgaggtaattaaaaaattaagaccattaacaaagaaagtttttgatgtccatttaatgatatcgccggttgacaaatatattgaagctttttcggatgctggagctgatatcattacctttcacccggaagctacagaaaatattgatgtaacaataaatttaataaaaaaacataagaaaaaagtaggtatttcgttaaaaccaaaatcaagcattaatttaataaaagattatattactaagattgacctaatactcattatgagtgtggaacctgggggttggtggacaaaaatttatgccagag

SEQ ID NO: 289812 - DNA, 661 bp, Unknown
  Bacterial polypeptide expressing nucleotide sequence isolated from the Sargasso Sea
tatgaattctataaaaatttcgccttcaattttatcagcggacttcagtaagttaggtaatgaaattcaaaatttagaaaaagcaaaagcagacttgatacacatagatgtaatggatggtcattttgttccaaatattacaatcggaccagaagtaataagtaaattgaggaaatatacatcgctaccatttgacgttcatttaatgatatcaccagttcacgattttataaaaaactttgctgatgctggcgcagacataataactatacatcctgaagccacaaatgatttagcaagctctataaaaaaaattaaatccttaaacaaaaaagcaggtgtatcattaaatccagaaactcctgtcgaaaaagttttaccagttttaaaacaaattgatttagttttaattatgagtgtaaatccgggttttggtggccagaaatttatggaaaataccctagaaaaagttaaaattttaaggaaagaaattgaccaaactaatttgaaaactttaatagaaattgatggtggtataaattttgagaacgcaacaatggctaagaaagcaggagtagatatattagtttcaggtacaacaatttttaaggaaaacgggggaaacttaaaaaaaaatatagaattattaagaacaggatga

SEQ ID NO: 289813 - DNA, 649 bp, Unknown
  Bacterial polypeptide expressing nucleotide sequence isolated from the Sargasso Sea
atgaaaaaaattcaaatttctccatctatattatccgctgatttcagccaacttggtagtgaaattaagaagctagaagaaggtggagctgacttaattcatgttgacgtaatggacggccactttgttccaaatttaacaataggaccaccagtaataaaaaacttaagaaaatatactaagcttccgtttgatgtacacttaatgatttctccagtacatgattacattgaaaattatgcaaatgctggtgccgatataataactattcatcctgaagccactgaaaacttaaaagaatctataagtttaataaaaaaatttggcaaaaaagttggtgtatctttaaatccaaaaactgaaataaaaactttaattgatgaaatagacaatattgatttagttcttgttatgagtgttaaccctggttttggaggacaaaaatttatgcctgaagtattagataaaataaaggaactgaaaagaataaaagacaaaaaccagtatcactttgatattgaagtcgatggaggaattaattttagtaattcaaaaatagttttagaagctggtgctgatattttagtatctggaaccacagttttcaaagagaacggtgggaatattaaaactaatatgaaaaactaaa

SEQ ID NO: 289814 - DNA, 661 bp, Unknown
  Bacterial polypeptide expressing nucleotide sequence isolated from the Sargasso Sea
atgaaaaaaattaaaatttcaccatcaattttatcagctgattttagtcagctaggtaatgaaattaaaaaacttgaagagtcaggtgctgatatgatccacgtagatgtgatggatggacattttgttcccaatttaacaatcggtccaccagtaattaaatcattgaaaaaaaatagtaagctcaaatttgatgttcatctgatgatttcaccagttcataagtatatagatgcatttgctgaagcaggtgcggatataatcacaattcatcctgaagcaactgataacttggaggaatcaatttcaaaaataaaaaatttaaaaaaaatagttggagtttctcttaatcctgaaacaaaaattaatacgatcataaaattattagataaaatagatttagtattaataatgagtgtgaatcctggcttcggaggtcaaaaatttatgccagaagttttagaaaaaattaaagaattaaaaaaaattcaacaagaaaaaaaacttaattttgatatagagattgatggaggaattaattttgaaaattgtaaattagcaattgatgctggagcaaatattcttgtttcaggaacaactatatttaaaagtaacaatggaaatattaaaaaaaatatagatctattaaaatcaaactaag

SEQ ID NO: 289815 - DNA, 544 bp, Unknown
  Bacterial polypeptide expressing nucleotide sequence isolated from the Sargasso Sea
tatgagtgaccagaaaaatataattgcaccttctatcctagcatctgattttgcaagacttggagaagaggtacgtaatgtccttgatgcaggagctgattgggttcattttgatgtaatggataatcattatgttccaaatctcactatcggaccaatggtttgcaaagctttaagagaatacggtataaaagaatttattgatgttcatttaatgattgatccagtagatgaattggcccaaagctttatagatgctggagcagacttaattagttttcatcccgaagcaaccaaacatatccatagatcaattcatgcgataaaagacaaaggttgtaaagcaggacttgtttacaatcctgcaactccacttcacacgttagaaagtgttcttgaggatctagatttagtattaattatgagtgtaaatcctggttttggaggccaatcgtttattcatagctcgcttgaaaaaatttgctcagttagaaaaatgatagatgagtctggaaaagatgtccgcttggaggtagatgggtga

SEQ ID NO: 289816 - DNA, 646 bp, Unknown
  Bacterial polypeptide expressing nucleotide sequence isolated from the Sargasso Sea
atgagcagtaaagactacataattgcaccatcaatattatctgcagacttcgctcgtcttggagaggagtccaaaaatgttttagatgctggtgcggattggatccattttgatgtgatggataatcactatgttcctaatttaactattggacctatggtctgtaaggcgcttagagattacggaattaaagcacctattgatacccatctcatggttaagcctgttgataagttaatagaaagttttgctgaagcgggctcaacctacataacttttcatcctgaagcgtccgaccatgtagatagatctatcgaacttataaaaagtcttaaatgtaaggcaggcttggtactcaatccagcttcaccagttagcttactagaagagtcaattgaaaaactagatatggtcttattaatgtctgtaaatcctggatttggaggtcagaaatttattgattcagttttaaataaagtaacaaaggttcgttctttaatagacagacataatttaaatattagattagaagtagatggtggaataaatttagataatatatcaaaggttgcatccgccggagctgacacattcgtagcaggatcagcgatcttcagtcaagcagattatattgattctataagca

SEQ ID NO: 289817 - DNA, 589 bp, Unknown
  Bacterial polypeptide expressing nucleotide sequence isolated from the Sargasso Sea
aatgaaaaaaataaaaatttcaccctctattctatctgctgattttagccaactcgctaaagaaattaagagattagaggatggcggtgcagatttaattcatgtagatgtaatggatggacattttgttcccaatttaacaataggtccaccagttataaaatctttaagaaaatacactaagttgttgtttgacgttcatcttatgattgctccggttcataaatatataaaagattatgcagatgctgggtcggatataattacctttcatccagaagcgactgataatttagatgaaactattaatcatattaaagaattaaaaaaaaaagtaggtatttctcttaatccagactcctctatagaattaataagagataaactaagtaaaatagatctagttttagttatgagtgtttatcctggttttggaggtcaagagtttatgccagaaaccattccaaaaatttctgaactaaaaaacataaaagataatttaaaacttaattttgatattgaagttgatggaggaattaattttaaaaatgcaaaatcagttattaatgctggtgcaaatattttagta

SEQ ID NO: 289818 - DNA, 577 bp, Unknown
  Bacterial polypeptide expressing nucleotide sequence isolated from the Sargasso Sea
atgaaaaatatacaaatttcaccgtcaattttatctgctgattttagtcaattaggtactgaaattaaaagattagaggaaggtggtgctgatatgatccatgtggatgtcatggatggccattttgttccaaatctaactattggtcccccagttattaaagccctacgaaagcactgctctttaaagtttgatgtacacttgatgatttcaccggtgcataaatacatagaagcgtatgcagacgccggagcagatatcattacaattcacccagaagccactcaaaacttggaagaatcaattaaaacgattaaagatttaaaaaagaaggtcggagtttctcttaatccagagtcgaaaattgaactaattgatgaatttttagataaaatagatttggttttaatcatgagtgttaatccaggttttggaggtcaaaaatttatgccagaggttctagacaaaattaaacaacttaaaaaaattcaacaagaaaaaaatttgaactttgatattgaaatagatggtggaataaattttgaaaattgcaaaattgctattgatgctggagcaa

SEQ ID NO: 289819 - DNA, 661 bp, Unknown
  Bacterial polypeptide expressing nucleotide sequence isolated from the Sargasso Sea
aatggctaatattaaaatttcaccttcaattttgtctgctgattttagtaagttaggtagtgaaattgaaaatttggaaaaagcaaaagcagatttaatacatatagatgttatggatggacattttgttccaaatattaccattggccccgaagtaataaataaattaagaaaacatacttcattaccatttgatgttcatttaatgatatctcctgtacataattttattaaaaattttgcagaagctggtgcagacataattacaattcaccctgaagctacagaagatttagttagttcaataaaaaaaattaagtcatataacaaaaaagttggaatatcattaaacccagaaacttcagtagataaagttatgccagttttaaatttaattgatttggttttagtaatgagtgttaaccctggattcggtggtcaaaaatttatgaaagaagttttggaaaaagtaaaaatattaagaaaagaaattgatactaaaaaactaaaagtagaaattgaaatagatggaggaataaattttgaaaattcaaaaatggccaaggatgcaggtgttgatatattagtttcaggaacaacaatttttaaagaaaatggtggaaatttaaaaaaaaatattcaattactcaaaacaggataa

SEQ ID NO: 289820 - DNA, 631 bp, Unknown
  Bacterial polypeptide expressing nucleotide sequence isolated from the Sargasso Sea
tatgagcggtataattaaaatttcgccttcaatattatctgctgatttcagcaaactaggtaatgaggtaatttctttagaaaaagcaggcgccgattatattcatatagatgttatggatgggcatttcgttcctaatcttactataggacctgaagttataaaaaaacttcgacctctaacaaaaaaaacttttgatgttcatttaatgatttctcctgttgataattttgtaaaagattttgcagatgctggcgcagatatcattacttttcacccagaggcgacttctgatgtttctaaaacaataaaattaataagagatcgaaataaaaaagttggtatttcattaaaaccaaaatcaaaaatcgatcttataaaagattatatagatcaagttgacttagttttaatcatgagtgtagaaccaggttttggtggacaaaagtttatgccagaggttttagacaaaacaaaagcagtaagaaatctaattaatgaaaacaatttaaacgtagatgttgagatagatggtggaattaattttgaaaattgttccaaagcaaaagatgcaggtgcaaatatacttgtatcggggtctactgtctttaatgaaaataagggtgaccta

SEQ ID NO: 289821 - DNA, 499 bp, Unknown
  Bacterial polypeptide expressing nucleotide sequence isolated from the Sargasso Sea
tatgagtgatcagaaaaatataattgcaccgtctatcctagcatctgattttgcaagacttggagaagaggtacgtaatgtccttgatgcaggagctgattgggttcattttgatgtaatggataatcactatgttccaaatctcactatcggaccaatggtttgcaaagctttaagagaatacggcataaaagaatttattgatgttcatttaatgatagatccggtggatgaattggcacaaagctttatagatgctggagcagacttaattagttttcatcccgaagcaaccaaacatatccatagatcaattcacgcaataaaagacaaaggctgtaaagcaggacttgtttacaatcctgcaactccactttacacgttagaaagtgttcttgaggatttagatttagtactaattatgagtgtaaatcccggttttggaggccaatcgtttattcatagttcgcttgaaaaattgctcaagttagaaaaatga

SEQ ID NO: 289822 - DNA, 559 bp, Unknown
  Bacterial polypeptide expressing nucleotide sequence isolated from the Sargasso Sea
tatgagtgaccagaaaaatataattgcaccttctatcctagcatctgattttgcaagacttggagaggaggtacgtaatgtccttgatgcaggagccgattgggttcattttgatgtaatggataatcattatgttccaaatcttactatcggaccaatggtttgcaaagctttaagagaattcggtataaaagaatttattgatgttcatttaatgatagatccagtggatgaattggcccaaagctttatagatgctggagcagacttaattagttttcatcccgaagcaaccaaacatatccatagatcaattcacgccataaaagacaaaggctgtaaagcaggacttgtttacaatcctgcaactccacttcatacgctagaaagtgttcttgaggatctagatttagtattaatcatgagtgtaaatcctggttttggaggccaatcgtttattcatagctcgcttgaaaagattgctcaagttagaaaaatgatagatgaatctggaaaagatgtccgcttggaggtagatggtggaataaacaaggatact

SEQ ID NO: 289823 - DNA, 463 bp, Unknown
  Bacterial polypeptide expressing nucleotide sequence isolated from the Sargasso Sea
atgaaaaaaatacaagtttcgccatcaattttatcagccgactttagtcagctaggcaatgaaataaaaagattggaaaaaggtggcgcagacttaatacatgttgatgttatggatggtcattttgttcctaatttaacaattggaccacctgtaataaaaacattaaaaaaatgtacaaatttaccttttgatgttcatctaatgatttcgcctgttcataagtatattgaagattatgctaaagccggtgcagatataattacatttcatcctgaagccactgaaaatttaaaagaaacaattgaattagtaaaaaaacttaataagaaagttggtatatctttaaatcctaatacagatataaatgtattagataagaaatttaaatatatagatttaatactcgttatgagtgtttatcctggatttggtggacaaaaaatttattccagacggtaat

SEQ ID NO: 289824 - DNA, 661 bp, Unknown
  Bacterial polypeptide expressing nucleotide sequence isolated from the Sargasso Sea
atgcaaaaaattaaaatttcgccctcaatattatctgctgattttagtcagcttagtctagaaattaaaaaacttgaagatgcaggggctgacatgattcatgtagatgtgatggatgggcactttgtgccgaatttaacaattggacccccggtgataaaatctttgagaaaacatactaatctaatatttgatgttcatctaatgatatcgccggttcataaatatattgagagtttttctaatgcaggtgcggatataattacatttcatcccgaagcaactgaaagtatgagtgaaacaatcagtcttattaaaaaattgaaaaaaaaagttggagtatctttaaatcctcaaactccaattgatttagttaaaaacttcttgaataaaatagatcttgttttagttatgagtgtacatccaggttttggaggtcagaaatttatgccggaaactctaggtaaaattgaagatttatcaaaacttaagaaagaaaaaaagctcgattttgatatagaggttgatggtggtatagattttgataactctaaattagttaaaaaagctggggcaaatattcttgtatctggaacaaccatatttaaaaataacaacggtaatataaaaaaaaatattgatgctttgagaactgggtaat

SEQ ID NO: 289825 - DNA, 506 bp, Unknown
  Bacterial polypeptide expressing nucleotide sequence isolated from the Sargasso Sea
aatgagtggtgcaattaaaatttccccttctattttatctgctgattttagtaaattaggtgaagaaataatttcattagataaagcaggggctgactatattcatgttgatgttatggacggtcattttgtacctaatctaactattggtccagaggttgtaaaaaaattaagaccatttactaaaaaaacttttgatgttcatcttatgatatctccagttgacaattacataaaacaattttcagaagccgggtcggacataattacttttcatccagaagcgacagaaaatatatctcatacaattggtttaattaaaaaatataacaagaaggttggaatttctcttaaacctaaatcaaatataagcttaatagaaaaacacttaaacgaaattgatttaattttaataatgagcgtggaaccaggctttggaggacaaaagtttatgcctgaagtacttgctaaagtaaaaaagttgaaaaagatcatttcagaaagaa

SEQ ID NO: 289826 - DNA, 661 bp, Unknown
  Bacterial polypeptide expressing nucleotide sequence isolated from the Sargasso Sea
aatgaaaaaaatacaagtttcaccatcaatattatccgctgactttagtcaattaggtaatgaaatcaaaagacttgaggaaggaggggctgatttaatacatgttgatgtaatggacggtcactttgttcctaatttaacaataggacctcctgtaatcaaatcattaaaaaaaaattgttcaattaaatttgatgtgcatttaatgatttctccagtacacaaatatatagaggcttactctgatgctggcgcagacattattactattcacccagaagcaactgaagatttatccgcttctatatctaaaataaaatatttaaaaaaaaaagttggtttatctctaaatccagagacaaatgttagtgtaattaaagaacacttaaataaaattgatttagtattaattatgagtgtcaaccccggttttggcggtcaaaaattcatgcctgaagttttagagaaaattaaagaacttaaaaatattcaaaaacaacaaagtttagatttcgatattgaaatagatggtggaattaattttgaaaattcaaaaattgcaattaaagctggtgccaatattctcgtctcaggaactacaatatttaaaagcaataacggggacatcaaaaaaaatatagatttactaaagtctttgtaa

SEQ ID NO: 289827 - DNA, 664 bp, Unknown
  Bacterial polypeptide expressing nucleotide sequence isolated from the Sargasso Sea
tatggttaaaccaatcaaaatatcaccttctattctctctgccgattttagcaaattaggtgaagaagtaattgcgcttgagaaagcaggcgctgactatatccatattgatgtcatggacgggcactttgttccaaatttaactattggtccagaggtaataaaaaaactaagaccactcactaaaaaaatatttgatgtacacttaatgatttctccagtagacaaattcataaaagattttattaatgctggcgctgacattataactttccatcctgaggcaacgccggatgtttccaaaactatcaatttaattaagaatgaaaataagaaagtaggcatatcattgaaacccaaatctaaaatagaattaatcgaaaaatacatcgataaagtcgatcttgttttgataatgagtgttgaacctggttttggaggtcaaaaatttatgccagaggttttagaaaaaacaaaaaaaattaaagaaataatagataaaaaaaatttaaatacagaaatagaaatagacggtggaataaattttgataactgtatactggcaaaaaaagcaggggctaatattcttgtttctggttcaacaatattcaaagaaaaccagggtgacttaaaaaaaaatattggaattttaaaaacaaattag

SEQ ID NO: 289828 - DNA, 673 bp, Unknown
  Bacterial polypeptide expressing nucleotide sequence isolated from the Sargasso Sea
atggcaacaaaagattacataattgcaccttcaatactatccgctgatttttctaggttaggagaagaggttaattcagttatagaagcaggagctgattgggtgcatttcgatgtaatggataatcattttgtgcctaatttaactataggccctatggtgtgtcagtctttaagggaatatggaattactgcccctattgacgttcatttaatggttgagccagtagatgaattaattaaaagctttgtaaaagcaggtgcgacttacatcacttttcacccagaagcatctgaagatgttgataggtcgataagtttaataaaagatggaggatgtaaggctggattggtattaaatcctgatatctctattgatgttttggatggatatctagataaattggatatgattttattaatgtcggttttccctggatttggagggcaagaatttattgattcagttttagaaaaagttaacaaaattagatcgattattgatgataagaatcttaatacaagattagaaatagatggcggcattaagttagataatattaaagaagtagctgatgctggggctgatacttttgtttctgggtcagctatttttaatcagcccgattactttcaaatcatccaagaaatgcgagactctcttgagacttagt

SEQ ID NO: 289829 - DNA, 329 bp, Unknown
  Bacterial polypeptide expressing nucleotide sequence isolated from the Sargasso Sea
aatgcgtaattcgattaaaatttctccatctattttgtcagctgactttagcaaattaggtagtgaggttatttcattagagaaagctggagctgactatatacacattgacgtgatggatggacactttgttccaaatttaacaattggaccagaagttattaaaaaactaagaccacttacaaaaaaaatatttgacgttcatttaatgatctctcctgtagataattttataaaagattttgcagatgctggggctgatatcataacttttcatcctgaagcaactaaagatacctctaaaacaattcagcttataaggaaggaaa

SEQ ID NO: 289830 - DNA, 514 bp, Unknown
  Bacterial polypeptide expressing nucleotide sequence isolated from the Sargasso Sea
tatgaaaaaaatacaaatatcaccttcgattttatctgcagattttagcaagctgggagaagatataaagagattggaggagagtggagctgatatgatacatgttgacgtaatggatgggcactttgttccaaatcttacgattgggccaccagtaattaagagtttaagaaaatatacaaaattaccttttgatgtacatttaatgatagatcctgttcataattacatcaaagattatatcagtgcaggtgctgatataataacttttcatcctgaggctacaaaaaatattgatgaaacaattgatctaataaagtcatttaggaaaaaaattggtatttcattaaatccagatacccaaatagagatggtaattgatcatttggaaaaaattgatttaattttaataatgagtgtatatccaggttttggtgggcaaaaatttataaacgatgtagttaaaaaaattaaggatttagataaaataagagaaaataaaaaattaaatttt

SEQ ID NO: 289831 - DNA, 664 bp, Unknown
  Bacterial polypeptide expressing nucleotide sequence isolated from the Sargasso Sea
atgagtaattcgattaaaatttcaccctctattttatcagctgattttagcaagttaggtagtgaagttgttgctctcgaaaaagccggtgctgattatattcacatagacgttatggatggtcactttgttccaaatttaactattggacctgaggtaattaaaaaactgagacctttaaccaccaaaacttttgatgtccatctaatgatatctccagtagacaatttcattaaagattttgcaaatgctggtgcagatataattacttttcatccagaggcaacaagtaacatttcaaacactatcaatcttattaagaaagaaaataagaaagttgggatatcacttaaaccaaattcaaaaatagatttgatatatgaatatttaaataaaattgatttagttttaataatgagtgttgagcctggatttggcggacagaaatttatgcctgaagttttagaaaaaacaaaaaagatcaaagaaataattgatgaacgaaatctaaatgtagatattgaaatcgatgggggaataaactttgaaaattgttctttagctaaaaatgctggtgcaaacattctcgtttccggctccacagtattcaaagaaaataaaggtgacctaaaaaaaaatatagagaaactaagaaaaaattgat

SEQ ID NO: 289832 - DNA, 676 bp, Unknown
  Bacterial polypeptide expressing nucleotide sequence isolated from the Sargasso Sea
atgaaagactttctgattgccccctcgatcctctccgccgactttgcccgtctgggggacgatgtcgccaaggtactggccgccggtgccgacgtagtccatttcgacgtgatggacaaccattatgtgcccaacctgaccataggccccatggtctgccaggccctgcgtgactacggtatcgaagcccccattgacgtgcacctgatggtcaagccggtggatcgcatcattcccgattttgccaaggcgggtgcttccctcatcactttccacccggaagcgtccgaccacgttgaccgctctctgggcctcatcaaggagatgggttgccaggccggtctggtgctgaacccggctacgccgctcacctgcctggagtacgtgatggacaagctggacgtgatcctgctgatgtcggtcaacccgggctttggtggccagagcttcattccaggcaccctcgacaagctgcgccaggtgcgccgcctgatcgacgagagcggccgcgacattcgcctcgagatcgacggtggggtcaaggtcgacaacattcgcgaaattgcccaggctggcgccgacatgttcgtggccggctcggccatcttcagtcgtccggactacaaggcggtgatcgacgagatgcgggcggagctctctcatgtcaaacgctgaa

SEQ ID NO: 289833 - DNA, 571 bp, Unknown
  Bacterial polypeptide expressing nucleotide sequence isolated from the Sargasso Sea
aatgagtgatcttattaaaatctcaccatcaattttatcggctgattttagtaaattgggaagtgaagttatttctttagaaaaagcaggagcagactacatacacattgatgttatggatggtcattttgtaccaaatttaactataggcccggaagttataagaaaacttagacctctgacaaaaaaaactttcgatgtgcatttaatgatttctccagttgataatttcattaaagattatgcgaatgccggggctgatataatcacttttcaccctgaagctacaaaagacaccttaaagactatagagctaatcaagaaagaaaataaaaaagttggtatctcattaaaaccaaaatctgaaattagcctagttgaaaaatatttaaaagaaatcgatttagttcttatcatgagtgttgaaccaggttttggtggtcaaaaattcatgccagaagtattaaaaaaaacaaaattactcaaagaaataataaataaaaataaattaaatgtagatatagagatagatggtggaattaattttgaaaattgctctttagctaaaaaa

SEQ ID NO: 289834 - DNA, 661 bp, Unknown
  Bacterial polypeptide expressing nucleotide sequence isolated from the Sargasso Sea
aatgaaaaaaatacaaatatcaccatcaattttatcagctgattttagtcaacttggaaatgaaataaaaagattggaagaaggaggagcagatttaattcatgttgatgtaatggatggtcactttgttcctaatttaactataggaccaccggtaattaagtcattgaaaaaaaattgttctttaaaatttgatgttcatcttatgatttctccagttcataaatatattgaaatattttctaatgcaggcgcagatattattacaattcatccagaagcaactgaagatttagctgcatcaatttcaaaaataaaagaattaggaaaaaaagctggtgtttcgttaaatccagagacagaggtagatgttattaagaattacttaagtcaaattgatttggttttaattatgagtgtcaatccaggttttggtggtcaaaaatttatgcctgaagttttagataaaattagagaactaaaaaatattcaaaaaagacaaaatatagactttgatattgaaattgacggtggaattaactttgaaaattcaaaaattgcaattaaagcaggtgcaaatattctagtctcaggaactacaatatttaaaagtaataatggagacataaaaaaaaatatagatttacttaaatcaagttaa

SEQ ID NO: 289835 - DNA, 661 bp, Unknown
  Bacterial polypeptide expressing nucleotide sequence isolated from the Sargasso Sea
atgaaaaaaattcaaatttctccgtctatattatctgctgacttcagtcagcttggcagtgaaattaagaagctagaagaaggtggtgctgacttaattcacgttgatgtaatggatggtcactttgttccaaatttaacaataggacctcccgtaataaaaaacttaagaaaatatactaagcttccatttgatgtacacttaatgatttctccagtacatgattacattgaaaattatgcaaatgctggtgctgatataataactattcatcctgaggctactaaaaacttaaaagaatctataagtttaatcaaaagatttggcaaaaaagttggtgtatctttaaatccaaaaactgaaataaaaactttatttgatgaaatagataatattgatttagttcttgttatgagtgttaaccctggttttggtgggcaaaaatttatgcctgaagtattagataaaattagagaattaaaaaaaataaaagatgaaggccaatatcattttgatattgaagttgatggaggaattaattttagtaattcaaaaatagttttagaagctggagctaatattttagtatctggaactacagtgttcaaggagaacaatggcaacataaaaactaatattgaaaaactaaaatcaatgtaaa

SEQ ID NO: 289836 - DNA, 685 bp, Unknown
  Bacterial polypeptide expressing nucleotide sequence isolated from the Sargasso Sea
atgtttagcccagaacaaaaatacttaattgccccatcaattctttcagctgattttgcaaagcttggtgaagatgttgatagcgttttagccgcaggtgcagatgtagtgcattttgatgtaatggataatcactatgtacctaacttaacgattggacctatggtgtgtaaagcactaagggactacggtatcaccgcgccaattgatgtgcatttaatggttaagcctgtcgatagcatcattccacagtttgcagaggcgggggcttcaataattacttttcacccagaggcgagtgagcatattgatcgcacgattcaattaatcaaagatcatggctgtaaagctggcttagtatttaacccagcgaccagtttaagctatttagatcatgtaattgataagctagatactattttactcatgtctgttaaccccggatttggtgggcaaagctttattcctcatacacttaaaaagttagcgcaggcaaagcaacgaattgttgagtcaggtcgagatattcgactagaagtggacggtggtattaaggtggataatatcgctgcagcagctcaggccggtgcagatatgtttgtagcaggctctgctatttttaatcagccagactacgaagtagttattgatcaaatgcgtaagcaacttgagagtgtaaaataat

SEQ ID NO: 289837 - DNA, 664 bp, Unknown
  Bacterial polypeptide expressing nucleotide sequence isolated from the Sargasso Sea
atgagtggaataattaaaatttctccttcaattttgtctgctgatttcagcaaattaggtgaagaggtaatttctttggaaaaagctggcgcagattacatccatattgatgtcatggacggacattttgttccgaatcttacaataggaccagaggtaataaaaaaacttagaccacttactaaaaaaacttttgatgttcacttgatgatttcacccgttgataattttataaaagattttgcaaatgctggtgcagatattattacttttcatccagaagcaaccacaaatgtttcaaaaacaataaagttaataaaagaagaaaataaaaaagttggtatttctttaaaacctaaaagtaatataaatttagtgaaagattatttaaaccaaatagacttggttttaattatgagcgttgaacctgggtttggtgggcaaaaatttatgccagaggtcttagaaaaaacaaaatcaattagaaaatttataaatgaaaaaaagttaaaagttgatgttgaaatagatggtggaattaattttgaaaattgttctaaagcaaagaatgctggtgcaaatattcttgtatcggggtcaactgtttttaaagaaaatgagggcaacctcaaaaaaaatatagaaattctcagaaacaattaat

SEQ ID NO: 289838 - DNA, 661 bp, Unknown
  Bacterial polypeptide expressing nucleotide sequence isolated from the Sargasso Sea
atgaaaaaaatacaaatatcaccatcaatattatctgcagacttcagtcaattaggtaatgaaattaagaagctggaaaaaggtggagctgacttaattcacgtcgatgttatggatggtcactttgtgccaaatctaacgataggacctccagtaatcaaaaacttaagaaaatacactaaacttccatttgatgtacatttaatgatttccccagtacatgaatacattgaaaattatgcaaatgctggtgctgatataataactattcatcctgaagctactaaaaacttaaaagagtctatgaatttgataaaaaaattaggtaaaaaagttggtgtatctttaaatccaaaaaccgaaattgaaactttaattgatgaaatacacaatatcgatttagttctagttatgagtgttaaccctggttttggtgggcaaaaatttatgcctgaagtattagataaaataaaagaattaaaaaaaataaaagacaaaagtcaatatcattttgatattgaagttgatggaggtattaattttagtaattcaaaaatagttttagaagctggagctgacattttagtatctggaaccacagttttcaaagaaaacaatggaaatattaaaactaacattaaaaaactaaaatcaatgtaaa

SEQ ID NO: 289839 - DNA, 661 bp, Unknown
  Bacterial polypeptide expressing nucleotide sequence isolated from the Sargasso Sea
aatgaaaaatattcaaatttcaccgtcaattttatctgctgattttagtcaattaggtattgaaattaaaagattagaggaaggtggtgcagatatgatccatgttgatgtcatggatggtcattttgttccaaatctaaccattggtcccccagttattaaagcccttcgaaagcactgttctttaaagtttgatgtacacttgatgatttctccagttcataaatacatagaagcatatgcagacgcaggagcagatatcattacaattcacccagaagccactcaaaatttagaagaatcgattaaaacgattaaagatttaaaaaaaaaagtcggagtttcacttaatccagtgtcgaaaattgaattgattactgaatttttagatcaaatagatttggttttaattatgagtgttaatccaggttttggaggtcaaaaatttatgccagaggttctagataaaattaaacagcttaaaaaaattcaacgagaaaaaaatttgaattttgatattgaaatagatggtggaataaattttgaaaattgtaaaattgctattgatgctggagcaaatattcttgtttcaggaacaactgtattcaaaagtaatgacggagatataaaaaagaatattgatttattaaaactaaaataa

SEQ ID NO: 289840 - DNA, 445 bp, Unknown
  Bacterial polypeptide expressing nucleotide sequence isolated from the Sargasso Sea
atgacgagttcaatcaaaatttccccatctatactctctgcagattttagcaaattgggtgaggaaattgtttctttagataaagcaggtgctgactatattcatgtagatgttatggatgggcattttgtacctaatcttactattggtcctgaggttgtaaaaaaactaaggccttttacaaaaaaaacttttgatgtccatctaatgatatctccagttgataactatataaaatcattttcggaggctggttcagatataattacctttcatccagaagccacagataatatagctcacacaatcggtttaattaaaaaatataataaaaaagttggggtatccttaaaacccaaatcacgtataaacttaatcgaaaaatatattaatgaaattgatttgattttaattatgagtgtagaaccaaggtttggagggcaga

SEQ ID NO: 289841 - DNA, 670 bp, Unknown
  Bacterial polypeptide expressing nucleotide sequence isolated from the Sargasso Sea
atgaatcaaataaagatttctccatcgattttgtctgcagattttacacgtctcgctgaccaagttcgtgaagccgaagaggcgggagttgattatatccatgtagatgtcatggacggccatttcgttccaaatattaccatcggtccactggtagtgaaagctttacgtcctattaccaaactgcccctagatgtacacttaatgattgagaatcctgagttctttatagaagatttcagtaaagcaggagctgatattattactgtgcaccaagaagcaacgccccaccttcaccgtacaattcagcagatacacgatttaggtatcaaagctggtgtaagtatcaacccttctacctctgtcaaaactttagatgaaataatttgtgatgtagatcttatattggttatgtctgtcaatccgggattcggaggtcagtcttatattcattcatgtactaacaaaattcgtaaggttcgtgaaatgcttgatgaacgaggtgtttcagcggatttagaggtggatggcggtgtcaacgttgacacagtatgcgaagtaattagtgcgggagcaaatgcatttgttgcaggttcagcaattttcaacgacaaaaacagtgtcgcagaaaatgtttcagctcttcgtgaaaaaataaaaacttcttaaa

SEQ ID NO: 289842 - DNA, 664 bp, Unknown
  Bacterial polypeptide expressing nucleotide sequence isolated from the Sargasso Sea
catgagtgaaataattattgcaccatcaattctctcagcagattttgcaagacttggtgatgaagtaaaagatgtacttgaggctggtgccgactgggtgcattttgatgtcatggataatcactatgtaccaaacctaaccattggacccatggtttgtaagagtctgagagattttgggattgatgcttttatagatgtccatctaatgattgatcctgtagataggcttgcccaagattttattgatgcaggcgcatcacttgtaagctttcatcctgaggcttcaaaacatgtgcatagatcagtatcagcaattaaagatagaggttgcaaagccggattagtacttaatcctgcaactcaagtaaatgtattagaagatgtattagaagatttagatctagtcttaataatgagtgttaatccaggatttggcggacagtcttttattaagtcatcgcttaaaaaggtcgaaaaagtaaggaaaatgattgattcgtctggtaaagacattaaattagaaattgatggtggcattaataaggatactattgcatcagcatatagcgcaggagcagatacatttgtagctggctcagctatttttaacagcaataattatgaagaaacaatctccttatttagaaagctggcttcttag

SEQ ID NO: 289843 - DNA, 664 bp, Unknown
  Bacterial polypeptide expressing nucleotide sequence isolated from the Sargasso Sea
atgggtaattctattaaaatatcaccttctattttatcagcagattttagtaagttaggcgaagaaataataaatttagataaagctggcgcagattatattcatgttgatgtaatggatgggcattttgttccaaatataacaataggacctgaagtaataaaaaaacttagaccgttaacaaaaaaaacttttgacgttcatttgatgatatcacctgtaaataattatattgagcaatttgctttggctggggcagatattattacttttcatccagaagctactaaagataccaatgaaacaatcaaattaataaaaaatcataaaaagaaagttggaatttctcttaaacctaaatcaagtattgatttaataactaagcatttagaaagtattgatcttgttcttatcatgagtgttgagcccggttttggaggacagaaatttatgccagaagttgttgaaaaggttaaagaaattaaaaagatagttttagaaaaaaatttaaagattgatatcgaaatagatggcggaattaattttgagaattgtaaagtggtaaaaaatgctggggctaatgttttggtatcgggttcgacgatttttaaagaaaatagtggaaatattaaaaaaaatattagtttacttcgttctaattaat

SEQ ID NO: 289844 - DNA, 661 bp, Unknown
  Bacterial polypeptide expressing nucleotide sequence isolated from the Sargasso Sea
aatgaaaaatatacaaatctcaccatcaatactatcggctgattttagtcagttaggtacagagataaaaagacttgaagaaggtggggctgatatgattcatgtggatgtgatggatggtcattttgttcctaatttaacaataggacctccggtaattaaagctcttagaaagcattgttcattaaaatttgatgttcatttgatgatatcaccagtgcataaatatatagatgcttacgctgatgcgggagcagatattattactattcatcctgaggcaaccgataatttagaaaattcaattaaaaaaataaaagaaaaaaataaaaatgttggagtttcgcttaatcctgaaactaaaattgatttaataatagatttattagatcaaatagatttagtcctaattatgagtgtaaatcctggatttggagggcaaaaatttatgccagaagttttagataaaattaaagaattaaaaaaaataagagagcaaaaaaagtttgattttgacatagaaattgatggtggaatcaattttgataactgcaaaagtgcaattgatgctggtgcaaacattcttgtttccggtactacagtgttcaaaagtaatgatggagatataaagaaaaatattaatttattaaaattaaaataa

SEQ ID NO: 289845 - DNA, 577 bp, Unknown
  Bacterial polypeptide expressing nucleotide sequence isolated from the Sargasso Sea
aatgagtgaaataattattgcgccatcaatcttgtctgcagattttgcaaggcttggtgaagaggttgaggaagtactaaatgcaggtgctgactgggtgcattttgatgttatggataatcattacgtgccaaacttaaccattggcccaatggtttgcaaaagtttgcgcgactatggtattgattcttttatagatgttcatctgatgattgatcctgtagataggcttgcacaagattttattgatgcaggcgcttcacttgtaagttttcatcctgaggcttcaaaacatgttcataggtcagtatcagcaatcaaagataggggttgcaaagctggattagtgcttaatcctgcaactcaagtaaatgtattagaagatgtattagaagatttagatctagttttaataatgagtgttaatcctggatttggtgggcagtcttttattgagtcatcgcttaaaaaggtcgaaaaagtaaggaaaatgattgattcgtctggtaaagacattaaattagaaattgatggtggcattaataaggatactattgcatcagcatatagcgcagga

SEQ ID NO: 289846 - DNA, 679 bp, Unknown
  Bacterial polypeptide expressing nucleotide sequence isolated from the Sargasso Sea
atgcgcccatttttaattgctccatcgattttatccgccgatttcgcccgtttaggggatgacgttaaagccgtgttagatgcaggggctgacgtagtacattttgatgtgatggataaccactatgtgccaaatttaaccattggccctatggtgtgcaaagcgttacgcgactatggcatcacggccgatatcgatgtgcatttaatggttaagcctgttgaccgtatcgtgcctgattttgccaaggcgggtgcatctattattactttccacccagaggcctctgagcatatcgaccgcactctgcaactgattaaagaatcgggttgtaaagcaggtttagtgtttaacccagcaacaccgctgcactatcttgaccatgtgatggataagttagatgtgattctgctgatgtcagtcaacccaggttttggcggccaatcctttattccttcgactttagataaattacgccaagtgcgtgagcgtatcgatgccagcggtttcgatattcgcttagaagtcgatggtggcgttaaagtggataacattgccgaaatcgccgccgcaggcgccgatatgtttgtcgccggctctgccattttcggtaagccagactataaagtcgtcgtcgacgagatgcgcgccgagttagcgaaagtagaggccaaataat

SEQ ID NO: 289847 - DNA, 670 bp, Unknown
  Bacterial polypeptide expressing nucleotide sequence isolated from the Sargasso Sea
atgagtgaccagaaaaatataattgcaccgtctatcctagcatctgattttgcaagacttggagaagaggtacgtactgtccttgatgcaggagctgattgggttcattttgatgtaatggataatcactatgttccaaatctcactattggaccaatggtttgcaaagctttaagagaatacggcataaaagaatttattgatgttcatttaatgatagatccagtagatgaattggcccaaagctttatagatgctggagcagacttaattagttttcatcccgaagcaaccaaacatatccatagatcaattcacgcaataaaagacaaaggttgtaaagcaggacttgtttacaatcctgcaactccacttcacacgttagaaagtgttcttgaggatctagatttagtattaattatgagcgtaaatcctggttttggcggccaatcgtttattcatagctctcttgaaaaaattgctcaagttagaaaaatgatagatgagtcaggaaaagatgtccgcttggaggtagatggtggaataaacaaagataccattggtctagcatctgaggcaggcgctgatacatttgtagcaggctcagctatattcaatactgaaaattatgagcaaacaatatctgaacttcgttcaaaaattgtttaag

SEQ ID NO: 289848 - DNA, 643 bp, Unknown
  Bacterial polypeptide expressing nucleotide sequence isolated from the Sargasso Sea
tctccatctatattatcagctgattttagtcagctgggtagtgagataaaaaattttgaggagggtggagctgacttgattcatgttgatgtaatggatggccactttgttcctaatctaacaataggacctcctgtaataaaaaatttaagaaaatatactaaacttccgtttgatgtgcatttaatgatatctccagtgcataaatatattgaaaattatgcagaagccggagcagacataatcaccattcaccctgaagctactgagaatttaaaagaatcaataaacttaattaaaaaatttggtaaaaaagttggagtctctttaaatcctaaaactgaaataaaaacactaattgatgaaattaaaaatattgatttaatactagttatgagtgttaacccaggctttggtggtcaaaaatttatgcctgaagtattagataaaataaaagagttaaaaaatattaaagataaaaaccaatatcattttaacattgaagttgatggaggaattaattttagtaatgcaaaaacggttttagaagcaggagctgacattttagtgtcaggaactacaatctttaaagaaaataatggtgatattaaaaataatattgaaaaactaaaatcaatgtaaa

SEQ ID NO: 289849 - DNA, 445 bp, Unknown
  Bacterial polypeptide expressing nucleotide sequence isolated from the Sargasso Sea
aatgaaaaaaattcaaatttctccatctatattatctgctgacttcagtcagcttggcaatgaaatcaagaagttagaagaaggtggagccgacttaattcatgtcgatgtaatggacggtcactttgttccaaatttaacaataggaccaccagtaataaaaaacttaagaaaatataccaagcttccatttgatgtacacctaatgatttctccagtacatgagcacattgaaaattatgcaaatgctggtgctgatataataactattcatcctgaagcaactaaaaacttaaaagagtctataagtttgatacaaaaatttggtaagaaagttggcgtatcattaaatccaaaaactgaaataaaaactttgattgatgaaatagacaatattgatttagttcttgtaatgagtgttaaccctggttttggtgggcaaaaa

SEQ ID NO: 289850 - DNA, 664 bp, Unknown
  Bacterial polypeptide expressing nucleotide sequence isolated from the Sargasso Sea
aatgagtagttcgattaaaatttcaccatctattctatcagctgatttcagtaaattgggtagtgaggttatttctttagaaaaagctggtgcagactatatacacatagatgtgatggatggacattttgttccaaatttgactataggacctgaagttataaaaaaacttcgtcctctaacaaagaaaacatttgatgttcatctaatgatttcaccggtagataattttattaaagactttgctgatgcagggtcagacattattacttttcatcctgaagctactcaagatgtttcgaaaacaatagatttgattaagaatgagaaaaaaaaggttggaatttcactcaaaccaaaatcgaaaatagacctgatcgaaaattatttaagcgagatagacttagtacttattatgagtgttgagccagggtttggtgggcaaaaatttatgcctgaggttttaagtaaaactaaaattttaaaaaaaataattaaagaaaaaaatttaaatgtagatatagaaattgatggtggaattaattttgaaaattgtactctggctaaagaagctggtgcaaacattcttgtttctggttcaactatatttaaagaaaaccaaggtaacctaaaaaaaaatatagaaattttaagaaaaaattag

SEQ ID NO: 289851 - DNA, 454 bp, Unknown
  Bacterial polypeptide expressing nucleotide sequence isolated from the Sargasso Sea
aatgaaaaatatacaaatttcaccgtcaattttatctgctgattttagtcaattaggtactgaaattaaaagattagaggaaggtggagcagacatgattcatgtggatgtcatggatggtcattttgttccaaatttaactatcggtcctccggttattaaagctcttagaaagcactgctctttaaaatttgatgtacacttgatgatttcaccagtgcataaatacataaaagcatatgcagacgcgggagcagatatcattacaattcacccagaagccactcagaacttagaagaatcgattaaaatgattaaagatttaaaaaaaaaagtcggagtttcacttaatccagggtcgaaaattgaattgattactggatatttagataaaatagatttggttttaatcatgagtgttaatccaggttttggaggccaaaaatttatgcca

SEQ ID NO: 289852 - DNA, 658 bp, Unknown
  Bacterial polypeptide expressing nucleotide sequence isolated from the Sargasso Sea
aatggctaaaaaactagctccatcaatactctccgccgattttgctcggttaggagaagaggtctctgaggtagtaaaggccggcgcagacattattcattttgatgtaatggataatcattatgtgcctgtcctaacctttggaccgaagatctgcgccgatctcagagcctatggggtttcggctcccatagacgtgcatttgatggcgaaacccgttgatgacctaatcaaagcttttggggatgctggagcggattatataacttttcatcctgaagcatcggaacatattgataggtctttgagacttatagagcaagttggttgcaaagccggactggttttcaaccccgctacacccctcgactacttagaatacgtcaccgaccagattgatatgattcttattatgtctgttaatcctggttatgggggacagaaatttatctcgacgacctacaaaaaaatcagggaagctaaagagtgtatatctaggttgggtgctgagatcctggtcgaggtcgatggaggaataaatctttctaatatttcagaaatttcgtcagcgggagccgatatatttgtagcaggttcggcgattttcgacagtgagaactatgctgaaactattgctaaattaaaaaaggaaatcgaa

SEQ ID NO: 289853 - DNA, 592 bp, Unknown
  Bacterial polypeptide expressing nucleotide sequence isolated from the Sargasso Sea
atgaaaaaaattcgaatttctccatctatattatctgctgacttcagccagcttggtaatgaaattaagaagctagaacaaggtggtgctgatttaattcatgtagatgtaatggacggacactttgttccaaatttaacaataggaccgccagtaattaaaaacttaagaaaatatactaagcttccatttgatgtacacttaatgatttctccagtacatgattatattgagaattatgcaaatgctggtgctgatataataactattcatcctgaagctactaaaaacttgaatgaatctataaatttaataaaaaaatttggtaaaaaagttggtgtgtctttaaatccaaagactgaaataaaaactttaatagatgaaatagaaaatattgatttagttttagttatgagtgttaaccctggttttggtgggcaaaaatttatgcctgaagtattagataaaataagagaattaaaaaaaataaaagacaaaagcaaatatcactttgatattgaagttgatggaggaattgattttagtaattcaaaaatagtcttggaggctggggctgatattttagtatctg

SEQ ID NO: 289854 - DNA, 661 bp, Unknown
  Bacterial polypeptide expressing nucleotide sequence isolated from the Sargasso Sea
aatgaaaaatatacaaatttcaccatcaattttatcagctgactttggtcaattaggttcagaaattaaaagactcgaagaaggtggagctgatatgattcatgtagatgtgatggacggtcattttgttcctaatttaacaataggaccacctgtaattaaagctcttcgaaaacactgttcattaaaatttgatgttcatttaatgatttcaccagtacataaatacatagatgcttacgctgaagcgggagcagatataattactattcatcctgaagctactgataatttagaaaattcaataaaaaaaataaaagaaaaaaataagaaagttggagtttcactaaatcctgaatctaaaattgatttaatattagatctattagatcaaattgatttagttttaattatgagtgtaaatcctggatttggaggtcaaaaatttatgccagaagttttagataaaattaaagaactaaaaaaaataaaagagcaaaaaaagatggtttttgacatagaaattgacggtggaatcaattttgataattgtaaaagtgcaattgatgctggtgcaaacattcttgtttctggtactacagtatttaaaagtaatgatggagatataaagaaaaatattaatttattaaaattaaaataa

SEQ ID NO: 289855 - DNA, 670 bp, Unknown
  Bacterial polypeptide expressing nucleotide sequence isolated from the Sargasso Sea
catgagtgatcaaaagtacataatagctccttcaattctggcatctgattttgctagattaggagatgaagtgagaaatgtcctagacgcaggtgcagactgggttcattttgatgttatggataatcactatgtacctaatctgacaattggacccatggtatgtaaggctctaagaaaatatggaattaaagaatttatagatgtgcatttaatgattgatccagttgatgagttggcacaaaggtttattgaagcaggtgctgatttaataagttttcatccagaagcgtcgacccatgttcatagatcaatacatgcaattaaagacaagggatgcaaagcagggcttgtatacaatcccgcaaccccattaaatacactagagaatgttttggatgatatagaccttgtgctgataatgagtgttaatccaggttttggtggacaatcttttattcatagctcattagataagattactcaagtaagaaagatgattgatgaatcaggcaaagatatacgtcttgaagttgatggtggaataaataatgatactattggcttggcatcggcagcaggcgctgatacctttgttgctggctcagctatctttaatacagaaaactatgagcaaaccatatctgagcttcgttctaaaatcgtttaa

SEQ ID NO: 289856 - DNA, 664 bp, Unknown
  Bacterial polypeptide expressing nucleotide sequence isolated from the Sargasso Sea
aatgagcagtttaatcaaaatatcaccttcgatactttcagcggattttagtaaattaggcgaagaggttatagcactagagaaagctggagccgattatatacatatagatgtaatggatggccattttgtgccaaacttaactattgggccagatgtaataaaaaaattaagaccacttacaaaaaaaacttttgatgttcacctaatgatatctccagttgataattttataaaagatttttctaaagccggtgcggatatcattacttttcacccagaagctacagagaacatagcaaacacaattaagttaataaaaagtgagggtaaaaaagttggtatatcattgaaaccaaaatctaaagttgatttaattgagaaatatttaaaccaaattgatttggttctaatcatgagtgtagaacctgggtttgctggtcagaaatttatgccagaagttttagataagacaagaaaaatcaaacaattagtcgataaaaataaattaaaagttgaaatagaaatagatggtggaattaattttgaaaattgtactgaagctaaaaaagctggtgcaaatgtgcttgtttctggctcaactatatttaaagaaaatcagggcaatctagaaaaaaatattggaatcttaagatctaattaa

SEQ ID NO: 289857 - DNA, 661 bp, Unknown
  Bacterial polypeptide expressing nucleotide sequence isolated from the Sargasso Sea
aatgaaaaaaatacaaatttcaccttcaatactatctgctgattttagtcaattaggtgttgaaattaaaagacttgaagaaggtggtgctgatatgatccatgttgatgttatggatggtcactttgttccaaatcttacaattggaccaccggttattaaagctctaagaaaacaatgtgatctcaagtttgatgtccatttaatgatttctccagtccataaatatattgagtcttatgctgatgctggagctgatattataaccattcatccagaagcaactgataatctagaagcttcaattttaaaaattagagagttaaataaaaaagttggtgtttccttgaaccctgagtctaaaattgatttaattaaaggctttcttgataaaattgatttaattttaataatgagtgtcaatcctggatttggtggtcaaaaatttatgcctgaagttttagaaaaaattaaagaacttaaaaaaattcaaaatgacaataatcttgattttgatattgagattgatggtggaattaattttgacaattgtaaagatgcaattgaagcgggtgcaaacattcttgtttcaggaacaacaatatttaaaagtaataatggagatataaaaaaaaatattaatttattaaaattaaaataa

SEQ ID NO: 289858 - DNA, 664 bp, Unknown
  Bacterial polypeptide expressing nucleotide sequence isolated from the Sargasso Sea
aatgagtgaaataattattgcgccatcaatcttgtctgcagattttgcaaggcttggtgaagaggttgaggaagtactaaatgcaggtgctgactgggtgcattttgatgttatggataatcattacgtgccaaacttaaccattggcccaatggtttgcaaaagtttgcgcgactatggtattgattcttttatagatgttcatctgatgattgatcctgtagataggcttgcacaagattttattgatgcaggcgcttcacttgtaagttttcatcctgaggcttcaaaacatgttcataggtcagtatcagcaatcaaagataggggttgcaaagctggattagtgcttaatcctgcaactcaagtaaatgtattagaagatgtattagaagatttagatctagtcttaataatgagtgttaatcctggatttggtgggcagtcttttattgagtcatcgcttaaaaaggtcgaaaaagtaaggaaaatgattgattcgtctggtaaagacattaaattagaaattgatggcggcattaataaggatactattgcatcagcatatagcgcaggagcagatacatttgtagctggctcagctatttttaacagcaataattatgaagaaacaatctccttatttagaaagctggcttcttag

SEQ ID NO: 289859 - DNA, 535 bp, Unknown
  Bacterial polypeptide expressing nucleotide sequence isolated from the Sargasso Sea
atgagtgaaataattattgcgccatcaatcttgtctgcagattttgcaaggcttggtgaagaggttgaagaagtactaaatgcaggtgctgactgggtgcattttgatgttatggataatcattacgtgccaaacttaaccattggcccaatggtttgcaaaagtttgcgcgactatggtattgattcttttatagatgtccatctgatgattgatcctgtagataggcttgcacaagattttattgatgcaggcgcttcacttgtaagctttcatcctgaggcttcaaaacatgtccataggtcagtatcagcaatcaaagatagaggttgcaaagccggattagttcttaatcctgcaactcaagtaaatgtattagaagatgtattagaggatttagacctagtcttaatcatgagtgttaatcctggatttggtggacagtcttttattgagtcatcgcttaaaaaggtcgaaaaagtaaggaaaatgattgattcatctggtaaagacattaaattagaaattgatggcg

SEQ ID NO: 289860 - DNA, 661 bp, Unknown
  Bacterial polypeptide expressing nucleotide sequence isolated from the Sargasso Sea
aatgaaaaatatacaaatttcaccgtcaattttatctgctgattttagtcaattaggtactgaaattaaaagattagaggaaggtggagcagacatgattcatgtggatgtcatggatggtcattttgttccaaatttaactatcggtcctccggttattaaagctcttagaaagcactgctctttaaaatttgatgtacacttgatgatttcaccagtgcataaatacataaaagcatatgcagacgcgggagcagatatcattacaattcacccagaagccactcaaaacttagaagagtcgattaaaatgattaaagatttaaaaaaaaaagtcggagtttcacttaatccagggtcgaaaattgaattgattactgaatatttagataaaatagatttggttttaatcatgagtgttaatccaggttttggaggccaaaaatttatgccagaagtcctagataaaattaaacaacttaaaaaaattcaacaagaaaaaaattttacttttgatattgaaatagatggtggaataaattttgaaaattctaaaattgccattgaggctggagcaaatattcttgtttcaggaacaactgtattcaaaagtaatgatggagatataaaaaagaatattgatttattaaaactaaaataa

SEQ ID NO: 289861 - DNA, 666 bp, Unknown
  Bacterial polypeptide expressing nucleotide sequence isolated from the Sargasso Sea
cgaattggattgctccgtcaattttatccgcagattttgcccgtctgggcgaagatgttagtcgcgttttaacagctggggcggacgttgtgcattttgatgtgatggataatcactatgtgccgaacttaacttttggcccaatgatttgcagcgctttgcgaaactatggcatcaccgcacctgtagatgtgcatctgatggttgagaatgtcgatagtctggtgcccgcttttgcggcagcaggcgcttctattattagttttcatccggaggcgtcgaagcatgttgaccgcactttgcaattgatccgccagcagggctgtaaagcaggtttggtgtttaatccggcgacaccgctcacatacttagactatgtgctggataaagtggacttagtgctgttgatgtcggtcaaccctgggtttggcggtcagtcttttattcccgcgaccttaaaaaaactgcaacaagcccgtcagatcatcgatcagagtggtttacccatccggctggaaattgatggtggtgtgaaggtagaaaatattcgcgagatagcggaagcaggcgctgatacttttgtggcaggttctgctattttcagccagagcgattatcaacaggtaattaatcagatgagagctgaactggctggagtgaactagt

SEQ ID NO: 289862 - DNA, 661 bp, Unknown
  Bacterial polypeptide expressing nucleotide sequence isolated from the Sargasso Sea
atgaaaaatatacaaatttcaccatcaattttatcagctgattttagtcagttaggtaaagaaataaaaagacttgaggaaggcggtgctgatatgattcatgtcgatgtaatggatggtcattttgttcctaatttaacaataggaccacctgtaattaaagctcttcgaaaacattgttcattaaaatttgatgttcatttgatgatatcaccggtacataaatatatagatacttacgctgatgcgggagcagatataattactattcatcccgaagcaactgataatttagaaaattcaattaaaaagataaaagaaaaaaataagaaagttggagtttcacttaatcctgaatctaaaattgatttaatattaaatctattagatcaaattgatttagttttaattatgagtgtaaatcctggatttggaggtcaaaaatttatgccagaagttttggataaaatcaaagagctgaaaaaaataaaagaacaaaaaaagatggcttttgatatagaaattgatggtgggatcaattttgataattgcaaaagtgcaatagatgctggtgctaacattcttgtttctggtactacaatattcaaaagtaatgatggagatataaagaaaaatattaatttattaaaattaaaataag

SEQ ID NO: 289863 - DNA, 634 bp, Unknown
  Bacterial polypeptide expressing nucleotide sequence isolated from the Sargasso Sea
atgaaaaatatacaaatttcaccatcaattttatcagctgacttcagtcgattaggtgatgaaattaaaagactcgaagaaggtggagctgatatgattcatgtggatgtaatggatggtcattttgttcccaatttaacaatagggccacctgtaattaaagctcttcgaaaacattgttcattaaaatttgatgttcatttgatgatatcaccagtgcataattatatagatgcttacgctgatgcaggagcagatataattactatccatcccgaagcaactgatgatttagaaaattcaattaaaaagataaaagaaaaaaataagaaagttggagtttcacttaatcctgaatctaaaattgatttaatattagatctattagatcaaattgatttagttttaattatgagtgtaaatcctggatttggaggtcaaaaatttatgccagaagttttagataaaattaaagaactaaaaaaaataaaagagcagaaaaagatgacttttgacatagaaattgatggtggtatcaattttgataactgcaaaagtgcaattgatgccggtgctaacattcttgtttctggtactactgtattcaaaagtaatgatggagatataaagaaaa

SEQ ID NO: 289864 - DNA, 661 bp, Unknown
  Bacterial polypeptide expressing nucleotide sequence isolated from the Sargasso Sea
atgaaaaatatacaaatttcaccatcaattttatcagctgactttagtcaattaggttcagaaattaaaagacttgaagaaggtggagctgatatgattcatgtggatgtgatggacggtcattttgttcctaatttaacaataggaccacctgtaattaaagctcttcggaaacattgttcattaaaatttgatgttcatttaatgatatcaccagtgcataaatatatagatgcttacgccgatgcaggagctgatattattactattcatcctgaagctactgaaaatttagaaaattcaataaaaaaaataaaagaaaaaaataaaaaagttggagtttcactaaatcctgagtctaaaattgatttaatattaggtctattagatcaaattaatttagttttaattatgagtgtaaatcctggatttggaggtcaaaagtttatgccagaggttttggataaaatcaaagatctaaaaaaaataaaagaacaaaaaaagttagattttgacatagaaattgatggcggaattaattttgataattacaaaagtgcaattgatgccggtgctaacatccttgtttctggtactacggtattcaaaagtaatgatggagatataaagaaaaatattaatttattaaaattaaaataag

SEQ ID NO: 289865 - DNA, 670 bp, Unknown
  Bacterial polypeptide expressing nucleotide sequence isolated from the Sargasso Sea
atgagtgataaaaaatacataattgcgccctctatattggcatcagattttgcaaaattaggtgaagaggttagagatgttctagatgctggagcagattggatacatttcgatgtaatggataatcattatgttcctaatctaaccattggaccaatggtctgcaaagctctaagaaattatggcataaaagaatttattgatgttcatttaatgattgatcctgtagatgaattagcgcaaagttttattgaagcaggagctgatttaataagttttcatcctgaagcctcaaaacatatacatagatcaatacatgccattaaagataaaggttgtaaagctgggcttgtttataaccccgcaacgccacttcatactcttgaaagtgttttagaagatctagacttagttttaataatgagcgtaaatccaggctttggtggacaatcttttattcatggctcaattgagaaaatagctcaggttagaaaaatgattgatgccttaggaaaagatattcgtctagaagttgatggtggtataaataaagataccattgctctagcatcagaggctggtgctgatactttcgttgcaggctcagcaatattcaatacagaaaattatgagcaaacaatatctgaacttcgttccaaaatcgtttaag

SEQ ID NO: 289866 - DNA, 679 bp, Unknown
  Bacterial polypeptide expressing nucleotide sequence isolated from the Sargasso Sea
atgcgcccatttttaattgctccatcgattttatccgccgatttcgcccgtttaggggatgacgttaaagccgtgttagatgcaggggctgacgtagtgcattttgatgtgatggataaccactatgtgccgaacttaaccattggtcctatggtgtgtaaagcgttacgcgactatggcattacggcggagatcgacgtgcatttaatggttaagcctgttgatcgcatcgtgcctgattttgctaaggctggcgcttctattattactttccatcccgaagcctctgagcatatcgaccgtactttgcaactgattaaagagtccggttgtaaggcaggtttagtgtttaaccctgcaacaccgctgcattatcttgaccatgtgatggataagttagatgtgatcctgctgatgtcggtcaacccaggctttggtggccaatcctttattccttcgaccttagataaattacgccaagtgcgtgagcgtatcgatgcgagcggttttgatattcgcttagaggtcgatggtggcgtaaaagtggataacattgccgaaattgctgccgcaggtgccgatatgtttgtcgctgggtcggctatttttagtcaaccagactataaagccgttgtcgatgaaatgcgtgccgagttagcaaaagttgaggccaaatgat

SEQ ID NO: 289867 - DNA, 661 bp, Unknown
  Bacterial polypeptide expressing nucleotide sequence isolated from the Sargasso Sea
atgaaaaatattcaaatttcaccatctattttatcagctgactttagtcaattagcttcagaaattaagagacttgaggaaggtggtgctgatatgattcatgttgatgtaatggatggtcattttgttccaaatctaacaattggccctccggtaataaaagcattaagaaatcattgctctttaaaatttgacgttcacttaatgatttcgcccgttcataaatatatagaagcgtatgcaagtgctggtgcagacattattactattcatccagaagcaacagaaaacttagaaaattcaattaaaaaaattaaagagcttaataaaaaagtaggagtttcactaaaccctgagtcaaaaattagcttaattaccaatttattagatcaaattgatttagttttaattatgagtgttaatccaggatttggtggtcaaaaatttatgcctcaagttttggaaaaaataaaagatcttaaaaaaattcaacaagaaaaaaatttaaattttgatattgaaatagatggtggaataaattttgataattgcaaaagtgcaattgatgcaggtgcaaatattcttgtttcaggtactactatatttaaaagtaataacggagatataaaaaaaaatattaatttattaaaattaaaataag

SEQ ID NO: 289868 - DNA, 661 bp, Unknown
  Bacterial polypeptide expressing nucleotide sequence isolated from the Sargasso Sea
atgaaaaatatacaaatatcaccctcaatcttatcagctgattttagccaattaggtactgaaataaaaagacttgaagaaggtggggctgacatgattcatgtagatgttatggatggacactttgttccaaacttaacaatcggtcctccagtaattaaagccctcagaaaacattgttcattaaaattcgatgttcatttaatgatttctcctgtgcataaatacatagaagcttatgcggatgcgggtgcagatataattactgtgcatccagaagcaactgataatttagaagactcaataaataaaataaaagatctaaagaaaaaggtaggagtttctctcaatcctgaaacaagtatagacttaataaaaaatcttttagataaaattgatttagttttaataatgagtgtaaatcctgggtttggcggacaaaaattcatgccagaagttttagaaaaaattaaagaattaaaaaaaattagagaaatagaaaaacttaactttgatattgaaatagacggtgggataaattttgataattgtaaaatagcaattgaagctggtgctaatattcttgtatctggtacaacggtttttaaaagcaatgatggagatattaaaaagaatattaatttattaaaaacaaaataag

SEQ ID NO: 289869 - DNA, 622 bp, Unknown
  Bacterial polypeptide expressing nucleotide sequence isolated from the Sargasso Sea
gatgcgtcaaccaaactggattgctccgtcaattttatccgcagattttgctcgcctgggtgaagacgtcgttcgtgtgttaaaagccggagccgatgttgtgcattttgatgtgatggacaaccactatgtgccaaatttaacttttggtccgatgatttgcagtgcgttgcgcaactatggtgtaacagctcctgtcgatgtgcatttgatggtggaaaacgttgatactctggtacctgcttttgctgaagctggtgcttcgatcattagttttcatcctgaagcgtcgaaacacatcgatcgtactttgcagcttattcgtcaacacggctgtaaggcgggtctggtgtttaatccggccactccattaagttacttagactatgtactggataaagtggacttagtgctgttgatgtcggtcaacccggggtttggcggtcagtcttttattcccgctaccttaaagaagctgcaacaggcccgacagatcatcgaccaaagtgggttacccatccggctggaaatagatggcggtgtgaaggtagaaaatatccgcgagatagcagaagcaggcgctgatacttttgtggctggttctgctatttcagccagagcg

SEQ ID NO: 289870 - DNA, 670 bp, Unknown
  Bacterial polypeptide expressing nucleotide sequence isolated from the Sargasso Sea
atgagtgaccagaaaaatataattgcaccgtctatcctagcatctgattttgcaagacttggagaagaggtacgtaatgtccttgatgcaggagctgattgggttcattttgatgtaatggataatcactatgttccaaatctcactatcggaccaatggtttgcaaagctttaagagaatacggcataaaagaatttattgatgttcatttaatgattgatccagtagatgaattagctcaaagctttatagatgctggagcagacttaattagttttcatcccgaagcaaccaagcatatccatagatcaattcacgcgataaaagacaaaggttgtaaagcaggacttgtttacaatcctgcaactccacttcacacgttagaaagtgttcttgaggatctagatttagtattaattatgagtgtaaatcctggttttggaggccaatcgtttattcatagctcgcttgaaaaaattgctcaagttagaaaaatgatagatgagtctggaaaagatgtccgcttggaggtagatggtggaataaataaggataccattggtctagcatctgaggcaggcgctgatacatttgtagcaggctcagctatattcaatactgaaaattatgagcaaacaatatctgaacttcgttcaaaaattgtttaag

SEQ ID NO: 289871 - DNA, 664 bp, Unknown
  Bacterial polypeptide expressing nucleotide sequence isolated from the Sargasso Sea
atgagtgccctaatcaaaatatcaccttccatactttcagcagattttagtaaattaggtgaagaagtaattgctcttgaaaaagcaggtgctgattatattcatattgatgttatggatggacattttgttccaaacctaacaattggtcctgaagtaattaaaaaactcagaccattaacaaaaaaaatttttgacgttcatttaatgatatctccagtagataattttattaaagatttctcaaaagctggtgcagatataataacttttcacccggaagctaccccgaacatattaaatacgattaatttaattaagaaagaaggaaaaaaagttgggatatccttaaagcctaaatcaaaaatagaattaattgaaaaatatatagaacaggttgatctggttcttattatgagcgtcgaaccaggtttcggaggtcaaaaatttatgccagaagtcttagataaaacaaaaaagatcaaagaattggtcgataaaaaaaacttgaaaaccgaaatagaaatagacggggggattaattttgaaaattgcacccaagcaaaaaaggcaggcgcaaacgtactcgtttctggctcaactatctttaaagaaaatcaaggcgaccttaaaaagaatataggaattcttagaacaaattagt

SEQ ID NO: 289872 - DNA, 676 bp, Unknown
  Bacterial polypeptide expressing nucleotide sequence isolated from the Sargasso Sea
atgacgactaaagactacataattgctccttctatcttgtcagcagattttgctcgcctgggcgaagaatctgagagcgtcttaacttctggtgcagactggattcattttgatgtcatggacaatcattatgtgcccaatctaactatagggccaatggtatgtaaagcattgcgggattatggtatcaaagcacctatagacactcatttgatggtcaaaccagtggatagtttaatagagagttttgcaaaagcaggatcaacttatattacttttcaccctgaagctactgaccatatagatagatcaatagaacttatcaaaagtcatgattgtaaagctggcttagttctaaaccctgcaactccggtgagtttaattgaggagtcaatcgataaattagatatgattctactaatgtccgttaaccccggttttggaggtcaaaagtttattgattctgtgcttacgaaagtcacaaaagtaagagatacgattgataggaaaaatctagatataagacttgaggtcgatggtggaattaacttagaaaatatagctaccgtagctgaagcaggtgctgatacttttgttgccggatccgctatttttaatgaagaagactattctaagataattaaacaaatgagatcctcgttagaagctctctaag

SEQ ID NO: 289873 - DNA, 688 bp, Unknown
  Bacterial polypeptide expressing nucleotide sequence isolated from the Sargasso Sea
atgacccaattccgcatcgctcccagcatcctgtcggccgatttcgcacggctcggcgaagaagtccgcaacgtggtcgccgccggcgccgactggatccacttcgacgtgatggacaaccattacgtgccgaacctgaccatcggcccgctcgtgtgcgaagcgatccgcccgcacgtgcaagttccgatcgacgtgcacctgatggtgcgcccggtcgaccggatcgtgcccgattttgcgaaggccggtgcaaacctgatcagcttccacccggaaggctccgatcacatcgaccgcacgctgtcgctgatccgcgaccacggctgcaaggccggcctcgtgttcaacccggccacgccgctgaactacctcgatcacgtgatggatcgcctcgacttcgtgctgctgatgtcggtcaacccgggcttcggcggccagtcgttcattccggaaacgctcaacaagctgcgcgaagcacgcgcacgcatcgacgcgtacaccgagcgcaccggccgcgagatcctgctcgaagtcgacggcggcgtgaagaccgacaacatcgcggaaatcgccgcagccggtgccgacaccttcgtcgcgggttcggcgatcttcggcaagccggactaccgcaaggtgatcgacgagatgcgcgccgcactcgcgaccgtcgagcggagctgac

SEQ ID NO: 289874 - DNA, 661 bp, Unknown
  Bacterial polypeptide expressing nucleotide sequence isolated from the Sargasso Sea
ttacataattgccccttctatactctcagctgatttttctcggttaggagatgaagtgcattctgttcttgaagcaggtgcagattgggtgcattttgatgtgatggataatcactatgttcccaatttaacaataggtccaatggtgtgtcaggctttaagagattatggtattacagctcctatcgatgtccacttgatggtggagccagtagatgaattaattaaaagtttttctagagcaggtgcaacttacataacctttcatccagaagcttcaacggatattgatcaatcaataaatcttataaaagatggtggttgcaaagctgggttagttttaaatccagatatccctattgatgttttagaaggttatttagaaaaattggatatgattctacttatgtcagtttttcctggttttggaggacaaaaatttattgattcagtgttagaaaaggtcgtcgaactaaggtcgattattaatgataagaatcttgaaacaagattagaaatagatggagggattaagctggataatataagagaagtagctgatgctggagctgatacttttgtttctggctctgccatttttggacagcctgattactctgaaataattcaaaagatgcgagcctctcttaaggcaaagtga

SEQ ID NO: 289875 - DNA, 403 bp, Unknown
  Bacterial polypeptide expressing nucleotide sequence isolated from the Sargasso Sea
atgaagaaaaaaaaaatattagtagtttttggaactcgcccagaagctattaagctagcaccattaatattacttataaagagacaaaaaaatgtttctttaaaagtttgtattactgcacagcatagagaaatgcttgatcaagttcttaaatttttttcaataaaacctgattacgatctaaatataatgtctaaaaatcaaagtataaatagagttgtatcaagaatttctaataaattagataatattttatctaaatttatgccagatttagtacttgttcatggtgatacaacaacaacctttgcagcatcattttcttcttttaacttaggaattgacattggacatattgaagctggtttacgtactggtaatattttatcccccttggcctgaa

SEQ ID NO: 289876 - DNA, 826 bp, Unknown
  Bacterial polypeptide expressing nucleotide sequence isolated from the Sargasso Sea
aatgacaccaaatcaatcacttaatcagctatcaggaaagattcttgattctttaaaaagtgttttagataaagaaaaaccagattatgtatttgttcatggtgatacaacaacaactgcatttgcatcaatcgcttctttttataatcagattaaaatctgccatattgaagctggcttaagaacatttaataaatattctccttttcctgaagaaattaatagatctattacaggaagattagcagatatacactttgctccaacagaaaaagcagctaataatttgctgttggaaaatattgataagaattcaattgttgtaactggcaatactgtaattgatgcattattagacggtattgaaataataaaaaattataaagatgaagaaatagataaactgaaaaaaattgtagataatacaaaaaagacaatattaattactggccacagaagagaaaattttggtaaaggatttgaaaatatctgtaatgcaattcttgaattatctaagaatgataatatcaatttaatatatcctgttcatctaaatcctaacgtcaaagatattgtatataaaacactttctaataaagaaaatatccatttaattaatccattaagctatccagcatttatatggttaatgaataaatcacatataatcctcacagatagtggtggcgttcaagaagaagctccatctttgggaattccagtattagtgatgagagataatacggagagacctgagggtgttgctgccaagacagctattttagttggaacaaaaaaagaaaagattatatcaaatgtgaacaat

SEQ ID NO: 289877 - DNA, 169 bp, Unknown
  Bacterial polypeptide expressing nucleotide sequence isolated from the Sargasso Sea
ttggcagtaaaagtatttgttgtatttggtacaagaccagaggctattaaaatggcaaccttatgccatgctctaatagaaaatccaaaatattttgatgtaacaatttgcgtaacagcgcaacatcgagaaatgcttgaccaagttttaaatatttttgcattaactc

SEQ ID NO: 289878 - DNA, 499 bp, Unknown
  Bacterial polypeptide expressing nucleotide sequence isolated from the Sargasso Sea
ggccaccgccgggaaagctttggccgcgggtttgagcaaatttgccacgcgctggcagaaatcgctgccagcaatcccgatgttcagattgtgtatccggtgcacctgaacccgaacgtcagcgagccggtgaaccgtattctcggtcatatcgataacgtgatgttaattgaaccgcaggattatctgccgtttgtctggttgatggatcgcgcatggctgatcctcaccgactccggcggtattcaggaggaggcgccatcgttagggaagccggtactggtgatgcgtgaaatgacggaacgcccggaggcgattgccgcaggtaccgtgcgtctggtcgggaccgatagccagcgtatcgtcgctgaagtcacgcatctgctgcaggatgatgccgcgtatcaggcaatgagccgggcgcataatccctatggcgatggtcaggcatgtcgccgtattttgtccgcacttaaaaataatcaggtaacgctatgag

SEQ ID NO: 289879 - DNA, 880 bp, Unknown
  Bacterial polypeptide expressing nucleotide sequence isolated from the Sargasso Sea
ttataatccagatattgttttagtgcacggagatactaccacatccttatcaacctcaatagcttgcttctatgcagggataaaagttggacatgttgaagcaggacttcgaacaaataatatctattctccctttccagaagaatttaataggcagattacaagtaaaattacaaaatggcactttgtgcctacagaaactagccgttctaatttaattgccgaaaatgtccaatatgatgatattacaattacaggtaatacagtaattgattctttatactggattttaaaccgtattaaaaaaaatgctgatgtttttactagagtaaaaaactctttagatcaaatactccctttcgattgggaatcaaataaatttattcttataactggacatagaagagaaaattttggcaagggctttcttaatatttgtgaagcattgaaagaacttgcaatgaagttcaaccaaataaaatttgtctatcctgttcacttaaacccaaacattcaaataccagtttataatctacttgcaaatattcctaatatatatttgattaaaccactaaattatgaaccttttgtttatcttcttaaatatagttattttgtcttgactgacagtggtggtattcaagaagaagcgcctagccttgggaaacctgttttagttatgagagatgttacagaacgacctgaagctgtcgcagctggaacagtcgaattagtcggcacaagtaaaaattgtataataaataaagtttcagaattgcttcaaaatcaagctctttattcaaaaatgtcaaaggcatataatccttatggtgatggtaaagcttgtgatcgaattttgaaagtactaaaaaatgtttag

SEQ ID NO: 289880 - DNA, 613 bp, Unknown
  Bacterial polypeptide expressing nucleotide sequence isolated from the Sargasso Sea
ggttatagacgcactttttctagtattagaaaaaatagaaaaaaattcaagtctcaagaatagaattttaggaaccatctcaaatcaatatgagttggatgatgataggaaaattattcttgtcacaggacacagaagagaaaattttggtcatggctttagaaatatatgcaatgcattaaaaacaattgctgaaaataatcctgatttcgatattgtttacccagttcattttaatccaaatgtgcaaaaacctgtaaaagaaattctatcgaattgtaagaatatacatttaatagatcctttatcttatgaatgttttatttatttaatgaacagagcattctttataattacagattctggtggcatccaagaagaggcaccaagccttggcaaaccggttttggtaatgagagaatcttcagaacgacctgaggcaatacaagctggaacagttaagcttgttggaacagattacttacaaataattgaagaatcacaaaagcttattgatgataaaaatgaatataacaagatgtctaaagcatataatccatatggagacggtaaggcatcttcaaaagtgcttaattttatcaaaagtatttaa

SEQ ID NO: 289881 - DNA, 580 bp, Unknown
  Bacterial polypeptide expressing nucleotide sequence isolated from the Sargasso Sea
aaatttttggagagaattatcttttctaacttcaaaaagggacaattccccacgtattatattagtcacaggacatcgtcgagaaaattttggctataattttgagcaaatttgccatgccctgtatgaaattgctcagcagcataaagatattcagataatatatccagttcacctaaacccaaatgtcagagacccagtaaaaaaaatcctgtctaattcgaaaaacattaatctaattgaacctcttgattacctgtcatttataaagttaatggattctgcctacctgattttgactgatagtggggggattcaagaagaggctcccagtcttggtaagcccgttctcgtaatgagggaaacaacagagagacccgaagcagtattagctggtacagtaatgatagttgggacggataaaaaaaatattgtaaataaagtgaataaactcatttctgaaaaaaatttttatcaaggaatgtctaaagctctcaatccttatggtgatggtaaagctagtaaaagaatttacaaaattataaaagattttgatcttgatggttttgataaaaaatag

SEQ ID NO: 289882 - DNA, 727 bp, Unknown
  Bacterial polypeptide expressing nucleotide sequence isolated from the Sargasso Sea
cctgaggaaataaatcgtcaaataacaagtagaatttgtgattatcatttcgctcctactgaaacttctaaaaagaacttacttaaagaaaatatttttgatagttcaatattggttactggaaatactgtaattgatgctttgattaaatctgttgaaaaagtttataaaaatcccagtcaattaattaaagatctctcaaaaaaaataggaaatcaagaattggttttagtaactggacaccgaagagagaatcatggtggaggatttgaaaaaatttgtaaagctttaaaacgaattgctgaagatgatacaaatcgtttaattatttatcctgttcatttgaatccaatggtacaggaacctgtaaagagaattttgttgggagttaataatataattttaatagatcctttagcgtatcaagattttatttggttgatggatcgatctaaaattattatcactgatagtggcggcgttcaagaagaagcaccaagtcttggaaaacctgtattagtgatgagagatactactgaaagacctgaagcagtagaagcaggaacagttttgttagtaggtactaatgaagatttgatagtttctaaagcattggacttattaaacaatcaggacaactttgttaaaatgtcaaagctgcataatccctatggagatggattagcttctaaaagaattgtagactttattaaaaatataaaataat

SEQ ID NO: 289883 - DNA, 534 bp, Unknown
  Bacterial polypeptide expressing nucleotide sequence isolated from the Sargasso Sea
tgattctcgttactggacaccgccgcgagaatttcggacaaggcttcgaaaacatatgtcagactctacttaagatcagtcgtcgtgatgatgttgaggtcgtttatccggtgcaccttaatcccaatgtacaggagccggttaaccggattttaggtgctcagtcaaacgttcatctcatcgaacctctcgattatataccctttgtatatttgatgaagcgagcttatttaattttgaccgattctggggggattcaggaggaagcaccgacgcttggagtgcccgttcttgttctaagggaaactacggagcggcccgaggctgttgaagcgggaacggtcaaactggttggcattaatccaaatgagatttatcagtcggtctgttctttactcgacagctcggagctttaccaaaatatgagccgtgcgcataacccctatggtgatggtctttcaagccagagggtctgtgactttattcagaaggatccggctttttcgtcgcttaaatcagaggtagtaaattaaa

SEQ ID NO: 289884 - DNA, 751 bp, Unknown
  Bacterial polypeptide expressing nucleotide sequence isolated from the Sargasso Sea
gatgagaattttatttatttttgggaccagacccgaagcgattaagctatcgcccttgatattaagattaaagaaaaattcaagatttaaggttggtgtttgtattacagcacagcatagagaaatgttagattcggttcttagtttttttgagattcaaccagatttcgatcttgatattatgaaaactaatcaagacttaacaacagtatcttcaagggttataaaaaagctggataaagtctataaagattttaaacctgatttaaatattgttcatggagatacaataactacatctatggcaagcatttcatcatttcttaataaaattaaaattgcacatgtagaggcaggtcttcgaacagataatctgctttctccatggcctgaagaagcaaatagacgtataacttcagttctagcagattttaatttttgcccaactagtgaatctaaacagaatcttttaaaagaaaatattagtgatgataaaatttttattactggcaacacggttattgattctttattccaaacagtagataaatttaattctgacaataatattgatcaaaattatatgcagtattttagttttcttgatttctctaagaaaattattttagttacagggcatagaagagaaaattttggtgagggatttagcaatatttgtgaagcgattaaaaaacttgcaattgataagccagaaattcaaattgtttacccagtacatctaaatcctaat

SEQ ID NO: 289885 - DNA, 1096 bp, Unknown
  Bacterial polypeptide expressing nucleotide sequence isolated from the Sargasso Sea
atgtctattaaaaaaatactatttgttttcggcactcgacctgaggctataaaagttgctcctttaattaaagaattcaaaaataataaaaactttaatgtatgtgtagtttcaactggtcaacataaagaaatgctaaatcaagtaattgatttttttaatattcaagttgattatgaattaaatctaatgaccccaaatcaatcacttaatcaactatcaggaaagattcttgattctttaaaaggtattctagataaagaaaaaccagattatgtatttgtgcatggcgatacaacgacaactgcatttgcatcaatcgcttctttttataatcagattaaaatttgtcatatagaagctggattaagaacttttaataaatattcgcctttccctgaagaaattaatagatctataactggaagattggcagatatacactttgccccaacagaaaaagctgcgaataatcttctattagaaaatattgataaaaattcaattattgtaactggtaatactgtaatagacgcattgttagatggtgttgaaataataaaaaattataaagatgaagaaatagataaactgaaaaaaattatagataataaaaaaaagacaatattaattactggtcatagaagagaaaattttggtaaaggatttgaaaatatttgtagtgcaattcttgaattatctaataatgatagtgtaaatttaatatatcctgttcatctaaatcctaacgtcaaagatattgtttataaaatgctttctaataaaaaaaatatccatttaatcaatccgttaagttacccagcatttatatggttaatgagtaaatcgcatataatattgacagatagtgggggcatacaagaggaagcaccatctttaggagtgccagtattagtgatgagagataatacggagagaccagaaggtgttgctgccaaaacagcaatattggtaggaaccaaaaaagaaaaaattgtctcaaatgttaacaatcttttaaataatgaattagaatatgaaaaaataagtatgaaaaaaaatccatatggaaatgggaatgcgtcaaaaactatta

SEQ ID NO: 289886 - DNA, 1060 bp, Unknown
  Bacterial polypeptide expressing nucleotide sequence isolated from the Sargasso Sea
atgatctttggtactcgaccagaagctatcaaaatgtgtaatttatttctgtatcttaaaaaagataattcattcaattccaaactttgtgtaagcggacaacataggtcaatgttagatcaagtgcttaattcatttgatttagagcccgatattgatctaaatattatgaaatcaaatcaagatctttttgatgtaacatccaatacccttactgccttaaaagaagttataaaaaaagagaaaccaaacttgataatcgtacatggagatacaactacagcattatctgcagcaatggcggcattctataataacgttccagtagctcatgttgaagctggcttaagaacctataatattaatagaccttatccagaagagtttaatagacagattattggtaagattgcttcaatacattttgctcccaccgaatcagcgaaattgaatcttattaatgagaaggttaataaagaaaatattcatgttactggaaatactgtaattgatgcattgttttatatgcttgatcatattgagagctctgattcagaacttaacgaaataaataatttattaactactaatcttggatttgactggatagaaaaagaatttatattaattacaggtcacaggagagaaaattttggagagggatttttaaatatatgtgaggctattaaaactcttgcacaagatcaccctgaaatgaattttatttatccagttcatttaaatccaaatgtcaaagatcctgtattaagaatattgtcaaatgaaagcaacatatatttgattgaaccattagattacaagccttttatatttttacttaagcattgttttttagtattaacagatagtggtggtattcaagaagaggcgccaagtcttggaaagcctgttttagtaatgagagacgaaactgaaagaccagaggctgttgacgctggaacagtaaaacttgttggagcttctaaaaaagaaattatttcgtcagtatctgaactcattaaaaataaaaagtcttatgaagtgatgtctgaatctataa

SEQ ID NO: 289887 - DNA, 964 bp, Unknown
  Bacterial polypeptide expressing nucleotide sequence isolated from the Sargasso Sea
tagtcctctctatgaccttaatattatgatgaagggccaagacttgacacatataacgacaagtgtgttgaaaggtttagtagatgtgctgaaagaggttcaacctgacagggtcctagtgcatggagatacgactacaactttggcggcttctcttgcctctttctacgcacatgtgccagttggccatgttgaagctgggttaagaacaggaaacaaattatctccatggccggaagaaatgaatcgccgtcttgctgataatatctgtgatatcttgtttgctccaaccaattcagcaaaaaacaatcttctgatggaaggagtgccagaaaaccgtattttcgtcactggcaatacagtaattgactcgcttattcaaatctctgaattattagaaaacaaaccagatatagcaaatgaggcaaataagcagctacctacattagataatgaaaaaaatttgatcgtagttaccggtcatcgaagagaaaactttggtacaggtcttgaaaaaatatgcgactctatttcagagctatctaaaagacgcgatgtagaaatagtatatcctttgcacctaaatcctaatgtgagagattttgttaaaaaacggctaaagactcttaaaaacgtttacctaatagaccctttagagtatctatcgtttgtacatttaatgaaaaaagcaaggatgatacttaccgactctggaggaatacaggaagaagcgccttcactaggggtgcctgttctcgtgatgcgagaagaaacagaaagaccagaggctgtatcagctggaaccgtaaaattagtaggaacaaattctgaaaaaatttatggagaatgttgcaacctgcttgatgacgaatcagcctttcttgcgatgagcaaagcccataacccttatggtgatggaaaagcgagctcaagaattgtaaaagaattgatgaatgttaaataa

SEQ ID NO: 289888 - DNA, 837 bp, Unknown
  Bacterial polypeptide expressing nucleotide sequence isolated from the Sargasso Sea
cctggtgcgtgcgctagcggcagacacacaaattgactcccgagtttgcatcactgcccaacatcgcgagatgctggaccaagttctgaacctcttcggtatacagtccaatcatgatctgaacatcatgcggccgagccaggatctatcgcacattacccaggccgtacttactggcatgggggccgtccttgatcgggaaaaaccagatcgtcttctagtacatggtgacaccaccacaacgttagcggcaaccttggccgcctactaccggcaaatccccgttggtcacgtggaagcggggttacggaccggtgatccctatgcgccgtttcccgaagaaatgaaccgaaagcttaccgactgtatcgcagacgtatactttgcgccgactgatggagcagcagagaaccttcgacgtgagggcgttgacggttcccgcatcgccatcactggcaacactgtgattgatgccctgctgcaagtcgtgggcgacctccacagcgatgacaaacgccgtaacgccgcggcttcatatttccaaaatatccccaatgaccgacgcttgattttggtgacgggtcatcgacgagagaactttggggatggtttccgacgcatttgtcatgcgcttagagcattggcggaacgcggcgacgtcgagatcgcctacccggtgcacctcaatccaaacgtccagtcgcccgtccactccatcctgtccgactgtccgcatgttcacctaatggcaccccaggattacctacctttcgtttatctaatggatcgatgccacctggtcattactgattctggcggcatccaggaagaagcgcc

SEQ ID NO: 289889 - DNA, 464 bp, Unknown
  Bacterial polypeptide expressing nucleotide sequence isolated from the Sargasso Sea
gcttgcgagtgaaaagaatattgaatctagagtgtgcgttactgcgcagcatcgtgaaatgcttgaccaagtattagcattgttcgacattgtgccagattatgacttaaatgttatgaagccgggacaagacctctacacagtcactgccagtattttagagggaatgaaaccagtacttgaggactttaaacctgacgtagtattggttcacggtgatactacaacaaccttttcagcgtctttagctgccttctatcagcaaatcgatattggtcatgtcgaagctggcttaagaactggcaacttatattcaccttggcctgaagaagccaatcgcaaactcaccggtagtttaacgcgttaccattttgctcccacagccttgtcacgcgataatttactcgcggaaacggtcagcgaggataaaattgtagttacgggcaacacagtaattgatgctc

SEQ ID NO: 289890 - DNA, 469 bp, Unknown
  Bacterial polypeptide expressing nucleotide sequence isolated from the Sargasso Sea
atggggaagatcttgaccgtgttcggcacgcgcccagaggccatcaagatggcgccgctggtgcaggcattgcaggccgaggcaggctttgcgtcggcagtgtgcgtgagcgcgcagcaccggcagatgctggatcaagtgctggagctcttcggcatcgtgccggagtttgacctcaacctgatgcggcctgggcagacgctgtccgatatcacatccaacgtattgagcggcatcgacggcgtgctagacgcctacaagcccgatgccgtgctggtccacggcgatacgacgaccacgctggcggcgagcctcgcagcgttctaccggcgcattccggtcgggcatgtggaagcgggtttgcgtaccggcaacatctggtcgccatggccggaagagttgaaccggcgcgtgaccgattccgtgaccacctggcacttcgcgcccacggccgaatcacgtcagaacc

SEQ ID NO: 289891 - DNA, 499 bp, Unknown
  Bacterial polypeptide expressing nucleotide sequence isolated from the Sargasso Sea
aatgtcagataaactttcaacaaaaaaaatactattagttttcggaacaagacctgaagcaatcaagatggtaccaataataaaagcactaaagcgagataaaaattttgatgctaaagtttgtgttacagctcagcatagagagatgctagatcaggtattacaaatcttcgatgtactgcctgattatgatttaaatattatgaatccaatgcaagatttatttgacgttacctccaatgtaatactaggtatgagaaaagtattgagtgattttaagcctaatattgtcttagttcatggagatacaacaactacttctgcaagtgcgcttgctgcgttttatcataaaataaaagttggacatatagaagctggactaagaactaataatatttatagtccatggccagaagaggctaatagacagattacaagtgttattgctaactttcattttgcaccaactcgaacaagtcaaaataacttactaaaggaa

SEQ ID NO: 289892 - DNA, 883 bp, Unknown
  Bacterial polypeptide expressing nucleotide sequence isolated from the Sargasso Sea
caagaaaaaccagatcgtcttctggtacatggtgacaccacgacaacattcgcggcaactttggccgcctactaccggcagatccccgtgggccacgtggaagcgggattgcggaccggtgatccttacgcaccgtttcccgaagaaatgaaccgaaagcttaccgactgcatcgcagacgtatactttgcgccgactgatggcgcagccgagaaccttcggcgtgaaggcgttgacagctctcgaatcgccatcaccggcaacactgtaattgatgccttgctccaggtcgtgggcgacctgaacaccgataccgaccgccgcaacgccgtggcgtcatgtttccaggatatccccaatgaccggcgcttgattctggtgacgggccaccgacgagagaactttggcgatggtttccaacgcatttgtcatgcgcttcggacattggccaaacgcagcgacgtcgagatcgtctacccggtgcacctcaatccaaacgttcaatcgccggtcaacgcgatcctgtccgactgtcccaatgttcacctgatggcacctcaggattacctaccctttgtctacctgatggatcgatgccatttggtcatcactgattctggcggcatccaggaagaagcgcccgcgctcggcaaacctgtattagtgatgcgcgacgtcaccgaaagaccggaagccgtcaatgccggcaccgtgaaattagtgggcacggacacagatgccattgttagcgaaacggcattgctgcttgatgacgaagcggtctacaacaacatgtcacacgctcataatccctatggtgacggcaaggccagcgagcgaatagtcagggagattcgacgtgtccacgaactcgacgcctagc

SEQ ID NO: 289893 - DNA, 679 bp, Unknown
  Bacterial polypeptide expressing nucleotide sequence isolated from the Sargasso Sea
gatgaatctgctcgtaatttttggaacccgtcctgaagccattaagcttgctcctctgattttaaaacttcgtcagcaatttaaggttaaaatttgtgtgacaggacaacatagagaaatgctggatcaggtcttaagtgttttcaaaatcaattcggatttcgacctcaatttaatgaaaccgaatcagaatttgacatcccttacatcaggagttctagaaagtgttcaaggtgtaatggaaaaagagcatgttgactgggttatcgttcaaggagacacaacgacttcaatggccgcagcggtcgctgcattctataagaaaataaatattgctcatgtggaagcaggtctgaggacttcggaaaaattttcaccctttcctgaagaaatcaaccgacaattgacatcccgtttagcagatatccattttgcacccactgaaaaaaaccgtgattctcttattaaggaaaacatacctcctgaaaaaatctttgtgacaggaaatacggttattgatgctcttaaatgggtattgaaaaacatccctgaaccagcctgggacttgccttttcatccttctgaaaaaaggatgattctggtaacgggccatagaagagagaattttggtgagggattccaaaacatttgcaaagcaatcaaaacattggctgtaaaa

SEQ ID NO: 289894 - DNA, 847 bp, Unknown
  Bacterial polypeptide expressing nucleotide sequence isolated from the Sargasso Sea
ggctcctctttttcatgagttaaataaacacaaatctaattttaaggtaagtgtttgtgtgactggtcaacacaaagagatgcttgatcaggtattgagtacatttcaaattattcctgactttgatctgaatttgatgaaagatggtcaagacctttttgatctttcttcttcgacgcttcttgctatgcgagatgtgatcaaaaaagaaaatccacaattgattttagttcatggagatactactacttctaatattgcagcaacctcttcgttttatctagatatcccaataggacatgttgaggctggtttgagaacttgtgatctaaaatctccatttcctgaggaatttaatagacagttgataagcatgattgcagattttcattttgcgcctactgaaaaaagtcgcactaatcttgagaaagaaggcatcaaagcaaattcaatatttgtaacaggtaatacagtcatagatgctttattttggatcctaaacaaaatttcaaatgataaaaaacttgaacaagacataacaaataatataaataaatatctaaattttgattggctcaatgataactttatattaattactggacatagaagagagagttttggagagggttttgaaaatatttgtaaggcaataaaagaattatctgaaaaatataaaaatattaagtttgtttatcctgttcaccttaatccaaatgttcaaaaacctgttaaaaaaatattatctaatttagaaaatgtttatttgattgatccacttgaatatgaatcttttgtatatttaatgaaagcatcatatctaattttgactgatagtggtggtatt

SEQ ID NO: 289895 - DNA, 889 bp, Unknown
  Bacterial polypeptide expressing nucleotide sequence isolated from the Sargasso Sea
tttaaactattaaaagatataaaacccgacttaatctttgtccagggagacaccaccactacattttctgcatccctagcttctttttataatagaattccagtagctcatatagaggctggccttaggacaaataatatgtattcaccatttcctgaagaaattaaccgtcgattaacatcaataattgcaaagtatcattttcctccaactattgaagcaaaaaactatttaattaaagaaaatgttgataaaaaattagttcaagtaactggcaatacagttattgatgcattgttatctgtgtcctcaattattgattctaaatctgatttttttgttcaccattttattgataactataaaatagattttaataataaaaaaactattttagtaacagggcatcgaagagaaagctttggggatggttttaataatatttgtaatgctttaaagattatagcaaagaaaaaaaacattcagatcgtttatccagtgcatctaaatccaaatgtccaagagcctgtaaaaaaaattcttaaaaattgttcaaatgttcatttaattccacctcaagattatgttccttttatatttctaatgaaaaaatcttatcttattttgacagactccggaggcgtccaagaagaagcaccttcattggggaagcctgttttagttatgcgcaatactactgaaaggattgagggagtaaaagcgggcacagcttcattagtaggtactgatatcaataaaattgtgtccactgttgatttattattaaataataccattgaatataatcgtatggcaaaagcagcaaacccttatggggaaggtaatgctgcaaaaaaaatacataactttattttaaaaaaacatcaaa

SEQ ID NO: 289896 - DNA, 721 bp, Unknown
  Bacterial polypeptide expressing nucleotide sequence isolated from the Sargasso Sea
gcagagcctgatgtttttgatgtcaaagtttgcgttaccgcgcagcatcgagaaatgctcgatcaagtgctagaaatctttgccattcaacccaatattgacctcaatctgatgaaggaaggtcaggacttaaccgatgtcaccagttcggtgttgttgggcatgcgcggagtgtttgccaagcatcgtccagaagtggtgttggtgcacggcgacacgactacgacgttggcgtctgctatggcagggttttatgacggcgtaccggtagggcatgtggaggcgggtttgcgaacgcacgatgtctacgctccctttccagaggagtttaatcgtcaggtcgctagtaaagtcacgcgctggcattttgcacctacggaattaagccgcgataatatattggctgaaggggtccctgcgtcggccattaccgttaccggcaacacagtgatcgatgccttgcactggatattagcgcgtatcgatgccgatacctcacgtcaggcggcattgaccgaagcattgcagtcggtgctgccctttgcctggcaacgaaagcgctttgtgttgattaccggacaccgccgcgagaacttcggcgacggctttgtgcagatctgcgaggcgcttcgcatactggcgttgcgctttattgatgtacattttgtatatcccgtgcacctgaacccgaatgtgcagcagccggtgctctctttgctgg

SEQ ID NO: 289897 - DNA, 616 bp, Unknown
  Bacterial polypeptide expressing nucleotide sequence isolated from the Sargasso Sea
catatcaattacaggcaatacagtgattgatgccttattctgggtacttgaacactccaaaccattggatgaagcattaccttttgacattcaaaattctaggataatactggtcacaggtcatcgtcgtgaaaattttggagatggattgcggcagatatgtaaagccctaaaaaagattgcgttacaactgccggatgttcagatcgtttatcctgtccacttgaatccgaatgttagagagcctgtgaatcgtattttgtccaacttgccgaatataaatcttttggaacctttggaatatacacaatttgtgcatttgatgaatcaatccactctcatacttacagatagtggtggtgtacaggaggaggcaccaagtttaggaaaacctgtactagttatgcgtgataaaacagagcgaccagaagctgtcgtcgctggtactgtaaaactggttggaacaaatctccaatcaatttttgaagaaacgctacgccttttaagtgattctaaagcttaccgagaaatggcgtttgctcacaatccttatggagacggaactgcatgtagtaaaattatggatgctttaattaatttccgtaaattaagctaa

SEQ ID NO: 289898 - DNA, 376 bp, Unknown
  Bacterial polypeptide expressing nucleotide sequence isolated from the Sargasso Sea
catggctattaaagtattaagtatttttggtacgcgacctgaagcaataaaaatggcgccacttgttaaagcactaaatgcagcagaaggtattgacgcaaaagtatgtgttactgcacagcatcgtgaaatgcttgaccaagttttagagttgtttgaaattgtaccagattacgatttaaatattatgaagccgggtcaaagcttatacgatgtaacaacaaatattttgttaggtttaaaacctattcttgaagagtttaaaccagatttagtccttgttcatggcgatacaagtacgactttatctgcaagcttagctgcgttttatcagcaaattccagtggggcacgtagaagcaggtttacgcacaggc

SEQ ID NO: 289899 - DNA, 1189 bp, Unknown
  Bacterial polypeptide expressing nucleotide sequence isolated from the Sargasso Sea
atgaggattctgtcgattttcggcacacggccggaagccatcaaaatggcgccgttagtcaagcaactggaagccgatgccggcatcgagtcgattgtttgcgtcaccgggcagcatcagcagatgctcgatcaggtgctcgagctgtttcagatcaagccgcatcacaacctcgcgctgatgaccggcaaccagacgctcaacggtctggcctcgcgtctgatcgcctcgctcgacgaagtgctcgctgccgtacaacccgatcgcgtgctggtgcacggcgatacgaccaccgcgtgcgcggcggcgctagcttcgttccaccggcgcattccaatcggtcacgtcgaagcagggctgcgtaccggcaatctgatgcagccgtggccggaagaaatgaaccgccgcgtggtcgacgtgatgagcgatctgatgttcgcgcccaccgcgagctcgaaagcaaacctcgcgcacgaaacgctgcacggcaagatcatcgtcaccggcaatacggtgatcgacgcattgaacctcaccaccgcgcgcatcgaccaggacgcggcattgcgcgccgaactcgacgcacgcctgccgtttctcgatggcgccctgccggtgctgctcgtcacgggccatcgccgtgagagcttcggtgcgggcttcgcgaacatttgcgcggcccttgccgaactcgcgaaaaccaacacggtgcagatcgtctatccggtccacctgaatccgaatgtgcgcggtcccgtgcaggaaaccctcggcacggcgcgcaacgttcatctgatcgagccgctggattacctcggcttcgtgcgcctgatgcagcgtgcgtcaatcatcctcaccgactcgggcggcgtgcaggaagaagcgcccgcacttggcaagccggtgctggtgatgcgcgacgtgaccgagcggccggaagcggtggcggccggcacggtacgcctcgtcggcacggagcgcgaagcgatcgtgcgcgcggtgacaggtttgctcgcaaacgcgggcgagcgtgacgattttgcgcatcgcgtcaatccgtacggcgacggccatgcatcgcaacgaatcgtcgcggcgctgagcgggcgtccgttcgacgagttcgtgagcggcgcagcgggcagcaccgcgcagctggcgggcgcattggccgtgcacgcactgtaag

SEQ ID NO: 289900 - DNA, 955 bp, Unknown
  Bacterial polypeptide expressing nucleotide sequence isolated from the Sargasso Sea
caggaagatcgatttgagtctaaggtatgcgtgactgcacaacaccgtgaaatgcttgatcaagttcttgacttattcagtattaagccagatttcgatctaggagttatgaaaacaggtcaaactttatatgatgtaactacagatgtattaaaaggtttagagaagattgttgctagttataaaccagatttacttcttgtgcacggagatacaacaactacattcgctgcttctttagcagcttattatcagcaaatagaagtgggtcatattgaagcaggcttgagaactggcaatatgtattcgccttggccagaggaggccaatagaaagcttactggagtcctagccaaatatcatttcacgccaacagaagtgtccaaggacaacttattaaaagaatcaattcctgaagaaaatattgttgttaccggtaacactgtcattgattcacttttatgggttacagagaagctaaatcaaagtaaatccttaactaaagatatggcttcaacatttgattttcttgatgaagagaagaaattaattcttgtcactggccatcgtcgtgagagtttcgggcaaggattccaaagaatatgtagagcattaaaacaaatttcttctgataaccctcaaacacaaattctttatcctgtgcatctaaatcccaatgttcaagagccagtaaaaaaattattggcagatctagataacgtatttttaattcaaccccagtcctatctccagttttgctatcttatgaagagatctgaaattattttaacggattctggtggcatccaagaggaagctccttcattaggaaaacctgttttagtattgcgtgaaacgacagaaagacctgaggcaatagaagcaggtactgttaagcttgtaggcacaaaagtagataccatagttaaagaagtaaatttattactcaaatgat

SEQ ID NO: 289901 - DNA, 1150 bp, Unknown
  Bacterial polypeptide expressing nucleotide sequence isolated from the Sargasso Sea
tatgaacagccggatactgcttacgttcggaacccgtccggaagccataaagatggcgccgcttgtgaggcggctcaagaatacgaaggggattgactgtttcgtttgcgtgacgggtcagcatcgggaaatgctcgaccaggtgttgtccctatttcggatacgtcctcatttcgacctgaacgtgatgaagcgaggccaggacctttatgacgtgacgacctcgatcatgctcggcatgcgagatgtgctgaccgattgcaggccggacctcgttctcgtgcacggcgacaccacgacgacgatggcggcaagtttggcttcgttctaccaacgcattccggttgggcacgtcgaagctggtctgcggaccggaaatctcctgtcgccgtggcctgaggaggcgaaccgcaaactgaccggggtgctggcggcaacacattttgcgcccacagagcgtgcgcgtcagaacctgcttgctgaaaacgtgccagacgatcggatcgtagtgacaggcaatacggtgatcgacgcactgttgcacgtacgtgagttgcttgcgaacgatccgcagttgcgcgcctcagcggagcgccacttaccgaacctcgaggcggatcggcgcatcgttctcgttacggggcaccgccgggaaagtttcggcgacggattcgaacgtatctgctcggcgcttgcgcaactggcacgtgcgcatccagacgcggacatcgtgtacccaatgcatctcaatccaagcgtacgcgagcctgtgaaccgccttctttcaaatattccgaacgttcatcttattgagccgcttgactatctaccttttgttcacctgatggatcgcgcgtttctgattctgaccgattctggtggcgttcaggaagaggcgccatcgcttggcaaaccggtgctcgtgatgcgcgatacgaccgaacggcaagaagcagtggatgccggcgtggtgaagcttgtcggaaccgatgcacagaagatttttgacggcgcgtcgcaactactttctgactccaggatgtatgacgcaatgagccgcggcagcaatccgtacggcgatggcaacgcttgcgagcgcatcgcccgcgcacttacggcaaatcccccggcggcgacccttgcggcgtaa

SEQ ID NO: 289902 - DNA, 916 bp, Unknown
  Bacterial polypeptide expressing nucleotide sequence isolated from the Sargasso Sea
aagatttcaagttataattttagataatttaaaaacaggatctaaaaaacttgtaaacaagaaatcaatttttataaaaggagatataaataaccaaaaattattaaaaaaaatttttgataaatatgatatttcaactataattcatttagctggcttaatcgatgtcattgaatcacataaaaataagaaaaaatattatagaaacaacgttttaggtacattaaatcttttaaaatcaattaaagtatcctccgtaaaaaactttattttttcatcttctgcaggtgtttatggtaacataaataagtctgctaaagaaacaatgaaaacaaaacctattaataattatgcttctatgaaactaaaaagtgaaaaattgattaaaaaatattctcagaattataattttaattatgcaattttaagatattttaatgtagcaggcgctagttcaagtggtaaagttggaattttaaatagaaaaaataacagtttttttaatgttttagccaaacaatcattgaaaaagaaaccgataataaatattttcggtaacaactacaaaacgtatgatggcacatgtattagggactttattcatgtaactgatttagctaccattcatttaaaggtgctcgaaaatttgactttaaaaaaaaaatcttttgttattaattgtggttatggaaagggatattcaattttaaaaatagctaaattgtttaaaaaatacataaataagtcaactgatatcaaatttaaaccatcaagaaaaggtgacatcgctattagttattcaaacactagtaatttaaaaaaaaaaataatttggaagccaaagtataataatattagaaaaattttaattactgcaattaattgggaaaagaaaatatccaaattaaatgcttaa

SEQ ID NO: 289903 - DNA, 681 bp, Unknown
  Bacterial polypeptide expressing nucleotide sequence isolated from the Sargasso Sea
aatgcgaaataaaaaagaatatattcttataactggaggattgggttttatcggatcacatactgcaatagaattactaaaattaaaaaaaaaaaatttaatattagttgataatttagtcaattcttctatttcagtaaaaaaaaaaattgaaaaaatatctaagaaaaaacttctttttttcaaagcagatttaagaaagaataaaatatatgagatctttaaaaaatataatatttcatcagttattcattttgcaggtttaaaatctgtaagagagtcacaattaaaatcaaaaaaatatttttcatttaatgtaggaggcactaaaaacctacttaaagctatggttttaaataactgctttaatatcattttcagctcgtcagcttgtgtttataacgaaaaaaacaagtcaccgattaaggagaattcatcattaaaacctaaaagcgtctatggtaaaacaaaactaactatagaaaaaatcttaaaaaaatttaacaaactaaataaaagatcatcggtaattattttaagatattttaatcctattggcgcacatccatcaggtattttatcggaaaatccaaaaaaggcagaaaatatagtaccaaatattcttaagtcaattaaacaaaaaaaaacttttaaaatttatggaaacaattataaaacaaa

SEQ ID NO: 289904 - DNA, 391 bp, Unknown
  Bacterial polypeptide expressing nucleotide sequence isolated from the Sargasso Sea
aatactaaaaattcaaaaattctttttgatacttgtataaaaaataatcttaaaaatattatttttttttcgacagctgcagcatatggcaatccagttaactcagaacctatcaaagaaagtacagatttgaaacctataaatccttatggagaatcaaaaattcaatcagaattacatcttaaagaaaattcgcaatgtaattttattatattaagatatttcaatgttgcaggtgccgaccctaaaatgcgctctggattaataagtaaaaaggctacacatttaattaaaatagcaagcgaagttgcagtaggcaaaagaaaagataaaaaaaaatttggatttgattttccttctcctgttggttctgctgtaagaggttgtttgc

SEQ ID NO: 289905 - DNA, 813 bp, Unknown
  Bacterial polypeptide expressing nucleotide sequence isolated from the Sargasso Sea
ttcccgaacaggttcgtgccgccatgagaggcatccggtccgtgatccacctcgccgccctgaaagccgccggtgattcgatgctcgagccggaacgctacgcgcttcataatttaaacggaaccgtcaatctgctccatgccgctggaactgaaggagtccgccattttgttttctcatccagtgctgcagtctatggagaaccgcagtacctgcctttggacgaaaaccacccaactgaacctgccaatttttacggacagacgaagctgcaaatcgagatgcttctgtcctggttcagcagattaaggaacatgcgttatgcaggcttgcgctatttcaatgctgcaggttatgaccctgatggagaagtacgggggctggagaaggagcccaataatctactgcctctggtgctcgaaaccctgctcggttggcgtgaaaaccttgaagtctatggaaccgattacgataccgaagatggaagctgcatccgggattacatccacgtcagtgatttggccgacgcacaccttcgcgcattgaattttcttgaagaacaagacgaggatcttgttgtaaatcttggcacatccaaagggatcagtgttctggaaattttgaatgtcgccaaaaaagtttccgggatggatctgccggtgattctcagtgatcggaggccgggagacccggctgtggtgcttgcatctgcggaaaaagccgaacggattctagaatggagtcctgcattcagcgatgtggaaaccatccttaaaaccatgctggccgcctatcgctcgcatcatcgctgaa

SEQ ID NO: 289906 - DNA, 674 bp, Unknown
  Bacterial polypeptide expressing nucleotide sequence isolated from the Sargasso Sea
gatgaatacctcgacgccagacattctcgtggttggtggagccggatacatcggttcgcatgtggtcaaagcccttcgcgacgcaggcagacaaccggttgtctttgacaacctgagtactggtcttagggaaaaccttttcccggaaattccattcatccatggagaccttctcattccgaaacaggtttgtaacgccatgagaggcatccgatctgtgatccacctcgccgccctgaaagccgccggtgattcgatgctcgagccggaacgctacgcgcttcacaatttaaacggaaccgtcaatctgctccatgctgctggaacagcaggagtccgacattttgttttttcctccagtgctgcagtctatggagaaccgcagtacctgcccttggacgaaaaccacccaactgaacctgccaatttttacggacagacaaagctgcaaatcgagatacttctgtcctggttcagcagattaaggaacatgcgttatgcaggcttgcgctatttcaatgctgcaggttatgaccctgatggagaagtgcgggggctggagaaggaacccaataatctactgcctctggtgctcgaaaccctgcttggttggcgtgaaaaccttgaagtctatggaaccgattacgatacggaagatggaagctgcatccggg

SEQ ID NO: 289907 - DNA, 436 bp, Unknown
  Bacterial polypeptide expressing nucleotide sequence isolated from the Sargasso Sea
tccggagctccaaataatttaatgccttttgttgctcaggtagcagttggaaaacgggcagaattgaacgtttttggggctgattattcaacaaaagatggtacaggagtgcgtgactatattcatgttaccgacctggcaaaagggcatttaaccgctttaaattttgtatgctctggcaaagggttagattgctttaacttgggaaccggcgttggttattctgtgcttgagattgtccatgcttttgaggctgtcaaccaggtaaaaattccctttagagttgttgagcgccgtccgggagatatagcagagtgttttagtgacactagtaagtctgcttctgtattggggtggcgtgcagaaaaaacactgaacgatatggttcgtgacagctggaattggcaaaaaaacaaccccaacggatatcgttgaa

SEQ ID NO: 289908 - DNA, 872 bp, Unknown
  Bacterial polypeptide expressing nucleotide sequence isolated from the Sargasso Sea
catgggtgtttatgtaatcgacgacttatctacaggcaataaaaatttaatacctgaaaatatcaaactcttaaattgcaatattaatgatgaagagcagatatcaaatcttttacaaagtgaaagttttgatattttatttcattttgcaggattcataaaagttgaggaatctgtaaaaaatccagataaatattttgtaaacaatacttacaatgccataaaactttttgaaacttgttataaaaatggtctgaataatataatattttcatctactggtgctgcgtatggaaacccaattaataataactcaattaaagaagatgagatcttaaaacctcttaatccttatggtgaatcaaagataaaaactgaaaaatttttaattgaaaacagtaatagatttaattcaattatacttcgatatttcaatgtagcaggagctgatcctgatttaagatctggtcttatttcaaaaaaaccaacacacttaataaaaattttaagtgaggttgcagtaggtaaaagagataaaatttttatatatggtgatgattataaaactatggatggaacagcaataagagattatattcatataagtgatttagctgatatacatatagaagtagctaaatatttaatgcataaaaaggttagtaatatatttaattgtggttatggaaaaggatattcagttttagaggttattaatgctgctaataaaataactagtaataaaattaaatttgaatatgataaaagaagacctggagatgcagaaaaattagtctcaaatgttaataaactccatcaaaatattaattggaaaccaaaatttgatgatttagattttataattcagacag

SEQ ID NO: 289909 - DNA, 691 bp, Unknown
  Bacterial polypeptide expressing nucleotide sequence isolated from the Sargasso Sea
tatggataatttctcctgtaaaaaaatagtttttagcagcagtgcaacaatatatggaagaggtaatgaatttaatttatatgaagatacaccaattaaacctattaacccatatggtaagacaaaagcaactattgaagattttttaacagatatatttaataaccctgaagcaaaatgggctattgcaaatttgagatattttaatccaataggtgcgcatccctctggcttgattggagagaatcctatgggtatacccaataatattttcccttttattacccaagtggcattagggaaattaaaggaacttagtatttttggaaatgattggtctactccagatggaacgggcataagagactatattcatgttatggaccttgctgaaggtcatatttgcgcgatggaaaaattaaataattttgagtcgaaaatttttaatataaatcttggaactggacagggaacaagcgtcttagaactagttgaaatttttgaaaatattaataaggttaaagttccttatgtttttacaaataggagaaaaggtgattatcctattgttgttgcaaataatgaacttgctaaaaaggaattaaattggttgcctaaaagaaatattgaagatatgtgtaaggatggttggaattggcaaattaaaaatcctaatggattcgatttttaa

SEQ ID NO: 289910 - DNA, 601 bp, Unknown
  Bacterial polypeptide expressing nucleotide sequence isolated from the Sargasso Sea
gggccggtcaatccctacggggacgtcaaaactgatgacggaatggatgttacgagacctcgccaatgccggcggcccttcttatgctgcgcttcggtacttcaatgtggccggctgcgaacccgggggttcgataggacagtcgacaccaaaagctacattactcgtcaaggttgcttgcgaagcggcggtaggcacacgctcgcatgtatcagtattcggcacggactacccgacgccggacggaaccggcatacgcgactacattcatgtcgaagatctcgctgcggcgcacctggatgcgctcgattaccttcgcaagggcggcgactcgaccatcctcaactgcggttatgggcatggctacagcgtccgccaggtgctggatgcggtggagcgcgccaatgagtccaaattgaaaattgtcgatgagccgcgacgcgccggcgatccgcccgaactcgtcgcaattgccaaccgtgtccgcgacgtgctcggctgggaaccccgttacgatgacctcgacacgattgtcagcaccagtctcgcctgggagcgcaggatcgccgggcaggatcccggcgcatactgggccgtctga

SEQ ID NO: 289911 - DNA, 526 bp, Unknown
  Bacterial polypeptide expressing nucleotide sequence isolated from the Sargasso Sea
tctgtcctggttcagcagattaaggaacatgcgttatgcaggcttgcgttatttcaatgctgcgggttatgaccccgatggagaagtgcgggggctggagaaggaacccaataatctactgcctctggttctcgaaaccctgctcggttggcgtgaaaaccttgaaatctatggaaccgattacgataccgaagatggaagctgcatcagggattacatccacgtcagcgacttggcctacgcacaccttcgcgcattgaattttcttgaagaacacaacggagatcttgtcgtaaaccttggcacatccaaaggaatcagtgttctggatattttggacgcggccagaaaagtttccgggatggatctgccggtgattctcagtgatcggaggccgggagaccctgctgtggtgcttgcatctgtggaaaaagctgaacggcttctagaatggcgtcctgcattcagcgatgtggaaaccatcctaaaaaccatgctagccgcctatcgctcgcatcaccgctga

SEQ ID NO: 289912 - DNA, 699 bp, Unknown
  Bacterial polypeptide expressing nucleotide sequence isolated from the Sargasso Sea
aattatttttctcatctactgcagctatttttggaatcccagattctaaatatttgcctttaaaagcagatgcacctaaaggtcctattaatccttatggtatgagcaagcttatggtcgagcaggccttgcctgattttgatcatgcgcatggtataaaatatgcatgcttgagatattttaacgtctctggtgtagattcagatttaagaatcattccaaaagaaaatacagagccgactcacttaattcctttagttttgcaagcagcaagcggtaggagggaaaacataaaagtattcgggactgattatgaaacacgagatggaacttgcatcagagattatatccatgttcatgatttatgtagcgcccatttattagcattacaaaatttattaaatggagttgagagttttaaaattaatttaggctatggcttaggattttctgtaaaagaagttatagaaaaatctcgagagattacaggctgtgctattaatgctattgatacaccaagacgagagggtgatcctgctgaattaattgcatccagtgaagaagctaaatctttaggatggcagccaaagtatgataatctagaacttattttaaagcatgcttgggaagcagaaaaaaggaaagcaaattatgaagaaggcagatcagatgacagagaaaatggtagcaccaagtaaa

SEQ ID NO: 289913 - DNA, 550 bp, Unknown
  Bacterial polypeptide expressing nucleotide sequence isolated from the Sargasso Sea
gatggatgaacaaaaggtcttagtaacgggcggtgcgggatacataggctcccacgcgtgtaaggcgctgcagcagtcgggatttacccctgtgacttttgataatctggtcacaggctggagggacgccgtcaaattcggccctcttgagcagggtgacttgctgaacaagggcgacttagaccgggtttttaagaagcactcacctgttgctgttatgcattttgcagcgctcagcctagttggtgaaagcatgcagaaaccgggtctttattggcaaaataacgttttgggatcactgaacctgatccaggcggctgtcgaccatggctgcatgaatttagttttttcgtccacgtgtgcaatttacggtgaccaagacagcgtagtgctggatgaaaacagcaagcagaaccctatcaacgcctatggcgcctcaaaaagagctatagaaaatattttggctgattatcaggtgacttacgggcttaaccaagtaatttttcagtatttcaatgtagcgggtgctgaccctgaggcagaaattgga

SEQ ID NO: 289914 - DNA, 905 bp, Unknown
  Bacterial polypeptide expressing nucleotide sequence isolated from the Sargasso Sea
atccttaattgacaaaggtcactcagtaacagtaattgataacttgataactggtaataagacactaattcccacaaaagccaagcattttaattttgatattgccgatgaaaattcaatacaaaaaattctaaaagaaaataaatttgatttagttatgcattttgcaggtctcacaagagtagacgagtcagttaaatatcctgaaaaatatgaacttcataattttgaaaaatcaaaaatatttttttcattatgtataaaaaataatcttaaaaaaatcatattttcttcaagtgctggagtttatggaaataataattctaataatttaatagaagaaagtgaattaaaaccaattaatccttacgcagagtcaaaatataaaatagaaaattttttaatttcaaaaaaagataaaattgattatacgattttaagatattttaacgtagcaggagcagacaaaagcaaaagatctggatttatagccaagtcatcctcaaatctaattaaagttctttgtgaagtagctgtaaacaagagaaaaaaaataataattaatggcgatgattatgaaacaaaagatggcacagctataagagattttatacacgtgtctgatatagccgatatgcatgttttagcagcaaataatcttttaaaaaatcggagttcaaatatttataactgcggttatggcagcggatattctgtaaaagaagtaattactgagatggaaaatatattaaaaaataaattacaagtagaaattggaccaagaagaccaaaagatatagcagtttcagttgccaatagtgataaatttaaaaaagaatttaattggaaaccaagttttaataatttaaatattattttaagttcagctttaagctgggaaaaaa

SEQ ID NO: 289915 - DNA, 553 bp, Unknown
  Bacterial polypeptide expressing nucleotide sequence isolated from the Sargasso Sea
cgtttatggattaacaaaattaaaatgtgaaaaattgataaaaaaaaatttcaaaaaaaattatgctatccttagatattttaatgttgttggttcaagtccaagtaaaaaaattggacaaataaataaaaatggacaattatttaaaaatctatcattggcggtaaaaaaaaagaatccaatatttaatatttatggagatgattataaaacttttgatggatcgtgtattagggattatattcatgtatgtgatctagcagaaattcatattaaaactttattaaaaataaatttaaagaataaatcagtaatattaaactgtggttatggaaatggattttctgttttcgaagtagtcaaagaattttctaagctttctaaaaataaagttacaattaacgtaaaggaaagaagacgtggtgatatgactaaaattatagcaagggtaaataaattgaataaatttttaaaatttaaaccaaaatttcatagtttaaagaaaatggttaaaagttcggtagattgggaaaaaaaattaaataataattaa

SEQ ID NO: 289916 - DNA, 649 bp, Unknown
  Bacterial polypeptide expressing nucleotide sequence isolated from the Sargasso Sea
ttgaaaaatattttattttcatcaacggctggaatctatggtaatacaagtaacacacaagtaaaagaaactgatgaattaaaaccaattaatccttatgctgagtctaaatttaatatcgaaaaatttttaattgaaagctcaaaaaataaaaaaataaattatacaattttaagatattttaatgtagccggagctgacataaaaaagagatccggattaatatctgactcgtccacaaatttaattaaagtattgtgtgaggccgcaacaaagaaaagagataaaataattattaatggagaagatcacaaaactaaggatggcactccaattagagactttatacatgtctctgatattgcagagattcatattttggcagcaaaatatattcatgaaaattcggaatcagacattttcaactgtggttatgggaaaggatattctgtaaaagaagtaataaaagaaatggaacatattattggaggtaaattaaaagttgaaattggatctagacgagaaaaagatatatcaatttctattgcaaacagtgataaatttaggaaaaaatttaattggaaaccaaaatttaataatttaaattatattctaaagacagcactagagtgggaaaaaattaattaat

SEQ ID NO: 289917 - DNA, 898 bp, Unknown
  Bacterial polypeptide expressing nucleotide sequence isolated from the Sargasso Sea
gagctttaaacgagtagaggcattaacaaacaaaaagttgaaatttgtagagggcgatatctgtaaattcggttttcttgagcaatcgatttgtgaatttcaacctgatattgttttgcattttgcgggattgaaagcggtcggagaaagtgtaattgatcccttgcgttattatgaagtaaacttaaaaggttctttaaatatcttaagtgccatgtctcttacagcatgcaataaaatagttttttcttcatcggcgacggtgtatgggaacaaaaacgcgcctccctataaagaaacagatcagttacaacctgtctcaccttatggtcggactaaactaatttttgaacagattttgcaagactgggtcaagtcagatagaaagcatcgggctattgttttgcgttactttaaccctgttggagcacatggttctgctatgataggagaaaaccctcaagataaaccagataatttgatgccatttctagcgcaagtagctagtcaaaaaaggcagtatctatctatatttggaagtgattaccctactaaggatggtactggtgtaagggacttcattcatgttgttgatctggcatcagggcacgcaaaagccattgataaaatagagagacttaagcgtttccatattcttaatttgggaacaggtaagggaacaactgtgctggagttaattaaatcatttgaaatttctacgggtattaaggttccgttgagatttgttgatcgacgggcaggagatgtagctatatcgcttgcggatccgacggaagctgaaaacttgttaaattttaaatgtgaaaaaacaatacaagatatgtgtgttgacgagtggaattggcagacaaaaaatccaaagggttatgaattttaa

SEQ ID NO: 289918 - DNA, 928 bp, Unknown
  Bacterial polypeptide expressing nucleotide sequence isolated from the Sargasso Sea
gttaattgataagaattataaagttacagtaattgataatttagaaactggtaataaattcttaattccaaagagagcaaaatttgagttgtgcgacattggcaatacaaaaaaaattgaacaaattttaaaaaaagaaaattttgatataattatgcattttgcaggtttaataagagttgatgagtcggtaaaaaaaccaaaaaaatatattttatataattatgaaaaatcaaaaaaatttttagaaatatgtttcaagcacggattaaataaagttattttttcttcaacagccgcagtttacggaaatttaaaaaataaaaaagctaaagaaacagataaactttcaccattaaatccttatgcactttctaagatgaaattagaaaattatttaataaaaaaatcaaaaatagataaaataaattatgtaatattaagatattttaatgtggctggtgctgaaaaaaaactgagaacaggcttagtctcgaagcacgcatctcatttaattaaaattatttgtgaagtagcaacaaataaaaggaaattattaacaataaatggagaaaattataatactaaagatggaacacctataagagattacattcacatttctgacttatctgatgctcatttaatatctgctgaatatcttcttaataaaggtaattcccaaatttttaattgtggttattcaaaaggctattcagtaaagcaagtaatatttgaaatggagaaaattttaaaaagaaaacttccatcaaaaattggaaaacgaagaaagggagattctgaaagagttgttgcaaatatctctaaatttaaaaagtatttttcttggcaaccgaaatacaataatcttaatttaattttaaaatctgcactcgcttgggaaaaaaaattaaaaaaatatgagtag

SEQ ID NO: 289919 - DNA, 795 bp, Unknown
  Bacterial polypeptide expressing nucleotide sequence isolated from the Sargasso Sea
ataaaatcgaaaatgttatacatttagctgctagtgtaaaagttgatgaatctacaataaatccaataaaatattactcaaataatactgcgaaaacattaaaatttataggcagctgttcaaataccaatataaaaaatttcattttttcctctacagcctctgtatatgggtcaaaaggaagtgatccaattaaagagaatgaagaattaaatccagagagcgtttatggacattcaaaactaatgagtgaaataatgttaaaagatattacctctacttcaccaatgaaatatggaattttaagatattttaatgtagcaggtgctgatccaaaacttagggtgggacaatgtgatgaggatgccacgcatttaatcaatgtggcttcattggcggcaataggaaaaagagattgtataaatatctatggaacagattataatacaaaagatgggtcgtgtatcagagattatgttcatgtttccgatattgctgaaattcattatttaacaattaaatatctcgttagtggaggtgaatctattactatgaattgtggatatgaaaaaggttattctgtgctagaagtcgttaaatatttgaaagaaatttccaaaaggaaaattgttgtgaattacaaagagagaagaaaaggtgatccatcttcagttattgcggatgcaaaactttgtaaaaacttattaaattggaaacctaaattcaatgatatttatactatcatagaacattctattaaatggcaggaaaagcactttaaaataactaattaat

SEQ ID NO: 289920 - DNA, 790 bp, Unknown
  Bacterial polypeptide expressing nucleotide sequence isolated from the Sargasso Sea
gatgagaggcatccggtccgtgatccaccttgccgctctgaaagccgccggtgattcgatgctcgaaccggaacgctacgcgcttcacaacttaaacggaaccgtcaatctgctccatgccgccggaactgcaggagtccgccaatttgttttttcctccagtgctgcagtctatggagaaccgcagtacctgcctctggacgaaaaccacccaactgaacctaccaatttttacggacagacaaagctgcaaatcgagatgcttctgtcctggttcagcagattaaggaacatgcgttatgcaggcttacgctatttcaatgctgcaggctatgaccccgatggagaagtgcgggggctggaaaaggaacccaataatctactgcctctggttctcgaaaccctgctcggttggcgtgaaaaccttgaagtctatggaaccgattacgatacggaagatggaagctgcatccgggattatatccacgtcagtgacttggccgatgcacaccttcgcgcattgaattttcttgaagtacacgacgaggatcttgtcctaaaccttggcacatcgaaaggaatcagtgttctcgaaattttggatgcggccagaaaagtttccgagatggatctgcaggtgattctcagtgatcggaggccgggagacccagctgtagtgcttgcatctgcggaaaaagccgaacggcttctagaatggagtcctgcattcagcgatgtggaaaccatcctcaaaaccatgctggccgcctatcgaacgcatcatcgctga

SEQ ID NO: 289921 - DNA, 762 bp, Unknown
  Bacterial polypeptide expressing nucleotide sequence isolated from the Sargasso Sea
catgagaggcatccgttccgtggtccacctcgccgccctgaaagccgccggtgattcgatgctcgagccggaacgctacgcgcttcacaatttaaacggaaccgtcaatctgctccatgccgctggaactgaaggagtccgccattttgttttttcctccagtgctgcagtctatggagaaccgcagtacctgcctttggacgaaaaccacccaactgaacctgccaatttttacggacagacgaagctgcaaatcgagatgcttctgtcctggttcagcagattaagggacatgcgttatgcaggcttacgctatttcaatgctgcaggctatgaccccgatggagaagtgcggggactggagaaggaacccaataatctactgcctctggtgctcgaaaccctgctcggttggcgtgaaaaccttgaagtctatggaaccgattacgatacggaagatggaagctgcatccgagattacatccacgtcagtgacttggctgacgcacaccttcgcgcattgaattttcttgaagaacacgacgaggatcttgtcgtaaaccttggtacatccagaggtatcagtgttctggaaattttggatgcggccagaaaagtttccggggtggatctgccggtgattcacagtgatcggaggcagggagacccggctgtggtgcttgcatctgcggaaaaagccgaacggcttctagaatggagtcctgcattcagcgatgtggaaaccatccttaaaaccatgct

SEQ ID NO: 289922 - DNA, 502 bp, Unknown
  Bacterial polypeptide expressing nucleotide sequence isolated from the Sargasso Sea
ctgcgctacttcaatccggttggcgcacacccttcgggtctggtgggggagaacccgctgggccatccgaacaacctcatgccttttatccagcaggtcgccgtcgggaggaggccggagcttacggtcttcgggaacgactacgacactccggacggaaccggcgtccgcgactatctgcacgtcgacgacttggcggcggggcaccttgcggcgctgagctacatccagaagaccgagggttgccatgtgcacaatctgggtaccgggagaggctacagcgtgctcgagatgatcgaggctttcgagaagtgctccggggtgaagatcccgtacaagataggtccacggcggcccggggacctgtctaccgtggtcgcggactccagcaaggcgatgcgtgagttgggctggagcgccacccggggcttggaggacatcatggcctccgcatggaagtggcagaaaaacaacccggaaggctacccgaaggaggagtgag

SEQ ID NO: 289923 - DNA, 660 bp, Unknown
  Bacterial polypeptide expressing nucleotide sequence isolated from the Sargasso Sea
gatggctaaaaaaatagttttgacaggtggcgcaggctatataggttcacatatttttatctcactagtggaaaaggggtatgagcccattatcattgataatttcacaaatagtaatgaagcagttattcagaaaatagaattaattacgaataaaaaaattaatttttataaatgtgatgtcactaataatatggatgaattatttaaaaatgaaaatgtatttggtgtaattcacttagctgcatataaatctattccaaattctttaagtagtcctcttgagtatttttataataatgtaaatggtctaatcagtattttacaagcaatgaaaaataatcaatgtgatagaattatttttagtagtagttgcagcatatataataataatagcaacacaccagttactgaggaatgccaaataaaaggaaataatccctattcattaagtaaaataatgtgtgaagaaattttaaatcaaacagctttttctgatcctaattttagatatatgtcattaagatattttaatcccgtaggagcccacaaaagtggattaattggggaaaatgttgacagtgaggaaagcaatctaatgaatgaaatatgtaaagttgcgattaaaaaaaagaaaaaactatcaattttcgggaatga

SEQ ID NO: 289924 - DNA, 483 bp, Unknown
  Bacterial polypeptide expressing nucleotide sequence isolated from the Sargasso Sea
atgttaacttgaggtattttaatgtagctggctgtgataaagatggagaaataggtgaggatcataatcctgaaactcaccttatccctagaattattaaatctgcacaaactaaagaaaaagtaattgaaatttatggaaatgattatgatactaaagatggaacatgcgtcagagattatattcatgtagaagatcttgcaatggctcatgttaacgctatggattatttgaaaaaaaatgaatctgatagctttaatattggaattggaaatggttattcaattttagaagtaattgagtgcatagaaaacataatgaatttaaaatttaataaagttataaaagcgaagagagagggtgatcctccagttttattttctgataatacaaaatctcttactaaattagattggaccccacagtattataatcttaaagacataataaactcttcaattaattggataaataataattagc

SEQ ID NO: 289925 - DNA, 647 bp, Unknown
  Bacterial polypeptide expressing nucleotide sequence isolated from the Sargasso Sea
aaaattttttattttttcttcagcagcagtttataaagacggtctttacaaagttaatgagtcatcaaaactaaaaccaaaaagtgtttatggaaaaacaaaacttaaagcagaaaatttaataaaaaaaagatgtaaagaaaaaaaaataaattacggaattttacgttactttaatgtagtaggtgctagtccatctggaaaaattggtttaataaataaagggggacacttgtttaaaaatttttctgccgaaattctaaagaaaaaaccaatctttaaaatctttggaaaaaactataaaacaccagataaaacaaccattagggactatattcatgtttacgatttagcagaagtgcacataaaagttttaagagaaatttcaattaaaaatacctctataatcttaaattgtggctatggaaaaggtatttctgttttaagtgtattaaatgaattcaaaaaacaacttcaaaaaaacattaagatatcaatattaaaaagacgaaaaggtgatatggaaaagattatagctgataataaaaaattactcagatttattaagtggaaacctaaatttaataagctaaatattctagtgaaaagttctatacagtgggaaaaaaaattatctcgactttaaa

SEQ ID NO: 289926 - DNA, 830 bp, Unknown
  Bacterial polypeptide expressing nucleotide sequence isolated from the Sargasso Sea
ggaaacctattattcagattaacggtgatattcgtgacagggcggctcttagtgatgtattcagtaaataccctattaaagctgtgattcactttgcggcactaaaagcagttggtgagtcagtgcaaaacccactttcatattatgaagtaaatgtggcaggtactgttacactttgtcaggttatgggcgagtttaacgtcaagcgtttagtctttagctcctctgcaactgtctacggcgcgtcggaatttgtgcccataccggaagcagcttcacgttcggcaactaatccctatgggcaaacaaaactaatgatcgaacatgtcctcgcagatctttatcaatccgataaagattgggatatagcagttttacgctatttcaaccctgttggcgctgatgagagtggtctgattggtgaagaccctaatggcataccgaataatctgatgccttttatcactcaggttgcagttggaaagcgagaggttttaaatgttttcggtgctgattacgatacacatgatggaaccggagttcgcgactttattcatgtcgtagatctcgcgtctggtcacctcgcagccttaaaatacttgtacaggaagccaggtattggttatttcaacttgggaactgggattggatattctgttttagatattgtgaaaagttttagtaaggtcaatcagattaatattccttatgtgattactcaacgaagacccggagatataggatgttgctatgcggatcctaagcaggcacttgagatacttggttggaaaacagaaaaaacactagaagatatggttcgcgacagctga

SEQ ID NO: 289927 - DNA, 488 bp, Unknown
  Bacterial polypeptide expressing nucleotide sequence isolated from the Sargasso Sea
catgcatatattagtcaccggtggtgctggctatatcggctcacatacctgtatctcgttagttgaagcaagccattctgttgtggtaattgacgacttctctaacagccacgccgaagcacttaagcgggtagaaggtatttgtaatacagagatccctcattatgagggtgacgtgggggatgaagagctgctcagacgtgttttctcagagcacacctttgatggcgtcattcacttcgccggctcaaaagcagtgggggaatctgttgagaaacctatgctttattaccgaaacaacgttactgccagccagactttaatagaaactatgcatcaggctggcgtacatacgttagtgtttagctcttcagcgacagtttacggcgacccgcaaactgtacctattgtggaagactttcccgtcggcgcgaccaatccctacggcagaagtaaactcatggtagagcaaatcatacaagattttg

SEQ ID NO: 289928 - DNA, 349 bp, Unknown
  Bacterial polypeptide expressing nucleotide sequence isolated from the Sargasso Sea
gacacgccggacggcaccggcgtgcgcgactatattcacgttgtggacctcgcgcgcgggcatctggccgcgctggatgcgctggtcaggcgcgatgcgagcttcgtcgtgaatctcggcacgggccaggggtatagcgtgatcgacgtcgtcaaggcgttcgagaaagccgcgggccggcccgtgccctacgagatcgtggctcgccgccctggcgacgtggcttcgtgttttgcggaccccaccgccgcgctggaagtcattggctggcgtgcagaatatgggatcgagaggatgtgcgcggatcactggcggtggcagtcgaccaatccgcacggcttcgcctgaa

SEQ ID NO: 289929 - DNA, 547 bp, Unknown
  Bacterial polypeptide expressing nucleotide sequence isolated from the Sargasso Sea
cttgatttaccctcaaaaaaagactaatgataattggaagatagggatattaagatactttaatcctgtaggcgctcaccaaagtggaatgataggcgagaatccaaaaggcaaaccaaataatgttttcccattaataaataaagttgctattaaagaattaaaaaaattaacaatatttggtaaagactattctacaaaagatggaacacctataagagactatattcatgttatggatttggcccaggggcatgtccaaatgttgaaatttttaggggaaaacgattctcaactactgactttaaatctaggaacaggctttggcacatctgttctagaactggttaatacattttgctctgttaacaaagtaaaagttaattattcatttggagaaagaagattgggggattctgagtgctcagtcgcaaattcagaattgtcaaattcaatattgggttggaaagcggaaaagactcttaacgatatgtgtatagattcatggagatggcaaaaaaatttatcttctcaaaaagaaaattag

SEQ ID NO: 289930 - DNA, 599 bp, Unknown
  Bacterial polypeptide expressing nucleotide sequence isolated from the Sargasso Sea
ttatctacctattgatgaaaatcattctttagatccaattaatttttatggatatacgaaattagtaattgaagattttattaaatggtatgggaaattagagaaaataaattatgtaatttttagattttttaatgctgcaggatacgacataaatggtagagttaagtgtattgaacaaaatcccactaatttattacctataattatggaaacagcaaatagaacgcggaaaaagatgaaggtttatggtaatacgtatgatactcacgatggtactggagtacgcgattatattcatgttagcgatttagcgttagcgcacgaaaaagcaatcgattatttatctaaaaataatagtgatttgataacaaatttagcaacaggtgaaggatactctgttcttgagattataaatcgatttgaggatttaatttctataaaaataaactatgatatcgtgaataaaagaaaaggtgatcttgcaatgatggtagcattatctaagattgcatatgataagcttggatgggagccatgtttctctgatatagataccattttaaatagtatgtggaatatttataaagagttttaat

SEQ ID NO: 289931 - DNA, 286 bp, Unknown
  Bacterial polypeptide expressing nucleotide sequence isolated from the Sargasso Sea
tgccgcctggaaaaactggcaggcattcagggtgtgcatatttataacctcggtgcaggcatcggcagcagcgtgctggacgtggtccacgccttcagcaaagcctgtggtaaaccggtgaattaccacttcgccccgcgccgtgaaggcgatcttccggcctactgggctgatgccagcaaagccgatcgcgagctcaactggcgcgtgacccgcacattggatgaaatggcacaagatacctggcactggcagtcacgccacccacagggatattcggattaag

SEQ ID NO: 289932 - DNA, 891 bp, Unknown
  Bacterial polypeptide expressing nucleotide sequence isolated from the Sargasso Sea
acaatctcgtcaccggctgggaagacgcggtcaaattcggcccctttgaaaagggtgacttgctggatcgtgcgcggatcgacgaggtattgcccaaatatgcccccatcgccgtgatgcattttgccgccctgtctcaggttggcgaaagcatgcaggtgccggggaaatattggcgcaacaacgtcgtaggctcgctgaacctgatcgaagcggccgtcgcggcgaattgccataactttgtattctcatcgacatgcgccacctatggcgatcaagacaacgtggttttggacgagaattccgcgcaacatccgatcaacgcctatggcgcatccaaacgcgccatcgaagacatcctgcgcgatttcgaggcttccaacggactgaaccatgtcatcttccgctacttcaatgtcgcgggcgccgaccccgaggcagaagtgggtgagcaccaccagcccgaaacccatctcatcccgctgatgctggatgcgattgacggcaagcgcgatgcgctaacgattttcggcaccgactacgagacgccggacggcacctgcatccgcgattatgtccatgtttgcgatttggtcgatgcgcatgttttggggctcaaatggctcgagaaggacaaaggcagccgggttttcaatctgggcaccggatcgggattttcggtgcgcgaagtcatcgaccattcgcgcgcggtgaccaatcgcgcggtgcccttcaacgaaggcgcgcgccgccccggagattgcaccaagctggtatcgggatcgacccgcgccaaacaggaattaggttggacacccacgcgttcgaccttgcaaaccatgatcgcagacgcgtggaaatggcaccaaactggccattacgacaaataat

SEQ ID NO: 289933 - DNA, 430 bp, Unknown
  Bacterial polypeptide expressing nucleotide sequence isolated from the Sargasso Sea
aatgaatagacaaattatcgtaacaggcggactgggctatatagggtctcatactattgtagaattaaaaaatgatttcgatgaattcatcgtcattgatgatctatcaaatagtaatttaactgtaattaatcgattggaacaattaacagggaaaaaaataattcatttttcatcttcagtcactgatcatgaatcattaaagaatatttttgaagaatacaatcctataaatgtaatacattttgcaggtctaaaatccgtacaggaaagcgaagaatatccagagaagtatttctttacgaatgtaacaggaaccgaaacattattaaatgttatcaaagaattcaactgcaaaaactttattttttcttcatcagctactgtatatggcaatcctgagtacctaccatatgacgaaaatcatcca

SEQ ID NO: 289934 - DNA, 463 bp, Unknown
  Bacterial polypeptide expressing nucleotide sequence isolated from the Sargasso Sea
ggttctggattaattggagaggatccttttgagacacctaataatttaatgccttatatcactcaagttgcattaggccgtttagagaaattaaaaatttatgggaatgattataaaactaatgatggaactggagtaagagattatatccatgttgttgatttagctaaaggtcacttagcagctataaattttttagagaaatgtataggtgttgaaatttttaacttaggtacaggatttggatatagtgtaaaagaagttttaaattcttttgaaaaaatgtctggtatttctatcaaacatgaagtttatccaagaaggtctggagacgttgcaataaattatactgacatttcaaaatcaaaaaatatgctcaaatggaaatgtagtctaaatttaaatgacatgacaaaagatgcctggaattggcaatctaagaacccatatggttataaataaa

SEQ ID NO: 289935 - DNA, 898 bp, Unknown
  Bacterial polypeptide expressing nucleotide sequence isolated from the Sargasso Sea
gaatctggatattgcccagtagtattagacaatttttcaaactcttctgtaaaatctttacataaagttgaacagattgttgaaaaaaaaatagattttttagaaggcgatattagggatgaagaggctttatctaaattgttttcttcaaataaatttggtgccgtgatacatctagctggagctaaatctataagtgaatcagttaaaaaaccattattttattttgaaaataatgtcagtggcagtttaaatttatttaaaacgatggataaatatgaagttagatctattgttttctcttcatctgcaacagtttatggaattccaaaaaaactacccctgaaagaatctatgccgacaagtgaacctactaatgcttatggcataacaaaattaatgattgaaaaaaatcttcaagaactttattcaaggaataaggcttggaatataattaatctaaggtattttaatccaattggcgctcataaatctggtttaattggagaagaccctcaggaattaccaaataatattatgccttacctaactcaagtagctattggaaaactaaaccaactaaatatctatggtaatgactacaaaactcatgatggaacaggcattagagactatattcatgtcatggatcttgctaatggacatataaaagctcttcaaaaactagaaaaagaaaagggtatatggaatataaatcttggcacaggtattggacactctgttttagatcttgtaaaaacttttgagaaagtaacaggtaaagaaataccatacaagctgactgatagacgccctggagatattgcaatttcgtatacagatccatcttttgctaagaaagaaatcaactggattgcagagtttagtttagatgata

SEQ ID NO: 289936 - DNA, 751 bp, Unknown
  Bacterial polypeptide expressing nucleotide sequence isolated from the Sargasso Sea
atgaaaatcttagttgttggcggagcaggatatattggttctcatatggtcaaacgatttcaagatactgatcacgaagtcgaaatacttgataacttgtcaacaggcttcgaattaaacgctcaaaattacaaattacatatctgtgatttatcgaacaaagatcttgtttaccaaattcttaaagaaaataaatatgaaatagtaatgcattttgcctcttacataaatgttggagagtcttattctcagcctaaaaaatattataaaaataatgtaacaaacactctcaatcttcttgactgtatgatagatcttaaaatcttgaattttatattttcctctactgctgctgtatatggtgaaccacaagatataccaattacggaggctcaaaagatatctcctgttaatccatacggaaatacaaaagcaattgtagagaaaattttaaaagattatgacgaggcctatggtcttaaatatatttcattgagatattttaacgcttgtggagctcacatagatggaacaattggagaaagacacaaccctgaaacacatcttatccctctaattttacaagctgcttcaggtcgaaaaaaaaattttactattcatggagatgattatgacacaaaagatggaacgtgtattcgtgactatattcatgtaatggatctagctgaagctcaccttttatcattggaagatttaattaaaactcaaaattctgaaatttacaatatgg

SEQ ID NO: 289937 - DNA, 727 bp, Unknown
  Bacterial polypeptide expressing nucleotide sequence isolated from the Sargasso Sea
aatccaataaaatactatataaacaatacagcaaatacagccaatttcattaaatcatgcactgatgctagtgtaaaaaatataatattttcatcaacagcggctgtttatggagattcaaaccaagaaaagtatagtgaaaatatggaaacaaaacctgtaagcgcatatggattttcaaagcttttcagtgagagaatgctaattgacacatgtaagtctaaaaacataaaatatataatttttagatatttcaatgttgcaggttcagatccaaaaaagaggactggccagattgtaaaaaatgctactcatcttataaaggttgcttgcgaaaccgcacttggtaaaagagacaaaatacaaatttttggaaataattatgatacaaaagatggtacctgtataagagactatatacatgtatgggatttggtcaccgctcacttaaaagcaattacctacctacaggaaggaggcgtttcaaaaattttaaattgtggatatgggaatgggttttctgttttagatgttattaaaaatgtgaaaaagttatccaatgttaattttaagacagaaattgtaccaagaagattgggagatccagcaaaaattattgcagataattcactgattttaaagtatctaaaatggaatccaaaatataataacttagaaaaaattgtaagtgattcactagaatgggaaaaatattcaaataactaat

SEQ ID NO: 289938 - DNA, 589 bp, Unknown
  Bacterial polypeptide expressing nucleotide sequence isolated from the Sargasso Sea
aatgagcaaatcatctattaacattttagtaactggaggagccggatacattggaagtagcgttagtaatttattaattgatcaagggtataacgtcacaatttttgacaatttgatcacgggtcacgaagaattaatacctactgaagctaaatttgaaaaacttgatatttcagatacatcaaatattgaaaaaatatttaaaaataaaaaattcagtgcagttttccattttgcaggtttaattagagttggtgaatcaatagaatttccagcaaaatatatggataataattttgaaaaatcaaaaatatttctaaatacgtgctttgataacgatataaaaaaagttattttttcgtcaactgcagctgtttatggaaatgcaaaaaaaaataaagtagttgaaacagataaaataaatccactaaacccttatgcagagtctaaaataaaattggaaaattttttaatagatcagtcaataaagagacaaataaattatgttatacttagatattttaatgttgctggagcagatgtagaaatgaggacagggttaatatctaaattttcttcacatttaaaa

SEQ ID NO: 289939 - DNA, 845 bp, Unknown
  Bacterial polypeptide expressing nucleotide sequence isolated from the Sargasso Sea
tatgaaaatccttgtaactggtggagctggatatattggtagccaaatggttcattcactattagacaatggttttaatgtttctgttattgataatttaacaacaggtaataagaatacaattccaaaatctgtagaattttttcatgcagatattggagctggaaataaaataactaattacttaaaaaaaaataaaattgacgcaatctttcattttgctgccagcattaaagttgaagagtccgaaacaaatccactaaaatattttaaaaacaacttctgtgaaacaagagcatttcttgattcctgcatcaaagcaaacattaaattctttatattttcttctactgcagcagtttatggaaattctcaaagtcaattttctaaagaaaatgacattttagaacctagtaataattatggtctatcaaaattattttgtgaacaaatgattgaaaaggtatgtaaaacacatcaaataaaatattgtattttaagatattttaatgtagcagggtctgatttaaggctaagaactggtcagatgaatgatcaacctagtcaccttattgccgttgcgtgtcatgcagcactaggtttaatagagtcaattccagtatttggaacagattataaaacaaaagatggtactgctattcgagattatatacatgttgttgatttggtagatgcccatctaaatgctctggattatctaaaaaaagacggaacttctggaatatttaattgtggatacggtcaaggttatagtgtttatgaagtaattaatgctttaaacatgataatcgaaaaagaaataaaaacaactttaaggccaagaa

SEQ ID NO: 289940 - DNA, 514 bp, Unknown
  Bacterial polypeptide expressing nucleotide sequence isolated from the Sargasso Sea
aatgaaaattttagtgactggtggagctgggtacattggtagccatgtttgtaatttattattggacaaaggttataaagtgatagtaatagatagtttagtaacaggtaacaaaaatttaattccaaaaaatgcaaggctaattgtctctgatataagtgatgaaaaaaaagtagaagatataattataaaagaaaaatttgatttagtgatgcatttcgctgggttaataagagtggatgagtcagttaaagagccaaaaaaataccatgaatacaattttgaaaaagctaaaatttttttaaatatctgttttaaaaatgggctgaataaaataattttttcatctactgcttcagtttatggtaacccaaagaaagagagagttttagaaagtgatcctccaaatcctttaaatccttatgcaacctcaaaattaaaacttgaagaatttataaaaaagaaatctaaagaaattgatcttaggtatattattttaagatattttaatgtt

SEQ ID NO: 289941 - DNA, 696 bp, Unknown
  Bacterial polypeptide expressing nucleotide sequence isolated from the Sargasso Sea
tatgaaagtcttgattactggtggtgcaggatacattggaagtatggtagcacattttctaactgatataggctacgatgtttacataattgataatctctcaactggctcaattaaacttttaccaccgaattcaaaattttataaactcgacataggcctaggagataaagttacaaaaattataaaagatatctcaccaaaagtaattattcatttagcagcatctgtagaagttgaacaatcaataattaatcccttagattattatgagaacaatatttcaaaatccatttcatttttaaaatcaagtatcgaatcaaatattaaaaatctaatattttcttctacggcagcagtttatgaaattccaaaatcgcaaaagagaattaaagagagtcataataaaaacccaaaaagcccatatggctattcaaagcttgttctggaaaatattataaaaaatgcctcacaaaaatataaatttaaaagtattatattaagatactttaatgtcgctggagctgatataaaattaagaactggtcaaataaaagaacctgctacacatttaataaagattgcttgtgaagttgctactaataaaaagaatagtataagtatattcggtaatgactataatactaaagacggaacatgcattagagattatatacatatagcagatctcgcaga

SEQ ID NO: 289942 - DNA, 752 bp, Unknown
  Bacterial polypeptide expressing nucleotide sequence isolated from the Sargasso Sea
tatgaacaacatattagttactggaggtgctggttacataggaagccacattgttcaaaaacttttaaaattaaaaaaaaaagtttttataattgataatctttcaacagggtacaaaagattaataaataaaaaagcaaaattttataattgtgatattaataattttaaaaaagtaaataaaataattagagatgaaaatattaattcagttatacatctagctgcacttcttgatgtaaatgaaagtcagaaaaatccaaaaaaatattacaaaaataatgttttaggcacagacaacgtaataaaggcctgcataaaatcaaatgtaaagaattttatattttcttctacagcagcagtatatcgtgatggaatttttaaagtaaaagaaagttcacaaattaaaccaaaaagtatttatggcaaatgtaaatttaaagctgaaaagttaattaaacaaaaattaaaaaaaaataaaataaattatgcaatattaagatattttaatgtttgtggttctggacagggatacaaatatggtcaaattaatacttacgatcttctttttaaaaatttagcaaaaagtataattaaaaaaaaacctgaaattaatatttatggaaaaaattaccctactaaggacggaacatgcattagggattttattcacatatcggatataacaaatattcatattaagatattgaaaaaaatttctcaatctaacaagtcttatatttttaactgtg

SEQ ID NO: 289943 - DNA, 455 bp, Unknown
  Bacterial polypeptide expressing nucleotide sequence isolated from the Sargasso Sea
actaataggagaaaatcctaaaggaattccaaataatatttatccattaattactaaagttgcggcaaaaaagataaagcatctagaaatttttggaagtgattgggatacagaagacggcacaggagttagagactatatacatgttatggatttagcagaaggacatgtaagagcagctgaaaaaattttagaaggcaaatcacgagtgatgaatataaatttaggaactgggaaaggtactagtgttcttgaattaattcatacttttcaagatgtaaacaaagtaaaaatccccttcgttttcggtaaaagaagattgggagattatggtaaggttgtagctaataattctctcgctattgagtttcttaattggaaaccaagtagaactattgaagatatgtgtagtaatggatgggaatggcagaagcttaatccaaatggatattaag

SEQ ID NO: 289944 - DNA, 805 bp, Unknown
  Bacterial polypeptide expressing nucleotide sequence isolated from the Sargasso Sea
ttaggaaataagtggtcagtaaaatggggacccttagaagtaggagaattatgtagtgaaaatgatctacaaaaactttttgaaaaatataattttattggtgtaatccatctagcagctctatctaatgtttcagaatcagtaaataatccatctatatattataaaaataacgttattggttcttataatttaatagagaaaatgattaagtttaatgtaaaaaaaattgttttttcaagtactgctgctgtatatgggaatcctattcactcacctatttgtgaaaaccatccaactcaaccgataaacccatatggtgatagcaaactcacaattgagagattgatttgtaattattctaaatgtcacgacttaaattttgttatattaagatattttaatgtttctggtagtgatttttcaaataatcttggagaagctcacttacctgaaactcatttaatacctctagccctagaggcagctcatcaaaaatctatttttaaaatttatggtgataactatccaacaactgatggaacttgtattagagactatattcatgtgaaagatttaggaagtgttcatttattaagctttaataaattgaaatcttcaaaagtaaatcaaattattaatgttggagggggaaaaggttatacagtttatgaaataattaaatatgtgaaaaaaattacaaatttagatttaaaaatagacgtaataaaaagaagaaaaggtgatccagatattttagtatcagacattagtaagtcaaaaaatattctatctgggaaccaaa

SEQ ID NO: 289945 - DNA, 765 bp, Unknown
  Bacterial polypeptide expressing nucleotide sequence isolated from the Sargasso Sea
taattttattaattcagatatatcagatgaaaaaaagattagagatcttctaaaaaaagaaaaatttgatctcattatgcattttgcaggcttggtgaaagtggaggagtcactcttgcatccagaaagatataaacttaacaacgtcgataaagctaaaacttttataaaagcctgtatggagtgtggtttaaataaaattattttttcttcctccgctggtgtttacgggaatactcctagtatggaaaaactcaatgagagtagcgagctgatgcctactaatccatactctaaaacaaaacacgaatttgaaaaatatttgttaaatttatcaaaggaaaaaaaaataaaatgtataattttgagatattttaatgtagctggagcagacgagaaaaaaagatcaggtcttgttgcaaaaaaatcaaataatttaattaagtcaatatgtgaagttgctacaaacaaaagatcaaatattgttattaatggagatgattacgatactcaagatggcaccccagtaagagactttattcatgttactgatttagctgaaatgcatacaatagctgctgaaaatttagataaaaaaaactcagaaatttataactgcggttatggcgagggttactcagtaaaacaagttgtattagaaatggaaaaaattcttaaccgttctttaaataaaaaaattggtagaagaagagaaggcgatataccttactccgttgcagacaccacaaaatttaaaaaagaatt

SEQ ID NO: 289946 - DNA, 816 bp, Unknown
  Bacterial polypeptide expressing nucleotide sequence isolated from the Sargasso Sea
gacataaaagatttaaataaagtaaaaaagattttaagaaaatatcaaatagatagtattattcacttagcagctcatttgaatgtaagtgaggcagaaaaaaataaaaaaagatattattcaaataatattttagggactttaaaattagtagaggcctgtaaaaattcaaaagtaaaaaatataattttttcgtcatcttgtgctgtttatggaagtattaatggatcagtaaatgaaaagaaaaaaccaaatccacaaggttactatgcgtttacaaaatataaaggtgagcagataataaaaaaatatgcaaaaaaatataattatagatatgctattttaagatattttaatgttgctggagcaagcaagtctaataaaattggtgaaatacaaagatcatatggacatttaattaaaaatttagccatacaatcactgaaatatcgtcctaaaatatttgtttacggaaatgattataatacaaaagatggaacttgtgtaagagattatgtacatgtatctgatcttgctgatgtacatattaaaagtttgaaccatataaatttaaaatctaaatcgctaattcttaattgtggttacggtaagggatattcggttttagatattgttaatatttttaaaaaaaagaaaaaaaaattaataattgaattcacaaaaagaagacctggagatgtagcaaaagtttttgccgatactaaaaaaattaaaaggattttaaaatggagaccaaaatacaataatttaaataaaattttacagagcgcatttcaatgggaaaaaactcttagc

SEQ ID NO: 289947 - DNA, 379 bp, Unknown
  Bacterial polypeptide expressing nucleotide sequence isolated from the Sargasso Sea
atgaaaagtatattagttacaggaggaactggatttataggttctcacacatgctgtgcattattagatagtggatttgaaatatatgttttagattcattaagtcatagtaaattaaactctttagaagcagttaatttaatattaagaaacaaaatactaaatatttcaaaaaaacttcatttttttaaaggggatttgagatataaggaatctatagattcaatttttaaaaaagcagaaatcaaagggaaacctataaatggagttatccattttgcgggactaaaatcagttgctgaatctgttcgtaatccacttacatattgggaaaataattttattggatcctttaatttactccaatctatgcaaggaa

SEQ ID NO: 289948 - DNA, 595 bp, Unknown
  Bacterial polypeptide expressing nucleotide sequence isolated from the Sargasso Sea
aatgaagatttttgtaactggctgttcaggttatattggaggcacttttagctacgaagctttaaaaaaaggccatatagtctatggccttgataattttgtaaattctaaaagggatgtaatagaaaaaatttcaagtgactttcaagataatttcttatttgagcaaatagatattgctactgatgctaaagatttggacaaatttcttatgaaaagtgatcctgacgttgttgtacatttcgctggcctaaaagcagtgggagaatctgaaaagcaaccacttgcatactgggagaataatttaatgggcaccttaaatctaataaaatctatgcaaaaaagtaaaacaaagagtattgttttttcctcttctgcaactgtttatggaaattctaaagtgcaacctgttgatgaagatagctatttaaacacaactagtacatatggcagcacaaaattatctattgaatatttattaaatgatgtttcacgaactggtgctcttaatgtaatttctttacgatatttcaatccggtaggcgcccataaagaaaaaataatttttgaagatccatttgatagccctaataat

SEQ ID NO: 289949 - DNA, 958 bp, Unknown
  Bacterial polypeptide expressing nucleotide sequence isolated from the Sargasso Sea
atgaaagttttagttacaggcggagcgggctatattggatcgcatgttgtgataggtctgtgcgagtctggtcatgaggttgtggtaattgataatctatcttcaggagaaaaaggtgcagtggattcccgagcaacatttattgagggttccattcaaaaaaaagaggatttaaatcaatgctttgaaggtgtggatactgtagtccatttggctgcgcttaaatctgtgaatggatcgatgcaatttcctcaaaaatattctgaaaataatattactggaaccctatccgtgctagagacaatgcatgaaaataatgtaaaacatattattttttcatccactgctgctgtttacggtgaaccagaatatctccctctagatgaaaaacatccacttaagcccgtaaatttttatggatatactaaattaagtgctgaaaatttgcttgaatggtataaagaattaatggggataagctacatttccctgagatattttaatgccgctggctatgatgcatctgggagaataaaatatcttgaaaaaaatccccagaatcttattccgattattatggaagttgccgcaggaaaaagagaaaaagttgatgtttttggtgatgattatgataccccagatggtacgggtataagagactatatccatgtatctgaccttgtcaaagcacatctaaatgccttggaattaattcaaactaaccaaagcgcgccaataaaccttggctctgatcaacagtactctgtaatggatgtcataaaaattgcagaaaagatttcagggaaagatattccatacaaaatcgtacagagaagaaagggtgatccagcaaaaatttatgcctccactgcatatgcaaagaaaatacttaattggtctgctgaacattcaagtttagagaatattattgaaacaacatggcgtatttacaaataat

SEQ ID NO: 289950 - DNA, 373 bp, Unknown
  Bacterial polypeptide expressing nucleotide sequence isolated from the Sargasso Sea
aaaaaagtttttaaagtatatggctcagattatgaaaccattgatggcacaggagtaagagattacattcatgtaaaagacctgtccagggctcatattttaagtttacaaaagattttaaatgataagaaaaatcatactcttaatataggaactggaaaggggtattcagttctagatttgataaaagcttttgaagcggttttaggagaaaagatacctcatgtatttgaagaaagaagagaaggggatgttgcagagtgctttacagagacttcattagctagagatgttattggttttcaagcagataaggatattaatgacatggtcagtagtgcattaaactttgcaaagaactattctgcgtaat

SEQ ID NO: 289951 - DNA, 655 bp, Unknown
  Bacterial polypeptide expressing nucleotide sequence isolated from the Sargasso Sea
cttgggattaaaaatcttattttttcctctacagctgcagtatatggatatccaaaaatatttacctatagatgaaagtcatgtattgaatccggttaattattatggttacactaaacttactgtcgaaaatataattcagtggtatgcgaaattagggaaattaaactatgtaatctttagatattttaatgctgcaggatatgatattaaaagtagaattaaatgtgttgaacaaaaccctgcaaatcttttacctgtaattatggaaacagcaaataaaacaagaaaaaaaatggaagtatatggggatacttatgacacttctgatggtacaggagtacgtgattatattcatgtgagtgatttagcaacagcacatgaaaaggcagttgattacttattggaaaataataataatttgatcactaatttggcgactggtgaaggatattcagtccttgagattataaatcgagtagaggatatattatcatgtaaaataaattatgatatagtaaataagagggaaggagatccttcaaaagtaatagcttcttcaaatattgcttatgataaacttgggtgggaacctaagttttcagatatagaaacaattttacaaagtatgtggaatatttataaagccttataa

SEQ ID NO: 289952 - DNA, 923 bp, Unknown
  Bacterial polypeptide expressing nucleotide sequence isolated from the Sargasso Sea
tgataattttataaattctaaaaaggatgtaatagaaaaaatatcaagtgaattccaagataatttcttatttgagcaaatagatattggtactgatgctaaagatttagaaaaatttcttataaaaagtgatcctgaagttgttgttcatttcgctgggctgaaagcagtgggagaatctgaaaagcaaccacttgcatactgggagaataatttaatgggcaccttaaatttaataaaatctatgcaaaaaagtaaaacaaagagtattgttttttcctcttctgcaactgtttatggcaattctaaagtgcaacctgttaatgaagatagctatttaagtacaactagcacatatggcagcacaaaattatctattgaatacttgttaaatgatgtttcacgaactggtgcacttaatgtaatttctttacgatattttaatccggtaggagcccataaagaaaaaataatttttgaagatccatttgatagccctaataatttgatgcctagaattgtaagagtagcacttggaattgataaggaaattggtatttttggttcagattattctacaaaagatggcaccggtgaaagagactatattcatatagaagacttagtacaaggacattttcatgcagtagaatatcttgaagattttaatggttttgctagttttaatttaggcacaggaaagaaggtatcagttttagatttaataaaaacatttgaagaatccaataaaattactattccttataagcttgaacaaagaagacagggcgatgtagaaatatgctatgcagatccatctaaatcaaatcaaatcttaaattggagagcaaagcgctccactactgaaatgtgcatcgatacttgggaagcaataaaaaaaaatataaatgaaattggataat

SEQ ID NO: 289953 - DNA, 745 bp, Unknown
  Bacterial polypeptide expressing nucleotide sequence isolated from the Sargasso Sea
atgaaaattcttttaactggaggagcgggttatataggtagccatgctgcaattgctttattagaggacggtcataaagtaactgttatagacaacttaagcactgggaataaaaagttaataccgccttcagctaattttgttaactgtaatattaatgatgttacgacaattagcgaaatattacaaaaggaaaaatttgatgcattaatgcattttgcaggctacatagaagtagaagagtctgtatccaatcctaaaaaatactttgataacaatactaaaaattcaaaaattctttttgatacttgtataaaaaataatcttaaaaatattattttttcttcgacagctgcagcatatggtaatccagttaactcagaacctatcaaagaaagtacagatttgaaacctataaatccttatggagaatcaaaaattcaatcagaattacatcttaaagaaaattcgcaatgtaattttattatattaagatatttcaatgttgcaggtgctgaccctaaaatgcgctctggattaataagtaaaaaggctacacatttaattaaaatagcaagcgaagttgcagtaggtaaaagaaaagatataacaatatttggaaatgattatccaacacctgatggaactgcaataagagattatatacatgtttctgatttggcagatgttcatgtaaaagctgttgaatatttggtgagtaaacaacaatcaaatattataaatt

SEQ ID NO: 289954 - DNA, 244 bp, Unknown
  Bacterial polypeptide expressing nucleotide sequence isolated from the Sargasso Sea
tttattgctcaaactgcggtaggtaaacgtgaggtggttaatatttttggtgacgactacgataccgaagatggtactggcgtgcgcgattacattcacgttttagatttagctaaaggccatgtagcggcatttatgcaacataaatcagataccgcctttcatgcatacaacttaggcacaggccaaggttattcagtgcttgatatgatcaacgcatttagcgcatcagcgggtaaagcta

SEQ ID NO: 289955 - DNA, 479 bp, Unknown
  Bacterial polypeptide expressing nucleotide sequence isolated from the Sargasso Sea
cattagtattgctagatattttaatccaataagcaatcattacacaggcttaatcaaagaaaatccaaaaggaataccaaataatcttcttccatttataataaaagttgctcagaaaaaattacctctactttatgtgtttggaaaaaactacaaaactaaagatggtacttgtgttagagattatattcatgttatggatcttgcaaatggtcatatttcaattttgaaaaatagagataaaaaatgtggatttaaagtttttaattttggtactggtaaaggctctacagtattagaggttatacaagcatttaaaaaacaaacaggaaaagaagttccttataaattcataggaagaagaaatggagatgttccatcaacaatatgtagtccaaaaaaagctttgaaagaattaaattggagagcaaaatataatcttaatcaagctatgatagatattaaaaaaataatataat

SEQ ID NO: 289956 - DNA, 739 bp, Unknown
  Bacterial polypeptide expressing nucleotide sequence isolated from the Sargasso Sea
catgaaaattattgtaactggaggcgcaggatttatcggttctcatacagtcgttgatttactagaaaatggttttgagccaataataatagacgattttagaaattctaaaccttttatacttgataatcttaaaaagattctaaaccgagattttaaatcttatgatattgattgtggagatgttgacaagttaagcgtggtatttaaaaaagaaaaacctgatggaataatccattttgctgctgacaaagcagttaacgagtctgttaataaccctttaaaatattatcacaacaacattactacactggtaaatattttaaaagtagttgagttataccctattaagtcttttgttttttcttcttcctgtacggtttatggggttccaaaaaacgtgcctgtttctgaaaaatctcccattcaacctgctttttctccttatggttttaccaagcaagttggggaacaattacttaaagattttgctctaacaaaccctaaaacagctatatcgttgttaaggtattttaaccctattggggctcatccctctggtttaattggtgaacttcctttgggtgttccaaataatttgataccttttattacacaaacagctataggaataagaaaatctttaacggtgaatgggaatgattatgaaactcctgacggaacctgcataagagattacattcatgttgttgatttagctagtgctcatgttttagcg

SEQ ID NO: 289957 - DNA, 573 bp, Unknown
  Bacterial polypeptide expressing nucleotide sequence isolated from the Sargasso Sea
tcaaaaatccatatgcagaatctaaagttaaaactgaaaaatttttaattgagaatcaaaattattttaaatttattattctaaggtattttaatgtggctggtgcagataaatatctacgttcaggacaaatatcaaaaaggtctacacatttaattaaaatactatcagaggtggttgttggtaaaagaaatcacattgaaatatatggaaatgattatgatactccagatggaacagctgtaagagattatattcatgtctctgatcttgctgatatacatgtagaggtggcaaaatatcttttagagaatttagagtctaatttatttaattgcggttatgggaatggctttagtgtcttagatgtagtaaatactgcaaacaaaatctatcaaaataaaatttcttataaattttctaatagaagaaatggagatgtggaaaaacttattgcagagacttcaaaaatattaaaatgtatagactggaagccaaaacacaatgatttaaaagaaattattaaatcatcaattaaatgggaagaaaagattaatgcctcaaatacataaa

SEQ ID NO: 289958 - DNA, 923 bp, Unknown
  Bacterial polypeptide expressing nucleotide sequence isolated from the Sargasso Sea
ttagtaaccggtggggctggctatgtaggtagtcacataatcgagcttttaataaagaaaaaaaataaagtttttatctacgataacttggttacaggctataaaaagttaataaacaaaaaagcaatatttattaaaggtgacattaaaaacttcaaacttttagctaaaactattaatgaaaatgatataaattccataattcatctagcaggatatctaaacatatctgaaggtcaaaaaaataaaaaaaaatattataaaaacaatgtcataggaactctaaatttagtaaaagcttgtaaaaattcaaatgttaaaaatataattttttcatcttcttgttcagtttatggaaatataaagggttcagtaagtgagaaaaagatacctaaacctaaaagttattatgcttttacaaagtataaaagtgaacaaatcataaaagaatatgaaaaagaatttaatttcaaatacggcattcttagatattttaatgttgcaggtgctagtcaatcaggaaatataggtgaaatagaaagatcttacggtcatcttattaaaaacttagctatacaatcaacaaaatcaaaacctaaagttgatatatttgggaataactacaacactaaagatggtacttgtattagagactacattcatgtgtctgatctagccgatatccatattcttgctttaaaaaaaatatctggtagcaaaaaatctttaattttaaattgtggttatggaaaaggatattctgttaaagaaattgtagaaatttttaaaaaaatcaaaaaaggggtagttgtaaaatatagaaaaaaaagaattggagatgttgcacaaatatattcagataattctaagctaaaaaaaatacttaaatggaaaccaaatttaacaatattcggactatatta

SEQ ID NO: 289959 - DNA, 569 bp, Unknown
  Bacterial polypeptide expressing nucleotide sequence isolated from the Sargasso Sea
tatgaaaattcttttaactggaggagcgggttatataggtagccatgctgcaattgctttattagaggacggtcataaagtaactgttatagacaacttaagcactgggaataaaaagttaataccgccttcagctaattttgttaactgtaatattaatgatgttacgacaattagcgaaatattacaaaaggaaaaatttgatgcattaatgcattttgcaggctacatagaagtagaagagtctgtatccaatcctaaaaaatactttgataacaatactaaaaattcaaaaattctttttgatacttgtataaaaaataatcttaaaaatattattttttcttcgacagctgcagcatatggcaatccagttaactcagaacctatcaaagaaaatacagatttgaaacctataaatccttatggagaatcaaaaattcaatcagaattacatcttaaagaaaattcgcaatgtaattttattatattaagatatttcaatgttgcaggtgccgaccctaaaatgcgctctggattaataagtaaaaaagctacacatttaatta

SEQ ID NO: 289960 - DNA, 670 bp, Unknown
  Bacterial polypeptide expressing nucleotide sequence isolated from the Sargasso Sea
atgtcgtgcaggatcctgatcactggaggcgccggtttcatcggcagtcacacctgcctggtgctgttggaaaagggccactcccttgtagtcgttgacaacttcgacaacagcagccctgaagccctacgtcgagttcagaagttggcggcgtccgatgcccttcagctggtggaaggggatctgcgcaaccctgaggtgctggatcgagccttccgctcgggcggcccagtggatggcgtgattcacttcgccgggctcaaagccgtgggtgaatcggtggccgacccgctgcgctactgggatgtgaacctcaacggcagtcgggtcctggcggcagccatggaacggcatggctgccgaacccttgtgttcagcagcacctccaccgtgtacggcgaaccggagcaatttcccttgcatgagggcatggccaccgcgccggtgcatccctatgcccagaccaaactcgccgtggagcagatgctgagagcactttgccgctccggcagctggcgggtggcctgcctgcgctacttcaacccggtaggtgcccaccccagcggccgcatcggggaggaccccctcggcattcccaacaacctgtttcccttcatcacccaggtggctgcaggacgcagggacaagctgcgggtcttcgggcaggact

SEQ ID NO: 289961 - DNA, 868 bp, Unknown
  Bacterial polypeptide expressing nucleotide sequence isolated from the Sargasso Sea
ttaattaatagaaaagctatatttcttaatgaagatattaaaaatttaaaaaaattaactaaaattataaattcatacaaaattgatacaataatacatctggctgcttatttaaatgttaatgaagctgaaacaaataaaaaaaaatattataaaaataatattgttggaactcaaaacttaataaaagcttgtaaaaattctacagttaaaaatctaatttactcatcaagctgttctgtttatggaaacataaagggagctgttagtgaaaaaaaaaaaccaaatcctcagggctattatgcatacacaaaatatgaaggtgaaaaaataattaaaaaatattcaaaaaaatttaaatataaatatgctatcttaagatattttaatgtagctggtgctagcccatcaaaaaaaattggacaaatagaaaaatctcatggccaattatttaaaaatattgctatacaatctttaaaaaaaaaaccaactattaatatctatggaaacgactattcaactttagacggaacatgtattagagattatattcatgtatcagaccttgctaatattcatattaaaactttggactatcttaataaaaaaaaaaaatctcttatattaaactgtggttatggaaaaggatattcagttttagatgttgttaatacttttaaaaaaattaaaaaaaattcaaaaataaaatttcaaaaaaggcgattaggagatatttctgaagtatacgcaaatacaagtaaaataaaaaaaattttaaggtggaaaccaaaatataaccagctactaaagattttaaaaagttcaattagctgggaaaaaactttacaaaattcttctaagtattaaa

SEQ ID NO: 289962 - DNA, 534 bp, Unknown
  Bacterial polypeptide expressing nucleotide sequence isolated from the Sargasso Sea
aatatcttctagataaccgtaataagtataattcaataatattaagatattttaatgttgctggtgctgatataaatcaaagaactggtcttatttcaaaaaatgcaactcatttaattaaaatattaagtgaagttgctgtaggaaaaagagaaaaaatacagatttttggaaatgattataatacgccagatggaacagctataagagactacattcatgttagtgatttatcagatatacatgtagaggttgcaaagcttctaaatgaaaaaaaaatatcacatatttttaattgtggttatggaattggctattctgtaaaagaggtaatagataaagctaatgagataactaatggttcgataaaatatgaatttattaatagacgttcaggtgatcctgagaaattagtttcaaatgttgataaaattcataaatttattaattggaaaccaaaatataataacttatctacaattattaaatcatctattgattgggaaaaaaaaataaatgaagaaaatctttaaa

SEQ ID NO: 289963 - DNA, 486 bp, Unknown
  Bacterial polypeptide expressing nucleotide sequence isolated from the Sargasso Sea
ttttaagatattttaatgttgcaggtgcagcaaattcagaaaagataggggaaattggtaatagaaatgatcgtttaataaaaaatttagcaattcaattttttaaagataaggcaaaaataaacatacatggaacaaattataaaactaaagatggaacatgtataagagattacattcatgtttcagatatagcagatattcacgaaatgtgcgttgattatcttaacaaaaatttaaaatcaaatacttttaattgtggttatgaaaaaggttattcagttttagagatatcaaatattttcaaaaagttaaaaaaaaatactattataaaatttggtaagagacggccaggtgatgttgggcaggttttcgcaaattcaagtaaatttaaaaaaatatttaaatggaaaccaaaatataatgatatcaaaaaaattttaaatagttcaattaaatgggaaaaaaaattaaatcatttgtaaa

SEQ ID NO: 289964 - DNA, 522 bp, Unknown
  Bacterial polypeptide expressing nucleotide sequence isolated from the Sargasso Sea
aaaatagcgatgatttgaaatttataatattaagatattttaatgttgctggagctgacagtaagttaagagcaggtcaaatatctaaaaaatctactcatttaattaaaaagctatctgaagttgttgtgggtaaggaaaaatcaattgaaatttacggtaatgattataacacaaatgatggaacagcagttagagattatatacatgtttctgacttagctgaaattcatgtttctgcagcagagtatttattgaaaacattaaaatcaaatatttttaattgtggatatggaaaaggttttagtgtcttggatgttgtaaatacaactaacaaaataagtaataattcagttaaatttaatttttcaaagagacgagatggtgatgttgaaaaattaattgctcaaacaaataaaatcaaaaaacatatagattggataccaaaatttaatgatttaacaaaaataattaaatcatcaattgattgggaaaaaaaaataaatgaaaaaaatttataaa

SEQ ID NO: 289965 - DNA, 655 bp, Unknown
  Bacterial polypeptide expressing nucleotide sequence isolated from the Sargasso Sea
atgaatgttctagtcaccggcggttgcggatatatcggcagccacacctgtctggccctgcaagcggcaggcatgaatcccgtggtggtcgacaacctcggcaacagcaagcgcagcgtgctggcccgagtcgccgccatcagcggccagcaaccccagttctatcaaggggatattcgcgatgccgccctgctggagcggatcttcgccgagcaacagatcgatgcagtgatccactttgccgccctcaaagcggtcggtgaatcgacccgcattccactggattactacgaaaacaacctcggcggcaccctcaccctgctgcaggcgatgaagcgggccaatgtgcacaatctggtgttcagctcctcggccaccgtctacggcgatcccgctagcctgccgatccgcgaggatttccctcgctgcgccaccaacccctacgggcgatccaagctgctcatcgaggagatcctcgaagatctgcagctggccgagccccactggagcatgaccctgctgcgctacttcaatccggtcggcgcccacgactcgggcactatgggtgaagacccgcaagggatccccaacaatctgatgccctatatcacccaggtggccatcggccgtcgcgactgcctgtcggtcttggaaa

SEQ ID NO: 289966 - DNA, 697 bp, Unknown
  Bacterial polypeptide expressing nucleotide sequence isolated from the Sargasso Sea
catgaatattttattatcaggcggcgcgggttacataggtagtaaccttgcttattttttattagataatggttgcaaagtaattatagttgatgatttatcttcaggttcattagatctggttcctaatgaggcacttttttataaaagtgatgtagatgatgaaaaagctatcaataaaatttttaatgcaaataaaattgatgcagtagtacatttggctggaaagatagtagtatctgaatctgttatcaatcctttaaaatattatttaaataatacagttaaaacaattaaattttttgaaatatgtgtaaaaaataatgttggaaactttattttttcgtcaactgcatctgtttatggaaaaaaaagtgagggcaaaatcaatgaagaatcaaaactaaatccaattaatccatatgcaaaatcaaaactattttgtgaagaaatgttaaatgatattgcaaaacaaaacaaaattaacatcgctattttaagatattttaatgtagctggcgcagattcaaagggtagagcaggtcagatatctaagccagcaactcatttaataaaagtaggttgtgaaactgctttaggtttaaggaaaagcataaatgtttttgggaatgattacaatacgcctgatgggacatgcatgagagattatatacatgtaacagattgtccgagcttc

SEQ ID NO: 289967 - DNA, 664 bp, Unknown
  Bacterial polypeptide expressing nucleotide sequence isolated from the Sargasso Sea
tatgaaaattcttttaacggggggagctggatatataggaagtcatgttttgctgtctattatagaaaataaacatgaggtaattgtaattgatgatctttcaacaggaaataaaaaacttattcctgagaatattaaattaattaatacaaatattaataattcagagaaaatttccaatttattagtggaagaaaattttgatctacttcttcattttgctggctttgtaaaggtagaagaatcagttcaaaaacctgataaatattttaaaaataatactgataacgccattgaactttttgaaacatgctacaagcataatttacaaaatatcatattctcttcaacagcagcggcttatggcaaccctagcaataatgaatcaataaaagaagatgagccgcttacccctctcaatccttatggagaatcaaaagttaaaacggaagaatatttattaaacaacaaagataaatttaactcgattatattacggtattttaatgttgctggtgccgatcctaaattaagatcaggtcttatttccaatacaccaacacacttatttaagattctaagtgaagttgccgtcggaaaaagagaaaaaatctccatatacggaaatgattataatactgaagatggaactgcaattagagat

SEQ ID NO: 289968 - DNA, 760 bp, Unknown
  Bacterial polypeptide expressing nucleotide sequence isolated from the Sargasso Sea
tatgagcagaaaatcagtcttagtcactggcggtgcgggatatattggcagccatgttgtctatagcctccttgaggccgggtatgccattactgtactcgacaacctatccaccggacgacgcgagattttgccgagagaggttgaattcatcgagggaaacgcaggcgaccagaggctcgttacagacctctgtagaaataacgaaatctcagcggttcttcattttgctggctccattgtcgcaccggagtccgtacggaaccccttgatatattatgaaaacaacacctccgtcagtcggaacctactgtccgcctgcactgaagcggacatccaaacgtttatcttttcatcgtccgccctagtgtatggcgaaccgtttactcttccattaaaggaaagtgcaccgaccacgccgacgacgccgtacggaagaaccaaactgatgaccgagtggatgcttgaggatacatcaaatgcaaccgggcttcagtatgctgctcttagatacttcaatgtcggcggcgcagatcctgcgggtagaaccggacaatgcagccccaatgcgactcaccttctgaaaatcgccggcgaagttgtgactgggaagagacccagcatagtcattaatggcgatgactatgataccccggatggcacctgcgttcgggattatatccatgtatcagatctggctgatgctcacgtcgagatcctgaagctgctggaaaaaaccgggcgaaaaccagatttataa

SEQ ID NO: 289969 - DNA, 806 bp, Unknown
  Bacterial polypeptide expressing nucleotide sequence isolated from the Sargasso Sea
cgttattgtcgataatcttgtaaattcttctaaaaaagtcttgtcccgaattgaacaaattacaggaacagcgccggtttttattgaagcagaccttcgggatacttcgacaatcatcgaaatatttagcgaccatccaattacttcagttgtccattttgctgggcttaaggcagtaggagagtcagtagaggaaccagttaaatattatgacaataatctcggctcaacgctcagcctgttagatgccatggcctcgtctaaggtgtcaacgctagttttctcatcttctgcaaccgtttattcaccctctgagattgcaccatttgatgaagcagcagaactcggcccgacaaacccctatgggatgtcaaagtactttatagagcaaatactttctgatgttgctttaggggatgatgagtggagcatcggtcttcttcgttacttcaatccgattggagctcacccaacagggttaattggagaaatgccaactggaattccaaataatcttgtgccatatatcatgcaggtcgcagttgaaaaactagagaaactcttcatcttcggcgatgattaccaaacgccggatggaacatgtattcgggactatattcatgtcgttgacctagcccgaggacatttggctgcacttcgatttttagaagatgcaaacggtagtcatgtatggaaccttggaacaggtcagggctcgtccgttcatgagctggtcaagatgatagaggaagtgatcggaaagcctattcctagagaagttgtgggaagacgaagcggggatattc

SEQ ID NO: 289970 - DNA, 625 bp, Unknown
  Bacterial polypeptide expressing nucleotide sequence isolated from the Sargasso Sea
ggttactgaagatagccctaaggtagaagcaaattctccttatggaaataccaaatgtatttcagaagaaataatttctgattttgcaaattcatggccgtcattaaaagcaattaatttaagatattttaatccagttggagctcatccttcaggttttattggagaattccctattggaaagccaaataacttactcccttatctaactcaaacggctattggtaggcttgaaagcttaacagtatttggcaatgattaccctacaaaagatgggacatgtattagagattacattcatgttgtggatcttgcaaatgctcacgtaaaagccatttcgtttttgggtaatcaagctcattcatgttgtgaggttgttaatgttggtacaggaaaaggaacaagtgtattggagctaatcaatttatttgtgtcaaaaacaggacaagatctaaactggagctatggcccaagaagaagtggtgatgtaacagaaatatttgcaaacgtttctaaagcaaaaaaaacattgtcttggaaagccacatattcaatagcagatgcattagaacatgcctggcagtgggaaaagaatattaataaacgcatcaatcatgtcaattaa

SEQ ID NO: 289971 - DNA, 713 bp, Unknown
  Bacterial polypeptide expressing nucleotide sequence isolated from the Sargasso Sea
aatgaaaatattgcttacagggggagccggatatattggaagtcatgttagtttggagctgcttgataaaggtcatcaggtatcaatcatagataatctagttaatggttcaaaaaaattattacctgtaaaagctgattttttagaatgtgatattgaagatgaaaaaaaaatatcaaattttttaaaaaataataaatttgacctggttatgcattttgcaggttacacaagagttggggagtctactaaatatcctgaaaaatattatgaaaataattttgaaaaaccaaaaaagttttttgatgtatgtatagaaaacaagttaaataaattcattttttcatcaactggttcagtttatggtaatgtgtcaattcaaacaaatattccagagaattataaaaaaaatccattaaacccttactcggactcaaaatataagttagagaatcatttaatttctttatctaatcaaaataaaatttctgcaacaattcttcgatattttaatgttgctggtgcagataaaaaaaacagatcaggattaattactaaccctgataatttaattaaagcaatatgcgaggttgctacagggaaacgcaaggaactgattgttaatggaaatgattacaaaacaaaagatggcactactataagagattatattcatgtatctgatttagctgaaatgcatgttttggccgctg

SEQ ID NO: 289972 - DNA, 624 bp, Unknown
  Bacterial polypeptide expressing nucleotide sequence isolated from the Sargasso Sea
atggagattatggtttaaattctattcctgaagaagcaacaataaaaccaataaatccatatggtcaaacaaaatatacagtagaaaaaattcttgaaaacttattttctagcgaaagcaaagaatggagaattgcaaatttaagatatttcaatcctgttggtgctcatccatcgggactaattggagaaaagccaaagggtaagccaaataatttacttcctataataataaaagtcgcaacaaacaatcaaaaagttttaaaagtatttggtaatgactggcccacgcatgatggaacatgcataagagattatattcatgttatggatttagcagatggccacttagccgcattattaaatttgataaaaggcgaaccaaaaataattaacttaaatttaggtacaggtatcggaacgtcagttttggaaattataaaaattttcgaagaagtaaacaaatgcaagttgccatatgagatagttggcagaagagatggagatgttgcttctcttgtcgctgattcaagaaaagctaaaaagtatctcgaatggaccccacaaaaaactttagaagatgtttgtatagacagttttaaatggattaacttgaataaataac

SEQ ID NO: 289973 - DNA, 448 bp, Unknown
  Bacterial polypeptide expressing nucleotide sequence isolated from the Sargasso Sea
agaaaacccgctgggcatccccaacaacctttttccctatgtgagtcaggtggccgttggccgcagagatcagctgcaggtgttcggcggagactggcccactcccgacgggacgggggtacgggattacatccacgtaatggatctcgccgaagggcaccgtgctgccctggactgcctgctggcggaagcccctcagctgctcaccctcaaccttggcagcggccagggaaagtccgtcctggaggttgtgcaagccatggaagctgccagcggtcgttccattccctatgcgatcaccgaccgtcggcctggcgatgccgccatcagcgtcgccgatcccactaaggcctctgagcacctgggctggcgcacccagcgaagccttgaagacatctgccgagacggctgggcctggcagcagaaaaaccctcgggggtacagctaa

SEQ ID NO: 289974 - DNA, 868 bp, Unknown
  Bacterial polypeptide expressing nucleotide sequence isolated from the Sargasso Sea
aatgaatattttaattactggtggtgctggatacattggaagccatactgcgctctcactaattgatagaggctattcagtttcaattatagacaatttaataacaggtaaaaagagacttattccaaaaaaagcaaagtattttaattttgatataggtaacaaagaggaaataacaagtctattaaataaaaatacgttcgacatagttattcattttgctggtttaataaaagtagacgagtcagtaagatatcctgaaaaatactattttaacaattttgagaaatcaaaaattttttttgattgttgttttgaaaataaaataaaaaaaattattttctcttcaactgcaggagtttatggaaataataattctacaaatataaaagagtcagataatttattgcctttaaacccttatgctgagtcaaaacttaaaattgaaacatttttaattgaaaattcaaaaaaaaaaggaatttcatacacaattttaagatattttaatgtagctggagcagataaagaaaaaagatctggattaatttccgacagttcaacaaatttaatcaaaatcctttgtgaagttgcaacaaataaaaaaaaagaaataataataaatggcaatgattatgaaactaaagatggaactgctgttagagacttcattcatgtttctgatgtcgctgagatgcattcaattgtagctgaatacctttataaaaataataaatctggaatttataattgtggttatggcagaggcttttctgttaaagaggtcataaaagaaatggaaaatatagttgaaagaaaactaaatgttcaaataggaccaagaagagaaaaagatattcctttttct

SEQ ID NO: 289975 - DNA, 709 bp, Unknown
  Bacterial polypeptide expressing nucleotide sequence isolated from the Sargasso Sea
gatggcatccctgctgatcacaggcggtgctggcttcatcggcagccacacgctgctggtgctgctggacgctggccacgagctggtggtgctcgacaactttgccaacagttcacccatctccttggatcgggttttggaactggcgtcccctgatgccgccggccgtttgcaccgtgtggagggcgatgttcgctcggcagcggatttggaccgggctttcactgcgcctgctgctccgatcacaggtgtggtgcatttcgccggccgcaaagcggtgcgggagtcagtggagaacccactgctgtattgggatgtgaatctgggaggtacacgggcgctggcggaggcgatgggccgccatggttgtgatctggtggtgttcagcagcacagccacggtctacggcgagccggatgcgtttccgctcactgaattgatgccaacgccgcccgtgcatccctacgcccaaacaaagctggctgctgagcagatgttggcggctcttgtgcagagccagggctggagggtggcctcgctgcgttacttcaatcctgtaggagcccatcccagtggtcgcattggtgaagaccccactggaatccccaacaacctcttcccgtacatcacccaggtcgcggccgggcgattggagcggctacgggtgtttggggatgactaccccacccgcgatggcagtggagagcgc

SEQ ID NO: 289976 - DNA, 874 bp, Unknown
  Bacterial polypeptide expressing nucleotide sequence isolated from the Sargasso Sea
gaggcgcgtggaggagataacgtctcggtcgatatcgtttgttcagggggatattcgtaatagggatgcgttgcgtaatgcaatggaagggtgtcaagcagtgattcattttgcagggctaaaggcggtaggggagtctgtggcgtttccgttgatgtattatgagactaacgtgtatggcacggtgtgcttgcttcaggtgatgcaggagttgggggttcgttcgcttgtagttagttcgtctgcaacggtgtatggggatccggtaacattgccgttaacagaggatcatccgtgtttgcctgagaatccctatggatggacaaagtatgatatagagacaatgtgccgatcattggcggtatctgatccggagtggcatatggtgttgttgcgttactttaaccctgttggggctcatgagagtggacgtattggggaggatccgtgtgggactccgaataatttaatgccttttgtgtcgcaggtagcagtaggtcgacgtgaggtgttatctgtatttgggaatgattatgatacggttgatgggacgggggtgagggattatgtgcatgtggttgatttggctaaaggacatgtggcggcgttggagagggtgggtaattttcagtgtgacgtgattaatgtggggacaggaaaggggtatagtgtgttggatgttgttcatgcatttgagaaggtgtctcagaaacaggttccttatgtgattaaatcgcgacgggatggggatgtcgcaacgtgttatgctagtgtggataaggcggagaaagtgttggggtggaaggctgagtatgggttggaacgaatgtgtgaggattgttggcgatggcaggttgagaacccccatgggtat

SEQ ID NO: 289977 - DNA, 580 bp, Unknown
  Bacterial polypeptide expressing nucleotide sequence isolated from the Sargasso Sea
tatgaaaattctcttaaccggtggtgcaggttatataggaagtcataccgctttgtctcttattgatggcggtcattctgtaacaattatagacaatttaattacaggaacaaaaaaacttcttccaccccaagcagaatatcacgagtgcgatatggcagataaaaaatctatagaaaatattttaaaaaaaaataaatttgatatcatcatgcattttgcagggcttacaagagttgatgagtcagtaaagtatccagaaaaatatgaacttaataattttgaaaaatcaaaaactttttttaattgttgttttgacaataatattaaaaaaattattttttcctcaacagcaggagtatatggagactcaacttcagaatatgtgaaagaaactgacgcactaattcccatgaatccttacgcagagtcaaaacttaaaattgaaaaatttttgattgaaaattcaaaaagtcaaaagttaaactacactattctcagatattttaatgttgctggtgccgataataaaaaaagatctggccttatatcaagatcctcaactaatctaataaaaatt

SEQ ID NO: 289978 - DNA, 496 bp, Unknown
  Bacterial polypeptide expressing nucleotide sequence isolated from the Sargasso Sea
atgactattttagtaaccggtggcgcaggctatattggctcgcataccgttttagaacttttgcaacaaggaagtgatgttgttgttatagataatttagcaaattcatcgcaagagtctctggctcgcgttaaacaaattacgggaaaagaagtaactttttatcaaggtgacatactcgataaagcttttttagattcagtatttgcaaagcatacggttaacagcgttattcattttgcaggcttaaagtcggttggcgaatcggttgctaaaccagtagagtattaccaaaataatgtgcaaggcacgttaaccttagttgatgctatgcgagatgcgggcgtatttaagttagtatttagctcatctgccaccgtttatggcgaccctgcaagcttaccaatcaaagaagacttccctgtaggcggtactaccaacccttatggcacatctaagttaatggttgaaatgatgctccaaggatatcgctaaa

SEQ ID NO: 289979 - DNA, 619 bp, Unknown
  Bacterial polypeptide expressing nucleotide sequence isolated from the Sargasso Sea
atgaattttcttttaactgggggcgcaggatatatcggaagtcatgcagcgctttctcttctagatgctggtcatagtgttcatattattgatgatttatctactggaaacgaaagtcttattcctaaaagtgcattatttacaaaatgtaatattaataatgaagaagtaatttcgaagcttatacaattaaacaactttgatgttttaatgcattttgctggttttattcaagttgaggaatcagtgaaatatcctcaaaaatattttgacaataatactgaaaatgcaactaaactatttgaaacttgtaaaagtaatggattaaataaaatagtgttttcttcaacagctgctgcatacggagcagtaaatgaaaataaattaatagatgaaaatacaaatttaaatcctcaaaatccatatgctgaatctaaaataaaaacagaaaattttttatttgaaaataagaatgactacaaatttataatattacgatacttcaacgttgctggtgcagataaaaaattaagagcaggacaaatatctaaaagatcgacacatttaattaaaattttatctgaagttgttgtaggtaaaagagatcatattgaaatat

SEQ ID NO: 289980 - DNA, 577 bp, Unknown
  Bacterial polypeptide expressing nucleotide sequence isolated from the Sargasso Sea
aaacctcttaatccttacggtctatcaaaaattaatactgaaaaatatttacttaaaaataagcacaagattaattctgtaatacttagatattttaatgttgctggggctgatcctgatttaagatcaggcttaatttcagatgaaccaacacacttaatcaagattttgagtgaagtcgcaattggaaaaagagaaaaaatattcatatacggtaatgattatgaaacaaaagatggaacagctattagagattatattcatgttagtgatttagccgatatacatttagaagtagcaaaacacttattagataaaaatcaaagtaatatatttaattgtggctatggaaaaggatactctgtcttagaagttattaatgctgcaaataaaatcacaaataataaaattaaatttgaatatacaaatagaagagctggagatgcagaaaaattagtttcaaatgttgctaaacttcataagcacatcaattgggaacctaaatttaataatctagattttattattcaaacagctataaattgggaaaaaaaaattaatgaaaaaaatttataaa

SEQ ID NO: 289981 - DNA, 513 bp, Unknown
  Bacterial polypeptide expressing nucleotide sequence isolated from the Sargasso Sea
aaaaatttaattacaaatatggcttacttagatattttaacgtagcgggagcaagtagctctggaaaaattggacaaattgaaaaatctcatggtcaacttataaaaaatttagctattcaatcactaaaaagaaatcctgtaataagtatttatggaaacgattatccaactaaagatggtacatgtataagagattatatacatgttgttgatctagcaaatatacatattctagcaatgaattatttaaataaagttaaaaaatcatttatcgttaattgtggatatggcaaaggttactccgttaaacaaatagttaatatttttaaaaaaaataaaaaaaatttaactataagatatgataaaagaagacccggtgatattgctcaagtttattcaaatacaaaaaaatttcaaaatttatttaaatggaaacctaaacataataatattaataaaataattaaaagtgcaattaattgggaaaagaaaatttctactgttaaataat

SEQ ID NO: 289982 - DNA, 726 bp, Unknown
  Bacterial polypeptide expressing nucleotide sequence isolated from the Sargasso Sea
agaaatattttgaaaacaatactgataattccataaagctttttaatatttgcaaagaaaatggtttaactaagataattttttcatctactgcagcagcttatgggttagtaactgaaaataaattaatagatgagtatactaatttaaatccacaaaatccatatgctgaatctaaaataaaaacagaaaaatttttatttgataatgaagatagttttcagtttattatcttaagatactttaatgttgcaggagctgataaaaaactaagatctggacaaatttcaaaaaaatcaactcatttaattaaaaaaatatcagaagttgtagtaggaaaaagagatcaaataaaaatatttggcaacgattataatactcatgatgggactgccataagagattatatccatgtatcagatcttgctgatatacacctaaaagtagcgaaatatcttttaaaaaatttagaatcaaatttatttaattgtggttatggaaatggatttagcgtcttagatgttgtaaatactacaaacagcatctatcaaaataaaattatttataagttctccaataggagagagggagatgttgaaaaattaatttcagatacttctaaattattaaaatatataaaatggcaacccaaatacaatgaccttaaaaaaataattaattcatcaataaaatgggaagaaaaaattaatgcgtcagatacataaa

SEQ ID NO: 289983 - DNA, 508 bp, Unknown
  Bacterial polypeptide expressing nucleotide sequence isolated from the Sargasso Sea
caaaaatttaactataaatatggaattctaagatattttaatgtagctggtgcaagtaaatcaggtaaaattggtgaaatagaaacgtcccatggtcatttaataaaaaatatagctattcaatctcagaaattaaaatcaaaaatcaatatttatgggaatgattatgatacgaatgatgggacatgtgtaagagattatatccatgtatctgatttagcagatgttcatttaaaaattttacaaaatatttcaataaaaagaaaatctataatattaaattgtggttatggaaaaggttactcagttcaagaaatagtggatattttcaaaaagataaaaaaaaatattataattagatataaaaaaaggagacctggagatgtggctcaaatctacgctaatacttataaaattaggaaagttttaaaatggaaaccaaaatttaataatattagaacaatcttaaatagcgcaattaaatgggaaaaaaaattaactaaataaa

SEQ ID NO: 289984 - DNA, 807 bp, Unknown
  Bacterial polypeptide expressing nucleotide sequence isolated from the Sargasso Sea
attaattgataaaggatacagagtaacaattatagatagtctaataacgggaaatttatcacttgtacctagcaaagctacattagtggtttgtgacatttctgataaaattaaggtttcaaaaattttaaaaaaaaaaaattttgcagctgttctgcatttcgctggattaataagagtagatgagtctgttaaaaaaccaatgaaatatcataattacaattttaagaaagctaaaattttttttgacacttgtttaaagtataatgtaaacaaaataattttttcttcaacagcatctgtttatggtaatacaaataataaaaatgtaaaagaggtagacaaattattgcccattaatccatatgcatcttcaaaactaaaattcgaaaagtatttattaaaaaaatcaaatataaaaaaaatgtcatatattattttaagatactttaatgtagctggagctgataaaaaattaagaactggtttgatctccaagtattctacgcacttaataaaagtagcatgtgaagttgcaacaaagaaaagaaaaaaaattattattaatggcaacaattataatactaaagatggaacacctattagagattatattcacgtatctgacttgtcagaaatacatctaatttcattaaatcatttgttaaaaggaggaaaatctgaaatttttaattgtggttatggaaaagggtattctgtaaaagaagtaataaatgaaatgaatagaattttaaaaaaaaaaattatttctgaggtagggccaagaagaaaaggtgatagtcaaaa

SEQ ID NO: 289985 - DNA, 757 bp, Unknown
  Bacterial polypeptide expressing nucleotide sequence isolated from the Sargasso Sea
atgaaagttttggttacaggcggtatgggctatataggcagtcatagctgtatcgctttatatgaagcaggcattacaccagtgatttttgacaacttggtcaactccagtgtcaaagttctggagcaactaaaaaaaatcaccgggaccagcattgaatttatcgaaggggatgtatcggatgccgtcgctcttgagcaggctttacgtcaaaccaatgccagcgcagtactgcattttgctgcactaaaagccgtaggtgagtcaacagaacagccactgcgttactatcagaataatgtcgctgcaactctcacgctgttagaggcaatgcaaaaagtgggagtgaataaaattatttttagttcatctgctactgtttatggcgatccacagtacctgccttttgatgagcagcatcctcttcgtgccaccagcccttatggctggagcaaaattatggcagaacaagtagtaaacgatctctgctgtgctgccagtgactttcttgctgtgtcattacgctactttaatccggtcggtgctcacccgtccggtcttctgggtgagagtccccaaggaacacccaacaatctattaccttttattgctcaaaccgcggtgggtcgccggccttttgttaaggtgtacggctcagattaccccactccagacggctcaggggtgcgggattatcttaacgtcatggatttagcaaaaggccatgtcgccgctttattcaccatcaggcagataa

SEQ ID NO: 289986 - DNA, 907 bp, Unknown
  Bacterial polypeptide expressing nucleotide sequence isolated from the Sargasso Sea
ccacgcagctttgtcattacttgatgacggtcataaagttcatattattgataacttgtcgactggaaatgaaatgttaattccaaaaagtgcaaaatttactaattgtaatattaataatgaagaattaatttctaatcttatacaatctaataattttgatttacttatgcattttgcaggttttatacaagttgaagaatcagttaagcagcctgagaaatattttgaaaacaatactaataatgcaataaaactttttaatatttgcaaaaaaaatagtttaactaaaatagttttttcatctactgcagcagcttatgggttagtaggtgaagataaattaattgatgagcatactagtttaaatccacagaatccatatgcggaatctaaaattaaaactgaaaaatttttgtttaataataaagataactttcagtttattattttaagatactttaatgttgctggagccgataaaaaactaagatcgggacagatttcaaaaaaatcaactcatttaattaaaaaaatatcagaagttgtagtaggaaaaagagatcaaattgaaatatttggcaataattataatactcctgatgggactgccattagggattacatccatgtatcagatcttgctgatatacacttagaagtagcaaaatatcttttaaaaaatttagaatcaaatttatttaattgtggttatggaaatggatttagtgttttagatgttgtaaaaactacaaacagcatctatcaaaataaagttacttataaattttctagtaggagagaaggggatgttgaaaaattagttgcagatacctccaaattattaaattattttaaatggcaaccaaaatataatgatcttagagaaataattaattcatcgata

SEQ ID NO: 289987 - DNA, 610 bp, Unknown
  Bacterial polypeptide expressing nucleotide sequence isolated from the Sargasso Sea
tatgaaaattcttttaactgggggagctggttatataggaagccatgctagcctggctttgttagatcaaggacataaagttacaattattgataatttatctacaggtaacagcgaactaattccttctgctgctagctttataaaatgtgatattgaagatgtttctaaagtaagcaagctaataaaaaaaaattcttttgatgttttaattcattttgctggatttgttcaagttgaagaatcagtaaaaaatccaaaaaaatattttcttaataatactgaaaattcaaaaatactatttaatacttgcttacaaaataatttaaaaaatataattttttcttcaacagcagcggtttacggtaacccccccaatgataaacccattaaagaaaatattttgttaaatcctttaaatccttacggtgaatcaaaaattcaaactgaaaactatttacaaaataatttagattttaattatataatacttcgatattttaatgtagctggagctgacccaaaaatgcgttcaggcttaataagcaaaaatgctacacatttaataaaaattgcaagtgaggtcgctgttgggattaaaaggaaataa

SEQ ID NO: 289988 - DNA, 760 bp, Unknown
  Bacterial polypeptide expressing nucleotide sequence isolated from the Sargasso Sea
atgaaaaatatactaattacaggaggatgtggttttattggaagccatacctgtttgtcacttttagagcaggattttaacttaattgtttttgattctaatatcaatagcaaaagtatagttattagaaaaataattgaaattggcaaacttaagaagaaagaatttgatgatagattgtcttttataaatggtgatataagagatttttctgttcttgaaaatgtttttttgaattcaattaataataaaaaacctatcgacgctgtaatacattttgcaggtttaaaatctgttgaagaatctgttaaagatcctttgctttattgggataataatttatctggctcaataaccttattgaaggttatgcaaaaatttgattgtaaaaatattgtttttagtagtagtgcaacagtatatggagttacaagtcagcttattactgaaaatgctgagattaaaccttttaatacttatggcagaacaaaatttgctattgaaacaatactaagagaattatatgaaagttcatctaataagtggagaattgccaatttaagatactttaatccaataggcgctcacgaaacaggtcttataggtgagaacccttcaaatcttcccaataatttattcccttacatctgtaaagtcgcaaatcgaaacttggaaaaattaaatatttttggaaatgactggaatactttagatgggacatgtattagagattatatacatgttatggatttagcagagg

SEQ ID NO: 289989 - DNA, 874 bp, Unknown
  Bacterial polypeptide expressing nucleotide sequence isolated from the Sargasso Sea
ctgatgaatacctcaacgccagacattctcgtggttggcggggccggatacataggttcgcatgtggtcaaagcccttcgcgacgcaggcagacaaccggttgtctttgacaacctgagtactggtctcagggaaaaccttttcccggaaattccattcatccatggagaccttctcattccggaacaggttcgtgccgccatgagaggcatccgttccgtggtccacctcgccgccctgaaagccgctggtgattcgatgctcgagccggaacgctacgcgcttcacaatttaaacggaaccgtcaatctgctccatgccgccggaactgcaggagtccgccattttgttttttcctccagtgctgcagtctatggagaaccgcagtacctgcctttggacgaaaaccacccaactgaacctgccaatttttacggacagacgaagctgcaaatcgagatgcttctgtcctggttcagcagattaaggaacatgcgttatgcaggcttgcgttatttcaatgctgcaggctatgaccccgatggagaagtgcggggactggagaaggaacccaataatctactgcctctggtgctcgaaaccctgctcggttggcgtgaaaaccttgaagtctatggaaccgattacgatactgaagatggaagctgcatccgggattacatccacgtcagtgacctggccgacgcacacattcgtgcattgaattttcttgaagaacaagacgaggatcttgtcgtaaacttaggcacatccaagggaatcagtgttctcgaaattatggatgcggccagaaaagtttccgggatggacctgccggtgattctcagtgatcggaggccgggagacccggctg

SEQ ID NO: 289990 - DNA, 851 bp, Unknown
  Bacterial polypeptide expressing nucleotide sequence isolated from the Sargasso Sea
aaattttactaattgtaatattaataatgaagaagtaatttctaatcttatacaatctaataattttgatttactcatgcattttgcaggttttatacaagttgaagaatcagttaaggtacctgagaaatattttgaaaacaatactaataatgcaataaaactttttaatatttgtaaaaaaaatggtttaactaaaataattttttcatctactgcagcagcttatggtttagttagtgaaaataaattaatagatgagcatactaatttaaatccacaaaatccatatgctgaatctaaaattaaaacagaaaaatttttgtttgataataaagataactttcagtttattattttaagatactttaatgttgctggggcagataaaaacctaagatctggacaaatttcaaaaaaatcaactcatttaatcaaaaaaatatcagaagttgtggtaggaaaaagaaatcaaattgaaatatttggcaataattataatactcctgatggaacagctgttagggattacatccatgtatcagatctagctgatatacacgtagaaatagcaaaatatcttttaaaaaatttagaatctaatttatttaattgtggttatggaaatggatttagtgtcttagatgttgtagaaactacaaacagcatctatcaaaataagataacttataaattttcgaatagaagagaaggagatgttgaaaaattaatcgcagatacttctaaattattaaatcatattaaatggcaaccaaaatataatgatcttagagaaataattaattcatcgataaggtgggaagaaaaaattaatgcatcaaatatataaa

SEQ ID NO: 289991 - DNA, 613 bp, Unknown
  Bacterial polypeptide expressing nucleotide sequence isolated from the Sargasso Sea
ccggtcagggaaacgacgccgcagcggccgatcaacccctacggcatgtcgaagctgatgaccgaatatatgctgcgcgacgtcgccgccgcccacgccatgaacttctgcgcgctgcgctatttcaacgtcgccggcgccgatccgcagggccgcaccggccagtcgacggccggcgccacccatctgatcaaggtcgcggtcgaggcggcgctgggcaagcgcagccatgtcagcgtcttcggcaccgatttcgccacgcccgacggcaccggcgtgcgcgactatatccatgtcagcgatctcgccgccgcccatgtgctggcgctcgaagcgctgatcgcccaccccgatcgcaattacatgctcaattgcggctatggccggggcttctccgtgctcgaagtgctggacgcggtcgaccgggtcacgaacatgatgatcgagcgccggttggaagggcgccgcgcgggcgatcccgacgcgctgatttccgacaatagcgcgctgatggcggaatttccctggcagccgcgctatgccgacctcggccagatcgtcgaccatgcgctcgcctgggaacgcaagctcagcgatatccagaaggcatgag

SEQ ID NO: 289992 - DNA, 919 bp, Unknown
  Bacterial polypeptide expressing nucleotide sequence isolated from the Sargasso Sea
atgaattttcttttaactggaggtgctggatacattggaagtcatgcagctctctgtctgttagatgctggtcataatgttcatattatcgataatttatctacaggagatgaaaagttaattcctaaagaggcagaattcacaaaatgtaatattgatgatgaagaaaatatttcaagtattttaaattcaaataactttgacgtactaatgcactttgcaggttttatacaagtagaagagtctgtaaaatttcctgaaaagtattttaaaaataatacagagaatgcaattaaactttttaaaatttgtaagaaaaatggtttggataaaatagtattttcatcaactgccgctgcatacggattagtaaaggaaaataaattaatagatgaaagtacaaatttaaatcctcaaaatccttacgctcagtcaaagatcgagactgaaaaatttttatttgaaaataaaaataattttaaatttattatattaagatactttaatgttgctggagcagataaaaatttaagatctgggcaaatttcaaagcgatctactcatttaattaaaatattatccgaggttgctattgggaaaagagatcacatcgaaatttatggtaatgattataatactccagatggaacagccataagagattatatacacgtctcagatcttgctgatattcatctagaagtagctaaatatctaatagaaaaaaaagaatctaatttgtttaattgtggttatggaaatggattcagtgttttagatgttgtaaacactgcaaataaaatctgtcagaataaaattaagtataaattttctgaaaggagagacggagacgttgaaaaattaattgctgaaacttcaaaaatatcaaagcatattcaatggcagcctaaatataatg

SEQ ID NO: 289993 - DNA, 589 bp, Unknown
  Bacterial polypeptide expressing nucleotide sequence isolated from the Sargasso Sea
tgccatatctaagataaaagtagaggagcatctaagaggaaattttcatgaatatccaaattggaggattattttattgagatacttcaatcccattggtgcacataaatctggccttttaggcgataatccaaatgataaacccaataatctcatgccatttattctaaaagtagcatctatggaagaggaatatctagaagtctttggcaatgattatgaaacaaaagatggaacaggtgtgagggattatatccatgtttctgacctatccgatgcacatgtttctagtctcaattatttactatcttcagatgagaagagtggattttgccatgctttgaatataggtacaggtaggggatattcggtcttggaaataattgaggcatttgaaaagatcaataataaaaatattccctataaggttgttgatagaaggccaggcgacatttcacaatcgttcacagatactgagctatcgcaacgaatgcttaagtggtcagcaaagaaagatttaaatgatatgtgcaaggatagttggaagtggaaacagtctgaaatgaaaaggaaaaaatatgaatcctga

SEQ ID NO: 289994 - DNA, 979 bp, Unknown
  Bacterial polypeptide expressing nucleotide sequence isolated from the Sargasso Sea
ttgattacgggtggcgctggttatataggaagccacattgctgaacagctggtaaacacaaaaaataatataattattctcgataacttagtaactggatataagagattaataaataaaaaaacaaaatttttgaaaatggatttaaaaaataaaaaattgttaaataaaataatttatgaaaacaaaatcgatacaataattcatttggcagcatatcttaatgttagtgaggcagaaaataatagaaaaaagtattataaaaacaatattattggtactaaaaacttaatagaagcttgtaaaaattctagtgtaaataatattattttttcttcctcttgttcaatttatggaaatgttaaaggagcagtaagtgaggaaaaaaaaccaaatccactggggtattatgcttacacaaaatataaaggtgaaaatctcataaaaaaatattcaaaaaaaattggctacaaatattcaatcctaagatattttaatgttgcaggagcaagcccttcaaataaaatcggtgagatagaaaaatcacatgatcatctttttaaaaatatttctattcaagcactgaaaaaaaaaccagtggttcgaatatatggtaataattacaatactaaagacggcacatgtatcagggattttattcatgtctcagacttagcagacattcatgttaagtgtattaattacttatgcaaaaaaaaaaaatctatcacccttaactgcggttatggaataggatattcagttcaagagatagtcaatatttttaaaaagattaaaaaaaattgtaaagttgtttatgaaaaaagaagggcaggagatgttgaccaagtttactctaacataaaaaaattcaagaaaacttttaaatggaaacccaaacataatgatattaaaaaaattcttttaagctcaattaaatgggaaagaaaattaaaaaaaaataatgttaaaagataaa

SEQ ID NO: 289995 - DNA, 626 bp, Unknown
  Bacterial polypeptide expressing nucleotide sequence isolated from the Sargasso Sea
aatgaatgttttattaacaggtggtgccggctatattggaagtcatgctgcgctttctctattagatgcaggtcatgatgtccatattatagataacttatcgacaggaaatgaaactcttattcctaaaaatgctaaattcacaaactgcaatatcaataatgacattgcaatctctaatcttatacaatcaaacaaatttgatttgctcatgcattttgcaggatttatacaagttgaagaatcagttaaaaatcctgaaaagtattttgaaaacaatacaaataatgcaattaaactttttaagatttgtaaaaaaaataatttaaataaaatagttttttcttctactgcagcagcttatggttcagtaagtaaagataaaccaatagatgaaaatacaaatttaaatccacaaaatccatatgcggaatcaaaaattaagactgaaaattttttacttgaaaataaaaatgaatttaacttcattatattaagatacttcaatgtagctggcgctgataaaaatttacgatctgggcaaatatctaatagatctacacatttaattaaagtattatcagaggttgttgtaggaagaagagatcatattgaaatttatggaa

SEQ ID NO: 289996 - DNA, 603 bp, Unknown
  Bacterial polypeptide expressing nucleotide sequence isolated from the Sargasso Sea
aatgaatattttattaacaggtggagctggttatattggaagccatgtagcaataagtttacttgatgctggatataaagttacaattattgacgacctaagtactggacatcaagagctaattccaaaagaagcaaattttatagaagcaaatatcaataataaaaagatacttaaaagtactttaattaaaaataaatttgatgtcctaatgcattttgctgggtatattgaagtagaagaatctgtaaaaaatccaaaaaaatattttataaataatacagataatgcaaaagttttatttgatatctgtactaaacacaacttacagaatattattttttcatctactgctgctgcttatggtaatcctgaacaaaaagatttaataaaagaaaactctatacttaagccattaaatccatatggtaagtcaaaagtagaaacagaaaagtatttacaaaataactcaaattttaattatattattctaagatattttaatgttgctggcgcagatcctcttatgcgatgcggattaataagcaaaaatccaactcatttaattaaaattactagtgaagcagcaactagaaaagggga

SEQ ID NO: 289997 - DNA, 667 bp, Unknown
  Bacterial polypeptide expressing nucleotide sequence isolated from the Sargasso Sea
tatgaatattcttctaactggtggcgcaggttatatcggaagccataccgctctttcgttaattgaaaatggtcatatggtaactgtaatagataatttaattacagggacaaaaagattaattccacctaaagcaaaatattataattgtgatattgcagacagtagttcaatcaaaaaaattttaaaagaaaataaatttgacgttgttatgcattttgcagggttaactaaagtagacgagtccgtcaataatccagataagtataatgattataattttgagaagtcaaaatctttttttaattgctgttttgaaaataatttaaaaaaaattatattctcctcaactgcaggagtttacggagatagttcgagtcaatacgtaaaagaaactgatgaaatcaaaccgatgaatccttatgctgtttcaaaatctaaagtagaaaactttttaataaaaaaatcaaaaagtgaaaaaataaattacattgtattgagatattttaatgttgcaggagctgacgaggataaaagatcaggattaatttctaaatcatcaactaatttgataaaagtaatttgtgaactagctacaaaaaaaagaaaaaaaatgacaatcaacggcaacgattatcaaactaaagatggtacagctataagagat

SEQ ID NO: 289998 - DNA, 988 bp, Unknown
  Bacterial polypeptide expressing nucleotide sequence isolated from the Sargasso Sea
atgaatacctcgacgccagacattcttgtggttggcggagccggatacatcggttcgcatgtggtcaaagcccttcgcgacgcaggcagacaaccggttgtctttgacaacctgagtactggtctcagggaaaaccttttccctgaaattccattcatccatggagaccttctcattccggaacaggttcgtgccgccatgagaggcatccgttccgtggtccacctcgccgccctgaaagccgccggtgattcgatgctcgagccggaacgctacgcgcttcacaatttaaacggaaccgtcaatctgctccatgccgccggaactgcaggagtccaccattttgttttttcctccagtgctgcagtctatggagaaccgcagtacctgcctttggacgaaaaccacccaactgaacctgccaatttttacggacagacgaagctgcaaatcgagatgcttctgtcctggttcagcagattaaggaacatgcgttatgcaggcttgcgctatttcaatgctgcaggttatgaccccgatggagaagtgcggggactggagaaggaacccaataatctactgcctctggttctcgaaaccctgctcggttggcgtgaaaaccttgaagtctatggaaccgattacgataccgaagatggaagctgcatccgggattacatccacgtcagtgacttggccgacgcacaccttcgcgcattgaattttcttgaagaacaagacgaggatcttatcgtaaaccttggcacgtccaaaggaatcagtgttctcgaagttttggatgcggccagaaaagtttccgggttggatctgccggtgattcacagtgatcggaggccgggagacccggcagtggtgcttgcatctgcggaaaaagccgaacggtttctagaatggagtcctgcattcagcgatgtggaaaccatcctcaaaaccatgctggccgcctatcgctcgcatcaccactgaa

SEQ ID NO: 289999 - DNA, 970 bp, Unknown
  Bacterial polypeptide expressing nucleotide sequence isolated from the Sargasso Sea
aatgaacaatatcttaattactggtggtgctggttatataggtagtcatattgtagagcaattaataaaagcaaaaaaaaaagtttttgttgttgataatctttcaactggttataaaaggttacttcataaaaaagcaaattttttcttgtgtgatataagaaattttaaaagattggatataatagttaagcaaaataaaatacagtctatcatacatctagccgcctgtttgagtgttggtgaaagtgaaagaaaaccaaaaaaatatttttcaaacaatgtcattggaactagaaatgtgattaattgctgcaaaaaaaatgatattaaaaatttaattttttcctctacttgtgctgtttataaagacaaaattaaatctgtaaaagaaaattctaaacttgagccaaaaagtgtttatggaaaaactaaattaaaaggtgaaaatataattaaaaaaaatttatttaaaaataaaactaattacgcaattttgagatattttaacgttgccggagctagtgaaagtggaaagataggacaaatttctattggtgatcaattatttaaaaatttatctatatgctctaaaaaaatgaatcctaacataaacgtatatggtagtgactataaaacaaaagacggtacttgcgttagagattacatccacgtgtcagacatagcaaaaattcatataatggtactaaaaaaaattaataatgaaaataaaaatattattttaaattgtggatatggaaatggtgtgtcagtacttgatgcaatatacgaatttcaaaaacaattaggaaaaaaaataaaagttaaagttaaagatagacgaaaaggagatatggaagaaataatagcaaataataaaaaaattaaacgttttttaaagtggagacctaaaaaaaatattctaagcaaaatagtcaaaagttgtattaaatggggaaaaaaaatttaa

SEQ ID NO: 290000 - DNA, 985 bp, Unknown
  Bacterial polypeptide expressing nucleotide sequence isolated from the Sargasso Sea
atgaatgttcttttatccggtggagctggttatatcggaagtcatgccgctctttctcttctagatgctggtcataatgttcatattattgatgatttatctactggtaacgaaagtcttattcctaaaaatacattttttacaaattgtaatattaatgatgaaaaagtaatttctgagcttataaaatctaatagctttgatttattaatgcacttcgctggttttattcaagttgaggaatctgtaaaatatccgcagaaatattttaataataatactgaaaatgcaactaaactgtttgaaacttgtaaaaataatggattaaataaaatagtattttcttcaacagctgctgcatatggatcagtaaatgaaaataaattaatagatgaaaatacaaatttaaatcctcaaaatccatatgctgaatctaaaataaaaacagaaaattttttatttgaaaataaagatgactacaaatttattatattacgatactttaacgttgctggtgctgataaaaaattaagatcaggtcaaatatctaaaagatcaacacatttaataaaaattttatctgaagtagttgtaggtaaaagagatcatattgaaatatttggtaatgattataatacgcctgatggaacagctatcagagactatattcatgtctccgaccttgctgatatccacttagaagttgcaaaatatttattagaaaattcagtatctaacttatttaattgtggttatggaaatggttttagtgttttagatgtaataaatactgcaaataaaatttcaggggataaaattgattacaaattttcaaatagaagagatggggatgttgaacaattaattgcagatacatcaaaaatattaaagcatattgattggaggccaaaatataatgatctaagtgaaattataaattcttcaattaaatgggaagaaaaaattaatgaatcaaatacataaa

SEQ ID NO: 290001 - DNA, 919 bp, Unknown
  Bacterial polypeptide expressing nucleotide sequence isolated from the Sargasso Sea
tatgaattttcttttaacgggcggtgctggatatataggaagtcatgccgctctttctctactagatgcgggtcataatgttcatattattgatgatttatctactgggaataaaagtctaattcctaaaaatgcattttttacaaaatgtaatattaatgatgaagaagtaatttctgaacttataaaatctaatagctttgatatattgatgcactttgctggttttattcaagttgaggaatctgtaaaatatccgcagaaatattttgataataatactgaaaatgcaactaaactatttgaaacctgtaaaaataatggattaaataaaatagtattttcttcaacagctgctgcatacggaacagtaagtgaaaataaattaatagatgaaaatacaaatctaaatcctcaaaatccatatgctgaatctaaaataaaaacagaaaatttcttatttgaaaataagaatgactacaaatttataatattgcgatacttcaacgttgctggtgctgataaaaaattaagatcaggacaaatatctaaaagatcaacacatttaattaaaattttatctgaagttgttgtgggtaaaagagatcatattgaaatatatggcaatgattatgatactcctgatggaacagctattagagattatattcatgtctctgatcttgctgatatccacttagaagtagcaaaatatttatttgaaaattcagaatctaacttatttaattgtggttatggaaatggttttagtgttttagatgttataaaaactgcaaataaaatttcagaagataaaattgattacaaattttcaaatagaagagatggggatgttgaacaattaattgcagatacatcaaaaatattaaaacatattgattggaggccagaaatataa

SEQ ID NO: 290002 - DNA, 749 bp, Unknown
  Bacterial polypeptide expressing nucleotide sequence isolated from the Sargasso Sea
tatgaaaatacttttaacaggtggtgcaggttacattgggagtcatgttttactatcaattttagaaaaaaattataaggtagttgttgttgatgatttatcaacgggaaatataaatttgattccagaaaatattacattaatcaagtgcaacattaatgatgagaggaaagtttcaaatattattcaacaagaaaaatttgatattcttttacattttgctgggttcatcaaagttgaagaatctgttcaaaatccctccaaatattttaaaaataatactgaaaatgcaataactctttttgaaacatgttataaaaacaaccttagaaatattatattctcttcaacagctgcagcatatggtaaccctgctagcaacaactccataaaagaagatgcaaatttaagtcctctgaacccctatgggcaatcaaaaatagatactgaaaaatatctaattgagaattcaaataaatttaattcagttatattgagatacttcaatgttgcaggagctgatcctgaattgagaagtggattaatttccaaagaaccaacgcatctaattaaaattttaagcgagattgctgttgggaaaagagataaaatttatctttatggaaatgattataatactgatgacggaacaccagtaagagattatatacatgttagtgatttagctgatattcatataaaaacagcggaatatttaatggaaaaaaaaatcagtaacatttttaact

SEQ ID NO: 290003 - DNA, 782 bp, Unknown
  Bacterial polypeptide expressing nucleotide sequence isolated from the Sargasso Sea
catgacgtgcaggatcctgatcaccggtggggctggtttcatcggcagccataccgctctcgtgctgttggagcaaggccactcccttgtggtggtggacaacttcgacaacagcagcccggaagccctgcgacgggtgaaggcgttggcagcatccgatgcccttcaacttgtggagggggatctgcggaatccggatgtactggatcgtgccttccgctgcgatgggctagtggatggcgtgattcatttcgccggtctcaaggcggtgggggaatcggtggccgacccactgcgctactgggatgtgaacctcaacggcagccgggtgctggcggcggccatggaacggcacggctgtcgaaccctcgtgttcagcagcacctccaccgtgtatggcgagcccgaagagtttccgctccacgaggggatgaccactgccccggtgcatccctacgcccagaccaaactcgccgtggagcagatgcttggagcgctttgccgctccgggccctggcgggtggcttgcctgcgctacttcaacccggtgggcgcccaccccagcggccgcatcggggaagacccccttggaattccgaacaacctgtttcccttcatcacccaggtcgcagcgggacggcgggacaaactccgggtgttcggacaggactaccccacgccggacggcaccggcatccgcgactacctgcacgtcatggatctggcggaagcccatggcgtcaccctcaaccacctcctcaaccaggagtcgcccacccagc

SEQ ID NO: 290004 - DNA, 715 bp, Unknown
  Bacterial polypeptide expressing nucleotide sequence isolated from the Sargasso Sea
atgaacattctattaactggtggtgcgggttatattggaagccatactgcattatccttaattgataacggtcactcagtgacaattattgacaacctcataactggcagcaagacactaataccctcagaagcaaagcattacaattttgatattgcagatgaaagttcaataaataaaattttaaaagaaaataaattcgacatagctatgcattttgctggactcacaagagtagatgaatcagttaaatatccagagaaatatcaacttcacaactttgaaaaatcaaaaatatttttttcatcatgtattaaaaataatctaaaaaaaattatattttcttcaagcgctggggtttatggaaatagtaactctaacaatttaactgaagatagtgaattaaagccaattaatccctacgctgactcgaaatataaaattgaaaattatttaattgaaatttcaaaaaaagataaagtcgattacactattttgagatattttaatgtagcaggagctgacaaaagcaaaaggtctgggcttattgcaagatcctctacaaatctgattaaagttatatgtgaagtagcgactaaaaaaagagagaaaattataataaatggagatgactatgaaacaaaagatggtacagctataagagattttatacatgtaactgatatagctgatatgcatgttttagctgctgata

SEQ ID NO: 290005 - DNA, 538 bp, Unknown
  Bacterial polypeptide expressing nucleotide sequence isolated from the Sargasso Sea
gaagactacctaattaaaaatgcagataaatttaattcaattattttaagatacttcaatgttgcaggcgctgatcctaaattaagaagtggtttaatttccaaagagcctacacatctaattaaaattttaagcgaggttgccgttgggaaaagagacaaaatttatctttatggaaatgactataatactgatgacggtacagcagttagagattacatacacgtaagcgatttagctgatattcacataaaaactgctgaatatttaattgaaaaaaaagttagtaacatttttaattgtggatatggtagaggctactctgttttggaggtagttaaagaagcaaataaaataactggtgataaaattaaatacgagttttctaataggcggcctggtgatgcagaaaaattgatctctaacatagataagctttctgaaacaattaattggaagccaaaattcaatgatttaaatttaataataaaaactgcaattagttgggaaaaaaaaattaatgaaaaaaatttttaaa

SEQ ID NO: 290006 - DNA, 976 bp, Unknown
  Bacterial polypeptide expressing nucleotide sequence isolated from the Sargasso Sea
atgagaatacttatcactggtggagcagggtatataggaagtcatgtctgtaatttacttttagataaaggttttaaagtaactgtaattgataacttagttactggaaataaagaattggttcctaaaaaggcaaagttaattattgctgatatagcagatgaaaaaaaaattgaatatgtaataactaatgaaaaatttgatttagtaatgcactttgctggcctaataagggttgatgagtctgttaaagagcctgagaaatacaatgaatttaattttgaaaaagcaaaaaaatttttaaatatttgttttaagaataagttatttaagattattttttcatccacagcatctgtttacgggaattcaaaaaaacagaaagtattagaaactgaccctctcgatcctttaaatccttatgcgatttctaaacttaaactagaaaattttataatttcaaaatctaaagaacttaaaattagttatattattttaagatattttaacgttgcaggtgctgacgaaaggttgcggagtggtttaatttcaaagttctcttcacatttaataaaaagagcttgtgaggttgcggttggaaaaagagaaaaactaattattaatggaaatgattataatactttagatggaacacctgtaagagactatattcatattactgatttagctgatatccattatatttcagctaagcatttaatggaaaacggaaaatctgaaattttcaattgtggttatggaaaaggttattccgtaaaagaagtcttagaaagtttcagcaaagttctaggtaaaaaaattaattttgaaataggtcctagaagagacggagatagtgaaatggtagttgctaattcagataaatttaataaattttttaattggaaaccaaaatttaacgatattaaattcattcttaagacagctattgattgggaaaaaaaaattaaatgat

SEQ ID NO: 290007 - DNA, 985 bp, Unknown
  Bacterial polypeptide expressing nucleotide sequence isolated from the Sargasso Sea
tatgaagaatattcttttaacaggcggcgcaggttatattggaagtcatgtggctaatttattaatcgatcaaggatacgatcttacaattattgatagtttaattacgggtaataaaactttgattaaccctaaagcaaaatttattaattgcgacattgcagactcaaaatatatttctgaaatattgatcaataaaaaatttgatatcgtaatgcattttgcaggtctaattagagttgatgaatctgtaaaagaacctgaaaaatacaatgaatttaattttgaaaaagcaaaaatctttctggatacttgctttaaatatggcttaaaaaaagttattttttcatctacagcatctgtttatggaaatccaattcataataatgtttctgaaagtgatgaattaaatcctttaaatccatatgctaaaaccaaattaaaattagaaaattttctaattaataaatctaaatatgaaaaaatatcttatattattttaagatattttaatgttgcaggagctgatgaaaaattaagatcaggacttatctcaaaaaattcaacacatttgattaaaattgcttcagaagttgcagttggtaaaagagatgaaattataattaatggcgatgattatgacactaaagatggcactgctattcgagactttatacatgtttcagacttagctgatattcatttagtttctgcaaaatatctattagataaaaatcaatcaaatatatttaattgtggttatggaaatggatattctataaaggaggttattgatacatataataaaatattaaataaaaaaattaaatccaaaattggacctagaagacctggagatagcaaaatggttgttgctgatccaactaaattcaataaaattctaaattggaaaccaaaatttaataaactagattacatactaaaaactgcttacgagtgggaaaaaaaattaaaatctagttaa

SEQ ID NO: 290008 - DNA, 991 bp, Unknown
  Bacterial polypeptide expressing nucleotide sequence isolated from the Sargasso Sea
tatgaacaataaagctaataaaattttaattactggtggtgccggatatattggaagtcatgttgctgaaagattaattaactcaaaattaaaaataattgcttttgataatttatccaggggaaatagaaaacttattaataaaaaaacaaagtttattaaggcagatgttaataatttaaaaaaattaaaaaaggttattagtgaaaataatgtaaataccgtaatccacttaggaggtttagcaagtgttgctgaatcattaattagaaaaaaaaaatactatattaataatgtcttaggaactttaaatgttattaaagcatgcaataagtcaagcgtaaaaaattttatttactcttcatcctgttcagtatacggaaatgtcgagggaaatgtagatgaaaagaaaaaaccaaatccaaaaagctattatgccttcacaaaatttaaaagtgaaaatttaatcaaaaaattttcaaaaaaatatagatataaatatattatactaagatactttaatgttgctggagcaagtaattcaggaaaaataggtgaaattggaaataaaaatgatcgtcttattaaaaatttagctattcaattttttaaaaaaaatccaaaaataaatatacacggtacaaactataaaactaaagatggaacatgtattagagattatatacatgtatctgatatagctgatattcactaccaatgtattaaatatttaaataaatattcaaagtcaaatatttttaattgtggttatggaaaaggatactcggtattagaaattgcaaatattttaaaaagaatgaaaaaaaaaactcaaataaattttatgaaaaaaagaccgggagatgttggacaagtcaaagcaaacataaataagtttaaaaaaacgtttaaatggaaacctaagtttaatagtattaataaaattttaaatagttcaataaagtgggaaaaaaaattaaatcatttgtaa

SEQ ID NO: 290009 - DNA, 679 bp, Unknown
  Bacterial polypeptide expressing nucleotide sequence isolated from the Sargasso Sea
atgaccacgaagggtacgattctggtaacgggcggtgcaggatttatcggctcgcacacatgtgtcgaactgctgaacggcggttacgacgtcgtggtaatcgacaatctcgtgaacagcaaccgcgaatcgctgcgacgcgtagagaagatcaccggcaagcccgtgaccttttacgaagccgacgcccgcgacgaaggagcgctcaatcgcattttcgacgcccacccgatcaccggcgcgatccactttgccgcgctcaaggcggtgggcgaatcggtcgccaagcctgtcgagtactacagcaataacgtcggcagtctgctggcgctgcttggcgtgatgcgcgatcgcaaggtgaagcagttcgtgttcagttcttccgcaacggtgtacggcgtgccgaaaagttcgccgatcgacgaatcgtttccgctgtcggccaccaatccttatgggcagtcgaagctgatcgccgagcaggttttgcgcgatctggaagtggcagatccttcctggcgaattgcgactttgcgctatttcaacccggttggcgcgcatgagagcggcctgattggagaagacccggccggtatccccaataatctgatgccatatgtggcacaggtcgcagtaggcaaactggaaaagctgcgtgtattcggtggcgactacgaca

SEQ ID NO: 290010 - DNA, 832 bp, Unknown
  Bacterial polypeptide expressing nucleotide sequence isolated from the Sargasso Sea
taactgtaatattaatgatgttacgacaattagccaaatattacaaaaggaaaaatttgatgcattaatgcattttgcaggctacatagaagtagaagagtctgtatccaatcctaaaaaatactttgataacaatactaaaaattcaaaaatactttttgatacttgtataaaaaataatcttaaaaatattattttttcttcgacagctgcggcatatggtaatccagctaactcagagcctataaaagaaagcacagatttaaaacctataaatccttatggtgaatcaaaaattcaatcagaattacatcttagagaaaattcccaatgtaattttattatattaagatatttcaatgttgcaggtgctgatcctaaaatgcgctctggattaataagtaagaaggctacacatttaattaaaatagcaagcgaagttgcagtaggtaaaagaaaagatattacaatatttggaaatgattatccaacacctgatggaactgcaataagagattatatacatgtatctgatttggcagatgttcatgtaaaggctgttgaatatttggtaagtaaacaacaatcaaatattataaattgtggttacggaaaaggtttttcagttaaggatgttttaaacattgtaaatcaagtgaatgataagccaattagtattaaaaatggagatagaagagcgggagatccacctatgcttgtttctaatgtttcaaaattgcatagtctatttgaatggcaaccaaaatataatgatctctcttttattgttaaaacatcaatagattgggaaaaaaaattattaaattattaa

SEQ ID NO: 290011 - DNA, 556 bp, Unknown
  Bacterial polypeptide expressing nucleotide sequence isolated from the Sargasso Sea
atgacaattctggtcacagggggcgccggctatatcggctcccataccctggttgaactcttgaacgtcgggcagcaggtcgtggtgctggacaacctctccaactcctcccccgaatcgctcgaacgggtcgagcggatcaccggcaagccggtcatcttcgtcgaaggggatgtgctggaccgggcctgcctgcaacagctgtttgccgcccaccagatcgagtcggtgatccatttcgccgggctcaaggcagtcggcgagtcgagccagatcccgctcacctactaccagaacaacatcaccggcaccctggtgctgtgcgaagagatggccaaggccggggtgttccggctggtcttcagctcctcggccaccgtctacggcgatccggcctcggtaccgctgcgggaagatttccccaccagcgccaccaacccttatggccgctccaagctgatggtcgaagagatcctgcgcgatctcgccaaatccgatccccgctgggccatcgtgctgctgcgctacttcaacccggtcggtgcccacgagagcg

SEQ ID NO: 290012 - DNA, 579 bp, Unknown
  Bacterial polypeptide expressing nucleotide sequence isolated from the Sargasso Sea
cggcgagtctgtggctaaaccgctgttttattatgaaaacaatgtcagcgcttcaggcttactgatgcaggtgatgttggcgcatcaggtcaaaaccctggtatttagctcctctgccacagtctacggtgagccggtgtcttcgccgatacgggaggattttgccgtccaccctgaaagtccttatggtcgttccaagctgatggtggagcagatcatgtctgatctggtggtggctcaaccagatttcagcgccataagtctgcgttactttaaccctgtaggtgcacatgagtcaggcttgattggtgaggacccaaatggtattccaaataacctgatgccttttattaatcaggtggctataggccgcaggccctatttatctgtgtttggtgatgattacgacacgccggatgggactggcgtgcgggattatatccatgtctgtgatttagcctcaggccatgtcaaagctttagaaactctgcatcagaatgccggttttcatgtatttaacttaggcactggccatggcgtttctgtgctggaaatggtcgatgcttaccgtcgtatttc

SEQ ID NO: 290013 - DNA, 853 bp, Unknown
  Bacterial polypeptide expressing nucleotide sequence isolated from the Sargasso Sea
aatgagccatattttacttaccggtggtgcaggctatattggcagccatacggcgctggagctgctgaacgccggttttaacgtactgagcttcgacaatttcagcaacagctctgatgcagcattaaaacgcgtagagcagctcagcgggaaaagtgtcgtcagcgtgaaaggcgatatccgtgatgagcaagcactacgtgacgtatttagccaatacgatattgctgcagttgtacattttgccggcttaaaagccgttggtgaatctacccaaattccactgcattactacgacaataacgttgccggcacggttaccttatgccgtgtgatgcgcgaatttggggtgaaaaaactggttttcagttcatcggcaaccgtgtacggcgatactaaacaggtacccatccctgaaactgccccccgctctgccaccaatccttatggccagagcaaactgatgattgagcatattctggaagatttagtgcgggcagaacccgactggggcattacactgctgcgctactttaacccggtcggcgcgcatgacagcggccagataggtgaagaccctaacggcattccgaacaatctgatgccgtttatctctcaggtggccgttggtaaacgtgaacaattaagtgtgtttggtaacgattacgccacccatgacggtaccggtgtacgcgactatatccatgttgtggatttagcccgcggccatctaaaggccttgcagtacttgcaaacacatagcggcattgaggcaataaacctgggcaccggcaccggttacagcgtattggatatggtaaaagccttcagcgaaaccaacaaagtgccggtg

SEQ ID NO: 290014 - DNA, 706 bp, Unknown
  Bacterial polypeptide expressing nucleotide sequence isolated from the Sargasso Sea
acttgtactttggttgaagtaatgaatgtgttcaaatgtaaaaatattgtttttagctcatcagcaacggtatatggcaatccaaaaagtgtacctataaaagagaatttttcactttcagctactaatccttatggacagtctaaattgatgattgagagatttcttcaagatttatttgatgctgacagttcttggagaattgcgatattgagatactttaatcctgttggtgctcataaaactggaattattggggaagatccaaatggtattccaaataatttaatgccatacatttctcaagttgcgattggtaaattaaagcagttaaatatctttggtggagattatgacacaccggatggaacagggattcgtgattatatacatgtagtagatttagcaaaaggtcatgttaatgcaataaatacattgaaagataaatcacaaattatgaaaattaatttaggtactggaactggttattctgttcttgaaatggtcatggctttcgagaaggcatctggtaaagatataccatataaaattacagatagaagggttggagacattgcagctagctatactgatccttcttttgctgaggaaaaattaaactggaaagcaaacctaaagattgatgagatgtgtgaagatacatggcgatggcaaaataataatcctaatgggtacaaggactaat

SEQ ID NO: 290015 - DNA, 754 bp, Unknown
  Bacterial polypeptide expressing nucleotide sequence isolated from the Sargasso Sea
gatgagttatgttttgttaaccggcggcgcgggttatatcggcagtcatacggcattagctttgcttcgggcaggcgagcaggtaataagtttcgataattacagcaactccagtgcagagtcgttaaagcgggtagagcagttggccggcaagtctgtgattcagattgaaggcgatgtgttggatgccgacgctctggctgctgtatttgagcaatatccgattaaagctgtagtgcattttgctggtttaaaagctgtgggtgagtcgacgcaaaagcctttgtggtattacgaaaccaatgtcggtggcactattaaactctgtcaggtgatgactaagtttggtgtgaaaaatctggtattcagttcatctgcaactgtatatggcgatgcacaaaacagcccattaccggaaacaactcctactgtggcgatgaatccttatggtcagtccaagttaatgacagaatgggtgctgcaggacttgtatcagtcagataacagctggaacatagccgtgttgcgctactttaatccggtcggtgctgatgccagtggtcgtattggtgaagaccctaatggcattccaaacaacctgatgccttttatcacgcaagtggcggtcggcaaacgtgcgcagctgcagatttttggtaatgactatccaactgtagatggcaccggcgtacgtgattatattcatgtgacagatttagctgctggccatgtggcagctttacaacatcttgct

SEQ ID NO: 290016 - DNA, 774 bp, Unknown
  Bacterial polypeptide expressing nucleotide sequence isolated from the Sargasso Sea
cctgcgcggcggcggccccaaggacaagcaggtcgtgctcgtgacgggcggcgtcggctacatcggcagccacacggtgctcgagctgctgcaggcgggctacgaggtcgtcatcgccgacaacctttgcaactcgaacatcgagtgcctcaagcgcgtgcagaagctcgccggccgcgaggccaccttccacaaggtcgacatccgcgacaaggcggcgctgtcggacctcttctcaaagtacaatgtcggctcggtcatccactttgccggcctgaaagcggtcggcgagtcggtcgccaagccgctgctctactaccaggtcaacatcgaggggacgctcaatctcgtccagtgcatggatgacgccggatgccgcaacatcgtcttctcgtcgtcggcgaccgtctacggcgacccggcctctgtcccggtcactgagtccttcccgacgggcgcgaccaacccgtacggctcgtctaagctcttcaacgagcagatccttaccgacgtcgccaaggcgcccggcgagaacaagtggaatgtctgcctccttcgctacttcaacccggtcggcgcgcatgagagcggccagattggcgaggaccctaaaggcatcccgaacaatctgatgccattcatccagcaggtcgcggtcggcaagcggccgcacctctccgtcttcggctcggattatcccacggccgatggcaccggcgtccgtgattacattcacgtcgtcgacctcgcaaagggccacctcgccgccctacg

SEQ ID NO: 290017 - DNA, 744 bp, Unknown
  Bacterial polypeptide expressing nucleotide sequence isolated from the Sargasso Sea
aaaaaccaattgaatattacattaataattttgtaggaacttgtactttggttgaagtaatgaatatgttcaaatgtaaaaatattgtttttagctcatcagcaacagtatatggcaatccaaaaagtgtacctataaaagaggattttccgctttcagctaccaatccttatggacagtctaaattaatgattgagagatttcttcaagatttatttgatgctgatagctcatggagaattgcgatattgagatactttaatcctgttggtgctcataaaactggaattattggtgaagatccaagtggtattccaaataatttaatgccatatatttctcaagttgcgataggtaaattaaagcagttaaatatctttggtggagattatgacacgcctgatggaacagggattcgtgattatattcatgtagtagatttagcaaaaggtcatgtcaatgcaataaatacattgagaaacaaatcacaaattataaaaattaatttaggtactgggaccggttattctgttcttgatatggtcatggcttttgagaaagcatctggtaaaaaaataccatataaaattgtagagagaagagctggagacattgcagctagctataccgatccttcttatgctaaggaaaaattatgctggaaagcaaacctaaagatcgatgaaatgtgtgaggatacatggcgatggcagaataataatcctaatggatataaggattaac

SEQ ID NO: 290018 - DNA, 556 bp, Unknown
  Bacterial polypeptide expressing nucleotide sequence isolated from the Sargasso Sea
aatggttgaaatgatgctacaagatatcgctaaatcagatgagcgctttgcatttgctattttgcgttactttaatccagtaggtgctcatgaatcgggcataattggtgaagatcctaatggcattcctaataatttattaccattcattgctcaagtagcagtgggtaaactcaagcagctagccgtatttggtgatgattacgacaccattgatggcacaggtgtgcgcgactacattcacgttgtagatttagctattggccacttaaaagcgcttgataaaatagctacaaatacgggtgcacttgtctataatcttggcactggtaatggctattctgttctgcaaatggttaatgcatttattaaagcaagtaaccaagcagtaccataccaagtatcacctcgtcgccctggcgatattgctgcatgttacgccgcaccagaaaaagcccttaatgagctgggctgggaagctaaacgcggaattgatgccatgatgcaagatacatggcgctggcagtcaaacaatccaaatggctacagtaagtaa

SEQ ID NO: 290019 - DNA, 1015 bp, Unknown
  Bacterial polypeptide expressing nucleotide sequence isolated from the Sargasso Sea
atgagttacgtattattaaccggcggcgcaggttatatcggcagccacactgcattagccttgctgcgtgcaggtgagcaggtagtaagttttgataattacagcaactctagcccagagtcgttaaagcgggtagagcatctggccggcaagtctgtgatccagattaaaggggatgttttagatgctgcggctttagcagctgtctttgaacagtatccaattaaagctgtcgtgcattttgcaggtttaaaggcggtaggtgagtcgacacaaaaacctttatggtattacgaaactaatgtcggtggcaccattaaactctgtcaggtgatggcgaagtttggtgtaaaaaatctggtgttcagctcatctgccacagtgtatggcgacgcgcaaaatagccccttgccagaaaccactcctactgttgcaatgaacccttatggccagtctaagctgatgacggaatgggtattaaaagacttgtatcagtcagataacagttggaacatcgctgtgctgcgttattttaaccctgttggtgctgatgccagtggtcgtatcggcgaagaccccaatggcattccaaacaatttgatgccgtttatcacgcaagtcgctgtgggtaaacgtgcgcagctgcagatttttggcaatgattatccaacaacagacggcacaggggtgagagattatattcatgtaacagatttggctgcaggtcatgttgcggctttacagcatctttccaaaggaccaggttttgattgttttaacttaggcagtggtgaaggtttgtctgtgctggacatagtgaacagctttgctgaagtgaataaggttgcagtgccttatcaatttgttgaacgccgtcctggcgatgtggcccgctattttgccgatccatctaaagccaaggctgtattgaactggcaaacaaaacaaagtctggaggatatagtccgcgatagctggaactggcaaaaaaataacccgaatggttataactaag

SEQ ID NO: 290020 - DNA, 1015 bp, Unknown
  Bacterial polypeptide expressing nucleotide sequence isolated from the Sargasso Sea
gatgaaagtactggtcaccggcggctgcggctacatcggcagccacacctgcctggcactgcaagcggctggcatggagcccgtggtggtggacaacctctgcaacagcaaggcgggcgtactggctcgcatcgccgccatcagcgggcgcgagccccgcttctatcagggggacatccgtgacccggccctgctggatcgcatcttcagcgagcaacggatcgacgcagtgatccacttcgccgccctcaaggcggtcggcgagtccacccgcctccccctcgcatactacgagaacaacctgagcggcaccctggtattgctgcaggcgatgcagcgggccggcgtccataacctggtgttcagctcgtcggccaccgtctacggcgacccggccagcacccccatccgggaggatttcccgcgcagcgccaccaacccctacggccgatccaagctgatcatcgaagagatcctagaggatctgcagcgggcggagccgcactggagcatgaccctgctgcgctacttcaacccggtcggcgcccacgagtcgggcaccatgggggaagatccccaggggatccccaacaacctcatgccgtttttgacccaggtcgccattggccggcgcgactgcctttccatctttggtaacgattaccccaccgtcgatggcaccggcgtgcgcgactacatccacgtgatggatctcgccgaagggcacgtcaaggcgctgcagcactgcgccagcaagggtggcgtgcacgtctacaacctgggcacgggccagggccagagcgtgctgcagatggtcgcggcgttcgaggcggccagcggccgccccttgccctatcgcatcgagccaagacgccccggcgacatcgccgaatgctgggccgatcccgccaaggccgagcgcgagctgggctggcgtgcccggcgggatctggccgccatgtgtgccgacagctggcgctggcaatccgccaacccccaggggtacgaggcatga

SEQ ID NO: 290021 - DNA, 1015 bp, Unknown
  Bacterial polypeptide expressing nucleotide sequence isolated from the Sargasso Sea
aatgacgattttagtgaccggaggcgctggttatatcggcactcataccgtagtggaattactcaatgcggggagcgaagtgattgttttagacaacctgtctaattcaagcatcgaagcccttaaccgtgtcgagcgcattaccggtaaagcggtcaccttttaccaaggcgatattctcaataaggccttactgcagaaagtctttagcgaccataacatcgatgccgttatccattttgcaggattaaaagccgttggtgagtcagttgctaaaccgctgaaatactatgagaataacgtgactggcaccttaattctttgccaagtgatggcagagtttaaggtgaaaaacctcgtctttagttcttctgctactgtgtatggcgaccctgccagcctaccgattaccgaagatttccccacgggggccactaacccctacggtcaatctaagttgatggtggagcatatacttgcggatttacaccatagcgatccgagttggaatatcgcccgtttacgttacttcaaccctgttggcgcccatgccagcggcttgattggtgaagatcctaacgatattccaaataacttgatgccatttatcgcgcaggtggctgtcggtaaacgcgaagcgttaagtgtgttcggcaatgattatccaacccacgatggtacgggcgttcgcgactatatccacgtggtggatttagcccttggccacctcaaagcccttgaaaagctgggcactaaaccaggtcttgtcacctataacctaggtacaggccaaggctacagtgtgctcgatatggtcaaagccttcgaaaaggcctgtggtaagtcaattgcctatcaaattgcgccgcgtcgtcccggtgacattgccgcctgttatgcaaacccagatcatgctaaaaccgatctgggctggcaggcgactcacagtctagaggatatggcgaacagcagttggcattggcaatctaccaatccaaatggttataaaggctaa

SEQ ID NO: 290022 - DNA, 1024 bp, Unknown
  Bacterial polypeptide expressing nucleotide sequence isolated from the Sargasso Sea
atgaccgctaaaggcaccatcctcgttaccggcggcgcgggctacatcggctcgcacacggccgtcgagctgctcgacaacggctacgatgtcgtgatcgtcgacaacctcgtcaacagcaaggccgaatccgtgcgccgcatcgagcggatcacgggcaagacgcccgcgttccatcaggtcgacgtgtgcgacgaagccgcgctcgccaaggtattcgatgcgcacccgatcaccggcacgatccatttcgcggcgctcaaggccgtcggtgaatcggtcgcgaagccgctcgagtactaccagaacaacatcggcggcctgctcgccgtgctcaaggtgatgcgcaagcgcaacgtcaggcagttcgtgttcagctcgtccgcgaccgtatacggcgtgcccgagcgctcgccgatcgacgaatcgttcccgctgtccgcgacgaacccgtatggccagtcgaagctgatcgccgagcagatcctgcgcgatctcgaggtttccgacccgtcgtggcgcatcgcgacgctgcgctacttcaacccggtcggcgcacatgcgagcgggctgatcggcgaggatccggccggcatcccgaacaacctgatgccgtacgtcgcgcaggtcgcggtcggcaagctggaaaggctgcgcgtgttcggctccgactacccgacgccggacggcaccggcgtgcgcgactacatccacgtggtcgatctcgcgaaggggcacatcgccgcactcgacgcgctcgcgaagcgcgacgcgagcttcgtcgtgaacctcggcacgggccagggctacagcgtgctggaagtcgtgcgtgcattcgaaaaggcgtcgggccgcccggtgccgtacgagctcgtcgcgcgccgcccgggcgatatcgccgagtgctacgcgaatccgcaggccgcggccgacatcatcggctggcgcgcgacgctcggtatcgaggaaatgtgcgccgaccactggcgatggcaggaggggaacccacgcggttttgtataat

SEQ ID NO: 290023 - DNA, 1015 bp, Unknown
  Bacterial polypeptide expressing nucleotide sequence isolated from the Sargasso Sea
atgacgattttagtgaccggcggtgctggttatattggcactcataccgtagtggaattacttaatgcgggaagcgaagtgattgtattagacaacctgtctaattcaagtatcgaagcactaaaccgtgtcgagcgcattaccggtaaatcggtcacattctaccaaggcgatattctcaataaggccttactgcagaaagtctttagcgaccataacatcgatgccgttatccactttgctggattaaaggccgtcggcgagtcagtagctaagccactgaaatactatgagaataacgtgactggcaccttaattctttgccaagtgatggcagagtttaaggtgaaaaatcttgtctttagttcctcggcaactgtgtatggtgatcctgctagcctgcccattaccgaagattttccaacgggtgccactaacccctatggtcaatctaaattgatggttgagcatattctggcggatttacaccatagcgacccaagttggaatatcgctcgtttacgttacttcaaccccgttggtgcccatgccagtggtttgattggcgaagatcctaacgatattccgaataacttgatgccatttatcgcccaagtcgccgtgggtaaacgcgaggccctcagtgtgttcggcaatgattacccaacccatgatggtactggcgttcgtgattatatccatgtggtggatttagctattggtcaccttaaagcccttgagaaactcgccacaaaaccagggcttgtcacctacaatctaggtacaggccaaggttacagcgtgctcgatatggttaaagccttcgagaaggcctgtggtaaatcgattgcctatcagattgcaccacgccgcccaggagatattgccgcctgttatgcaaaccctgagcatgctagaaccgatttgggctggcaggcgacccatagtcttgaggatatggcaaatagcagttggcattggcaatcaaccaatcccaatggttataaaagctaat

SEQ ID NO: 290024 - DNA, 787 bp, Unknown
  Bacterial polypeptide expressing nucleotide sequence isolated from the Sargasso Sea
atgagatatttagtaactggacataaaggttttattggtagtaatttattaaaaaaactatcaggtgacgttacaaccattgaagctaatattgtggatgaagattattgctatgattatttagaggatgttgtcaaatcagtagatgttatatttcacattggtgctatatcagacacgacattacaagattcaacagagatgttgagatataattatgtatttagtaaagagctatttgattacgcacagaaatatggtaaaaaggtaatatactcttcctcagcagcttgttatggtgatggtggtggaatgccattaaacatatatggttggtctaaattgatggcagaacaatatggaatggctaaatgcgataattttattgctttaagatattttaatgtatatgggccaggtgaaaatcataaaggaaagatgtcttctgtagcgttacaatcttggaatggtgagataaataaattatttccacaaaaaccaaaaagagattttgtttatatagatgatgttgttagtgcgaatatacacgcgataaattcacctaaaggtgtttatgaagttggtagtggagaagctagaacatttgaagatgtattagataatatggaaataaaatattcatatcattcagaagataaaatacctgaatggtatcaattctatactaaatcagataaatcaaaatggttacctgaatggaaaccaaaatacaatttagaaaaaggtataaaaaaatataaagattatttaaatgaaaatttgtaaa

SEQ ID NO: 290025 - DNA, 432 bp, Unknown
  Bacterial polypeptide expressing nucleotide sequence isolated from the Sargasso Sea
gtccacaggaaacccataagggaaggatggcctccgtcgccttccatctatttcaccagctccgcaatgggggttcgatgaacctttttgagggcagtgaaggattcaggagggattttatccacgtccaggatacgattaggatcaacctgcattttctcgaatcagggaaaagcgggatcttcaatgcgggtaccggaaaagcgagaagcttcactgccatcggagaatgcctgagggagatcgagggttccggagaattgaaaagcattcccttccctgatgacctactgggaaaataccaggaattcaccgaggccgacaccacccggctcagagaagccggctacgaggaggaatttctcagcctggaagaaggaattcggctttaccacaaaatgctttcggaaaatgggggctttcatctctgac

SEQ ID NO: 290026 - DNA, 721 bp, Unknown
  Bacterial polypeptide expressing nucleotide sequence isolated from the Sargasso Sea
gggtgctcgcaccgacaccacagaatttaacagggagcttttgtggaaattgaacacggattataccaaggaaatttggaagcggtgtgtggattaccaaattccgctggtctatgcgagttctgcggctacatatgggctaggggaattcggatataaggatgatgagtcgctcatcccccagttggtgcctttgaatccatacggggactcaaagaatgaatttgataaatgggccttgaaggaatccgaaaaaccgtttttctgggcgggattgaaatttttcaatgtatacggacctggagagtcacataagggacgcatggcctcagttgtttggcatgcatataatcaaatcaaggatacgggtgccatgaagttatttcgatcgcacaatccgaagtataaggatggcgaacaaatgcgagattttgtctacgtagaggatgtttgtgaggtaatgttttggttgatgaatcatcgcaaggactcaggtatctacaacatggggagcggggaggctcgtactttcttagacctagtgagggctgttttcaaagcgatgggtaaagaggagcgaatatccttcgtggatacgccggcggacatccgagacaaataccaatattttactgaggccgatatgagtaagctcaggggtattgggtataaaaaacccttctctgggttggagaagggtgtagaaggatatttgaagtga

SEQ ID NO: 290027 - DNA, 752 bp, Unknown
  Bacterial polypeptide expressing nucleotide sequence isolated from the Sargasso Sea
tattaataatattaaaaaatttcgtgatgtagatatagtttttcacttagctgcatttaatggtactaagtatttttactcaaagccattaaatgttattgatcaaaatattctttcaacactaaaattagttcaacattataaaaataaaagattaataaaatttataattgccggctcatctgaagcttatgctggggctcaaataataaaaaaaaataaaggtattttacataatgaagaagaaccaattatctttcaagatattaaaaatccaagatggagttattcaacttccaaatttatgagtgaaattattactattaacagtggtatgccctatcttattttgagatactttaatgtatacggtccaagacaaaaagatcactttatacctgaatttattaataggattaaaagaggaaaatacgaattgtatggatttaaaaataaaagatcattcatttatatagatgacgcaataaaagcaacaattaaagcatcaaacataaaaaagaaaaatgaaataataaacataggctccgatattgagtctaagataattgacgttgttagattgataatgaaaatatttaaaataaatcccaaaaaacttaaattatttccagcacctaaaggaagtgttttaaatagacgacctgacattaataaattacgaatgattgttggtaaaacaaattttttaagtttagaagagggaataagattattattaaaaaaaaaataaa

SEQ ID NO: 290028 - DNA, 496 bp, Unknown
  Bacterial polypeptide expressing nucleotide sequence isolated from the Sargasso Sea
atgatagttgttactggaggagcaggctttatcgggagcaatattttaaaggggctcaatgatgctggagaaaacaatattatcgttgtagataatttaagtaatgctcagaaacatctaaacctgaacagattgtcattcaatgattacattgacaaagatgactttcttttgaaaataggtaaatttacaaatttaaaaactatttttcatcagggagcatgctcatcaaccaccgaacaggatgggaagtacatgatgtcaaataactatgaatattctaaaattcttttgaataattgccttgaacataaaattgattttctttatgcctccagcgctgcagtttatggaaatgggggaaatgggtttactgaggaatcgaaagctgaatacccgatgaatgtttacggattttccaagtttgccttcgataattatgtcagacgtgttttgcctaaagcagaaaatcagattttaggactacgctatttca

SEQ ID NO: 290029 - DNA, 685 bp, Unknown
  Bacterial polypeptide expressing nucleotide sequence isolated from the Sargasso Sea
tatgattattgtaactggcggtgcgggtttcataggaacaaatcttgtgcgatctttaatagaattagataaacaaattttgattgttgaagaactagataaatatacaaaaaaatttgaaaacataaagaatctagaaattttagattgtcttaatcataatatttttttaaaagatctagttaatggtaaatatgcaaacaagattgatcaaatattccatttaggtgcatgctctaaaactacagaacctgacagagactatattatggatgtaaactttgattattcaaaaagattattggaatattctgcaaataacaatattgatatgatttatgcctcatcagcatcagtatatggtgatggaacagtctttaaggaagattctagtaatgaatcttctctaaattattactcagagtcaaaactattattcgataattatgtaagagagaacatgtctaagattaaatctcaaattgttggcatgcgttatttcaatgtgtatgggccatatgaacaacataaggaagttatgagtagtgttatataccactttcataatcaattcaaaaagtatggtatgttaaagctattcagaggaagtcacggttatgacgatggcgaacaacgaagagatttcgtatatgttaaagacactgtagatataaaattatggttt

SEQ ID NO: 290030 - DNA, 436 bp, Unknown
  Bacterial polypeptide expressing nucleotide sequence isolated from the Sargasso Sea
ttatggacctcaggaaaatcataaaggacgcatggcatcagtagcttttcatctctttaatcaacttcagaactcaggaaaaatgagactttttgagggtagccaagaattctgtcgtgattttattcatgttgcagacgcagtaaaaattaatatgcatttttaccaaacaaaatctagcggaatattcaacgctggtacggggaaatccagaagctttacggatattgcacgagcaatgctggacatacacggtattggagaaattgaagatatcccatttccgaaagatctacgtggaaaatatcaaaaattcacagaagctagcttggaaaatctgcggcaagcaggattcagtgaagatttcatgtccctagaagaaggaataaagaaatattatgatcaactctctaaaaccaacaaaccctatatttga

SEQ ID NO: 290031 - DNA, 645 bp, Unknown
  Bacterial polypeptide expressing nucleotide sequence isolated from the Sargasso Sea
aaaatatatttaacatatccataaataaaggtatcaagaaagtaatttatgcagaatcctcagcagtttatgaaggtgtagaagtattaccaagcgtagaaacaattacttatccgaaaagtgtttacgctaagtcaaaaatggaaaccaatgctattgctcagcaactgtttatttctaaaggattatttgcaacaggtttaagatattttaatgtttacgggccacaccaagattatagaagaaccatacctccagttttcagtgcatttataattaaaatgttgcaaggtgaacgccctactatttatggagatggttcaaaaaaaagagatttcgtttatgtggatgatgttaacgactttcatctgatgtgtatgaaaaataaacttactgataataatatttacaatattggctctggtaaaaattattccataaaatctatttatgaacaaattaaatcaatacttaattcggatataaaaccaatttatggagaaaattttgattttgaagctcaggatactcttgccaatatagatcaagcaaaaaaaataggttgggagcccaaaacgagtatttcaacaggattaaaaaaatctatagattatataaaagaaaatagtaatttgatgacatgat

SEQ ID NO: 290032 - DNA, 826 bp, Unknown
  Bacterial polypeptide expressing nucleotide sequence isolated from the Sargasso Sea
ttgcttgagctgaaccacaaagtattagttgtagaagagctagatcgtcaacctaataaattcaaaaatatcaaatctttagatatcatcgattgtattggtcacgacgtcttcattaaagatttatttaatgaaaagtataaaaataaaattgaatacatatttcatttaggcgcatgctcaaaaacaactgaaccagatagagattatgtaatggatgtaaatctcagctactctaaaaagcttttagaatactctgcaaataataatatcaacatgatatatgcttcttctgcctcagtttatggaagtggaaatattttctcagaggacccagccaatgagtcatcgctcaatcactattcagaatcaaaacttctgtttgacaactatgtgagaaaaaactttgataaaattaattctcaagtagtcggactcagatattttaatgtctatggaccacatgaacaacataaggaagtcatgagtagtgtaatatttcatttttacaaccaaattaagaatataggaaagttaaaactctttagaggaagtcatggttacagcgatggtgagcaaagaagagattttgtatacgtcaaagatactatagacataaagctttggtttatgaacaatggcatttccgggatatacaatgttgcgacaggaaaaagcagatcatttaatgatgtagcaaatagcgtaattgatttttttgattcaggacatattgagtatatagattttcctgagggacttgaagcacagtaccaagcatttacggaggccagtttagtaaaacttcgcaattcaggatataagg

SEQ ID NO: 290033 - DNA, 673 bp, Unknown
  Bacterial polypeptide expressing nucleotide sequence isolated from the Sargasso Sea
gtctactaaccttgattattcgaaggacctattggaatattctgccaataacttcatcaatatggtgtatgcatcatctgcatctgtttatggaagcggtaatgtctttaaagaagaaccagaaaatgaatcctcactgaatcactactctgaatctaagttgttatttgataactttgtgcgtcaaaatttttcaaaaattaaatctcaagtggtcggaataagatattttaacgtttatggtccatatgagcagcataaggaagtaatgagtagtgtgatctatcatttttacaatcaattcaaaaaacttgggatgttaaaattatttcgtgggagccatggttatggtgatggggaacaaagaagagactttgtttatgtaaaagatactgtgaagattaagatttggtttatgaataataacgtgtcaggtatttttaatgttgcaacgggtaaaagtagatcatttaatgatgtaggtaatgctgtgataagttactttagttcaggacatattgattatgttgatttccccaaggggcttgagagacaataccaagcttatacacaagcagatatgactaatcttaataatgctggatatcaaggtaagcctactgaattagaagatggagtaaatgagtacctatcttttctagataaaacataa

SEQ ID NO: 290034 - DNA, 853 bp, Unknown
  Bacterial polypeptide expressing nucleotide sequence isolated from the Sargasso Sea
tctgtcaaaaaataattcagaaaatattgaaaactttgttggaagtattctagatgtaaataatgttaatgaagcagttagagggtgtgatgctgtaattcaccttgccgctaagttaggagtgaaaagaaccgaaacacatagattggaaactttgaatttaaatattcaaggtactgtaaatattttagaagcagcagtgaaaaataatattgataaagtaatttttacatcctcatcagagatctatggtgatcaatcagttgattttatatctgaaacatgtccaagaaaccctaaatctatatatggcgttacaaagttggcatctgaggagtatatggaagcatattatggatattataatcttaattattcaatattgcgatattttaatgtttatggaccagggcaagttgcagaatttgttttgccaaggtttattaaagctgctatggataataaatcacctataatttatggagatggtagccaggtaaggagtttttgttatgttgatgatattgctcgaggaacagctttggcgcttttaagtgataaagcaaactttgaggttttcaatttaggaaacgacaaggataaggttactattttagaagcagcaaaaaaagtgattaaagtttctggtaaagattatttgattccggagcttatttcatttaaagaggcagatagaagtactgatagagatattagcaaaagggttcccgatatatcaaaagcaagggaattattaggttacgaacctatagtatttttagaagaaggaattaaaagagtcatggaagatggggaaataccaccaagttggatagatcccatggagtattaa

SEQ ID NO: 290035 - DNA, 778 bp, Unknown
  Bacterial polypeptide expressing nucleotide sequence isolated from the Sargasso Sea
atgatagtcattactggtggggcaggctttataggcagtgcctttgcaaaaaaatgtaatcaaatgggagtcgatgatctcttaattgttgacagtcttaacgaatcagaaaaatggaaaaatctgagccatatatcctatgttgattatattcataaatctgaatttctagatatgattgtcgatgatatgcttcctccaaatattgaggctattgttcatatgggggcctgttcagcaaccacagaaaaggatatggactatttaatggataataattatcggtatacccgcatcttagcccaatggtgtgttgataataaaaaacgatttatttatgccagtagcgctgcaacttatggtgatggcgagaagggctttttagatgatcataataccttagatgaccttattccgattaatcgttatggctactcaaaacacctttttgatgtttatgcacaaaaacaaggctatctagataagatggtgggtttaaaattttttaatgtttttggtccaaatgaatatcataaagggtctatgatgagtatggtttgtaaaggctatactgaaattaaaaacacagggaaaatgaaattatttaagtcttacaaagacgagtttgaagatggtgcgcaacggcgtgactttgtctatgttaaagactgtgtagatattatttggtggttattagaaaatccaaaagtgaatggtcttttaaatatagggacaggaaaggcacgcacatggaacgatgtggctaaagccttattta

SEQ ID NO: 290036 - DNA, 733 bp, Unknown
  Bacterial polypeptide expressing nucleotide sequence isolated from the Sargasso Sea
gagttgattgaaaaaagaaaaccaatctgcgatgaaatcgattttatatttcatcagggtgcatgtactgtgactaccgagtgggatgctcgatatatgatggataataattttagatattcaaagactttactcagtttttgtcttgaacgctcaattccttttatttatgcctctagcgcatctgtttatggtacatgcacgaattttagtgagagaagaaaaaatgaaggacctctcaatatttatggatactcaaaatggttgtttgatcaatatgttcgaagtctagagaagaaaattaaatcacaagtagtaggtcttcgatattttaatgtttttggacccagagaggcccacaaaaataatatggcaagtgttgtttatcattttaataaccaaataaatgaaacagaacaggtgcagttattctcaggaagtcatggttatgataacggagaacaatgcagagattttatttttgttgatgatattattgatatgaatttatggatgatgaacaatcctagcatttctggaatttataatgcaggtacaggagtagctcatagttttaatgagattgcgaatactgtaataaaaagccgtaaaaagggaaaaattaaatatataccattcccaaaggaactagaagaatgttatcaaagttttacccaagcaaatctcaaaaaattacgttcagttggctataaaaaagaatttacttcattaa

SEQ ID NO: 290037 - DNA, 919 bp, Unknown
  Bacterial polypeptide expressing nucleotide sequence isolated from the Sargasso Sea
attgaagattctaattactggggtagcaggatttattggcagtaatcttgctgaattgctgataaaaaataattttgaagtaataggtattgataacttatcatacggtgtttcagagcagatacctaaaggggtagtttttcacaaagaagatattagaaataatgaaatttatcatctgttttcagacgtcgaatatgtttttcatttagcagcaaaaaattcaatcatagattgtgaaaatgatccagaagaaacatttcaaataaatgtcaatggaacaattaatgtatttaatgcagctataaaaaataatgtcaagaaagtcatatacgctgaatcatctgcagtctacgaaggatcaaagaacttgccaagcatagaaacagaggtatctccaaaaagtgtatatgcagagtctaaaatgacaaccaatcgtattgctgaagaattttctaaatctaaaggattggttactacaggtttaagatactttaatgtatatggacctaaacaagactacagaaggactatcccacctgtttttagcgcatttattattaatttgttgaagggccatcagcctataatttttggggatggttcaaaaaaaagagattttatttatgttgatgatgttaatgattttcatttaatgtgtatgaaagataacaaaacagataatgaagttttcaatattggttcaggtaaaaattattcaataaagcatatttttaactctataaaaaatatacttaatgtagatataaatccaatttttgggaaaaatcttgactttgaagctcaggaaaatcttgcaaatattgacaaagctaatagtattgggtggtcaccaaaaatcgatttaaatactggtttaaaaaagtctatagattatataaaagaacatgtaatttaa

SEQ ID NO: 290038 - DNA, 754 bp, Unknown
  Bacterial polypeptide expressing nucleotide sequence isolated from the Sargasso Sea
tgtgaggatattgattttatgtttcatcaaggagcatgtactgtgacaactgagaaaaatgtcgaatatatgatgagcaataactacatgtactcaaaaacgttattagatttttgtacggagcgtgagattccatttatttatgcatctagcgcggcgatttacggccttagctcaaattttactgaggaagaaaaaaatgaggagccgattaatatttatggccaatctaaatggatgtttgatcagtatgtgcgtgatttaaaaattagaaagatacttaaatcacaggtagttgggctcagatattttaatgtttatgggccacatgaaacacataagaaatcaatggcaagtgtcatatatcattttaataatcagatcaatgatatgggaaacctaaatttattctctgcaagcggtggatataagaatggagagcaacgcagagattttatatatgttgatgatgttgttaagacaaatgtctggatgatgaataatagaaatatttccgggatatataatgttggaacgggtaaatcaaatagctttaatgatattgcgaatacaatcattaaaagacgtaaaaaaggaaaaattaactacatcccttttcctaaagaaatagagaaaaattatcagagttttactgaagcaaaccttactaaactaaggtcaataggttacaacaccgaatttatatcggttgataagggtgttaatttgtatctagatgaacttcttaattaat

SEQ ID NO: 290039 - DNA, 648 bp, Unknown
  Bacterial polypeptide expressing nucleotide sequence isolated from the Sargasso Sea
aaactaaaacgcccctgatttatgcctcgtctgcttctgtctatggagcgggaaaaatttttaaagaatctgttgaatacgaagatccaataaacctttacgcatactctaaatttaaatttgatcagttggtaagacaagaattaatcaaaagagaaacacaaatagttggcttgagatatttcaatgtatatgggcctcaagaacaacataaaggaactatggcaagcgttgctttccattttcataatcaactcaaagataatgaggaaattaaattatttgagggttctgaaggttatgatgatggagaacaaagaagagattttatttatgttgatgatgtagttaaagtcaacctatggtttctaaaaaataaaaaagtatcaggtatattcaatgtaggaacaggtaagagccagactttcaatgaagtagctcactcagtaataaattggaataaaagaggcaagataaattacgttccttttcctgaaaagctaaaaggcgcatatcaaagctatactcaagctaatatctcaaaattgagagaagctggctataaggatgagttcttgaacgttcaggaaggtgtaaagaaatatttagacagacttgaaagttggccaaaaaatgaaccgtcttaaa

SEQ ID NO: 290040 - DNA, 537 bp, Unknown
  Bacterial polypeptide expressing nucleotide sequence isolated from the Sargasso Sea
aatttaagtttgatcagttggtaagacaagaattaatcaaaagtgaaacacagatagttggcttgagatatttcaatgtgtatgggcctcaagaacaacataaaggaactatggcaagtgttgctttccatttacataatcaactaaaagataataatgaaattaaattatttgagggttctgatggttatgacgatggagaacaaaggagagattttatttatgttgaggatgtagttaaagtgaatctatggtttctagaaaatcaaaaagtatcgggtatattcaatgtaggaactggcaagagccagactttcaacgaagtagctcactcggtaataaattggaataaaaaaggaaagatcaattacgttccttttcctgaaaaacttaaaggtgcatatcaaagctatactcaagctgatatctcaaaattgagaaaagctggctataaggatgagttcttgaacgttcaggaaggtgtaaagaagtatttagacagacttgaaagttggccgaaaaatgaaccgtcttaaa

SEQ ID NO: 290041 - DNA, 526 bp, Unknown
  Bacterial polypeptide expressing nucleotide sequence isolated from the Sargasso Sea
tatggtttctccaatattccttcgacattacgttcgccgttttttgcctgaggctcagtcccaaatcctcggactgcgttattttaatgtctacggtccccaggaaacccataagggaaggatggcctctgtcgccttccatctatttcaccagctccgcaaagggggttcgatgaacctttttgagggcagtgaaggattcagaagggattttatccatgtccaggacaccattaaaatcaatcttcattttctcgagtcagggaaaagtgggattttcaatgcgggtaccggaaaagccagaagcttcactgccatcggagaatgcctaagggagatcgagggttccggagaattgaacaccattcccttccccgatgacctacggggcaaataccaggaattcaccgaggccgataccacccgggtcagagaagctggctacgaggaggaatttctcagtctggaagaaggaattcggctataccacaaaatgctttctgaaaatggtggctttcatctctaa

SEQ ID NO: 290042 - DNA, 277 bp, Unknown
  Bacterial polypeptide expressing nucleotide sequence isolated from the Sargasso Sea
tatgatcatcgttaccggcggcgcgggctttatcggcagcaacatcgttaagtccctgaatgataaaggcatcaccgacatcctggtggtggacaacctgaaagacggcaccaagtttgttaacctggtggatctgaatattgctgactacatggacaaggaagacttcctgatccagattatggccgggggaagatttcggcgatatcgaagctattttccacgaaggcgcatgctcttccaccaccgagtgggacgggcagtatatgatggataa

SEQ ID NO: 290043 - DNA, 581 bp, Unknown
  Bacterial polypeptide expressing nucleotide sequence isolated from the Sargasso Sea
agaaaagttagaaaatgaatctccaatcaatctttatgcctactctaaatacttattcgatcaaattgtaagaaaacatttggggagtaatgaatctcagatagtaggattaagatattttaatgtctatggcccaaatgaagtccataaagaaggcatggcaagtgttgcgtaccatcttcaccagcaacttaaaaacagcgatcaagttaacttatttaaaggttcagatggatttggtgatggagagcaaagaagagattttatacacgttgatgatgtggtgaatgttaatttatggtttatggataatcccagtgtctcaggtattttcaacgtgggaacagggaagagtcaaactttcaatgaagttgcaaatgcagtaattgaatggaatcagaaaggtcatataaattacattaattttccggagaatttaaaaggtgcttatcaaagtttcactgaagctgatattggtgcattaagaagtgcaggctacaagcaagaatttctagatgtgagtagtggcgtaaaaaaatacttagacgtcttatcgggttggccaaaaaatgaatactgat

SEQ ID NO: 290044 - DNA, 498 bp, Unknown
  Bacterial polypeptide expressing nucleotide sequence isolated from the Sargasso Sea
acgttcgccgttttttacctgaggctcagtcccaaatcctcggactgcgttattttaatgtctacggaccccaggaaacccataaggaaaggatggcctccgtcgccttccatctatttcaccaactccgcaaggggggttcgatgaacctatttgagggcagtgaaggattcagaagggattttatccacgtccaggacacgattaagatcaaccttcattttctcgagtcagggaaaagtgggatcttcaatgcgggtaccggaaaagcgagaagtttcactgccatcggagaatgcctgaaggatatcgagggttccggagaattgaaaagcattcccttccctgatgacctccggggcaaataccaggaattcaccgaggccgacaccactcggctcagagaagccggctacgaggaggaatttatcagcctggaagaaggaattcggctttaccataaaatgctttcggaaaatgggggcttacatctctaac

SEQ ID NO: 290045 - DNA, 790 bp, Unknown
  Bacterial polypeptide expressing nucleotide sequence isolated from the Sargasso Sea
atgaaaaattattttgataataaaaacattttagttacaggtggaaccggttttattggttctaatattgtaaaatatttaataaataataatgaaaatgtatcaattgatatatttgacaaagaggataatttaaaatattttaccaaaaaagaattaaatagtattaaacttataaaaggtgatttggaaaattttaattttgataatttaaaaaacaaatatcatcatatattccatcaagctgctataacagacacaacagtaatggatgaaacacttatgttatctgttaatacagaatcatttaataagattgttaatttagcattaaaaaataattctactttaatttatgcatcatcagctgcaacttatggtaacaccgatgctccgaatatagtaggtaaaggtgaaaaaccaactaatatatacggtgtatctaaactaaaaatggatcatttagcatacaaatttatgaaattatatccagaattaaaaattattggattaagatattttaatgtttatggtccaggagaatcaaaaaaaggaaaaatgtcttcaatgattcttcaattatataaacaaatagaaaaaaatcaacccccaagaatttttaaatatggtgaacaaaaaagagattttgtttatgttaaagatgtagtgcaggcaaatataaaagcaacaataaatggtgaatcaggtgtttacaatgttggaagtggaaaagcaagaagttttaatgatatagtgtcaattattaatgatattctaaactctgataaag

SEQ ID NO: 290046 - DNA, 582 bp, Unknown
  Bacterial polypeptide expressing nucleotide sequence isolated from the Sargasso Sea
ccctgtttgatcgttacgcattcggagagagcaggccagcttcgccgcaactggtggggctgaggtactttaatgtttacggcccgcgcgaagaccataaaggacggatggcctctgttgcgtggcatctgacgcgccagtattttgagtcgggttcggtgcggttgttcgagggctcgggcggctaccaggcaggcgaacaacggcgggactttatccatgtggatgatgtcgttaaggcgaatctgtttttccttgataacccggaaaaaagcggaatcttcaacgtggggacgggaaaggccggaactttcaacgatgtcgcgttagctgtgatcaacgcctgtagagagatcgatggtaagcccaagttgctgctcgaagaggcctgccgcgaagaactgctgggctattttccgatgcccgatgccttggtaggcaagtaccagagttataccgaagcggatgtcagccaccttaaggcagcaggtttttcgaacaactcccttgatgttgaggagggagtggggcggtatgccaagcaactctataccaccctaaagaagggggagcatagctaat

SEQ ID NO: 290047 - DNA, 877 bp, Unknown
  Bacterial polypeptide expressing nucleotide sequence isolated from the Sargasso Sea
gatgatcacaataatcctgaactcaaagaaaatataactcattgtgaaataaaggattatcttgatatagatgaatttctgtttctacttcaaaaaaataaatttgacggaacgaaactcaaatcaatctttcatcaaggtgcttgctctaatactatggagtgggatgcagaatatctatataagaataactttttatactcaaaagaaatattaaatctttcaatacaatcggatactcccctcatctatgcctcttctgcctctgtttatggaagtggtgatgttttcgaagaatcaattgagaatgagaatccaattaatctgtatgcatatactaaatttaaatttgatcaactggtaaggaaagccttaactgaaaatactactcaaattgttggacttaggtacttcaatgcttatggccctcaggagcaacataaaggtagcatggctagtgttgcgtatcatttacataatcagttaaaagataacgactccataaagttgtttaaaggatctgacggatataacgatggtgaacaaaggagagatttcatttatatcgatgatattgtcaaggtcaatctttggtttatggaaaacaaaaaaatttcaggtattttcaatttaggtactggtaaaagccgtgcatttaatgacgttgctcaggctgtaatcaattggcatagccaaggaaaaattgaatatattgattttcctgagaagttaaaaggctcatatcaaagctttacagaagctaacatttcaaaattgagaaaagtaggatacacagaagatttcgtagatgtcactgaaggagtaaacctttatttagataacttagaaaaatggccaaaaaatgatccttcctaat

SEQ ID NO: 290048 - DNA, 531 bp, Unknown
  Bacterial polypeptide expressing nucleotide sequence isolated from the Sargasso Sea
acttatttgatcaaaatgtaaggcgtcacttaggtaaaaataaatctcaaatagtaggtttaagatattttaatgtgtatggtcccaatgaagcccataaaggtagaatggctagtgttgcctaccacttacatcaacaacttaaaacaagcgagcaaattaatttattcaagggttcagatggatttgaagatggagaacaaagaagggattttatacatgtagatgacgtggtaaatgtaaatttatggtttatgaacaatacaaatgtttctgggatttttaatgttgggacgggcaaaagtcaaacctttaatgaagttgcaaaggcagtaattaaatggaatcagaaaggtcacataaattacatagacttccctgaaaaacttaaagatgcctatcaaagttttactgaagcggatattgaggcattaagaaaggcgggctacacagaagacttcctagatgtgaatgctggtgttaaaaaatatttagatgccttgtcgggttggccaaaaaatgaatactgaa

SEQ ID NO: 290049 - DNA, 531 bp, Unknown
  Bacterial polypeptide expressing nucleotide sequence isolated from the Sargasso Sea
catgaccatcattgtcaccggcgctgccggctttatcggcgccaacatcgtcaagggcctgaacgagcgcggcgagaccgacatcatcgcggtggacaacctcacgcgggccgacaagttcaagaacatcgtcgactgccagatcagcgattacctggacaagaccgattttgtcgagcgctttgcgcgcggcgagttcggcaaggtccgtgcgatcttccatgaaggggcctgctccgacaccatggagaccgatggccgctacatgatggacaacaattaccgctactcgcttgcggtgatgcgcgcgtgtctggaccagggcgtgcagttcctctacgcctcgtcggcagccacatacggcgcgtcggaaacgttccgcgaagagccccagttcgagcggccgctcaatgtgtacggctactccaagctgctgttcgatcagatcgtgcgccgtgtcatgccgaccgcgctgtcacagatcgtcggcttccggtcttcaacgtctacggcccgcgcgagcagccttcc

SEQ ID NO: 290050 - DNA, 834 bp, Unknown
  Bacterial polypeptide expressing nucleotide sequence isolated from the Sargasso Sea
tcgacctcaccatcgccgattacatggacaaggacgagttccaggcgcggatcgtctccggtgacgaattcgaggaatgggatgacggcatcgaggtgatcttccacgaaggcgcctgctccgcgaccaccgagtggaacggcaagttcatcatggaggtcaactacgagtactccaaggatctgttccactactgcatcgagcgggaaattccgttcatctacgcctcttccgccgcgacctatggcgggcgcaacgacaacttcatcgaagacccgaggttcgagcagcccctcaacgtctacggctactccaagcagctgttcgatcagtacgtgcgtcgctggatgccggagatcaactcccaggtggtgggtctcaagtacttcaacgtctatggtccccgcgagcagcacaagggatccatggcgtccgtggccttccacctcaatacccaggtgaagcagggtgacaatcccaagctgttcgagggctgtgacggcttcccggatggcggccagatgcgcgacttcatctacgtggacgacgtctgcaaggtgaacctctggttctggcagaatccgcagcactccggcatcttcaactgcggcaccggccgtgccgagccgttccagaacgtggcggaagccgtgatcaggcatcaccagaaaggcgccatcgaatacattcccttcccggatcacctcaagggtcgctaccagagcttcacccaggcggatctcaccaagttgcgcggcgtcggctatgacggcgagttcaagactgtggccgaaggcgtggccgattacatggcctggttgaaccgggcttgat

SEQ ID NO: 290051 - DNA, 599 bp, Unknown
  Bacterial polypeptide expressing nucleotide sequence isolated from the Sargasso Sea
catgatagttgtaactggaggagcaggatttatcgggagtaatattttaaagggtcttaatgatataggagaaaaaaacatactcgttgtcgataatttaagtaatgctcagaaacatcttaatttgaacagattgtcattcactgattacattgacaaagatgattttgttttaaatataggcaaatttacaaatttaagcactatctttcatcagggagcatgctcatcaaccacagagcaggatgggaagtacatgatgtcaaataactatgaatattctaaaattcttctgaataattgccttgaacacaagatcgattttctttatgcctccagcgctgcagtttatggaaatgggggaaatgggtttactgaggaatcgaaagctgaatacccgatgaatgtttacggattttccaaatttgccttcgataattatgtcagacgtgttttgcctaaatcagaaattcagattttaggattacgctatttcaatgtctatgggcctcaagaaaatcataaaggacgcatggcctcagttgcttttcatctctttaatcaacttcatgattctggaaaaatgagactttttgagg

SEQ ID NO: 290052 - DNA, 994 bp, Unknown
  Bacterial polypeptide expressing nucleotide sequence isolated from the Sargasso Sea
catgaccctcatcgtcaccggcgcagccggttttatcggcgcgaacatcgtcaaggcgctcaacgagcgcggcgaaacgcgcatcatcgcggtcgacaacctgacgcgcgcggacaagttccggaatctcgtcgattgcgagatcgacgactatctggacaagacggaattcgtcgaacgtttcgcccgcggcgatttcggcaaggtacgcgcgattttccatgaaggcgcctgttcggacacgatggaaaccgacggccgctacatgatggacaacaacttccgctacagccgcgcggtgctcgacgcctgcctcgcgcagggtacgcagttcctgtacgcatcgtctgccgcgacctacggcgggtcgacgcgcttcgtcgaggagcgcgaggtcgaggcgccgctgaacatctacggctattcgaagttcctgttcgaccaggtgatccgccgcgtgctgccgaccgcgaagagccagatcgccggcttccgctatttcaacgtgtacggcccgcgcgagacgcacaaggggcgcatggcgtcggtcgcgttccacaacttcaaccagttccgtgcagaaggcaaggtgaagctgttcggcgagtacaacggctacgcaccgggcgagcagacgcgcgacttcgtgtcggtcgaggacgtgacgaaggtgaatctgttcttcttcgatcatccggagaagtcgggcatcttcaacctcggcacgggccgtgcgcagccgttcaacgatatcgcatcgacggtcgtgaatacgctgcgtgcactcgacaaccagccgccgctgacactcgcgcagcaggtcgagcaagggctgatcgaatacgtgccgttccccgatgcactgcgcggcaagtaccagtgcttcacgcaggccgatcagacgaagctgcgcgcggccggttacgacgcaccgttcctgaccgtgcaggaaggcgtcgaccgctatgtgcgttggctatctggccaggtttaa

SEQ ID NO: 290053 - DNA, 652 bp, Unknown
  Bacterial polypeptide expressing nucleotide sequence isolated from the Sargasso Sea
atgataattgttacaggcagtaatggctttattggatctaatctaataaaaggcctcaattcaatgggcataaaagacatacttgctgtcgatgaccatgaaaagcttcctccaagcgagaacttatctaattgtgaatttgaagatcttattaaaattgaagatattgctgagctcttaaggaattatccaactaatgacataactcatatattccaccaaggtgcctgctcagacactatggagaaagatataaattatatgatcaaaaataattatctcttttctaaagatctgctcactctagccttagaaaaaaatataaattttatttatgcttcttctgcatctgtatatggagatggaaaaatcttcgaagaagacaagaaatatgaaaaacctataaatttatatgcatattccaaatttatatttgatcaatacgttcgggaactaataaataaaactgactctcaaatagtaggtttacgttatttcaatgtctatggacccaatgaacaacacaaaggaagaatggctagtgtagccttccatcttcatcaacagctgaaagaatcacagtcaattaaactctttaaggctctgatggttatgaagatggagagcaaaaaagagattttattcatgtaga

SEQ ID NO: 290054 - DNA, 958 bp, Unknown
  Bacterial polypeptide expressing nucleotide sequence isolated from the Sargasso Sea
catgatcgtagtaactggcggtgctggctttatcggcagcaatctggtcaagcagctgaacgctcaaggacggaccgatgtggtggtcatcgatgacctgaccgacggcaccaagttcgtcaatctggtcgatctgaccattgccgattacatggataaggatgagttccaggcgcggattgtctccggcgacgaatttgaagagtgggatggcggcatcgaggtgatcttccacgaaggtgcctgctccgccaccaccgagtggaacggcaagttcatcatggaggtcaactacgagtactccaaggatctgttccactactgcatcgagcgggaaattccgtttatctacgcttcttctgccgccacttatggcgggcgcaacgacaacttcatcgaagatccgaagttcgagcagccgctcaacgtctacggctactccaagcagctgttcgaccagtacgtgcgtcgctggatgccggagatcaactcccaggtagtcggtctcaagtacttcaacgtctatggcccgcgcgagcagcacaagggctccatggcctcggttgccttccacctcaatacccaggtgaagaagggcgagaatcccaagctgttcgaaggctgcgacggtttccccaacggcggccagatgcgtgatttcatctatgtggatgacgtctgcaaggtgaacctctggttctggcagaatccgcagcactccggcatcttcaactgcggtaccggccgggccgaaccgttccagaacgtggccgaagcggtgatcaagcatcatcagaagggtgccatcgagtacattcccttcccggatcacctcaagggccgctatcagagcttcacccaggcggacatgaccaagctgcgcggcgtcggttatgacgccgagttcaaaaccgtggccgaaggggtcgcggattatatggcgtggctcaaccgctaa

SEQ ID NO: 290055 - DNA, 967 bp, Unknown
  Bacterial polypeptide expressing nucleotide sequence isolated from the Sargasso Sea
ttgatagttgtaaccggaagtaatggatttattggatccaatcttattaagggccttaataaaattggctacaaagatatcattgctgttgatgatcacaataaccctgaactcaaagaaaatataattcattgtgaaatacaggattatcttgatatagatgaatttctgttgctaattcaaaaaaataaatttgatggaacgaaactcaaatcaatctatcatcaaggtgcttgctctaatacgatggagtgggatgcagaatatctatacaagaataactttttatactcgaaagaaatattaaatctttcaataaaatcgaatactcccctcatctatgcctcttctgcctctgtttatggaagtggtaatgttttcgaagaatcaattgagaatgagagtccaattaatctgtatgcatattctaaatttaaatttgatcaactggtgagacaagccttaactgaaaaaactactcaaattgttggactaaggtacttcaatgtttacggccctcaagaacagcataaaggcagcatggctagtgttgcgtatcatttgcataatcagttaaaagataacggctctataaagttatttaaaggatctgacggatatagcgatggtgaacaaaggagagatttcatttatatcgatgacatagtcaaggtcaatctttggtttatggaaaacaaaaaaatttctggaatattcaatttaggtacaggtaaaagccgtacatttaatgatgttgctcaggctgtaatcagttggcatagcaaaggaagaattgaatatattgattttcctgaaaagttaaaaggctcatatcaaagctttacagaagctaacatttcaaaattaagagaagtaggatacagagaagatttcatagatatcactgaaggagtaaacctttatttagataacttagaaaaatggccaaaaaatgatccttcctaat

SEQ ID NO: 290056 - DNA, 994 bp, Unknown
  Bacterial polypeptide expressing nucleotide sequence isolated from the Sargasso Sea
atgaccctcatcgtcaccggcgcggccggctttatcggcagcaatctcgtgaaggcgctcaacgagcgcggtgaacaacgcatcatcgcggttgataacctcacgcgcgcggacaagttcaagaatctggtcgactgcgagatcgacgattatctcgacaagaccgaattcgtcgaacgcttcaagcggggcgacttcggcaaggtgcgcgcgattttccacgagggcgcctgctcggatacgatggaaaccgacggccgctacatgatggacaacaacttccgctatagccgtgaggtgctcgacgtctgtctcgcgcagaacatccagtttctgtatgcatcctcggcggcaacgtatggcgggtcgagccgttttgtcgaagagcgcgaagtcgagcagccgctgaacgtgtacggctattcgaaattcctgttcgaccaggtgattcgccgcgtgctgcccaccgcgaaaagccagattgccggcttccgttacttcaacgtgtatgggccgcgcgagacccacaaggcgcgcatggcgtcggtggcgtttcacaacttcaaccagtttcgcgcggaaggcaaggtcaagctgttcggcgaatacaacggctatgccgccggcgaacagacgcgcgatttcgtctctgtcgaagatgtggtcaaggtgaacctgttcttcttcgacaatccggacaagtcaggcattttcaatctgggcagtggtcgtgcgcaaccgttcaacgacatcgcgagcacggtggtcaacacgctgcgtgcgctgaacaacgagccgccgttgtcgctcgcggatcaggtgcagcgcggactgatcgagtacattccgttccccgatgcgttgcgcggcaagtaccagtgcttcacgcaggccgacctgacgaagctgcgtgccgccggctatgacgcgccgttcctgagcgtgcaggaaggcgtcgatcggtacgtacgttggctattcggccaggtgtaaa

SEQ ID NO: 290057 - DNA, 961 bp, Unknown
  Bacterial polypeptide expressing nucleotide sequence isolated from the Sargasso Sea
tatgattgtagtcactggtagcaatggctttataggttcaaatctaataaaaaatctaaatgctttgggatttgcggaaattctagctgtggacaatcacgacgatgaggatctaaaggaaaatataaaagactgccaaataagtgagtatttaggtatagatgagtttttaaccttaataaagaataggaacttagattcagaaattaaaacaatatttcatcaaggtgcttgctcaaatactatggaatgggatggcgagtacctttttcaaaataatctactttactcaaaggaattacttaaattttgtttagaaaaatcaatacagttcatatatgcctcttcggcatctgtatatggctctggaactaattttaaagaagatttgaataacgaatctcctatcaatctttacgcatactccaaatacttatttgatcaattggtaaggaaacatttaggtaaaaataaatctcaaattgtaggattaagatattttaatgtttacggtccaaaagaaactcacaaaggcagtatggcaagtgttgctttccatttacatcaacagcttaaagccggcactaaagttaacttgttcaaaggatcagatgggtttgcagatggagaacaaagaagagattttgtttacgtagatgatgtaatcgatgttaatttatggtttatgaaaaacccagataaatcaggtatatataatgtaggaacaggcaaaagtcagactttcaatgaggtagcagaggcagtaattgaatggaatcaaaaaggcctaattaattacattgattttcctgatcatctgaaaggtgcttatcaaagctatacagaagcagatattgattcattgagaaaagctggctacagccaagagtttctagacgtaaaagcaggggtaaaaaaatatttagattccttatctaattggccacaaaatgaatactga

SEQ ID NO: 290058 - DNA, 1072 bp, Unknown
  Bacterial polypeptide expressing nucleotide sequence isolated from the Sargasso Sea
tttgcaaaccgtcacagggggccggccagtgctaaaccaaacgacagacctggcgccggacggccagccgtggaacctgatcaccctgcggaataatgccgggatggtggttacgctgatggactggggcgcgacgttattatctgctcaggtcccgctggccaacggcgaagtacgcgaagcgctgctcggttgcgcggcgccggaaaactatacccgtcaggcggcctatctcggcgcctccgtaggccgctatgccaaccgtatcgccaacagccggtttactctggatggccagacggtccaactgaccccttctaacgaagccggtcatcagctgcacggcgggccagacggtttcgacaaacgtcgctggcagatagttagcgccgacgaacaccaggcgctgtttgccctcgcttccgatgacggcgaccaggggtttcccggcaacctgaaagccacggcgcactaccgtcttactgaagataaccgcatcgctatcgagtatcgtgcgacggttgacaggccctgtccggtcaacctgaccaaccacgtctacttcaaccttgacggtgggcagacggacgtccgcaaccaccagctgcaaattttcgccgacagctacctgccggtggagagcgacggtattccgggcggcgatttacaggacgtcacccggaccagcttcgatttccgcacgccgaaaaccgtagcggtcgattttcttcgcgatgccgatcagcagaaagtaaaagggtatgatcatgctttcctgctacaggcaaaaggcgatgcccgcaaggcggcggcccatgtctggtctcaggatggtcaactgcagatggcggtgtatacctccgcccctgccctgcagttttattctggtaactacctgggcggtacaccgtcgcgtacggaacagccgtacgccgactggcagggtctggcgctggagagtgaatttctgccggactcaccaaatcacccggaatggccccagcccgactgcatattgcgcccgggcgaggagtacgtcagtctgacggaatatcagtttattgcccgataa

SEQ ID NO: 290059 - DNA, 582 bp, Unknown
  Bacterial polypeptide expressing nucleotide sequence isolated from the Sargasso Sea
catgttagaacaactgaaagccgaggtgctggcggcaaacctggcgctcccggctcatggcttagtcacctttacctggggcaacgtcagcgcagtggatgaaacacgtaaactgatggtgattaagccatccggcgtggaatatgaggtgatgaccgccgacgacatggtggtagtggatattgccagcggcaacgtggtggaaggcaacaaaaaaccgtcgtccgacacgccaacccatctggcgctgtatcgtcgttatccacagatcggcgggatcgtccatacccattctcgccacgcgacgatctggtcgcaggcgggtctggatctccctgcatggggcaccacgcatgccgattatttctatggttctattccgtgtacgcgtctaatgaccgctgaagagatcaacggcgaatatgaatatcaaaccggagaggtgatcattcagaccttcgagcagcgcgatctcaatccgctgcaggttccggcggtattggtgcactcccacggaccgttcgcctggggtaaagacgccgcagacgcggtgcataacgctgtggtgctcgaagagtgcgc

SEQ ID NO: 290060 - DNA, 439 bp, Unknown
  Bacterial polypeptide expressing nucleotide sequence isolated from the Sargasso Sea
atgttagaagatcttaaacgtcaggtgctggaagccaatctggcgttgcctaagcacaacctggtcaccctgacctggggcaacgttagcgccgtcgatcgcgaacgcggcgtatttgtgattaaaccatccggtgtcgattacagcgtaatgaccgcagaagatatggtcgtcgtcagtatcgctaccggtgaagtggtggaaggtaataaaaagccctcttccgataccccaacgcaccgtctgctgtatcaggctttcccgaccattggcggcattgttcacacccattcccgtcatgcaaccatctgggcgcaggcggggcagtctattcccgccacggggaccactcatgcggactatttctacggcacgattccctgcacacggaaaatgaccgaggaagaaatcaacggcgaatatgagtgggaaaccggta

SEQ ID NO: 290061 - DNA, 355 bp, Unknown
  Bacterial polypeptide expressing nucleotide sequence isolated from the Sargasso Sea
catggttcaaggtggtggccttgatgctgacatgcaaaataaaccttcagagtctgctgcgattgaaaatgaagccaataatggtctcaaaaatgatagaggtactatcgccatggcaaggacaatggatccccactctgctacgagtcagttctttattaatcatgcggataatgattttctaaacttttcttcagagactacccaaggatggggctatgcagtctttggaaaagtaattgaaggcatggaggtagttgatagtgttgcgctaagtcctactatggttgttaatggctatcaagatgccccagcaaaccctgtaatcatcaactctgtctctattagtgaatga

SEQ ID NO: 290062 - DNA, 370 bp, Unknown
  Bacterial polypeptide expressing nucleotide sequence isolated from the Sargasso Sea
gatgagatgcgccaatactgtaaaaaatttcactgacctaatagaaaaaggattctatgacggacttaattttcacagggtgatcccaaactttgttatccaaggtggttgtccgcaaggaactggtacaggaggccctggctaccgtattgattgtgaaatcaatcccaatcggcatcaagctggaaccctatcaatggctcatgcaggaaaagatactggtggaagtcaattcttcatctgccacagtccgcagcctcatttagatggggtacacacagttttcggacataccgcaaacatggatgtggtaaattcaattgaacagggcgatgagataatctctgcagagattgtttctggtgactga

SEQ ID NO: 290063 - DNA, 727 bp, Unknown
  Bacterial polypeptide expressing nucleotide sequence isolated from the Sargasso Sea
atgggcggcgacgacctcggccctgacgccatgagcgacgaggatgacatcgtctacgacgatctggaggtcggcgaggaggcggacgtctccaagctgaaggacggcgggtgcgtgaagaaggtgctcgtcaagggcacgggcacggaccgccccgagacgggctccgaggtcacggtgcactacaccgggacgttattggacggcacgaagttcgactcgagcgtcgatcgcggcgaccccttcaagttcaagctcggcgtcggccaggtcatcaagggctgggacgagggcgtcgcgagcatgctcaagggcgagaaggcgatcttgacgtgcaagcccgactacgcgtacggcgcccggggctccccgcccacgatcccccccgacgcgacgcttcagttcgaggtggagctcttctcgtggacgtccgacaaggactacttcgacgacggcgggtgcgtcagggtcaagaccctcaagcgctcgagcgcgtacggctcccccaaggacatcgacgaggtgacggtgtcttacgccgtctccgcgccggacgacgacgtcgcgggcgccggcgacgagatcgtcaagcccacggacgcgacgttcgcggtcaaggacgcgccgttcgtcggtttgggcgccatcctgaagaagatgaaggagggcgagagcgtcctggcgaggatgcgcgacgtccccggcgggacccagtactgctccggcc

SEQ ID NO: 290064 - DNA, 424 bp, Unknown
  Bacterial polypeptide expressing nucleotide sequence isolated from the Sargasso Sea
gatgcaagcaattatgaaaacagcaaagggcgaaatacagatcgatctttttaatgaagatgcgcccaatacagtaaagaatttcacagatttaatcgaaaaaggattctatgacggacttaattttcacagagtgattccaaactttgtcatccaaggcggatgtccgcaaggaactggaactgggggacctggatatcatattgactgtgaaattaatgcaaatagacatcaggccggaactctttccatggcacatgcaggcaaagacactggaggcagtcaattctttatctgccacagtccacagcctcatttagatggtgtgcataccgtttttggacacaccgcaaatatggatgtagtaaattcaattgaacagggcgatgaaataatctcagttgagattgttcctagcgactga

SEQ ID NO: 290065 - DNA, 253 bp, Unknown
  Bacterial polypeptide expressing nucleotide sequence isolated from the Sargasso Sea
atggcaaaccaaggaacacccaacaccaacggttcgcagttctttatcgttactggcccgttcggtgcttctttggatcccaattactccttaatgggtcatgtagttgctggtctcgacgtggcgttagcgatacagaaagtcgaaaccgatgctcaggatttgcctgtcgaaccagtgttaatcagctctgtaacgattgctggagccgcctcttccgagatcgatatatacaaagatttgactgattagc

SEQ ID NO: 290066 - DNA, 583 bp, Unknown
  Bacterial polypeptide expressing nucleotide sequence isolated from the Sargasso Sea
ttggtatctaccgaagtttttgcagatcaggttgaccaaagacttaagataaaaataattaaatcaggaaaagggcaggaagcactcccacaatcgaaggtgactgtgcactatacggggtggttgttaaacggccgtaaatttgactcaagtctcgacagaaaacgaccatttgaatttactcttggtgctggaagagtaatcaagggctgggaccaaggtgttctaggtatgagagtgggtgaaaagcgagagattatagtaccccctgaactaggctatgggagaacaggtgctggcggggttataccacctaatgctactttaaaatttgaagttgaattactctcggtcaaggcacctaagtttaaaagtattgatgaaaatacattaagaagattagtaaaaaatggaacaaaaataatagatatcaggcgcccagaagagtggttaaaaactggtgtgataaagggtagctacaaactaacagcattcgataaatcgagtcgttttaatcgatcatttccactagaactatctaaaatttcttctccggttgaaccggaattgttattattgtaga

SEQ ID NO: 290067 - DNA, 310 bp, Unknown
  Bacterial polypeptide expressing nucleotide sequence isolated from the Sargasso Sea
ttctggcacccaaccaatccaaaatgaagctaataatggtttaccaaatgacagaggaactattgctatggcaagaactggtgatcctcattcagctacaagtcagttttttataaaccataaagataatagtttcttaaatcactcatcagaaactatgcgtggctggggatatgcagtatttggaaaggtaacagatggaatggatgttgttgatgccattgctgtggtcgataccggtaactttcaacagtatgcagatgtgccagttgagccaattatgattcaatcgatatctgttatggaatga

SEQ ID NO: 290068 - DNA, 292 bp, Unknown
  Bacterial polypeptide expressing nucleotide sequence isolated from the Sargasso Sea
aggctcgtacctttacccggagcaaagttttcagttcattatcaaggaatgctacttaatggaactatttttgattcttcatataagcgaaataaacctataaagttttctgttggtgttgggcaagtaattaagggatgggacgaaggaattatgcttctaaataaaggtgctgctgctcgtttcgtaattccaagtcatttaggctacggtatgagaggagctggaggtgtaatccctcctaattcaactttaatttttgatgtagagcttataaacattgaaaattaaa

SEQ ID NO: 290069 - DNA, 733 bp, Unknown
  Bacterial polypeptide expressing nucleotide sequence isolated from the Sargasso Sea
atgaatactgaattaaatgataataaagaatttattactgaatctggtttaaaatatgaaattattaaaatgggtaatggggaaaaaccagttgcaacagacaaagttgaagtacattatcacggaactcttttagatggtacagtttttgattcatcagttgatagaggtcagactattacatttggattaaatcaagtaatcaaaggttggaccgaaggattacaattaatgccaattggttcaaaatttaagtttactattccacctgaattaggttatggtgatcgtgatataggcagcattcctgcaaattcaacattaatatttgaagtagaattatttgacatccaaaaaccatttgttgatgctgatttttcaattccagctgaagaaatagtattagaatctggattaagatatttagaacatattccaggatctggagatgtaactacaaaaggtaatatcgttgtggtacattattcaggttttttatctgatggtaccaaatttgatagttctcacgatagagctagaccatttaattttacattgggagaaaatcgtgtaattaaaggctgggaagaaggtttattaaatatgaaaaaaggtggtaaaagaacattaattataccacctgatttagcatatggagaaagaggtgctggaggagtaattccacctaacgcaactttacttttcgaagtagaattagttgattttaaataat

SEQ ID NO: 290070 - DNA, 267 bp, Unknown
  Bacterial polypeptide expressing nucleotide sequence isolated from the Sargasso Sea
atctcaagtggactttatctatggcccgaacaaacgatcctcattcagctagttcgcaattttttataaatttagtaaataatgtttcacttgatcatacggaagaaactatacaaggttggggatatgcagttttcggcgaagttgtcgatggctttgagactgttgaagcaatcgcagctacagcaacaggtagttcaggttttcatcaagatgtcccgattgaagaaatattaattacagacactaaagtgacaactgaataaa

SEQ ID NO: 290071 - DNA, 439 bp, Unknown
  Bacterial polypeptide expressing nucleotide sequence isolated from the Sargasso Sea
aatgacacaagcattatttgaaactgaagttgggaacattaatattgaatttttctctgacgacgcacctaatacagtaaaaaacttcacgaagttgatatgtgatggtttttatgatggtttagcatttcacagagttatacccggatttatggctcagggtggatgtcctaatactagaaatggggcatccggcatgcctggaactggaggtccaggatataatattaaatgtgaaatcaatgctaataagcacttaaaaggttccctttctatggctcatgcaggaaaggatactggtggtagccaatttttcatagtttatgaaccacagccccatcttgatggtgttcatactgtttttggtaagacagatgatatggatgtcgtgctaaagctaactaatggatcaaaaattttaaaagcaactgtaaattaa

SEQ ID NO: 290072 - DNA, 526 bp, Unknown
  Bacterial polypeptide expressing nucleotide sequence isolated from the Sargasso Sea
tatgtctactaaatttaccagcttagagcaacacgccagttatggcataggtctgcaaatgggtcagcaactggctgacaacccgtttgacggtttagacattctggcggtagccgcaggtttagctgctgctttccagggtgatgagccagaagtctctgatgagcaaattggtgctgcgttccaggtgatcagccagcgtatgcagcaacaacaggaacaacaagccaaagccttagcgggtgctggtgaagctttcctggctgaaaatgcaaaaaaaccaggcgtgactgtgactgcttcaggtttacagtacgaagtattagtgcaaggtgaaggcgagaagccaaccaaagcctctacagtgcgcacgcattaccacggcactttaattgacggtactgtgtttgacagctcgtacgaccgtggtcagcctgctgaattccctgtctctggtgtgatcgctggttggactgaagcgctgcaattgatgcctgttggcacccaagttacgtttaactatccc

SEQ ID NO: 290073 - DNA, 244 bp, Unknown
  Bacterial polypeptide expressing nucleotide sequence isolated from the Sargasso Sea
ggctagaacagctaatccgcattcagcttcatctcaattctttattaatcacgccgataatgcttttctaaactttagaaccaatcaggtagatgaaggttggggttatgcagtatttggtcaagtgattgaaggcatggaagtagttgataagattgctgatgtagaaacaggttctgttgggccttatcaagatgtgccagttgaagcaataacggttttaaaaacggaagtaatagattaa

SEQ ID NO: 290074 - DNA, 439 bp, Unknown
  Bacterial polypeptide expressing nucleotide sequence isolated from the Sargasso Sea
aatgacaaaagcattatttgaaacagaagtagggagcataaatattgaatttttccctgaagatgctcctaatacagttaaaaattttacaaacttgataagtgatggtttttatgatggtttagcatttcacagagttatcccaggatttatggctcagggtggatgtccaaatactcgagatggagcatctggaatgcctggaacaggcgggcctggatataatattaaatgtgaaatcaattccaataaacatctaaaaggttcgctttctatggctcatgcaggaaaggatacaggtggtagtcagttttttatagtttatgaaccacagccccatttagatggagtccacactgtatttggtaagacagatgatatggatgtcgtgctaaagcttaataatggttcaaaaattattaaagcaactctaaagtag

SEQ ID NO: 290075 - DNA, 232 bp, Unknown
  Bacterial polypeptide expressing nucleotide sequence isolated from the Sargasso Sea
attccttatgagaagggaattttagcaatggcaaatcgagggcctaatactaacggtagtcaattcttcataatgcatgctgattaccctttgccgtatcaatatacaatatttggtaaggtaacagatggttttgatgttattgataccattgcaagtgttgaaacagatacttctgataaacctttggatgatatagtaataaattcgattgtaattaaagagaattaag

SEQ ID NO: 290076 - DNA, 453 bp, Unknown
  Bacterial polypeptide expressing nucleotide sequence isolated from the Sargasso Sea
tatggcttcagcacctcagatgaacattgataacgagaccacctaccgcgtgtccatccaaacggccaaaggcacgatcgttatggacctcgacccgaaattagcgccgaacacggtaaataacttcgtgaacctggcacgtgatggctattacacaggactcaccttccaccgagtagtgccagatttcgtaattcaaggtggttgcccagaaggcaccggtacaggtggccccggatatcgattcgacgacgaacccgtcaatgccgaatacaccctgggggcggttgctatggcaaatgctggacccaacaccaacggcagccagttctttatatgcatcgacgactgccgatcaaaactagcgccggcctacaatctgttcggctacgtatcgagcggaatggacgtagcgttaacgatcgctgtcggtgacgttatggaaagcgtcga

SEQ ID NO: 290077 - DNA, 414 bp, Unknown
  Bacterial polypeptide expressing nucleotide sequence isolated from the Sargasso Sea
catgactcaagtcaaactgaccaccaaccacggtgacatcgttatcgagctgaacgccgagaaagcgccgatcaccgtcgccaacttcatcgaatacgtcaaagccggccactacgaaaacactgttttccaccgtgtcatcggtaacttcatgatccagggcggcggtttcgagccgggcatgaaagagaagaaagacaagcgtccaagcatccagaacgaagcggacaacggcctttccaacgacaagtacaccgttgccatggcccgtaccatggagccgcattcggcctccgcgcagttcttcatcaacgtcgccgacaacgccttcctgaaccacagcggcaaaaacgtgcagggttggggctatgcggtgttcggtaaagtcacccgaagcactgacgttgtcgacaa

SEQ ID NO: 290078 - DNA, 217 bp, Unknown
  Bacterial polypeptide expressing nucleotide sequence isolated from the Sargasso Sea
cgcgggcacgctgtcgatggcgaacgcgggccccggtaccaatagttcacagttcttcgtctgcacggggccgacgtcgtttttggatggaaagcacgtcgtcttcggcaaggtgacgaagggtctggacgtcgtaagggccatcgagcgcgtcgggtcgaaggaagggaagaccgcgcggacggtgcttattaatgattgcgggcagatcgcttga

SEQ ID NO: 290079 - DNA, 264 bp, Unknown
  Bacterial polypeptide expressing nucleotide sequence isolated from the Sargasso Sea
atgacagaggaactatagcaatggccagaactggtgatcctcattcagcaactagtcaattttttattaatcataaagataatggatttttaaatcataccggagaaaatccacaaggctggggctatgcagtatttggaaaagttacagacggaatggatgtcgtggatcaaatagctgatgtagcaactgggaatgttggtccttatcaagatgttcccctagaagtaataactatagagtctgttactattagtgaatgaa

SEQ ID NO: 290080 - DNA, 238 bp, Unknown
  Bacterial polypeptide expressing nucleotide sequence isolated from the Sargasso Sea
tctgatccccattccgcatcatcgcaattttttattaacgtaaatgataatttgttcttagatcataaaaatactacagcacaaggatggggctatgctgtatttggtagagtcacagaaggtatggacactattaataagattaaagagtgtaaaacaagctcccagctcggtcatcaagatgtcccagacgaagatgtagtaataaatacagctaaaagtatcgaagaaaactgac

SEQ ID NO: 290081 - DNA, 427 bp, Unknown
  Bacterial polypeptide expressing nucleotide sequence isolated from the Sargasso Sea
atgacacaagtaatgatgaaaacagcaaaaggcgatatccaaattgatctattcgatgaagatgcgccaaatactgtaaaaaatttcactgatctaatagaaaaaggattctatgacggacttaattttcacagggtgatcccaaactttgtaatccaaggcggttgtccgcaaggaactggtacgggaggccctggctaccatattgattgtgagatcaatcccaatcggcatcaagctggaaccctatcaatggctcatgcaggaaaagatactggtggaagtcaattcttcatctgccacagtccgcagcctcatttagatggtgtacatacagtttttggacataccgcaaacatggatgtggtaaattcaattgaacagggcgatgagataatctctgcagagattgtttctggtgactgag

SEQ ID NO: 290082 - DNA, 439 bp, Unknown
  Bacterial polypeptide expressing nucleotide sequence isolated from the Sargasso Sea
catgacaacagcattatttgaaacagaagttggcaacattaatattgaatttttctctgaagacgcacctaatacagtaaaaaatttcacgagcctaattagtgatggtttttatgatggtctagcatttcacagagttattcctggatttatggctcagggtggatgtccaaatactcgtgatggagcatcaggtatgcctggaactggtgggcctggatataatataaaatgtgaaattaattccaataaacatctagaaggctcactttctatggctcatgcaggaaaggacacaggtggtagtcagtttttcatagtttatgaaccacagcctcatctcgatggagttcatacagtttttggtaagactgatgatatggatgtagtgctaaagcttactaatgggtcaaaaattttaaaggcaactttaaagtag

SEQ ID NO: 290083 - DNA, 487 bp, Unknown
  Bacterial polypeptide expressing nucleotide sequence isolated from the Sargasso Sea
tttgcaggagaatatagtgtttaaaaaaatcatagctctaattacatctttttttattgttgaacaagtagcctcagctaatgaaacaacaaattctaagttacttcttaatacttctaaaggtgagattgttataaaatttctaccagatttagctcctgttcatgtcgcacgtataatagagctagtaaaaagtggtttttatgatggtattattttccatagagtaataccaggttttatggctcaaacaggagatccaaaaggcaatggaacaggaggaagcggacagaaattaaaagctgagttctcagattatcagtatacttctggtacagttggcatggcaagaactatggatcccaatactggagatagtcagtttttcatatgctttgatggttgcggccatttaacaggacaatatacagcctggggtcaagttgaaacaggtatggatgttgtagaaaatattaatgtcggtgag

SEQ ID NO: 290084 - DNA, 376 bp, Unknown
  Bacterial polypeptide expressing nucleotide sequence isolated from the Sargasso Sea
cttgattgccaaatataagaaggacaacaaatccgaggtggtgaccaccaagagcggtctgcgttacatcgtgttggccgaaggcaaaggtgacgccccggcggcaggcacgcgcattgccgcccactacaccggcacgctgacggacggcaagaaattcgacagctcccgcgaccgcaatgagcccattcgttttccagtgggtaaaggctttgtgattcccggctgggacgaagccttgtcgcagatgaaaaaaggtgagcggcgcatcttgatcatcccgcacaagctaggctatggagaacgtggcgccggcggcggcgttatccctccgtttgccacgctgatcttcgacgtggaactggtggatttctaa

SEQ ID NO: 290085 - DNA, 696 bp, Unknown
  Bacterial polypeptide expressing nucleotide sequence isolated from the Sargasso Sea
attgattattgttacaactcctcaagcttttgcagaatatgaggatacaattgtagtattagagactgattctggacgattaattatagaattcttcccacagtttgctccaaaccatgttgaaaactttgtaacgctatctgaagacggcttctacactggaacaatttttcatcgtataattgaaggatttatgattcaaggcggtgatccaaaatcagctgacccttctttttcaatgtctgaatggggaacaggagatcctggctattctatagatgcagaatttaacagcattgaacataaacgaggaatagtttcgatggcacgctcatctgatcctaacagtgcaggttctcaattttttattgttcataaagattctaactttctagatggtcagtatactgtttttggcagaattttaactgatgaaagttttgaaacattagatagaattgcaacaatggatacagcaccaaatgatcaaccgatggatgcatggagagctatcataaaaaatgttcaagttatagatcgttctgaattatcaaatttacccgagcatacaacaccggtaaccactgatgaaggagatgctctcatagctcctacaacaagtcaaccaaattcttttcctgaatatggtttgtcttttacctctcctgcgggatggatagttcaaacacctccgcc

SEQ ID NO: 290086 - DNA, 460 bp, Unknown
  Bacterial polypeptide expressing nucleotide sequence isolated from the Sargasso Sea
gataattttcgttaaattagctcaaagaggagattatgataatactcctttccatagagtaatagatgattttatgattcagggtggagacttcacgaatggagatggaactggcggtcatgctgcagaattctatggttactgtgacggaactgagacagcagtagaatgttcaaatccgactagtttcactcttcccgatgaagctgacaatggacttttgcatcagccatgtactatttctatggccaagactagtcaaccaaatactggaggaagtcaattcttccttattcctcaagatagtactcctgattggttagatggccaacatactgtgttcggacaaataacaagtggatgttccttcattactagtattagtgaagtagagacaggaggccaacaaggctccacacctgtcaatccagtcactttagtaagcgtagtaatttcttga

SEQ ID NO: 290087 - DNA, 382 bp, Unknown
  Bacterial polypeptide expressing nucleotide sequence isolated from the Sargasso Sea
cccaaccacgtccagcggatcgccgagctggcgaacgagggcttctatgacggcgtgccgttccaccgcgtcatccccggcttcatggcgcagggcggcgacggcgggaaccacaacggcaccggcggttcgtccaagcccaacctgaagcaggaattcaacaaggaaccgcatgtgcgcggcgtctgctcgatggcgcgcacgatggaccctaacagcgccaattcgcagttcttcatctgcttcgacgacgcgcgcttcctggacggccagtataccgtgtggggcgaagtgaccgagggcatggaactgatcgacgcgctgcccaagggcgagccgcccgcgaacccgggcaagatcgtcacgatgaaggcccagtaag

SEQ ID NO: 290088 - DNA, 494 bp, Unknown
  Bacterial polypeptide expressing nucleotide sequence isolated from the Sargasso Sea
tctgttacctgcggttcccgatgattttgttccatgggaaggacagcgtgccctcgccgaggtagctccacctgcaaggaacaatatttactcggaagctccaccgatgacgatcgacacaagtgggtcatatcaggcaattatcacgacggccgatggcgacatgacgttcgacctcctcgttgagacagctcctatcacagttaataactttgtaaaacttactgaagatggatattacgacggagtgatttttcaccgggtccttgaagatttcatggcgcaaggtggcgatcccgctggacagggaactggcggcccggggtaccagttcgaagatgaagttgatgatggtccagctatggagtcaagaggccttcttgccatggcaaatgcgggccccggcacaaacggaagccaattcttcatcacgttcgcacccaccccgcacctcacagggaaccacaccgtgtttgggacactaacagctggag

SEQ ID NO: 290089 - DNA, 817 bp, Unknown
  Bacterial polypeptide expressing nucleotide sequence isolated from the Sargasso Sea
attgattattgttacaactcctcaagcttttgcagaatatgaggatacaattgtagtattagagactgattctggacggttactaattgaattttttccacaatttgctccaaatcatgttgaaaattttgtaacattgtctgaagacgggttctacactggaactatttttcatcgcataattgaaggatttatgattcaaggcggtgatccaaaatcagctgatccttctttttctatgtctgaatggggaacaggcgatcctggctattctattgacgcagaatttaacagcattgaacataaaagaggaatagtttcgatggcacgctcatctgatccaaatagcgcaggttctcaattttttattgttcataaagattcgaactttttagatgggcagtatactgtttttggtagaattttaactgatgaaagctttgaaacattagatagacttgcaacactgaatacagctccaaatgatcaaccaatggatgcatggagagctatcataaaaaatgttcaaattatagatcgttctgaattatcaaatttaccagaatatgtaactccagtaactactgatgaaggagatgctctcatagctcctacaacaagtcaaccaaattcttttcctgagtatggtttatcttttacttctcctgcaggatggatagttcaaacaccgcctccatccggtaataatcctgatattgttgttgtcggttcaaaaacaactacatcagctcctgctgtatcttttgcaattactcgtcaagatgttacaattgaagaagcaataaatggactgaga

SEQ ID NO: 290090 - DNA, 271 bp, Unknown
  Bacterial polypeptide expressing nucleotide sequence isolated from the Sargasso Sea
tatggctcaaacaggtgatggacaatttggtaatggaactggaggatcaagtaagcctgatttaatgcaagagtttaatattacttcacatttaagaggcactgtttctatggctcgaactcacgatcccaattcacctaatagtcagttttttatttgttttggaccaactccacacttagatggacaatacactgtttttggtcaagtggtttcaagaatggagtacgtaaataacattaaagtagggtctggatcaaacggtgaagta

SEQ ID NO: 290091 - DNA, 534 bp, Unknown
  Bacterial polypeptide expressing nucleotide sequence isolated from the Sargasso Sea
tcgtggccccctccaccgtttccgcagccccggcgcagcctgctgccgttcgcagcgaggcttcgaaaccccagaaggcgttgagcttcgaactcgaccctgacgaccccaacccgactcttttcaccatggcaaacgattccgctcccgccgacgcctcagccctcggtggccccctcgatgcccctgacaccaccatcaccgccagtggtctgaaaatcatcgagctggaggtgggcagcggcgacgaggccacccccggccaaacggtggtggtgcactaccgcggcaccctggaagatggactgcagttcgatgccagctacgaccggggcacccctttcagcttccccctcggggctggccgggtgatcaagggttgggatgaaggcgtcgccggcatgaaagtgggcggaaagcgcaagctggtgatcccttccgacctcgcctacggaacccgtggcgccggtggtgtgattccccccaacgcaaccttgatcttcgaggtggaactgctcgacgtgaagaagtaag

SEQ ID NO: 290092 - DNA, 508 bp, Unknown
  Bacterial polypeptide expressing nucleotide sequence isolated from the Sargasso Sea
gatgaccgggaatgcggcgcaaggtggagaaatagccgttatagaaaccaccatggggaatatcgaactggaatttctggaagatgtagctcccggtcatgttaaaaacttcaaagatctggctaataaaggattttatgatggaaccatttttcaccgggtgatccctggtttcatgattcaaggtggagatccaaactctaaaagtgaagataggtctatgcatggagttggcggaccaggatacaccatcaaggcagaattcaacgacacgcctcatgaccggggtattctttcaatggcacgttcgcaagatccgaacagtgctggttctcaattttatattgttgttaaagattcccattttctggacgggcaatatactgcttttggtcgcgtgctaaaaggaatggatgtggcagataaaatcgtcaacgccccgcgcgatgctagagacaacccgaatgagcgcatagaaatgaagtcggtaaaaatcgtaaaccgttga

SEQ ID NO: 290093 - DNA, 520 bp, Unknown
  Bacterial polypeptide expressing nucleotide sequence isolated from the Sargasso Sea
tatgagttgtggatcaaaagagtctagccaaaagcaagatgttgcaattatttcaacaaaatatggtgatatggttgtagaatttttcgacgaacatgctccaaagcatgttgaaagttttaaaatgcattcacaaaacggttactacaacggtacaatttttcatagggttatacctggttttgttattcagggaggtgatcctaatagtaaatctgaagataggggaatgcatgggataggcggaaatgcagcaaaatattttggagtaggagacgagagggattcaacgacttggtcaatccctgcagaatttaattctctaaaacaccagaagggtatcctatctatggctagagcaaatgaccccaatagtgctgggagccaatttttcatctgtgctggcaatgtcaatcaattagataacaactacacggtttttggcaaggtcatcaagggtttaactataattgatcaaattgtgaatgtgccgcgagatggtagagataatcccaacgat

SEQ ID NO: 290094 - DNA, 442 bp, Unknown
  Bacterial polypeptide expressing nucleotide sequence isolated from the Sargasso Sea
aatgtcacttgttactatttctacttcagccggggacatccacttagagcttgatgctgataatgcgcccataacggtagcaaactttttaaaattagctgaagacggctattattcaggtacaatttttcacagaattattgaaggatttatggtacaaggcggcggtctagatgaaaatatggctcccaaactaactaatacagatccaatccaaaatgaggccaataatggattaaagaatgatcgtggttctattgcgatggctagaaccatggaccctcattctgctactggtcaattttttataaatcataaagataatgactttctaaatcatacagccgaaacctctcaaggctggggctatgcagtttttggttcagtgattgatggtatggatattgtggatcaaaatagccctcaagtacaacttctactg

SEQ ID NO: 290095 - DNA, 358 bp, Unknown
  Bacterial polypeptide expressing nucleotide sequence isolated from the Sargasso Sea
aatgacacaagtaacaataaaaacatctgttggagacattcaacttgaacttaatgacgagaaagcacctataacagttgaaaattttaaaactattgcttcaagtggatattatgaaggaacaatatttcatagagtcataaatggtttcatgattcaaggcggtggattaactgctgatatgagtaataagtctagtggaactggtcctatacaaaatgaagctaataatggattgccaaatgacagaggtactatttcaatggccagaacgatggatccacactcagctacaagtcagttctttattaatcacaaggacaatgcatttctaaatcatactggtgaaacatctcaa

SEQ ID NO: 290096 - DNA, 535 bp, Unknown
  Bacterial polypeptide expressing nucleotide sequence isolated from the Sargasso Sea
tttgcaggagaataaagtgtttaaaaaaattatagctctaattacatctttttttattgttgaacaagtagcctcagccaatgaaacaacaaattctaagttacttcttaatacttctaaaggagagattgttataaaatttctaccagatatagctcctgttcatgtcgcacgtataattgagctggtaaaaagtggtttttatgatggtattattttccacagagtgataccaggttttatggctcaaacaggggatccaaaaggcaatggaacaggaggaagtggacaaaaattaaaagctgaattctcggattatcagtatacttctggtacagttggtatggcaagaactatggatcccaatactggagatagtcaatttttcatttgctttgatggttgcggccatttaacaggtcaatatacagcctggggtcaagttgaaacaggtatggacgttgtagaaaatattaatgtcggtgagccaccctccaatcctgataaaattattaatgcatcaatttcggaataa

SEQ ID NO: 290097 - DNA, 277 bp, Unknown
  Bacterial polypeptide expressing nucleotide sequence isolated from the Sargasso Sea
aatggattgccaaatgatagaggcactattgcaatggctagaacgatggatccacactcagctacaagtcagttctttattaatcacaaggacaatggatttctaaatcataccggggaaacatctcaaggatggggatatgctgtatttggtatggttactgaaggtatggatgttgttgatcaaatagcagaagttgcaactggatcatctggagcctatcaagacgttcctgaagaagtgataactattgagtcagttactatctctgaatgac

SEQ ID NO: 290098 - DNA, 238 bp, Unknown
  Bacterial polypeptide expressing nucleotide sequence isolated from the Sargasso Sea
cgaaccaatgatcctcactcagcaacttcacagtttttcattaatcttcaagataatattagtctagatttttcctctgaaactccaatgggatggggatacgctgtctttggaaaagtcgtaaagggtcaagaagttgtcgatgaaatggcaacagtgcaaacaggaagctttggaccttatcaggacgtgccaagagaagatataaaaattctgagtgcatctctaaaacaataac

SEQ ID NO: 290099 - DNA, 265 bp, Unknown
  Bacterial polypeptide expressing nucleotide sequence isolated from the Sargasso Sea
atgaaaagaattcatatattcatcgcgtgcctagctctgattttgacagggataaaactggatgcctcggaaaactaccctcaaatagaaattgttacaacctctggaacgattgtggttgagcttgaccgaaatcgagccccaaaaactgtcgagaattttctaaactacgttcaatcgggagcctatgtcgggacaatctttcatcgagtcattcctggatttgtaatccaatacaggtggttacgatgtgaatctcaatgag

SEQ ID NO: 290100 - DNA, 328 bp, Unknown
  Bacterial polypeptide expressing nucleotide sequence isolated from the Sargasso Sea
tatgaaaactgcagaaatccatacaaaaaaaggggtcatgaagattgaattcttcgaaagggatgccccaaataccgttcagaattttatcgagttagctgaaaaaggctattatgatggcctaacctttcatcgggttattcctgattttgtcattcagggtgggtgcccaaaaggagatggtagcggtggcccagggtatcagattgattgtgaactaaatggggataatcagtatcacgatagaggagttctatcgatggctcatgccggtcgaaacacgggaggttcacaatttttcatttgtcatagcagaaacaatacatct

SEQ ID NO: 290101 - DNA, 397 bp, Unknown
  Bacterial polypeptide expressing nucleotide sequence isolated from the Sargasso Sea
ttgatcaaaatctatacaacacaaggtgaaattgagcttaaactatttgatgataaagcccctgaaacaacaaagaactttattctatatgcagaagcaggaaaatacaatggaactatatttcacagagttataaaagacttcatgattcagggtggtgggcacctgccagatttatcggaaatagctacagagtcaccggtagtcaatgaatcaaataatggtttgagtaataagaaaggaacaatagccatggctagaacaagtgatccgcattcagctacttctcaattttttattaatttaaaagataatgattttttagataaaaaaaatgctcctgataactatggttattgtgtattcggagaagtcactaatggaatcgatgtgtaga

SEQ ID NO: 290102 - DNA, 341 bp, Unknown
  Bacterial polypeptide expressing nucleotide sequence isolated from the Sargasso Sea
tatgacaaaagcaactattaaaacatcagaaggcgaaattaagcttgagcttaatggtgagaaagcaccaataacagtagaaaattttaaaactatagctaactctagttattatgaaggaactgtttttcacagagttattaacggttttatgattcaaggtgggggactaacttctgatatgaataataaatcaagtggaacaagcccaatacaaaatgaagcaaataatggtctatctaatgacagaggaactattgctatggctagaactatggatccccactctgcaactagtcagttttttatcaatcataaagataatagtttcttaaatcata

SEQ ID NO: 290103 - DNA, 325 bp, Unknown
  Bacterial polypeptide expressing nucleotide sequence isolated from the Sargasso Sea
gacgccagcctcaaggaaaagcccacgcgcgcgccgattccgctggaagcggacaacggcctcaagaatgaccggggcaccatcgccatggcgcgcactggcaatcccaactcggccacctcgcagttcttcatcaacgtggtgaacaacgacatgctcaacgcacccaagcctgacggacacggctacgccgtcttcggccgcgtggtccagggaatggatgtggtggacaaaatccgcacggtggccacgggcaaccagggcatgcaccagaatgtacccaccaagccggtgaccatcctctcggccaccgaagtcaagtaaa

SEQ ID NO: 290104 - DNA, 553 bp, Unknown
  Bacterial polypeptide expressing nucleotide sequence isolated from the Sargasso Sea
atgactgattgcccgaatgcagatggttccagcgaaagagtaactcaattcgcagaacagccacctatgtgcatagatactaataaaagctacacggctacgatggagacatcaatgggcgacatggtgatccatttagatgttgtgaacgcccctgtcactgtgaataattttgtgttcctttctcggtaccactattacgatggattgatctttcacagaatcattaatgggtttatgtgtcaaggtggatgcccagaaggttccggtagagggggacctggttatcgttttgaggatgaacttcccgcaccgggtcgatatgaaataggttctatcgcaatggctaatgcagggcccaatactaatggaagtcaattctttatcgtgactggccaaagcggagtagggttaccgcctcagtattctttatttggaaaggtcgtaaatgggttagaagttgccgatgaaatgcaacgagtccaaactcagcccggagatagacctataactgatgttgtgattcattcggttcaaatcactgaaagttaat

SEQ ID NO: 290105 - DNA, 226 bp, Unknown
  Bacterial polypeptide expressing nucleotide sequence isolated from the Sargasso Sea
atggacaagacgctccagatccgtgggaacccgaaggtgtacttcgacatcacggtcggcggcgaggccaccggccgcgtcgtcatgcagctgcgcaaggacaaggtgcccaagacggccgagaacttccgccagctgtgcctcaagcccgagggcgagggctacctcaactcgagcttccaccgcgtgatccccgacttcatgtgccagggcggcgactcacgaa

SEQ ID NO: 290106 - DNA, 427 bp, Unknown
  Bacterial polypeptide expressing nucleotide sequence isolated from the Sargasso Sea
atgacccaagtattgatgaaaacaacaaaaggcgatattgaaattaatctgttcaatgaagatgcaccaaatactgtaaaaaactttactgatctaataggaaaaggattttataacggacttaattttcacagggtcatcccaaactttgtaattcaaggcggttgtccacaaggaactggtatgggaggtcctgggtatcaaatagattgcgaaatcaattcaaatcttcatcaagccggaactctatcaatggcacatgccggaaaagatactggtggaagtcaattctttatctgccacagtccacagcctcatttagatggggtccataccgtttttggacatacagaaagtatggatgtggtaaattcaattgaacagggtgatgagataatctctattgagattgtttctggtgagtgag

SEQ ID NO: 290107 - DNA, 526 bp, Unknown
  Bacterial polypeptide expressing nucleotide sequence isolated from the Sargasso Sea
cttgactctttttagtcaattcaattcacctcaagttgtttatgctgccgaatcaaaaactcaatttgttcaaaaaacacctgttgaaaagtcatcaaatgtttcaaataataatatatttgaactagacccatcagatccaaatcctatacttttcgctatgtcagaagaaaaacaatcagacagtaactcaaggactacggaaagtggtcttgttattacagatatcgtgtatggggagggagatgaagccagcgctggaaaaacagtttctgtaaattacacaggaactctagaagacggaacacaatttgatacaagtattggtagagcaccatttagcttccccttgggtgctggaagagtaataaaaggttgggacgaaggtgtcgcaggaatgaaggttggaggcaaaagaaaattaataattcctccagaacttggttatggctcaagaggagcaggaaatgtaatacccgccaatgcaactttggtatttgaagttgaattattaaaagtcaattaa

SEQ ID NO: 290108 - DNA, 312 bp, Unknown
  Bacterial polypeptide expressing nucleotide sequence isolated from the Sargasso Sea
gttgcgttgcacgtccttcgcccaacggccggctctacgagtgccaccttgggcgcgctctgcggctaacatttgtgagagcagcgctcgccaaaaaagttgccatcgctctggccgcagaaagatgggcaagccggtgggcttcaaggggtgcagcttccatcgcataattaagggcttcatgctgcagggaggtgattttgtcaagggcgacggcaccggctgcataagcatctatggcgacaagtttgacgatgagaatttcgagctcaagcacactggccctgggctgctgtcggtgcgcctggagtg

SEQ ID NO: 290109 - DNA, 538 bp, Unknown
  Bacterial polypeptide expressing nucleotide sequence isolated from the Sargasso Sea
ttgattatttttcatgcgattaatgtacatgctcaaaccgtaaatgatgaaataattataattgagaccagtgaaggtaaaattacagttcatttagatgggagacgggcacctatcacagtgagtaattttgtgagtttaattaaagctgattattttgataatagtattttccatagagtaattgataatttcatgattcaaggaggtggctttgatgaaaatatgaatgaccttgaatcactcaacaccattccaaatgaatcaggtaatggattatcgaatttaagaggaacagttgctatggcaagaacctcggagccacactctgcaaatgcacaattctttattaacactcaagataatagatctcttaatccaaagtcaggtagatggggttatgcggtttttggcacagtaattgagggaatggaagtagttgataaaatctcaaaaaagcctacaggtccaaaaggaagatttacaagtgatgtgcctattgagacggtgctaatcatgaatatttctatagaatgac

SEQ ID NO: 290110 - DNA, 469 bp, Unknown
  Bacterial polypeptide expressing nucleotide sequence isolated from the Sargasso Sea
aatggattatacacatatagttataaagcttgagacaggtgatgtaaaaataaaattaagaccagacttggcaccaaatcatgtaaagcaaattacagaattagctgaagaaggattttatgatggcatagttttccatagagtaattccagactttatggctcaaaccggagatcctactggaactggaacaggttcatcggataagccaaacctaaagcaagaatttagtgctgagaaacacactagaggtacagcatcaatggcaagatctagtgatccaaatagtgcaaattctcaattttttatttgttttaatgatgcaaattggctggatggtcaatatactatttggggagaagttgttgaagggatggatcttatagatggcctcaaaaaaggactagatcaaagtgggatggttactgatccagacaaaatgttaaaggttacccctattaaagaataa

SEQ ID NO: 290111 - DNA, 366 bp, Unknown
  Bacterial polypeptide expressing nucleotide sequence isolated from the Sargasso Sea
accgaatagccgaactggcatcatccggattttatgatggcgttattttccaccgcgtcataccgggctttatggctcaaacgggtgacccgacaggcactggcatgggtgggtctggcaccaatctggatgctgaatttactgattatgagtaccgtgttggcacggttggcatggcccggtcatctagccccaacagcggcgacagccagttttttatctgttttgatggatgtggtcaccttacggggcaatatactgtttggggacaggtagaacgcggcatgggggctgtggaaaaacttgccgccgggcaaccgccggttgaacctgaccagattatctctgcttcagtgattgactaga

SEQ ID NO: 290112 - DNA, 577 bp, Unknown
  Bacterial polypeptide expressing nucleotide sequence isolated from the Sargasso Sea
catgctgaaaaacttaaccgtaagcaccattttattatgtctggcaggcagtggacaagcgtctgagaaccttgttttaattgagaccagtgagggaaatatcaccatagaactagatttcgataaggctcccattacttcggcaaattttattaaatatgttgaatctggtttctttaacaacacgatttttcacagagttattcctgggtttgtgattcaaggtggtggatttgagcaccctatgaatagaaaagaaaccttgccgcctatagaaaatgaggcagacaatggccttaaaaacttacgcgggacgctctccatggcaagaacctcagatcctaacagcgctacttctcaattttttataaacctcgtcaacaatgatttcttagattataagagtaaagacgtagccggctggggctatgcggtattcgccgaaattacttctggaatcgaggtaatagaccgtattgcaagtattcctacaacctcttttaacggaatgcaagacgtccccaccactcctataactataaataacgtttcgctcatatcaggtaataccgagtag

SEQ ID NO: 290113 - DNA, 403 bp, Unknown
  Bacterial polypeptide expressing nucleotide sequence isolated from the Sargasso Sea
attaatattgaatttttctctgaggacgcacctaatacagttaaaaacttcacaaacctaattaatgatggtttttatgatggtttagcttttcaccgagttattccaggatttatggctcagggtggatgtccaaatactcgtgagggagcatctgggatgcctggaactggaggtcctggatataatattaaatgtgaaattaactctaataaacatctaaaaggatcactttctatggcgcatgcaggaaaggatactggtggtagtcaatttttcatagtttatgaaccacagcctcatctcgatggagttcatactgtttttggtaagactgatgatatggatgtagtgctaaagcttactaatggttcaaaaattattaaggcaaccctcaagtaat

SEQ ID NO: 290114 - DNA, 436 bp, Unknown
  Bacterial polypeptide expressing nucleotide sequence isolated from the Sargasso Sea
actgcttttagaaacaacgcaaggtcaggtcgaaattgcattttttcctgagctagcaccaaatcacgtcaaccggattagtgaactcgcatcatccggcttttatgacggcataattttccaccgggtcatccccggcttcatggcgcaaaccggcgatccgaccggcaccggcatgggcggatcaggcaccaatcttgatgccgagtttaccgattatgaataccgcgtcggcaccgtcggcatggcacggtcatccaaccctaacagcggcgatagccagttctttatctgctttgacggctgtggtcatttgacggggcaatatactgtctggggtcaggtggaacggggcatggatacggtcgaaaaactcgccgccggcgaaccaccagccgaacccgaccagattgtatcagccgcggtcattgactga

SEQ ID NO: 290115 - DNA, 583 bp, Unknown
  Bacterial polypeptide expressing nucleotide sequence isolated from the Sargasso Sea
ctgattattgttacaactcctcaggcttttgcagaatatgaggatacaattgtagtattagagactgattctggacggttgctaattgaattttttccacaatttgctccaaaccatgttgaaaattttgtaacattgtctgaagacggtttttacactgatactatttttcatcgtataattgaaggatttatgattcaaggtggtgatccaaaatcagctgatccttcttcttcaatgtctgaatggggaacaggtgatcctggttatactatagacgcagaatttaacagcattgaacataaaagaggaatagtttcgatggcacgctcatctgatccaaatagcgcaggttctcaattttttattgttcataaagattcgaactttttagatgggcagtatactgtttttggtagaattttaactgatgaaagctttgaaacattagatagaattgcaacactgaatacagctccaaatgatcaaccaatggatgcatggagagctatcataaaaaatgttcaaattatagatcgttctgaattattaaatttaccagaaatatgtaactcccagtaac

SEQ ID NO: 290116 - DNA, 592 bp, Unknown
  Bacterial polypeptide expressing nucleotide sequence isolated from the Sargasso Sea
attgattattgttacaacccctcaagcttttgcagaatatgaagatacgattgtagtattagagactgattctggaagattaattatagaattcttcccacagtttgctccaaatcatgttgaaaattttgtaacattgtctgaagacggtttctataatggaacaatttttcatcgtataattgaagggtttatgattcaaggtggtgatcctaaatctgccgattcctcagtttctctgtctgaatggggaacgggagatcctggctattctatagatgcagaatttaacaacattgaacataaacgaggaattgtttctatggcacgttcatctgatcctaacagtgcaggttctcaattttttattgttcataaagattctaactttctagatggtcagtatactgtttttggcagaattttaactgatgaaagctttgaaacattagatagaattgcaacaatggatacagcacctaatgaccaaccaatggatgcatggagagctatcataaaaaatgttcaagttatagatcgttctgaattatcaaatttacccgagtatacaacaccggtaatcactgatgaa

SEQ ID NO: 290117 - DNA, 552 bp, Unknown
  Bacterial polypeptide expressing nucleotide sequence isolated from the Sargasso Sea
cttgcacaccaactttggtgatttgaacatagagttacactgcgatagagcgccgcgaacttgcgaaaatttcatcacgctcgcggagaagggatactacgacgacgtcaagtttcatcgaagcatcaagaactttatgcttcaaggcggcgaccccaccggcacgggcaaaggagggcactgcatatggggagagacgttcaaggatgagattaagaataatccgttcagacacgacgacagaggcgtgctgagcatggcgaaccgagggaaggatacgaacgggtcgcaatttttcatcacgtacaagtcgacgccgcacctcgacggcaagcacacggtcttcggtcgcgtcgtgggaggcatggaaacgctggctaagatcgaaaaagtcgagacggacgccgccgatcgtccgctgaagctgatcaagatcacggcgtgcacgattttcaccaacccgtacgaggaactgcgcgaagaagatgaacagagagagcgagaagaagccgccgccaaggccaaggcggaggatatgaagagcggcaaggg

SEQ ID NO: 290118 - DNA, 352 bp, Unknown
  Bacterial polypeptide expressing nucleotide sequence isolated from the Sargasso Sea
gtaaaaaatttcactgatctaatagaaaaaggattctatgacggacttaattttcacagggtgatcccaaactttgtcatccaaggcggttgtccgcaaggaaccggtacgggaggccctggctaccatattgattgtgagatcaatcccaatcggcatcaagctggaaccctatcaatggctcatgcaggaaaagatactggtggaagtcaattcttcatctgccacagtccgcagcctcatttagatggggtacatacagtttttggacataccgcaaacatggatgtggtaaattcaattgaacagggcgatgagataatctctgcagagattgtttctggtgactgag

SEQ ID NO: 290119 - DNA, 340 bp, Unknown
  Bacterial polypeptide expressing nucleotide sequence isolated from the Sargasso Sea
atgacaactgcattatttgaaacagaagttgggaacattaatattgaatttttctctgacgatgcacctaatacagttaaaaacttcacgagcctaattagtgatggtttttatgatggtctagcatttcacagagttatccctggatttatggctcagggtggatgtccaaatactcgtgatggagcatcaggtatgcctggaactggtgggcctggatataatataaaatgtgaaattaattccaataaacatcttaaaggctcactttctatggctcaaacaggaaaggatacaggtggaagtcagtttttcatagtttatgaaccacagccccatc

SEQ ID NO: 290120 - DNA, 241 bp, Unknown
  Bacterial polypeptide expressing nucleotide sequence isolated from the Sargasso Sea
cctgttgaacggcgccaagtttgatgcttcgtacgaccggcgctcgccgctggagtttgctgttggcacgggccgcgtgatcaagggttgggacgaggccttgctggacatgaaggtgggcgagaagcgcatgctcaagatcccgagcaaccttgcctatggcgcgaagggcgcgggcggcgtgatcccgcccgacgccacgctcgtcttctacgtcgagctcgtcacgctggcagcgtaa

SEQ ID NO: 290121 - DNA, 427 bp, Unknown
  Bacterial polypeptide expressing nucleotide sequence isolated from the Sargasso Sea
tatgacccaagtattgatgaaaacaacaaaaggcgatattgaaattaatctgttcaatgaagatgcaccaaatactgtaaaaaactttactgatctaataggaaaaggattttataacggacttaattttcacagggtcatcccaaactttgtaattcaaggcggttgtccacaaggaactggtatgggaggtcctgggtatcaaatagattgcgaaatcaattcaaatcttcatcaagccggaactctatcaatggcacatgccggaaaagatactggcggaagtcaattctttatctgccacagtccacagcctcatttagatggggtccatactgtttttggacatacagaaagtatggatgtggtaaattcaattgaacagggtgatgagataatctctattgagattgtttctggtgagtga

SEQ ID NO: 290122 - DNA, 547 bp, Unknown
  Bacterial polypeptide expressing nucleotide sequence isolated from the Sargasso Sea
catgacgggcggccacgccttttactcactccgatcatcaaaggattccatcatggttgaactgcacacgaaccacggcgtcatcaaactcgaactggacgctgaaaaggcgccgaagtcggttgaaaacttcctcaactacgtgaaggccggccactacgacaacacggtgttccaccgcgtgatcgacggcttcatgatccagggcggcggtttcgaacccggcatgaagcagaagccgacggcagagccgatcaccaacgaagcgaacaacggtctgaagaacgtcaacggctcgatcgcgatggctcgtacgaacgacccgcactcggcaacggcgcaattcttcatcaacgtgaacgacaacgacttcctgaatcactcgtcgccgacgccgcaaggctggggctacgccgtgttcggcaaggtcgtggaaggcatggacatcgtcgagaagatcaagaaggtcaagacgggttcgaagggcttccatcaggacgtgccggccgacgacgtcgtgatcgaaaaagcagtgatcgtcgactaa

SEQ ID NO: 290123 - DNA, 516 bp, Unknown
  Bacterial polypeptide expressing nucleotide sequence isolated from the Sargasso Sea
catgcgatttacttgggtttcaaatggtgtggctcaagagggtgaaatcgtgattgagttatatcctgaagcagcgccatttcatgtaaataatttcgttgccttggttgaaggggggtactacaacgatacaatcatgcaccgaatcatccaaaatttcatgattcaaggtggtgatttcgtgaatcgagatggtacaggggggcatgcagttgtttggtctggttattgttacgggcaatctgttgaaacatccgaagactgtgcgcaaaccctttggaatcttcctgatgaagcagataatggcctcacccacgagccatacgttctttctatggcaaaaacaaatcgcccgaataccggtggctcgcaattttttattgtctcaccagacatatacccacattggctagatggtgttcacaccgtatttggaaaggtaatttctggtcaatcagttatcgatgcgatcgagaaggtttcgacagggcaatatgataggccaatcgacgccgt

SEQ ID NO: 290124 - DNA, 333 bp, Unknown
  Bacterial polypeptide expressing nucleotide sequence isolated from the Sargasso Sea
tatgaaagcagtaatagcaacctcgctcggccaaataaccatagaattaaaccaagaaaaagcaccaaaaactgtggaaaattttttagcttatgttaaaagtggattttatgatgggacgattttccatcgagtcattgaaggttttatgatccaaggcggagggatggataaagagatgaagacaaaaccaactaatccgtcaatcgaaaacgaagcaaataatggattaagtaatcttcatggaacaatagctatggcgaggacttcaaacccacattctgcgacagcacaattttttattaatactgaggataatcgtggcctcgattt

SEQ ID NO: 290125 - DNA, 832 bp, Unknown
  Bacterial polypeptide expressing nucleotide sequence isolated from the Sargasso Sea
aatgaaaacagttaagtgtccacattgtaaaaaagaaattgagttaggcgaggtagcagcggcgcaagctgaagccctcgctgctcaaaaaattaaaaactataaaactgaaagtgacaaaaaaattaaagcattagaaaaagaaaaacaaaacgctagaaaagatgcaaaagaagaagcaaaaaaagaattagaaataaaatttaacaaaaatcaaaaacagaaagatgaaaaaattaaagcattagaaaaagaaaaacaaaacgctagaaaagatgcaaaagaagaagcaaaaaaagaattagaaaaagaaaataaagattttaaagaatcattaactgctgaattaaacgccaaagctgaaaataaaataagaaaaaacgatgaaaaaaaagatcaggaaattaagtttttaattttaaaaaatgaaagaatgaaaaaagatatggaaaaagcgaaacagagagcagaacaaggatcttcagctgaccaaggcgcttctcaacataatctattaggtgataatttaaaagagatgtttggtgaaacagaagatgaaatacgatccacagaaacaggagaaccaggagcagattggatccaaagaattaaaaaggatggtgaagttataggaaaaattctatacgaaagtaaaaaaactcaaaaattttccaaagattggtatggaaaacttcaagatgacatgaaatctgccaaagcagacataggtattattttttcaaccgcaattccaaaagattttgacaaaaaaaaaggatatttagaaaaaggcaatatttatgtttgtgattatgaccttgataaacttaaa

SEQ ID NO: 290126 - DNA, 193 bp, Unknown
  Bacterial polypeptide expressing nucleotide sequence isolated from the Sargasso Sea
attgactagtgtaaatatagaaaccaatcatggaaatatttcatttaacttgttaccagagttagcaccagaaactgtgagaagctttgtaaaattagcaagcgacggattttacgatggaacattatttcatagagtaattccaggattcatgattcaaggtggagacccaaatacaaaagacccaaacatg

SEQ ID NO: 290127 - DNA, 283 bp, Unknown
  Bacterial polypeptide expressing nucleotide sequence isolated from the Sargasso Sea
acctgggtatagatttgaagatgagttaccggcaccaggacggtatgagttgggttcattggctatggctaatgctggaccaaatacaaatggaagtcagttctttatcatcactggaccaagtggccagggcttaccgcctcaatactcattatttggtcaagtaattagaggcttagaagtagcagacgccatgcaaaaagttcctactaaccacagtgatcgaccagaaactgacatagtgattgaatcggtaacaatcacagagaacgaggaggtatag

SEQ ID NO: 290128 - DNA, 240 bp, Unknown
  Bacterial polypeptide expressing nucleotide sequence isolated from the Sargasso Sea
attgactagtgtaaatatagaaaccaatcatggaaatatttcatttaacttgttaccagagttagcaccagaaactgtgagaagttttgtaaaattagcaagcgacggattttacgatggaacattatttcatagagtaattccaggattcatgattcaaggtggagacccaaataccaaagacccaaacatgaaaagccaatgggggatgggaggacctggattcaatgttaaagggga

SEQ ID NO: 290129 - DNA, 337 bp, Unknown
  Bacterial polypeptide expressing nucleotide sequence isolated from the Sargasso Sea
gatggtttttatgatggtttagcatttcatagagttattcctggatttatggctcagggtggatgtcccaacacccgagatggagcatctggcatgccaggtactggtggccctggatataatattaaatgtgaaattaattccaataaacatctaaaaggttcactctctatggctcatgcaggaaaggatactggaggtagtcagtttttcatagtctatgaaccacagcctcatctcgatggagttcatacagtttttggtaagacagatgatatggatgttgtgctaaaactcactaacggatcaaaaattttaaaggcaactataaaatagt

SEQ ID NO: 290130 - DNA, 469 bp, Unknown
  Bacterial polypeptide expressing nucleotide sequence isolated from the Sargasso Sea
tatgggaattacacatattagcattaagcttgaaacagggaatgtaaaaataaaattgagacccgatcttgctccaaatcacgttcaacgaataattgagctagcatcagaaggtttttataacggagttgtttttcatagagttattcctaactttatggcgcagacgggagatccaactggaacagggacaggaagttcagacaagccaaatctaaaccaagaattctctagtgaaagtcatgttaggggaactgcatcaatggcaagatcagcggatcccaatagtgcaaattcacagttcttcatctgttttggtgattgctcttggctaaataatcaatatactatttggggagaagtagaagaaggaatggagctaatcgatcaaattaaaaaaggggaagatgaaagtggaatggttagagacccagataaaatgattgaagtagttactttagaaggttag

SEQ ID NO: 290131 - DNA, 499 bp, Unknown
  Bacterial polypeptide expressing nucleotide sequence isolated from the Sargasso Sea
catggtcactctgcacaccaatcacggcgacatcaccctcaccctgaacgctgaaaaagccccggaaaccgtggccaacttcctgcaatactgccgtgacggtcactacgacaacaccatcttccaccgcgtcatcgacggcttcatgatccagggcggcggctatgcccctggcttcgaagagaaagacacccgcgcccccatcaagaacgaagcggccaacggcctgtccaacaaggtcggcaccatcgccatggcccgcaccatggagccgcactctgccagcgcccagttcttcatcaacgtgaacaacaacgacttcctcgacttcaaatccgctaccacccagggcttcggctactgcgtgttcggtgaagtgaccgccggcatggacgtggtcaacaagatcaagggcgtcaagaccggcaactacggccgtatccaccaggacgtgccgaccgaagatgtggttatcaccaaggtgacccttgccgagtga

SEQ ID NO: 290132 - DNA, 505 bp, Unknown
  Bacterial polypeptide expressing nucleotide sequence isolated from the Sargasso Sea
atgtcacttgttactatttctacttcagccggagatatccacttagaacttgatgcaaacaatgcacccataactgtggcaaactttctaaaattagccgaagatggttattatactggtactatttttcacagaattatcgaagggtttatggttcagggtggcggtcttgatgaaaatatggcccccaagccaaccaacactgatcctattcaaaatgaggccaataatggattaaagaatgaccgtggctcaattgcgatggctagaaccatggatcctcattctgcaaccggtcaatttttcattaaccataaagataacgactttctaaatcatacagctgaaacctcacaaggctggggctatgcagtatttggctctgttattgatggaatggacgttgtagatcagattgctctgagtataacctccaatgttggtggttatgctgatgctcctcttgaaccaacaattattaattcagttacagtgagtgaatgaa

SEQ ID NO: 290133 - DNA, 595 bp, Unknown
  Bacterial polypeptide expressing nucleotide sequence isolated from the Sargasso Sea
atgtctgataaattcagtactgttgaacagcaagcaagctatggtgttcaacagaattcttttgaaggtgtggatattgctgccgttcaagcaggtttagccgatgcatttgctggcgtggaaagcgctgtatctatgcaagatatgcaagttgcattcactgagatcagccgtcgcattcaagcggctcaagagcaagctgcagcagaagcttctgccgaaggcgaagcctttttagctgaaaacgctaagcgtgcaggcgtgatcgtgactgactctggtctgcaatacgaagtattagttcaaggtagcggtgcaaaaccaacctacgaagacacagtgcgtactcactaccatggttctttcatcaatggtgacgtgttcgacagctctgtagtacgtggtcaaccagctgaattcccagtatctggcgttatcgctggctggactgaagctctgcaactgatgccagtaggtaccaagttaaagttattcgttccacatcacttagcatacggtgagcgtggtgcgggtgcttctattcctccatactcaacgttagtattcgaagtcgagttattagacatcgtctaat

SEQ ID NO: 290134 - DNA, 445 bp, Unknown
  Bacterial polypeptide expressing nucleotide sequence isolated from the Sargasso Sea
atgctcctaagtatatttgaagactatataaacaataagagtcaagcagatattttaagagctgaagaagaagctaaacttctagatgatttaacatcaggaatgattgaaactgaaagtggattaaaatataaagtttcaaaaaaaggaagcggtcctaatgcaaagatcgatgatgtcctttcagttcattactctcttaaacttgttgacggatcagaaattgattcatcttttactagaggagaaccaattgagttcacgtgtggtgttggacaagtaattaaggggtgggatgaagctatgcaactacttaataaaggctcaaaagctacactagtaattcctagtgaacttggttatggatcaactggtgcgggtaatggagttattcctccgaatgcaacattaatttttgaagttgaattagtcgacataaaataat

SEQ ID NO: 290135 - DNA, 421 bp, Unknown
  Bacterial polypeptide expressing nucleotide sequence isolated from the Sargasso Sea
atgacaactgcattatttgaaacagaagttggcaacattaatattgaatttttcgctgaagacgcacctaatacagttaaaaacttcacgagcctaattagtgatggtttttatgatggtctagcatttcacagagttattcctggatttatggctcagggtggatgtccaaatactcgtgatggagcatctggtatgcctggaactggaggccctggatataatatcaaatgtgaaatcaattctaaaaaacatctaaaaggctcactttcaatggctcatgcaggaaaggatacaggtggtagtcagttttttatagtttatgaaccacagcctcatctcgatggagttcatactgtttttggtaagacagatgatatggatgtagttttaaaactcactaatgggtcaaaaattctaa

SEQ ID NO: 290136 - DNA, 439 bp, Unknown
  Bacterial polypeptide expressing nucleotide sequence isolated from the Sargasso Sea
catgacaacagcactatttgagacagaagttggaagcataaattttgaatttttctcttacgacgcacctaatacagttaataacttcacgaagttgattagtgatggtttttatgatggtctagcatttcatagagttattcctggatttatggcccagggtggatgtccaaatactcgtgaaggagcatctggtatgcctggaactggtggccctggatataatattaaatgtgaaatcaatgccaataaacatctaaaaggttcactctctatggctcatgcaggaaaggatacaggtggaagtcagttttttatagtttatgaaccacagcctcatctcgatggagttcataccgtttttgggaagacagatgatatggatgtagtgctaaagcttactaatggttcaaaaattctaaaagctactttaaaatag

SEQ ID NO: 290137 - DNA, 424 bp, Unknown
  Bacterial polypeptide expressing nucleotide sequence isolated from the Sargasso Sea
atgcaagcaattatgaaaacagcaaagggtgaaatacagatcgatctttttaatgaagatgcgcccaatacagtaaagaatttcacagatttaatcgaaaaaggattctatgacggacttaattttcacagagtgattccaaactttgtcatccaaggcggatgtccgcaaggaactggaactgggggacctggatatcatattgactgtgaaattaatgcaaatagacatcaggcaggaactctttccatggcacatgcaggcaaagacactggaggcagtcaattcttcatttgccacagtccacagcctcatttagacggtgtgcataccgtttttggacacactgcaaatatggatgtagtaaattcaattgaacagggcgatgaaataatctcagttgagattgttcctagcgactgag

SEQ ID NO: 290138 - DNA, 324 bp, Unknown
  Bacterial polypeptide expressing nucleotide sequence isolated from the Sargasso Sea
gatgagttgttcaaaagatcaaaaagtagctgtcatatcgacaaaattcggggatatggtagtagaattttttccagatgtcgcacctaagcatgttgaaaattttcaaattttagcagaagaagggtactataatggcaccacttttcatagggttattcctggtttcatgatacaaggcggagatccaaattctaaggatctagataggatgaatgatggaactggtggaagagcaggaaagttttttggaattggcagagaaaatgattccgaatcttggactgttccagctgaatttaatgatacccctcatcaacgcgg

SEQ ID NO: 290139 - DNA, 439 bp, Unknown
  Bacterial polypeptide expressing nucleotide sequence isolated from the Sargasso Sea
atgacaactgcattatttgaaacagaagttgggaacattaatattgtatttttctctgacgatgcacctaatacagttaaaaacttcacgagcctaataagtgatggtttttatgatggtctagcatttcacagagtgattcctggatttatggctcagggtggatgtccaaatactcgtgatggagcatcaggtatgcctggaactggtgggcctggatataatataaaatgtgaaattaattccaataaacatctaagaggttcactttctatggctcatgcaggaaaggatacaggtggaagtcagtttttcatagtttatgaaccacagcctcatctcgatggggttcatactgtttttggtaagactgatgatatggatgtagtgctaaagcttactaatgggtcaaaaattttaaaggcaactttaaaatagt

SEQ ID NO: 290140 - DNA, 506 bp, Unknown
  Bacterial polypeptide expressing nucleotide sequence isolated from the Sargasso Sea
tatagctctaattacatctttttttattgttgaacaagtagcctcagccaatgaaacaacaaattctaagttacttcttaatacttctaaaggagagattgttataaaatttctaccagatttagctcctgttcatgtcgcacgtataatcgagctggtaaaaagtggtttttatgatggtattgttttccatagagtaattccaggttttatggctcaaactggagatccaaaaggcaatggaacgggaggtagtgggcagaaattaaaagctgaattttcaaattatcagtatacttctggtacagttggcatggcaagaactatggatcccaatactggagatagtcagtttttcatttgctttgatggttgcggccatttaacaggtcaatatacagcctggggtcaagttgaaacaggtatggacgttgtagaaaatattaatgtcggtgagccaccctccaaccctgataaaattattaacgcatcaatttcggaataaa

SEQ ID NO: 290141 - DNA, 607 bp, Unknown
  Bacterial polypeptide expressing nucleotide sequence isolated from the Sargasso Sea
atgagttgtgaaaaagataatgaagttgctgtcttatctacatcttatggttctatggttattgaattttatcctgatatagcacctatgcatgttgagagttttaagattttagcagaagaaggttattttgacggtacaacatttcatagagtaatcccaggatttgttattcaaggtggtgatcctaattctaaagatgatgatcgaatgaatgatggtactggaggacgggctggaaaatattttggtgatgaaactgatgattatgttggccgtaaagatgacccttctacatggacaatccccgcagagttcaatgactcgctacatgtaaagggaactctttcaatggctaggtctcaaaacccaaatagtggctcaagtcaattttttatttgtcatgcacctactcctcaattaaatggacaatacacagttttcggtaaagttataaaagggttagatgttattgataaaatagttaatgtggatagacccaacaagcaaaatcaatattatggcggtcctgatggagataacccttttgaaaaagtacctatgacagttaaagttatgaaacaaagccaggcgatggagtcttaaa

SEQ ID NO: 290142 - DNA, 562 bp, Unknown
  Bacterial polypeptide expressing nucleotide sequence isolated from the Sargasso Sea
atgactagttgcgaaaaacaaccagatgtagctgttgtatctacaagatatggagatatggtattagaattttatcctgaagttgctgaaaagcatgttgatagttttttaactcatgccaggaatggatatttcaatgggacaacgtttcacagagtaattccaggttttgtaatacaaggaggagatccaaattcaaaaagtgatgaccgttcgaatcatggaatgggtggacatgcagcaaatttttatggtgttggtaatgaggatgatcaaagctcatggatgttacctgcagagtttaattcacggccacatttaactggaacactatccatggctagatcacaatctccaaatagtgcagggagtcaattttttatttgtgcaggacccacaccacagctagataatcaatatacagtctttgggcaagttattgaaggccttgatgtaattcaaaaaatagtgaattctcctcgtgatagaagagataatccgaaggataaggtggaaatgactgtgactgtgatgccaaaaaacgaagctgtcgatagttaaa

SEQ ID NO: 290143 - DNA, 347 bp, Unknown
  Bacterial polypeptide expressing nucleotide sequence isolated from the Sargasso Sea
tatggagaatattgttattgaattagataaaggaaatgctccaatcacaactgaaaactttttaaattatatagaaagtggtttttatgaaggtacagtattccatcgtgtaatatctggttttatgatccaaggtggaggtcatcttgctgatatgacatctaaagataataaattagagcctattttaaatgaagccaataatggtttagtgaattcaagaggaacaatagctatggctaggacctcagaccctcattcagcatcatctcaattttttattaatcatgcagataatgattttttaaatttcaagaccgatcaagtagatcaaggttggggatatg

SEQ ID NO: 290144 - DNA, 547 bp, Unknown; identical to SEQ ID NO: 290122
  Bacterial polypeptide expressing nucleotide sequence isolated from the Sargasso Sea

SEQ ID NO: 290145 - DNA, 586 bp, Unknown
  Bacterial polypeptide expressing nucleotide sequence isolated from the Sargasso Sea
atgagttgttcgaaagaagaaaaagttgcagtgatatcgacccagtatggggatatggttttagaattttatgaagaagttgcgcctatgcatgttgaaagcttcaaagctctcgcggatgaaggctattttgacaatactgcttttcaccgtgtaattcctggctttgttattcaagggggagaccccaattcaaaaggtgatgatagaatgcggtggggttctggaggaagagctggcaaattttttggaattggaaatgaaaaagataataagacctggaaaattcctgcagaattcaatgataaaaaacatgttaaaggcaccttatcaatggctagaagcaaagaccctaatagcgctggaagccaattctttatttgtcatgcagcaacaccacaattaaacaatcaatatactgtatttggccaagtcatcgatgggctagaaatcatcgaccaaattgtttattctgaaactcctcgaaagcaaaatccaggttatcgtggacctgatgccgattatccttttgaaaaagttgaaatgaaaattaaactagtaaataaaagccaagcgctgaaatagc

SEQ ID NO: 290146 - DNA, 427 bp, Unknown
  Bacterial polypeptide expressing nucleotide sequence isolated from the Sargasso Sea
atgacacaagtaatgatgaaaacagcaaaaggcgatatccaaattgatctattcgatgaagatgcgccaaatactgtaaaaaatttcactgatctaatagaaaaaggattctatgacggacttaattttcacagggtgatcccaaactttgtcatccaaggtggttgtccgcaaggaactggtacaggaggccctggctaccatattgattgtgagatcaatcccaatcgtcatcaagctggaaccctatcaatggctcatgcaggaaaaaatactggcggaagtcaattcttcatctgccacagtccgcagcctcatttagatggggtacatacagtttttggacataccgcaaacatggatgtggtaaattcaattgaacagggcgatgagataatctctgcagagattgtttctggtgactgag

SEQ ID NO: 290147 - DNA, 520 bp, Unknown
  Bacterial polypeptide expressing nucleotide sequence isolated from the Sargasso Sea
gatgattaaagagggaattgttacggttcttttaactacttctcttggagaaataaaaatagaactaaacaaagagttagcacctattacaactcaaaattttgttaaatatgttgaatctggtttttacgatcaaactatttttcacagagtaatagaaaattttgtaattcaaggcggtggacataatgaggatatgtcaatgaaagatagagatcttgagcctattcaaaatgaagcaaataatggcttaaaaaatgaaagaggttctattgcaatggctagaactgcagaacctcattcagcttcatcacaatttttcataaacttacaaaataatttcactttaaatcatacttctgaaacatctaggggatggggttatgcagtttttggaaaagtttcagagggaatggatgttgttgataaaatagcaatgactgagacaggagtttttccaccacacacagatgtgccagtagaacctatcttaattttaaaagcttcaatagttgaataa

SEQ ID NO: 290148 - DNA, 439 bp, Unknown
  Bacterial polypeptide expressing nucleotide sequence isolated from the Sargasso Sea
atgaaaactgcattatttgaaacagaagtagggaacattaatattgaatttttctctgaagacgcacctaatacagttaaaaactttacgaatttgattagtgatggtttttatgatggtctagcatttcacagagttattcctggatttatggctcagggtggatgtcctaatactcgtgacggagcatctggtatgcctggaactggaggtcctggatataatattaaatgtgaaattaattccaataaacatttaaaaggctcactttctatggctcatgcaggaaaggatacaggtggtagtcagtttttcatagtctatgaacctcagcctcatctagatggagttcatacagtttttggtaagactgatgatatggatgtagttttaaagcttactaacggttcaaaaattctaaaagcaactttaaaatagt

SEQ ID NO: 290149 - DNA, 445 bp, Unknown
  Bacterial polypeptide expressing nucleotide sequence isolated from the Sargasso Sea
tatgaacaaactctcttctttcaaaggcttaatattaattttaattggtcttatttggatagtgagctgttctcaaaatgaaaaggagataaaagtgataacttttgaaacaacactggggccaatagtaatagaactgtttgaagaagaggcacccataacctctaaaaatttcctagagtacgctgagagtggcttctataatgggacattattccacagagtcattccaggatttgttatacagggtggtggtatggaatcagggatggttaacaaagaaggtaaccctccaatcatgaatgaaggaaataatggtattaaaaatctcaagtggactttatctatggcccgaacaaacgatcctcattcagctagttcgcaattttttataaatttagtaaataatgtttcacttgatcatacggaagaaactatacaaggt

SEQ ID NO: 290150 - DNA, 588 bp, Unknown
  Bacterial polypeptide expressing nucleotide sequence isolated from the Sargasso Sea
attgattattgttacagctcctcaagcttttgcagaatatgaggatacaattgtagtattagagactgattctggacgattaattatagaattcttcccacagtttgctccaaaccatgttgaaaactttgtaacattatctgaagacggcttctacactggaacaatttttcatcgtataattgaaggatttatgattcaaggcggtgatccaaaatcagctgacccttctttttcaatgtctgaatggggaacaggagatcctggctattctatagatgcagaatttaacagcattgaacataaacgaggaatagtttcgatggcacgctcatctgatcctaacagcgctggttctcaattctttattgttcataaggattcaaacttcttagatgggcagtacactgtttttggtagaatcttaacagatgaaagttttgaaacattggacagaattgcaacaatgaatactgcaccaaacgatcaaccaatggatgcatggagagctgttatcaaaaatgttcaagttatagatcgttctgaattatcaaatttacccgagtatacgacaccggtaaccaccga

SEQ ID NO: 290151 - DNA, 496 bp, Unknown
  Bacterial polypeptide expressing nucleotide sequence isolated from the Sargasso Sea
atgattattttcacaacaaattttggcgatataaccctcgaacttgatgtagagcgcgcccccgttaccgccaaaaactttattcgttactgtaaagaaggtttttatgatcacacgattttccatcgtgtaatcaaaggctttatgatccaaggcggtggctttaccgccaaaatgaaagaaaagcccacccacgaaccaattgtcaacgaagccaacaaaggcctatcgaatgtatttggtactatcgccatggcccgtaccgatgcgccacactcggcaaccgcgcagttttttatcaatactgccaataatgagtttctagaccatacggcacccaccaataacggctggggttatgcggtatttggtaaagtcacagcgggactcgaggttgtgctgcaaattgaaggcgtaaaaaccacgcgagtagcgggccatgaagacgtgccccgtgaacccatcattatcgaaaaagtgacgattattgaatgac

SEQ ID NO: 290152 - DNA, 505 bp, Unknown
  Bacterial polypeptide expressing nucleotide sequence isolated from the Sargasso Sea
aatgacaaaagcaaccattaagacatcacttggtgaaattaagcttgagcttaatgatgagaaagcaccaataacagtagaaaattttaagacaatagctaactctggttattatgagggaactatttttcatagagtgattaatggttttatggttcaaggtggaggcctaacagctgacatgaataataaatcaagcggaacctctcccatacaaaacgaagcaaataatggcctgactaatgatagaggaactattgctatggctagaaccatggaccctcactctgctactagtcagttttttataaatcataaagataatggtttcttaaatcatactggtgaaaattctcagggatggggctatgcagtgtatggggttgtaactgaaggtatggatattgttgatcaaattgcagatgtcgcaactggatcttctggtggccatcaagatgttccggtggatgtcataacaatagagtctgttactattagtgaatga

SEQ ID NO: 290153 - DNA, 619 bp, Unknown
  Bacterial polypeptide expressing nucleotide sequence isolated from the Sargasso Sea
tatgtctgataaattcagtactgttgaacagcaagcaagctatggtgttggtcgtcaaatgggcgagcaactggctgccaattcttttgaaggtgtggatattgctgctgttcaagcaggcttagccgatgcgtttgctggcgttgaaagcgctgtatctatgcaagatatgcaagttgcattcactgagatcagccgtcgcattcaagcggctcaagagcaagcagctgctgcggcttctgctgaaggtgaagcgtttttagtggaaaacgctaaacgtgcaggcgtgatcgtgactgactctggtctgcaatacgaagtattagttcaaggtagtggtgcaaaaccaacctacgaagatactgttcgtactcactaccatggttctttcatcaatggtgatgtgttcgacagctctgttgttcgtggtcaaccagctgaattcccagtatctggcgttatcgctggctggactgaggcactgcaactgatgccagttggtaccaagttaaaattattcgttccacatcacttagcttacggtgagcgtggtgcgggtgcttctattcctccatactcaaccttagtgtttgaagtcgagttattagacatcgtctaa

SEQ ID NO: 290154 - DNA, 358 bp, Unknown
  Bacterial polypeptide expressing nucleotide sequence isolated from the Sargasso Sea
tttgtcatacaaggtggcggtatggaatccggaatgcaaaataaaccaggtaatcctccaattattaatgaagcaaataatggccttaaaaatctaaaatggacattatccatggcaaggactaatgaacctcactcggctagttcacagttttttataaatttagttagtaatgcctcacttgatcatactgaagaaacaatacagggttggggttatgcagtatttggtgaagtcgtagaggggtttgagacagttgaggcaattgctgcagttgcaactggttcttcaggctttcatcaagatgtacctcttgaagaaatttctataatagacactaaagtcactactgaataaa

SEQ ID NO: 290155 - DNA, 812 bp, Unknown
  Bacterial polypeptide expressing nucleotide sequence isolated from the Sargasso Sea
gaaactgcaagagagcaaatacctaaaaggccttcttcatggtacccataaagagtggtgggagaatggaaataagaagtttcagggtagatttaaatcgggagataagaacggtagatgggtcggatactttgaaaacggtaagatcaagtctgagataaactataaaaatggcattgaggatggtttagaaactcattggcatgagaatggggtcaagtattcaaaaggttcatatcgaaaaggtaaaaaagtaggagaatggaattattgggatgaacaaggtgaccccatacactatgtatgtattgaaacaaaatttggtagaattatgatcgatctattttctggtattgctcctatgcatgttgaaagttttaaaatgcatgcaaacactggatattttaatggtactatcttccatcgtgtcatcccaggatttgtcatacaaggtggtgatccgaatagtagatctagtaaccggagaacacatggcataggtggagcatcagccgtattttatggtattggcgataaaagagacccatccacatggaaaattccttcagagttcaactccacccctcataagaggggtattgtttcaatggcaagagggtctgatgaaaacagtgctggtagccaatttttcatttgtgtaaaagatgccccaaatcttgataataggtacaccgtatttggtaaggtcttagaaggtatggaaatagtagaccagattgtcaatgtacgcgtagatctaagagataatccaatcgaccggattgaaatggaggtctcgatctgtaattgat

SEQ ID NO: 290156 - DNA, 496 bp, Unknown
  Bacterial polypeptide expressing nucleotide sequence isolated from the Sargasso Sea
atggttagcttacataccaattttggtgttattaaactggcattatttgccgacaaagcccctgcaacagtagaaaactttctgaactacgtaaaagaaggtttttatgacaacaccatttttcaccgtgtgatcaatggctttatgattcagggcggtggcttcactcctgatatggaacaaaaagagccgggcaaaccgatcaaaaacgaagcaaacaacaaagtggctaataaagccggcactattgctatggcccgcaccagcgatccacattcagccacctgccagttctttattaacgtggctaacaacgactttttagatttcagctcagaaacttctcagggctggggttactgcgtatttggtgaagtggtcgaaggcatggatgtggtcaacaaaatcaaaactgtgtcgactggacgtaagtttggtcatgctgatgtaccaactgacgctgtaatcatcgaaaaagcagaaatccatggctaaa

SEQ ID NO: 290157 - DNA, 196 bp, Unknown
  Bacterial polypeptide expressing nucleotide sequence isolated from the Sargasso Sea
attgactagtgtaaacatagaaaccaatcatggaaatatttcatttaacttgttaccagagttagcaccagaaactgtgagaagctttgtaaaattagcaagcgacggattttacgatggaacattatttcatagagtaattccaggattcatgattcaagggggagacccaaatacaaaagacccaaacatgaaa

SEQ ID NO: 290158 - DNA, 583 bp, Unknown
  Bacterial polypeptide expressing nucleotide sequence isolated from the Sargasso Sea
atgaaacgtctgttgctggcgcttggcggcgccgcccttctcgcgaccgcgaccgcacctgcgttcgcgcaatcggctaccgcgcaccccgtcgtgcagctgaagacctcgcagggcgacatccgcgtcgagctctacccggagaaggcgccgaagtccgtcgccaacttcctcgattacgtgaaggccggccagtacaacggcacgatcttccatcgcgtgatcaagggcttcatgatccagggcggcggctacaagaccaacttcgaggagaagccgacccgcgcgccgatcccgctggagagccgcaatggtctgaagaacctgacgggcacgatcgcgatggcacgcacgagcgatccgaactcggccaccgcgcagttcttcatcaacacggtcgacaacagcggcctcgactacccgaacccggacggcaacggctatgcggtgttcggcaaggtcgtgtcgggcctcgacgtcgtgaagaagatcgaaggcgtcgcgacgacctcgcgcggcccgatgcaggacgtgcccgcgcaaccgatcgtgatcgaatcggccagcatcgtctcgaagtaag

SEQ ID NO: 290159 - DNA, 448 bp, Unknown
  Bacterial polypeptide expressing nucleotide sequence isolated from the Sargasso Sea
atgcagacttcccagggagagattcatattgaattattcgaagacgaggcacccaacacggttgccaacatgattgaattgagtgaacaggggttctatgatggactggtttttcatcgggttatcaacgatttcatgatccaggggggatgtcctaatggcaaagggaccggaggccccggttatcgttttcgggatgaatgtcatcccgatcgtcgacatgatggaccaggagtcctctcaatggccaatgcaggtccaaataccaacggttcccagttcttcattacgcactctgcacaaccccatctggacggaaaacataccgtatttggacgcgttttggaggggctggatgtggtcaaccgcatcagccagggagacgagattcaatcggttactgttttagacaagcgcgaccatgaatacaatgtggtcaagctctaat

SEQ ID NO: 290160 - DNA, 634 bp, Unknown
  Bacterial polypeptide expressing nucleotide sequence isolated from the Sargasso Sea
tatgagttgtggaaaaccaaaaaaggaagcgcaagtgaatgcaacaacagagcaatcagctcaagaaacaaaacaaccggaacaagtagatcaagataagcaacaaaaggatgttgcgatcatcaccaccgattttggtgatatggtcgtcgagttctttgaaagcgttgcgccaaagcacgttgagagttttaagctccacgcgcaaaatggatactacaacggaacactatttcatcgtgtgatccctggattcatgatccaaggtggtgacccgaatacaaagaccgataacaaagcgagctatggtacaggcggtcatgctgcaaaatattttggagttggtaatgagagcgagcccactacttggaacgtacctgctgagttcaatgatataaaccattcacgcgggatcctatccatggcacgcgcaaatgatcccaatagtggaggaagtcagtttttcatttgtgccgctgatgcaccacacttgaatggaaagtatacggtatttggtcaattgataaagggagaccaggtcttggagcagatcgtaaaccttccccgcgatgcaagggataaccctacacgtagagttgaaatgagcgtacgattagataaaatagataactaa

SEQ ID NO: 290161 - DNA, 481 bp, Unknown
  Bacterial polypeptide expressing nucleotide sequence isolated from the Sargasso Sea
gaaattgttacaacctctggaacgattgtggttgagcttgaccgaaatcgagccccaaaaactgtcgagaattttctaaactacgttcagtcgggagcctatgtcgggacaatctttcatcgagtcattcctggatttgtaatccaaacaggtggttacgatgtaaatctcaatgagattgatacgtttcctgaaatcatcaatgaatcaggaaatggattaaaaaatcaaagaatgtctttgggcatggcaagaaccaatgagccacactctggttcatcgcagttttatatcaatctgaatgataatttttcgcttgatccaatgccgacaagatggggttatgcggtatttggggatgtcatcgatggattctcagttgttgatgatattgcgagcaatgcaactcaaacaacaaaaggttttcaagacgtccctgtggcgccaatcattattcttgaagtcaaccgcatagactgac

SEQ ID NO: 290162 - DNA, 655 bp, Unknown
  Bacterial polypeptide expressing nucleotide sequence isolated from the Sargasso Sea
aatggaagtcagttttttataactcacaaagaaacgccctggcttgatggaaagcacactatttttgggcatgtcattcttgatggacaaaaagttgtagattctatcgaaaaagatgatgtaatgaaaagtgttaaaattcttagaattggcaaggaggcgaaaaaatttgacgctaacaaaatctttaatgatcaaatggctgttattgagaaagaagctgaagaaaaaagaaaagctgctgctgaaaaattaaaaaaccttactaaaggagccacagttaccaaaagtggcctcgcctataaagtaataaaaaaagggagcggaaaagtacaccctactgctactcaaactgtaacggttcattatacgggtaaactgactgatggaactgtttttgacagctctgtcgaaagaggtcaacctgcatctttccccttaaatagagtaattcctggatggacagaaggagttcaactaatggtagttggagaccaattcacatttattattccatcaaatttagcctatggagaaagaggtgctggtggtgttatccctccaaatgcagatttaatatttgaagtagagcttatatcaatacaaggtgcagaatctcatgatggacacaaccatgatggacaaaatcattaaa

SEQ ID NO: 290163 - DNA, 522 bp, Unknown
  Bacterial polypeptide expressing nucleotide sequence isolated from the Sargasso Sea
catggataaagacaacgcagttatttcaacacaattcggagatattgttctagaattttttgatgacatagctccaaagcatgtcgagagctttaagctacatgctcaaaatggatattacaatggaacaaccttccacagggttatacctggatttatgattcagggaggtgatcctctaacaaaatctgatgatagaagtcggcatggaaccgggggtaatgcagcgaagtactttggcataggaacagagtcggatgagtcaacatgggaccttcctgcggagtttagccccactccacatacacgtggtatcctgtcaatggcaagatcacaaaatcctgatagcggaggaagtcaattctttatctgtgttgcagatgctcgttttctggataaccagtacacagtcttcgggaaagtagtaagtggaatggatgcagtagacgctattgtaagtgctcctcgagatgcaagagataaccccaatgatagaatagaaatgaaagttcatctagaaga

SEQ ID NO: 290164 - DNA, 829 bp, Unknown
  Bacterial polypeptide expressing nucleotide sequence isolated from the Sargasso Sea
aatgcaaacctcaaagggggaaattgttttacgacttttttacagaagagtaccaatgaccgtagcaaattttgttggtcttgctgagggttttaaagagtggaaagatccagttacaggcaaggccagaaaaactcgctattatgatggcttgagttttcacagggtaataaatgattttatgatccaaggtggtgatcctatgggaacaggcactggtggcccgggatatacattccaagatgagtttcatcctgagctcaagcatagcaagcccggaattctttcaatggccaatgcaggaccaaatacaaacggtagccaatttttcataacacacgttccaactccacacctagacaacaagcattctgtttttggggaagttgttgatggtatagaagtggttaacgcgattttgaaaggagatctcatcaactcaataactatcatcagtaaaggagaatctgcaaagtcttttgattcactatcaatagaaaaaataattgccgaaaaaaacaggaaacttgccgaaaaaaacaggaaaatcattccaaaaccaacatccgaaatagatgcttcaaaagtcccagattcagcacaggtggatgcagaagaagtcagcacacaactactggtgatagcatataaaggttcaaattcacctaaaaaaaatattttttatgataagtctagggcaaaagaagcagcaaaaaaaattgtagatcttgctcgaagaaagggagtgagttttcctgatttaattaagcagttttccgatttacctcagcagccaaaacttcccctgttgtcggcaaaaaataatttg

SEQ ID NO: 290165 - DNA, 547 bp, Unknown
  Bacterial polypeptide expressing nucleotide sequence isolated from the Sargasso Sea
gttctagcttggctactatctctcagcgcgacagtatttggacaatcaaacccagtggtagtgatggagacatcaatgggtacaataaaaattgagctccgtcccgatctgacgccaatcaccgcagagaacttcctgaggtatgttgataacggatattacgacggcttgatttttcaccgcgtaataagcggattcatggtacaaggcggtgggtttgattcagatatggttcagaaatctacttatgatccaataaaaaatgaagccgatacgggtatatcaaatgccagaggaactatagctatggcaagaaccggtgttgtggacagcgcaacgtcgcaattttttatcaatctagtaaataacgcacgtttagacttccaaaattcctctccctccggatacggttatacagcgtttggtcgcgttattgagggtatggatgttgtggatcaaatagcgagagtggcaactggttcacaacgcggatatcaaaatgtgcctctagaagcggtagtaattaattcaatgtctcaagaatagt

SEQ ID NO: 290166 - DNA, 529 bp, Unknown
  Bacterial polypeptide expressing nucleotide sequence isolated from the Sargasso Sea
aatgacatacgataaaacatattcagcaccgcctgctatgaatataaacgaaaacggaaattacagtgctgtaattgaaacttcacttggatcaatcgaaatcgaattgtttactgatattgctcctataactgtcaataactttgttaatttatccaaagatggttattacgataatgttattttccacagagttataaaaggattcatgatacaaggtggtgaccctagcggcacaggacatggagagatgggtaaatatcctggatatgaattccaagatgaactaaataacccaatgcaatatgaaaaaggaattgttgcaatggcaaatagaggaccaaatacaaatggaagtcaatttttcataatgcatgtagattatcctttaccgtatgactacacaatttttggtaaagtttcgaatggtatagatgttgttgatgcaatcgcaaatgtacaaactggagatatggacaaacctgttgatgatgtagttataaacagtgtcgatattaaagagaattaa

SEQ ID NO: 290167 - DNA, 342 bp, Unknown
  Bacterial polypeptide expressing nucleotide sequence isolated from the Sargasso Sea
aaatcgagccccaaaaactgtcgagaattttctaaactacgttcaatcgggagcctatgtcggaacaatctttcatcgagtcattcctggatttgtaatccaaacaggtggttacgatgtaaatctcaatgagattgatacgcttcctgaaatcatcaatgaatcaggaaatggattgaaaaatcaaagaatgtctttgggcatggcaagaaccaatgagccacactctggttcatcgcagttttatatcaatctgaatgataatttttcgcttgatccaatgccgacaagatggggttatgcggtatttggggatgtcatcgatggattctcagttgttga

SEQ ID NO: 290168 - DNA, 616 bp, Unknown
  Bacterial polypeptide expressing nucleotide sequence isolated from the Sargasso Sea
atgataaaacacataacaacattcctcgcgatatcaatttttatagcgggatgtggatcaaaacaaaaaagtaaggaatcaatcatggataaagaaaacgcagttatttcaacgcaattcggagatattgtcgtagagttttttgatgacatagctccaaagcatgtcgagagctttaaactacatgctcaaaatggatattacaatggtacaacctttcacagaattatacctggatttatgattcagggaggtgatcctctaactaaatctgatgatagaagtcggcatggaacaggcggtaatgcagcgaagtattttggtataggaactgagtcagatcagtcaacatgggatctccctgcagaatttagtcctactccacacgagcgtggtattttgtcaatggcaagatcacaaaaccctgatagtggaggaagtcaattctttatttgtgttgcagatgctcgttttctggataaccagtatactgtctttggaaaagtagtaagtggaatggatgcagtagatgctattgtaagtgcccctagggatgctagagataatcccaacgatagaatagaaatgaaagttcatctagaagataaaaaataga

SEQ ID NO: 290169 - DNA, 550 bp, Unknown
  Bacterial polypeptide expressing nucleotide sequence isolated from the Sargasso Sea
cgccttctttgccggttccgccctgttcgctgccaacctgatggcggccgagccggccaaggcgccacacgtgttgctcgacaccaccaacggccagattgaaatcgaactggacccggtcaaggcgccgatcagcaccaagaacttcctggcctatgtcgacaagggcttctacaccaatacgatctttcaccgcgtgatcccgggcttcatggtccagggcggcgggttcacccagcaaatgtcacaaaagccgaccgaagcaccgatcaagaacgaagccagcaatggcctgcataacgtgcgtggcaccttgtccatggctcgcaccaatgacccgaactcggccaccagccaattcttcatcaacgtggccgacaatgccttcctcgacccgggccgcgatgccggttatgccgtgttcgccaaagtggtcaagggcatggacgtggtcgacatcatcgtcaactcccagaccaccaccaagcaaggcatgcagaacgtgcctatcgatcctgtgatcatcaagtcggccaagcgcatcgactga

SEQ ID NO: 290170 - DNA, 399 bp, Unknown
  Bacterial polypeptide expressing nucleotide sequence isolated from the Sargasso Sea
tatgacaaaaacagttattgcagtggttatttcaacttctcttggtgacattactctagagcttgataaagaaaaggctccgggtacagttgaaaattttataaatcttgttgaatctggatactatgatgagactatctttcatagagtgattgatggttttatggtgcaaggaggaggcttaacagctgatatgagaactaagccttctggcactcaaccaatacaaaatgaagctaataatggcttgccaaatgatagaggaactattgctatggcaagaactaatgatcctcattcagctacaagtcagttttttattaaccataaagataatagtttcttaaatcactcatcagaaaccatgcgtggctggggatatgcggtatttgggaaggt

SEQ ID NO: 290171 - DNA, 412 bp, Unknown
  Bacterial polypeptide expressing nucleotide sequence isolated from the Sargasso Sea
aaccgcgggtaacttcatagacctcgcgaagaaaggatactacgacgacttgatctttcatcgggtgatagaggatttcatgatccagggcggctgtcccgatggcacggggcgaggcggacccggttacacgatctccgacgaattcgctcctggtctcgcacacacggaaaagggtctcttctccatggcgaacgccggaccaaacaccggagggtctcagttttttataacgcttgctgcaacgaactggctagacgggaagcacgcgattttcggaaaggtgaccggtggtatggacgtagtagaagcgatcggaaagatcgagactggcttcggagatcgtccaaatgaacccgtcgtaatgataaaggtgactgtctctgagactgaatcagatcggtcggattaa

SEQ ID NO: 290172 - DNA, 313 bp, Unknown
  Bacterial polypeptide expressing nucleotide sequence isolated from the Sargasso Sea
atggaagctcacataaaaactaataaaggaactataaaattaaaacttttttatgaacaaacccctatcaccgtatctaattttataaatttagctataagaggatattataataatttatcttttcatcgtgttattgataattttatgatacaaggagggtgccctttaggaacagggacaggtggtccaggatataattttcaagatgaatttaacgataacttaaaacataataaacctggtgttttatcgatggcaaattcagggccaggaacaaatggtagtcaattttttattactcatattgaaa

SEQ ID NO: 290173 - DNA, 625 bp, Unknown
  Bacterial polypeptide expressing nucleotide sequence isolated from the Sargasso Sea
ggctactccgtggctcgacggtaaacacaccgtattcggcaaggtgctcggcaaatcagatcttgacgtggtcaacgccattgccaagggcgataagatcatcaagctcaccattttgcgcgtcggcgataaggcaaaggctttcaagggagacgaagcccattttgcaaaaatcatggaagataaggaaaacgcaaaaaaaatcgccttcgaagcgcgcatgaaaaaggaggaggaacaagtcgccgccttgattgccaaatataagaaggacaacaaatccgaggtggtgaccaccaagagcggtctgcgttacatcgtgttggccgaaggcaaaggtgacgccccggcggcaggcacgcgcattgccgcccactacaccggcacgctgacggacggcaagaaattcgacagctcccgcgaccgcaatgagcccattcgttttccagtgggtaaaggctttgtgattcccggctgggacgaagccttgtcgcagatgaaaaaaggtgagcggcgcatcttgatcatcccgcacaagctaggctatggagaacgtggcgccggcggcggcgttatccctccgtttgccacgctgatcttcgacgtggaactggtggatttctaa

SEQ ID NO: 290174 - DNA, 502 bp, Unknown
  Bacterial polypeptide expressing nucleotide sequence isolated from the Sargasso Sea
catgtcgttagtcgcagtaatggaaaccaataagggcacaattcggctggatttgtatccagaagaaacgccagtaaccgtcgccaactttgtcaatttggcgcagcgtggtttctatgatggattgtcgttccaccgcgtaattgacgatttcatggttcagggtggctgccctcagggtactggcaccggcgggcccggctatcgcttcgcagatgaatttgtgcccagcctgcgtcatgacgcaccgggtaaattttcgatggcaaatgctggcccgggcactaacggttcacagtttttcatcacccatgtgccgaccccatggctcgatgacgcgcacagtatttttggcgcagttcagtcggatgacgaccaagacattgtcaacgcaatcgcccaaggcgatagcatcgtcagcgtcaccatagaaggcgagacccaagcactactggatagcgtagagcagattgccgattggaacgcagcactggacggttaa

SEQ ID NO: 290175 - DNA, 431 bp, Unknown
  Bacterial polypeptide expressing nucleotide sequence isolated from the Sargasso Sea
tgaaaactttttaagttatgttgaaagcggtttttataatgaaacagtctttcatcgcgtaatatccggattcatgattcagggtggaggccatcttgcagatatgacacctaaagatgagaagttagaccctatacagaatgaagcaaataatggcctaaagaataatagaggcacaatagcaatggctagaacagctaatccacattcagcttcatctcaattctttattaatcacgccgataatgcttttctaaactttagaaccaatcaggtagatgaaggttggggttatgcagtatttggtcaagtgattgaaggcatggaagtagttgacaagattgctgatgtagaaacaggttctgttggaccttatcaagatgtgccagttgaagcaataacggttttaaaaacggaagtaatagattaag

SEQ ID NO: 290176 - DNA, 484 bp, Unknown
  Bacterial polypeptide expressing nucleotide sequence isolated from the Sargasso Sea
attgactagtgtaaatattgaaacaaatcatggaaatatttcatttaatttgttaccagagttagcaccagaaactgtgagaaattttgttaaactaacaaaagatggattctatgacggaacattatttcacagagtcattcctggattcatgattcaaggtggagacccaaataccaaagacccaaacatgaaaagtcaatggggaacaggcggaccaggttacaatgtaaaaggtgaatttagttcaaggtcacatttacgaggaattgtttcgatggcaagagcaatggacccagatagtgcaggttctcaattttttattgtaacaaaagacagtaccttccttgatagagagtatactgtatttggagaggttgttgaaggaatggatgttgcagataaaatagtaaatcttgatagggataacaatgactgtcctctacaagatgcaaaaatggtcaaagtttcaatttcagagtaa

SEQ ID NO: 290177 - DNA, 541 bp, Unknown
  Bacterial polypeptide expressing nucleotide sequence isolated from the Sargasso Sea
tttgctattaagttgctcaaataatgaagaaaaggaggtaaaagtgataactttagaaacaaatttaggaccaattgaaatagaacttttttttgaggaagcgcctataacttcaaaaaactttttagaatatgccgaaagtggtttcttaaatggaactttatttcatagagttattccagggtttgttatacaaggcggaggtttaactaccggtatgcaagataaacaaggaaatcctccaatagaaaatgaagcaaataatggtttaaaaaatgaaaaatggacattgtctatggcaaggacaagtgatcctcattcagcaagctctcagtttttcataaatttaaccaacaatacctccttggaccatacatcagaaacacctcagggttggggctatgcggtctttggtgaagtgataggtggatttgaaactgtagaaaaaattgctgcagcagaaactggaaattcaggttttcatcaagacgtgcctttagaagagatttcaatactagatacaaaaatagctacagagtaa

SEQ ID NO: 290178 - DNA, 388 bp, Unknown
  Bacterial polypeptide expressing nucleotide sequence isolated from the Sargasso Sea
atggtcaaactgcataccaactacggcgtcatcaccctggaactctttgccgacaaggcaccggtgaccgttgagaacttcaagcagtatgtgcgtgacggccactatgacggcaccatcttccaccgcgtaatcagcaacttcatgattcaaggcggcggctttgcccccggcatgcagcaaaaagacacccgcgatccgatcaagaacgaagccgacaacggcgttggcaacagtgtcggcaccgtcgccatggcgcgtacacctgatccgcattctgccagcgcccagttcttcattaacgtggccgacaacgactttctcaacttctccgctccgaccatgcacggctggggttacgcggtcttcggcaaggtgaccgatggca

SEQ ID NO: 290179 - DNA, 394 bp, Unknown
  Bacterial polypeptide expressing nucleotide sequence isolated from the Sargasso Sea
tacgatgagactatctttcatagagtaattgatggttttatggtgcaaggaggaggcttaacagctgacatgagaactaagccttctggtactcaaccaatccaaaatgaagctaataatggcttaccaaatgacagaggaactattgctatggcaagaactggtgatcctcattcagctacaagtcaattttttatcaaccataaagataatagtttcttaaatcactcatcagaaactatgcgtggctggggatatgcggtatttgggaaggtaacagatggaatggatgttgttgatgcaattgctgtagttgataccggtaactttcaacagtatgcagatgttccagttgagccaattatgattcaatcgatatctgttatggaatgaa

SEQ ID NO: 290180 - DNA, 529 bp, Unknown
  Bacterial polypeptide expressing nucleotide sequence isolated from the Sargasso Sea
atgccaattattgaggaaactaaaatgacacaagtaactatcaaaacttcattaggagatattcaacttgaattagaggctgaaaaagctcctattactgttgaaaattttgtatctattgccaactctggttattacacagatactatttttcatagagtaataaacggttttatggttcaaggcggtggattgactgctgatatgggcaataaatctagtggtacagcacctattcaaaatgaagcaaataatggtcttagcaacgatagaggcactattgctatggcaagaaccatggagcctcattctgcaacaagtcaattctttattaatcataaagataatagtttcttaaaccacacaggtgaaaatccacaaggctggggatatgcagtctttggtaaagtcactgaaggcatggatgttgttgatgcaattgcagatgttgcaactggttcatctggaggccatcaagacgtaccgcttgaagttataaatattgaatctgtaactgtttctgaatgaa

SEQ ID NO: 290181 - DNA, 448 bp, Unknown
  Bacterial polypeptide expressing nucleotide sequence isolated from the Sargasso Sea
attgatcaagctttcaacaaatatgggcgatataactctggagttatttcaagataaagccccagaaacagtagctaattttttaaaatatacaaatgaaggaaaactaaatgggacgatattccatagggtaataccaaattttatgatacaaggcggtggtcatttacaagatatgtcacagattgatactttcgatcctgttattaatgaatcaagtaataatattagtaataaaaaaggaacaatcgctatggcaagaacaagcagccccaactctgcaacgtcacagtttttcattaatttaagagacaatgaatttcttgataaagctaactccgctgatggttatggatattgtgtttttggtcaagttacagatggcatagaaatagtcgagcaaattggtgctgtatctactggaaataatgctggtcattctgatgtt

SEQ ID NO: 290182 - DNA, 454 bp, Unknown
  Bacterial polypeptide expressing nucleotide sequence isolated from the Sargasso Sea
attgagtattttagtaagaatttttggccaggcgttttttattttagcggctacctttttaagccaaagtgtccaaggcgcttcagatttgacgattcaacagatagaggaagagggtggtcttgttcagttggcctctggacttcgttacaaagtgattagagaaggatcaggccctaagcccttggccaacgatactgtagttactcattatcacgggacctttctcgatggatcgatgttcgatagcacggtgcggcgaggtactcccgcaacgtttccagttaatggagtaataaagggatggacggaggcgcttcaactgatgagcgttggctcgaaatggcgcttagttattccgcctcatctcgcttatggtaagcgcggcatgagaggcgctatcccgccgaacgcaacactggtatttgaggtagagttgctagatataaggtaa

SEQ ID NO: 290183 - DNA, 466 bp, Unknown
  Bacterial polypeptide expressing nucleotide sequence isolated from the Sargasso Sea
attgactagtgtaaacatagaaaccaatcatggaaatatttcattcaacttgttaccagagttagcaccagaaactgtgagaagttttgtaaaattagcaagcgacggattttacgatggaacattatttcatagagtaattccaggattcatgattcaaggtggagacccaaatactaaagatccaaacatgaaaagccaatggggaatgggaggaccaggattcaatgttaaagcggaatttagtaccagatcacatttgcgaggaattgtttcgatggccagagcacaagacccagacagtgcaggttctcaattttttattgtgacaaaagacagtaccttcttagatagagaatacactgtatttggagaagtgattgaaggaatggatgttgcagataaaatagtaagtcttgatagggatggaaatgactgtccattagaagatgcaaagatgctcaaa

SEQ ID NO: 290184 - DNA, 517 bp, Unknown
  Bacterial polypeptide expressing nucleotide sequence isolated from the Sargasso Sea
atgataatcaggacagatgcctctgaaaattatccacaaatcgagatcgtgacaacatccggcaccattgtggttgaacttgatcgaaacagagccccaaaaactgttgagaattttctaaattatgttgaatcgggtgcttacatcggaacaatttttcatcgagtcatacccggctttgtgattcaaacagggggttatgatgtcaatcttgatgagattgaaacgctgcccgagatcatcaatgagtctggaaatggattaaaaaatcaaaggatgtctttgggcatggcaagaacgaatgaaccacactctgcatcatctcaattctatatcaatctaaatgataacttttctcttgatccaatgccgacgagatggggatatgcagtattcggtgatgtgatcgatggcttttctgttgttgacgatattgcgagtaatgcaacacaaagcacaaaggggtttcaagatgtgcctgttgcaccaatcattattctgaagtcaaacgaataga

SEQ ID NO: 290185 - DNA, 271 bp, Unknown
  Bacterial polypeptide expressing nucleotide sequence isolated from the Sargasso Sea
gcctggatacaaatttgatgatgaaattaatgataatttatctcatgataaagctggaatattatcaatggcaaatgcaggacctggtacaaatggaagtcaattttttattacattctctcctacacctcatttagatggtatgcatactatatttggtcatgttgtctcagggctagaaaacgttatgaaaattactccgagagatccatttagtgcctcagagcctggtgatcgtattattaaaattatcataaaaaatcaaccgtaa

SEQ ID NO: 290186 - DNA, 475 bp, Unknown
  Bacterial polypeptide expressing nucleotide sequence isolated from the Sargasso Sea
tctggataaaaaattacaatattttgcaaaatttgaaactgaaaagggagattttacagccatactatacccaaatgaagcccctttaactgtggaaaattttattaatttatctgaaaaaaacttttataacggcacaacttttcatagagttattccaggatttatggcacaaggaggagacccaactggaacaggttctggagggccaggatacaaatttaatgatgagttttcttcaagtttgcgtcataatggggaaggtattttatctatggctaacgcaggacccaacacgaatggtagccaatttttcataacatatactgctactccacatcttgatgggatgcatacagtttttggaaagataatagaaggaatggatgtagttaattctattagggaaagagatcctatgtctgatgctgaagaaggggataaaatacataaaataactatagaaaaaaagtaa

SEQ ID NO: 290187 - DNA, 766 bp, Unknown
  Bacterial polypeptide expressing nucleotide sequence isolated from the Sargasso Sea
atgcatatacggaaaaccttaaaactaagtgtaatattagctattctaagtgcttctttagcactaggatgccagccagatgtagttgaactagcttcagttacacccgaagcttctgaagctttgcaaataccgacaagtactcctgtacctgagccaaccgttgaagaagaatgcttggaacctgtgaaatccgaaacagaatggatgggacaaatgatccctcaatattcatgcgtacctcaaatcagtgtagatcctgctaaaacctattatgcaacaataaaagtaaccaatgaatcaggtgaatcttacgctggccacccagtcggggatattaagattgaactgttagctagcgttgctcctcttaccgtaagcagtttcaaattcttagcagaagatggcttctatgacgggttaatttttcaccgtgttatacctgacttcatgatacaagggggagatcctacaggaacaggaacatccggacctggatacaaattcaaagatgaatttgaacaaaacacaacgtttgatcgtactggaatcctagccatggcaaattctgggcctggcaccaatggaagtcagttctttataacagtagcaccaacccctcaccttaatttcaatcacacaatctttggatacatagtagagggtcaggagctggcagatgaaatttcaatggcaactggagatcaatctaacagaccaacagaatcaatcatcatcgaaactataattatagacgaaggttaaa

SEQ ID NO: 290188 - DNA, 664 bp, Unknown
  Bacterial polypeptide expressing nucleotide sequence isolated from the Sargasso Sea
atgtctaccttcactcgaaattgttttgttgctttatctattctttgcctcagtgcatgcggcagtgaagaaacccaagaagattcagcaaacgacaactcaaacacctcccaaggcaatggctctgaggccacagatccggctgctgaggtactcgccaatcagttcaccatcgtcaccactttgggaaccattcaaattgagctggacccagtcaatgcccccatcaccaccgccaactttgagcaatacgcggacgacggtttttacgatggtcgcgacggtgacggcgccacagtctttcacagggttatcagtaactttatgattcaaggcggcggttacaccgagtctggcagtgaaaagagtagccgttccagcattgatatcgaatccaacaatggtctcagcaacgaccgcggaactttggccatggcacgcaccaacgatcccaacagcgccaccagccagtttttcatcaatcacaaaaacaacagctttttgaattacgaaaatgatagcaatcccggctatgctgtatttggcgtggtcgtggatggactcgatgtcgtggatgccattgcagccgtggataccgatggcaacgacgagccttataccccagtggtcattacctccgttacccgcacacccgcaccatgaa

SEQ ID NO: 290189 - DNA, 334 bp, Unknown
  Bacterial polypeptide expressing nucleotide sequence isolated from the Sargasso Sea
ttgactagtgtaaatatagaaaccaatcatggaaatatttcatttaacttgttgccagagttagcaccagaaactgtgagaagctttgtaaaattagcaagtgatggattttacgatggaacattgtttcatagagtaattccaggattcatgattcaagggggagacccaaatacaaaagatccaaacatgaaaagtcaatggggaatgggcggaccaggattcaatgttaaaggggaatttagtacaagatcacatttgcgaggaatagtttcaatagccagagcacaagacccagacagcgcaggttcacaatttttcatagtacaaaaga

SEQ ID NO: 290190 - DNA, 436 bp, Unknown
  Bacterial polypeptide expressing nucleotide sequence isolated from the Sargasso Sea
ttgactagtgtaaatattgaaacaaatcatggaaatatttcatttaatttgttaccagatttagcaccagaacatgtgaggaattttgttaaattggcaaaagagggattctatgatggaacattatttcatagggtcattcctggatttatgattcaaggtggagacccaaatacaaaaaacccaaacatgaaaagtcagtggggaatgggtggaccaggatatacaataaaagctgaattcaattcaagatctcatttgagaggaattatttctatggcaagagcaatggacccagatagtgctggttctcaatttttcattatgcacaaagatagtacattcctagataatgaatacactgtgtttggagaggtcactgaaggaatggatacagttgacaagattgttgcacttcctagagatggggaatgcc

SEQ ID NO: 290191 - DNA, 484 bp, Unknown
  Bacterial polypeptide expressing nucleotide sequence isolated from the Sargasso Sea
aatgaacaggctaaatatattgcaacaattgaaacatcactaggaacacttgtgatcgatctgtatgctgacatagcacctaaaacagtcaacaattttgttaatttatctaatgacggatattacgacgatattatttttcatcgtgtaattaaaggtttcatgatacaaggtggggatccgagtggaaccgggcatggtgaaatgggtaaattcccaggttatgaatttgaggatgaattatattatccaatgaattatgcaaaaggaatcgttgctatggcaaatagaggaccaaatactaatggaagccaattctttattatgcacgttgactatccattaccatatcaatacacaatatttggtaaagtttctgaaggccttgatacagtggactcaatagccaatgttcaaacaggcgacaatgataaacctgtagatgatgtagttataaaaagtgtaaaaattacagagaagtaag

SEQ ID NO: 290192 - DNA, 493 bp, Unknown
  Bacterial polypeptide expressing nucleotide sequence isolated from the Sargasso Sea
tatgcaaatagacgaaggtaaatcttacacagctgttattaaaactaatttaggtgatatgactgtagaattttttacagacgatgcaccaattactgttaataattttatttcattatcaaaagatggatattatgacaatgttatctttcatagagttatctctggttttatgattcaaggtggcgatccatctggaacaggtcatggtgattatggaaaatttcctggatatgaatttgaagatgaattaaacaaccaaagaccatatgaaaaaggaattttagctatggctaacagaggtcctaacacaaatggaagtcaattttttattatgcatgtagattatccacttccttatagctacacaatatttggacaagttgtagacggttttgatgtcatcgataaaatagcatctgttgatacagactcagctgataaaccaacaacagatgttgtaattagcacagttgaagttacagagaattaa

SEQ ID NO: 290193 - DNA, 538 bp, Unknown
  Bacterial polypeptide expressing nucleotide sequence isolated from the Sargasso Sea
ctgttcaagtcggagtacaaaccgcccgacacgaccgtcaccacgcgcaccttcatggagttcacgatggacggcgagccggcggggcgcgtcgagtttgggctctatggcgagcaggttccgcgcaccgcggagaatttccgggcgctgtgctctggcgagaagggcgcgccgctggcctttgaggggtcgccgatgcaccgcatcatcccgggcttcatgctgcagggcggcgacaccacgaatggcgacggcacgggcggcgagtccatctatggtggcaagttcgaggacgagaactttgggatcaagcacgagcgcgccggcctgctgtcgatggccaacagcggccccgacagcaacggctcccagttctttgtgacgaccgaggacacgccgtggctcgatggcaagcacgtcgtcttcggcgaggtgctcgagggcatggatgtcgtcaaggccctcgaggcgttgggcaccgcagatggcaagccgagcaagaaggtgctcatcagcaagtgcggtgagctctcgtagg

SEQ ID NO: 290194 - DNA, 484 bp, Unknown
  Bacterial polypeptide expressing nucleotide sequence isolated from the Sargasso Sea
attgacaagtgtgaatattgaaaccaatcatggaaatatttcatttgatttgttaccagatttagcaccagaaactgtaagaaattttgttaaacttgctaaagaaggattttacgatggaacattgtttcatagggtaattcctggatttatgattcaagggggcgacccaaatacaaaaaacccaaacatgaaaagtcaatggggaatgggtggacctggatacaatgtcaaagcagaatttagttctagatcacatttgcgaggaattgtatcaatggcaagagcaatggatcctgatagtgcgggctcgcaatttttcattgtaacaaaagatagtacattccttgatagggaatataccgtattcggagtcgtagcagaaggaatggacgtagcagataagatagtaagtcttgatagggatcaaaatgattgtcctttagaaaatgcaacaatggtcaaagtatcaatttcagagtaa

SEQ ID NO: 290195 - DNA, 466 bp, Unknown
  Bacterial polypeptide expressing nucleotide sequence isolated from the Sargasso Sea
tatgacaaaaaccgttattgcagtagttatttcaacttctcttggagatattagtctagggcttgatcaagaaaaggccccgggtacagttgaaaattttataaatcttgttgaatccggatactacgatgagactatctttcatagagtaatcgatggttttatggttcaaggcggaggcttaacagctgatatgagaaccaagccttctggaactcaaccaatccaaaatgaagctaataatggcttaccaaatgacagaggaactattgctatggcaagaactggtgatcctcattcagctacaagtcagttttttattaaccataaagacaatagtttcttaaatcattcatcagaaaccatgcgtggttgggggtatgcagtatttgggaaggtaacagacggaatggatgttgttgatgctattgctgaggttgataccggtaactttcaacagtatgca

SEQ ID NO: 290196 - DNA, 537 bp, Unknown
  Bacterial polypeptide expressing nucleotide sequence isolated from the Sargasso Sea
tatgagctgtgggaaatcaaaaaaggaagaacctgtgacaattgaacaagaaaatcaaaatatagatcaacctcaagaaaatgaaccagagaatccaaagagagaggttggagtaattacaactgaatttggtgatttgatagtcgaattttttgaggattcagcccctaaacacgtagaaagctttaagcttcatgcggagaatggattctatgatggtaccatttttcatcgtgttattccagggttcatgatccaaggcggggatccaaataccaaaggagaaaataaagcgagctatggtaccggtggccatgctgcaaagtactatggcataggtaacgaggatcaaccacagacttggagcctgcctgctgagtttaacgacatcagtcacaaacgtggtatcctttcgatggcacgatcttcagacccaaatagtggtggtagccaattttttatttgtgctgctgatgctcctcatttaaacggtcaatatactgtttttggtcaggttattcagggagaacaaatcat

SEQ ID NO: 290197 - DNA, 505 bp, Unknown
  Bacterial polypeptide expressing nucleotide sequence isolated from the Sargasso Sea
tatgacagaagtcattataaaaacatcacttggagatataaatcttgagctaaataatgagaaagctcctattacagttgaaaattttatatcaattgcagaatctggttactatgagggaactatttttcatagagtcattaatggttttatgattcagggaggaggacttactgctgacatgagtaataaatcaagtgggacaagctctatacaaaacgaagcaaataatgggctatcaaatgatagaggcactattgcaatggctagaactatggatcctcactctgcaacaagccaattttttatcaatcataaggataacggatttttaaatcatactggagaaacttctcaaggttggggttatgcagtttttggagtagtcactgatggtatggatgtagttgatcaaattgcagaagttgcaacaggctcatctggagcttatcaagatgttcctcaagaagtaatcacaatagagtctgttgttattagtgaatga

SEQ ID NO: 290198 - DNA, 229 bp, Unknown
  Bacterial polypeptide expressing nucleotide sequence isolated from the Sargasso Sea
catgacggtccgggagttttgtcaatggccaacgctggacccggtacaaatgggagccagttcttcattactcatgaggcccagcctcatcttgacggcaagcatactgttttcgggaaagtaatcagtggcatggatgtagtaaataatataaatcagggagatgtaatagaaaaaatgcttatactacagagacgtgatcatgaatataaagttgaaactctataat

SEQ ID NO: 290199 - DNA, 223 bp, Unknown
  Bacterial polypeptide expressing nucleotide sequence isolated from the Sargasso Sea
gatgttaacatccgtaggtgagctcgggtttggatacaaaggatcttcttttcatagaataatcccggggtttgtaatgcagggtggagacgttacctctaatgcacgaggcgatggtcagttgtctgtctatggtccaacatttgaggatgaaaactttttagtgaaacatgactcattaggtatcattcaacaacatagtcatattcctaatacacattag

SEQ ID NO: 290200 - DNA, 426 bp, Unknown
  Bacterial polypeptide expressing nucleotide sequence isolated from the Sargasso Sea
aaaattttaaaactattgcttcaagtggatattatgaaggaacaatatttcatagagttataaatgttttcatgattcaaggcggcggattaactgctgatatgagtaataagtctagtggaactggtcctatacaaaatgaagctagtaatggattgtcaaatgacagaggaactattgcaatggccagaactatggatccacactcagctacaagtcagttctttattaatcacaaggacaacgcatttctaaatcatactggtgaaacatctcaaggatggggatatgctgtatttggtatagttactgaaggtatggatgttgttgatcaaatagcagaagttgcgactggatcttctggagcctatcaagatgttcctgaagaagtgataactattgagtcagttactatctctgaatgac

SEQ ID NO: 290201 - DNA, 463 bp, Unknown
  Bacterial polypeptide expressing nucleotide sequence isolated from the Sargasso Sea
accaatcatggaaatatttcattcaacttgttaccagagttagcaccagaaactgtgagaagttttgtaaaattagcaagcgacggattttacgatggaacattatttcatagagtaattccaggattcatgattcaaggtggagacccaaatactaaagatccaaacatgaaaagccaatggggaatgggaggaccaggattcaatgttaaagcggaatttagtaccagatcacatttgcgaggaattgtttcgatggccagagcacaagacccagacagtgcaggttctcaattttttattgtgacaaaagacagtaccttcttagatagagaatacactgtatttggagaagtggttgaaggaatggatgttgcagataaaatagtaagtcttgatagggatggaaatgactgtcctctagaagatgcaaagatgctcaaagtttcaatctcagagtaaa

SEQ ID NO: 290202 - DNA, 307 bp, Unknown
  Bacterial polypeptide expressing nucleotide sequence isolated from the Sargasso Sea
atgcagacttcccagggagagattcacattgaattattcgaagacgaggcacccaacacggttgccaacatgattgaattaattcaacaggggttctatgatggactggtttttcatcgggttatcaacgatttcatgatccagggtggatgtcctcatggcaaaggaaccggaggccccggttatcgttttcgggatgagtgccatcccgatcgtcgtcatgatggacccggagtcctctcaatggccaatgccggcccaaacaccaatgggtcccagttcttcattacgcactctgcacagcccc

SEQ ID NO: 290203 - DNA, 505 bp, Unknown
  Bacterial polypeptide expressing nucleotide sequence isolated from the Sargasso Sea
atgacacaggtaaccattgaaacatctttaggagatataaagcttgaacttaatgatgaaaaagcaccaattacagttgaaaactttaaaacaattgcaaattctggatattatgaaggaacaatatttcatagagttataaatggtttcatgattcaaggtggtggattaacttctgatatgaataacaagtctagtggaactggtcctatacaaaacgaagccaataatggattgtcaaatgatagaggcaccattgcaatggccagaacgatggatccacactcagctacaagtcagttctttattaatcacaaagataatggatttctaaatcataccggtgaaacatcacagggatggggttatgcagtttttggtaaggttactgaaggtatggaagtagttgataaaattgctgacgtgccaactggttcatcaggggcatatcaagatgttcctgaagaagttataactattgagtctattactattagtgaatgaa

SEQ ID NO: 290204 - DNA, 490 bp, Unknown
  Bacterial polypeptide expressing nucleotide sequence isolated from the Sargasso Sea
tatcccaactcagaaggcgaaattaagcttgagcttaatgggtgagaaagcaccaataacagtagaaaattttaaaaacattgtaaaatctggctattatgaaggaactgtttttcatagagttattaacggttttatgattcaaggcggaggcttaacagctgacatgatcgagaaacctagtggcactgctccaatacaaaacgaagcaaataacggtctatctaatgaaagaggaactattgctatggctagaacttcggatccccactctgcaactagtcagttttttatcaatcataaagataatagtttcttaaatcatactggtgaaaattctcagggttggggttatgcagtatttggtgctgtaactgaaggtatggatattgttgatcaaattgcagatgttgcaacaatgtcttataagggttatgcagatgttcctatatacgacataacaatagagtctgttacaattattgaataa

SEQ ID NO: 290205 - DNA, 426 bp, Unknown
  Bacterial polypeptide expressing nucleotide sequence isolated from the Sargasso Sea
tatgtcagcactatcagcaataatacaaacaagtaaaggggatattcacctcaatctttttaatgaagaagcccctcaaacagtcgcaaacttcgttaacctatccgagcgaggatattacgacaatttaaactttcaccgtgtcattgaaaactttatgattcagggtggctgtcctgaaggatctggtatgggtggcccagggtatcagtttgatgatgaatgtactgaaactcgtcttcacaataaagcaggaatcttatcaatggcaaactctggacctgggacaaacggaagtcaattttttattacgcacgttgaaaccccttggcttgatcaaaaacataccgtctttggtgaagtaaaaagcgatgcagatcaagcggttgtcaatctaattgagcaaaatgatactatagtgacaat

SEQ ID NO: 290206 - DNA, 360 bp, Unknown
  Bacterial polypeptide expressing nucleotide sequence isolated from the Sargasso Sea
acaacaacataattttccatcgtgtaattaaagattttatgattcagggtggagatcctagtggtacaggtcatggtgagatgggtaaatatccaggatacgaatttggcgatgaattgaataatccgatgccttacgaaaaaggaatattagcaatggcaaataggggacctaatacgaatggaagtcaattttttataatgcacactgattacccactaccttaccaatacactattttcggtaaagttactgaaggtttggacgtaattgatcaaatagcaatgattgaaactgattcatccgataagcctttaaatgatgtgatcataaattcaataacaattaaaaataactaag

SEQ ID NO: 290207 - DNA, 425 bp, Unknown
  Bacterial polypeptide expressing nucleotide sequence isolated from the Sargasso Sea
caacttcgagcaatacgtgaaggaaggccattacgacggcaccattttccaccgcgtgatcggcaatttcatgatccagggcggcggtttcgaaccgggcatgaagcagaggccgacccgcgcaccgatcaagaacgaagccaacaacggcgtggccaacaaggtcggcaccatcgccatggcccgcaccatggagccgcattcggcaagcgcgcagttcttcatcaacgtcgccgacaacgccttcctcaaccacagcgcaccgaccgttcagggctggggctacgccgtattcggtgaagtggtcgaaggcatggacgtggtcgagaagatcaagggcgtcgccaccaccatgaaatccggccaccaggacgtaccggtggacgacgtgatcatcgagaaggccgaagtcgtagccgagtaaa

SEQ ID NO: 290208 - DNA, 608 bp, Unknown
  Bacterial polypeptide expressing nucleotide sequence isolated from the Sargasso Sea
acacataacaacattcatagctatatcaatatttatagtgggatgtggatcaaaagaaaaaggtaaggaatcaatcatggataaagataacgcagttatttcaacacaattcggagatattgttctagagttttttgatgacatagctccaaagcatgtcgagagctttaagctacatgctcaaaatggatattacaatggtacaaccttccacagggttatacctggatttatgattcagggaggtgaccctctaacaaaatctgatgacagaagtcggcatggaactggtggtaatgcagcgaagtactttggcataggaacagaatcagatgagtcaacatgggatcttcctgcggagtttaaccctactccacatacacgtggtatcctgtcaatggcaagatcacaaaatcctgatagcggaggaagtcaattctttatctgtgttgcagatgctagttttcttgataaccagtatacagttttcggtaaagtagtaagtggaatggatgtagtagatgctattgtaagtgctcctcgagatgcaagagataatcccaatgatagaatagaaatgaaagttcgtttagaagataaaaaataga

SEQ ID NO: 290209 - DNA, 328 bp, Unknown
  Bacterial polypeptide expressing nucleotide sequence isolated from the Sargasso Sea
gctgccgctcgtcttcttcgacatctcgatcggcggcaagtacgcggggcggatcaagatgcggctgcggtcggacgtggtgccgaagacggcggagaacttccgatgcctctgcactggcgagaagggcctcaccgccgccaacggccgccccctgcgctacaaggacgcgcccttccaccgcatcatccccaagtttatgtgccaggtgcgcaccgcgcgcgtcattcgaggtgtgaggtcctcacaccgtcatcctcccgtgaacctcacaccgctaccgcgcgtgccgtccactcgaatcgcgccgcgtgcgcgtgccgcctga

SEQ ID NO: 290210 - DNA, 301 bp, Unknown
  Bacterial polypeptide expressing nucleotide sequence isolated from the Sargasso Sea
cctgcatcctcccggcgagcctcctcccctcagccctcacgcctcacgcccgccgcctcgacggcacacccacgcgtgctttgctgcacagggcggcgacttcaccgcaggcaacgggacggggggcgagtcgatttacggcaagacgtttgaggatgagaactttaagctctatcacaatgcgccgggggtgttgtcgatggccaacagcggcaagaacaccaacggctcgcaggtgggggggcgtgcatgcatgcgagcgcgtgcatgcttgcatgcttgctgtctgtctcgctgctaa

SEQ ID NO: 290211 - DNA, 448 bp, Unknown
  Bacterial polypeptide expressing nucleotide sequence isolated from the Sargasso Sea
gatgcagacttcccagggagagattcaaattgaattatttgaagacgaggcacccaacacggttgccaacatgattgaattgagtgaaaagggcttctatgatggactggtttttcatcgggttatcaacgatttcatgatccagggggggtgtcctcatggtaaaggaaccggaggtcccggttatcgttttcgggatgagtgccatcccgatcgtcgacatgatagtccaggagtcctctcaatggccaatgcaggtccaaacactaacgggtcccagttcttcattacccactctgcacaacctcatctggacggaaaacataccgtctttggacgtgttttggaggggctggatgtggtcaaccgcatcagccagggagacgagattcaatcggttacggttttaaacaagcgtgaacatgagtacagtgtggtcaaattataa

SEQ ID NO: 290212 - DNA, 511 bp, Unknown
  Bacterial polypeptide expressing nucleotide sequence isolated from the Sargasso Sea
actggatgcctcggaaaactaccctcaaatagaaattgttacaacctctggaacgattgtggttgagcttgaccgaaatcgagccccaaaaactgtcgagaattttctaaactacgttcaatcggaagcctatgtcgggacaatctttcatcgagtcattcctggatttgtaatccaaacaggtggttacgatgtaaatctcaatgagattgatacgcttcctgaaatcatcaatgaatcaggaaatggattgaaaaatcaaagaatgtctttgggtatggcaagaaccaatgagccacattctggttcatctcagttttatatcaatctgaatgataatttttctcttgatccaatgccgacaagatggggttatgcagtatttggggatgtcatcgatggattctcagttgttgatgatattgcgagcaatgcaactcaaacaacaaaaggttttcaagacgtccctgtggcgccaatcattattcttgaagtcaaccgcatagactga

SEQ ID NO: 290213 - DNA, 379 bp, Unknown
  Bacterial polypeptide expressing nucleotide sequence isolated from the Sargasso Sea
tttcatagagtaattgatggttttatggtgcaaggaggcggcttaacagctgacatgagaactaagcattctggttctcaaccaatccaaaatgaagctaataatggcttaccgaatgacagaggaactattgctatggcaagaactggtgatcctcattcagctacaagtcagttttttattaaccataaagataatagtttcttaaatcactcatcagaaactatgcgtggctggggatatgcggtatttgggaaggtaaccgatgggatggatgttgttgatgctattgctgtagttgataccggcaactttcaacagtatgcagatgttccagttgagccaataatgattcaatcgatatctgttatggaatgaa

SEQ ID NO: 290214 - DNA, 563 bp, Unknown
  Bacterial polypeptide expressing nucleotide sequence isolated from the Sargasso Sea
cttgcttctagtacccacagcaattaggaaaatcatcttttttattactacttttgtatttttttcaacaacttcttctgcaggagctcttgttgagggtctatacgcaaagatgcaaacctcaaaaggtgagatagttttgcgacttttctacaaacgcgctccattgactgttgcaaatttcgtaggtcttgctgagggttcgaaagagtggaaagatccggttacaggtaagaccagaaaaacacgttattatgatggcttgagttttcacagggtaatcaatgacttcatgattcaaggaggagatcctctggggactggtactggtggtcctggctatactttccaagatgagtttcatcctgatctcaaacatagcaaggccggaattctttcaatggctaatgcaggaaaaaacacaaacggcagccaattttttataacacatgtttcaactccgcaccttgacaaaaagcattctgtttttggcgaagttgttgatgggatgaaggtcgttaactcaattgtgaaaggggacatcataaacactgtaactataa

SEQ ID NO: 290215 - DNA, 616 bp, Unknown
  Bacterial polypeptide expressing nucleotide sequence isolated from the Sargasso Sea
atgataaaacacataacaacattcctcgctatatcaatatttatagctgggtgtggatcaaaacaaaaaagtaaggaatcaatcatggataaagacaacgcagttatttcaacaaaattcggagatattgttctagagttttttgatgacatagctccaaagcatgtcgagagctttaagctacatgctcaaaatggatattacaacggtacaacttttcacagggttatacctggatttatgattcagggaggtgatcctctaacaaaatctgatgatagaagtcggcatggaactggcggtaatgcagcgaagtactttggcataggaacagaatcggatgagtcaacgtgggaccttcctgcggagtttagctccactacacatgaacgtggtatcctatcaatggcaagatcacaaaatcctgatagcggaggaagtcaattctttatctgtgttgcagatgctcgttttctggataaccagtatactgtattcgggaaagtagtaagtgggatggatgcagtagacgctattgtaagtgcccctagggatgcaagagataaccctaaagatagaatagaaatgaaagttcgcctagaagataaaaaataga

SEQ ID NO: 290216 - DNA, 574 bp, Unknown
  Bacterial polypeptide expressing nucleotide sequence isolated from the Sargasso Sea
cctggtcagtcagctggtggccccctccactgtcgacgcagcagccgttgacgcagcatcagccaccagcaccgccacaaccgccagcgttgtcgccaagaccgccagcgccgtagcagcgtggtcaagcttcgagctggacccagatgatcccaacccaaccttgtttgccatggctcccgacaccaaccaggccgatgcctccgccctcggcggcccccttgatgcccccgacacccagatcacagccagcggcctgaagatcaccgaactgcaggtcggcgaaggagcagaagcggcctccggccagaccgtttcagtgcactatcggggaacccttgagaacggcaagcagttcgacgccagctacgaccggggcaccccgttcaacttccccctcggagccggacgggtgatcaaaggttgggatgaaggggtggtcggcatgaaggtcggcggcaagcgcaaactggtgatcccgccggatctcgcctacggcagccgcggtgctggcggcgtcatcccccccaacgccaccctggtgttcgaggtcgagctgctcgacatgaagtga

SEQ ID NO: 290217 - DNA, 517 bp, Unknown
  Bacterial polypeptide expressing nucleotide sequence isolated from the Sargasso Sea
atgacaaaaacagttattgcagtggttatttcaacttctcttggtgatattagtctagagcttgataaagaaaaggctccggatacagttgaaaattttattaatcttgttgaatctggatactacgatgagactatctttcatagagtaattgatggttttatggtgcaaggaggaggcttaacagctgacatgagaactaagccttctggtactcaaccaatccaaaatgaagctaataatggcttaccaaatgacagaggaactattgctatggcaagaactggtgaccctcattcagctacaagtcaattttttatcaaccataaagataatagtttcttaaatcactcatcagaaactatgcgtggctggggatatgcggtatttgggaaggtaacagatggaatggatgttgtggatgcaattgctgtggttgataccggtaactttcaacagtatgcagatgttccagttgagccaattatgattcaatcgatatctgttatggaatgaa

SEQ ID NO: 290218 - DNA, 857 bp, Unknown
  Bacterial polypeptide expressing nucleotide sequence isolated from the Sargasso Sea
ggatgagattcacccggatctcaaacattccggcccgggaatcctctccatggcaaacgcgggtccgaacaccaatggaagccagttcttcatcacccacaaagcaactccgtggctggacgggaagcattcggtatttggaaaagtgatccggggtatggaaacggtcaacaagatccagaaaggagatttgatccaaaccgtgtccatcattcgacgcgggaaagaagccaaaggatttgatccctccaaaattgaagccgctcagaaagcaaaacagaagagcctggcgatcaaacaaaaaaaggatcttccacccattactggggagtcagatccgactaaggttccaggaaaaaatcagccccttgcagaagaagtttccctggaactgatggtcatcgcctatgaaggtgttcaaacttcgttgcctgcgttgtattacgacaagtccggggccaagaaggtggcggagcagctggcagaactggcccgccgaaagaattcgaatttcagccgattgaccgaccagttctcggatctcaaacaacagaaaaaaatccccatgctccaagcggataccccgaatttgatgccttttttgaaggccggtttgagcttgaaggaaggccagatcagtgatccggtggattcaccttttggattcatcattttccaccgtgttcccctagatgtgatcacggccagtcacattctgatttctttcaaaggcgcatcgcgttctgagcagaaccgtagcagggacgaagcgaaaaaactggccggcgaacttgcggaaaaagcacaaaagggagaagatttcgccaatctggcccgaatgaattccgatggcccct

SEQ ID NO: 290219 - DNA, 475 bp, Unknown
  Bacterial polypeptide expressing nucleotide sequence isolated from the Sargasso Sea
ctgcacacgacgcacggggacgtgacgctcgagttgtattacaagcacgcgcccaagacgtgtgaaaacttttttgagctcgcgaggcgagggtactacgacggcacggtgtttcaccgcgtcatcgcggattttatgattcagggaggcgatcccacggggacggggcgggggggggagagcgcgttcggggggaagttcgaggatgagatcagtaaaggattgcgacacgtcggggcggggatcttgtccatggcgaatagcgggccgaatacgaataagagtcagttttttatcacgctcgcggcgacgccgtggttggatggaaaacatgcgatttttggacgcgttgagaacggtatgcacgcggttcgggcgctgggggcggtcaaggttgataagaacgacaagccgctgaaggaggtgaaaattcttcgcgtgacgtgcgatgatagagggttctcttggtactaga

SEQ ID NO: 290220 - DNA, 550 bp, Unknown
  Bacterial polypeptide expressing nucleotide sequence isolated from the Sargasso Sea
gttggaaccgccgccgggaaacggtgaggtgacgacgaggtgtttcttcgacgtgggggtgaacggaaaggcgagggggcgaatcgtgttcgggttgtttgggaaacacgcgccgaggacggttgaaaattttagagcgctgtgcgagggggagacgggggagagtccgaggagtgggaagcggttgacgtacgagggatcgtgttttcatagaatcgtcaagggtttcgtgtgtcagggtggggatttcacgtcgcaaaacggtcgcggcggggagagcatttacggggaggaattcgaggacgaggcgttcgggatgtctcacgacgccgccggcgtgttgtccatggcgaatcacgggccgaacacgaatgggtcgcaattcttcatcaccacgggaccggcgccgagtctcgacgacgcgcacgtcgtgttcggtcgcgtgttggagggcatggacgtcgtcgaggcgattgacgcggttggttcggacacgggacaacctcgcgggcaggcgtgcatcacgaagtgcggagaactcaagtcgtag

SEQ ID NO: 290221 - DNA, 592 bp, Unknown
  Bacterial polypeptide expressing nucleotide sequence isolated from the Sargasso Sea
tatgacaattgaacaaaaaaatcaaaatatagatcaacctcaagcaaatgaaccagaaaatccaaagagagaggttggagtaatcataacagaatttggtgatttgatagtcgaattttttgaggattcagctcctaaacacgttgaaagctttaagctacatgcgaaaaatgggttctatgatggtaccatttttcatcgtgtcattccaggtttcatgatccaaggcggggatccaaataccaaaggagaaaataaagcgagctatggcaccggtggccatgctgcaaagtactatggtataggtaatgaggatcaaccacagacttggagcctacctgctgagtttaacgacattagtcacaaacgtggtattctttcgatggcacgatcttcagacccaaatagtggaggtagccaatttttcatttgtgctgcagatgctcctcacttaaacggtcaatatactgtttttggtcaggtcgttcagggtgaacaaatcattgaccaagttgtaaaccttccaagggatgcaagagataatccaaacagaagagttactatgaaagtgaaaattgaaaaaagagactag

SEQ ID NO: 290222 - DNA, 721 bp, Unknown
  Bacterial polypeptide expressing nucleotide sequence isolated from the Sargasso Sea
tttggttttaggaccattaccagctcttgcaaatgaggggcttattgttgagacgctgcaaaagggaaaaggcgatctcgcgaccgctaatcaacaaatctctgtccattatgagggcaaattgaccgacggcacagtttttgatgcctcgcgtccacgtgggcagccttttagcttcatccttggaaaaggccaggtaattaaaggctgggacttgggtattgagggtatggccattggtgaaattcgtcgtctgacaattcctcctgaaatgggatatggaaccacaggcgcgggaggggttataccgccaaacgccactctgatttttgaagtcgaactattagcagtcagcagtcctctgacgctgggacagttgaactcagatgaactattagatgctcaagcacaaggtgctgtgattattgacattcgaagagaggaagagtggcaaaaaacaggagttattgatggcgcaaaaacaattactgctttcacaaaaaatggccgcctacatcaagattttcaggagaaatttttatctgcagtcccatcgttgaaagccccaatagtgctctattgccgtactggtaataggacaaccaagttaggaaatgcccttgtcaatcagctcggctattcaaatctcagtcatctgcgcgacgggatcacagggtggtttaaagccggtctgaaaagcgtgccttacaatcggcagtga

SEQ ID NO: 290223 - DNA, 505 bp, Unknown
  Bacterial polypeptide expressing nucleotide sequence isolated from the Sargasso Sea
aatgcttcaagcaattattaaaacatcagaaggtgaaattaagcttgagcttaataatgagaaggcaccaataacagtagaaaactttaaaactatagctaactctggttattatgagggaactatttttcatagagtaattaatggttttatggttcaaggtggaggcttaacagctgacatgaataataaatcaagcggaactgctcccatacaaaacgaagcaaataatggcctatctaatgacagaggaactattgctatggctagaaccatggaccctcactctgctactagtcagttttttataaatcataaagacaatggtttcctaaatcatactggtgaaaattctcagggctggggctatgcagtatttggtgctgtaactgaaggtatggatattgttgatcaaattgcagatgttgcaactggatcttctggtggtcatcaagatgttccggtagatgtcataacaatagagtctgttactattagtgaatga

SEQ ID NO: 290224 - DNA, 484 bp, Unknown
  Bacterial polypeptide expressing nucleotide sequence isolated from the Sargasso Sea
ttgactagtgtaaatattgaaacaaaccatggaaatatttcatttgatttattaccagatttagcaccagagacagtaagaaattttgttaaacttgcaaaagagggattttatgatggaacattgtttcacagagtcattccgggattcatgattcaaggaggagacccaaataccaaagacccaaacatgaaaagtcaatggggaatgggtggaccagggtataatgtaaaagcagaatttagttcaagatcacacttacggggtattgtatcgatggcaagagcaatggatcctgacagtgctggttcacaatttttcattgtaacaaaagatagtactttccttgatagagaatataccgtatttggagttgtgacagaaggcatggatgttgctgataaaatagtaagtcttgatagagataacaacgactgtccattacaagatgcaaaaatggctaaaatttcaatttcagagtaaa

SEQ ID NO: 290225 - DNA, 401 bp, Unknown
  Bacterial polypeptide expressing nucleotide sequence isolated from the Sargasso Sea
attgactagtgtaaaaatagaaactaatcatggaaatatttcatttaacttgttaccagagttagcaccagaaactgtaagaagttttgttaaattagcaagtgatgggttttacgatggaacattatttcacagagtaattccaggattcatgattcaaggtggagacccaaataccaaagacccaaacatgaaaagtcaatggggaatgggcggacctggatttaatgtaaaagctgaatttagttcaagatcacatttacgaggaattgtttcaatggcaagagcaatggatcctgatagcgcaggttcacaatttttcatagtaacaaaagacagtactttcctagatagagaatatacagtattttggagaagttacagaaggaatggatgttgca

SEQ ID NO: 290226 - DNA, 337 bp, Unknown
  Bacterial polypeptide expressing nucleotide sequence isolated from the Sargasso Sea
ttgactagcgtaactatagaaacaaaccatggaaatatttcatttaacttgttgccagagttagcaccagaaactgtgagaagctttgtaaaattagcaagcgacggattttacgatggaacattatttcatagagtaattccaggattcatgattcaaggcggagacccaaatacaaaagacccaaacatgaaaagccaatggggaatgggtggaccaggattcaatgttaaagctgaatttagttcaagatcacatttgcgaggaattgtttcgatggccagagcacaagacccggacagtgcaggttctcagttttttattgtgacaaaagaca

SEQ ID NO: 290227 - DNA, 472 bp, Unknown
  Bacterial polypeptide expressing nucleotide sequence isolated from the Sargasso Sea
attgacaaaggtaacaattgaaacaaattttggtaatattgaatttaatttattgcctgagttggcacctgagacggtcagaaattttgtaaagttagcagagtcagaattttacaatggaagtctatttcacagagttattcctggatttatgattcagggtggcgatcccaatactaaaaatccagaattaagagcacagtggggcataggaggtcctggctatacagtaaatgcagaatttagttcaagatcacatttgagaggtattgtatctatggctagatccactgatcctaatagtgctggttcacaattcttcatagttacaacagatagtacattccttgacagagaatataccgtatttggagaagtaacacaaggcatggatgttgcagataaaattgttaacttacctagagatcagggtgactgtccacaagaagatgcaaaaatgctcaaagtcaca

SEQ ID NO: 290228 - DNA, 505 bp, Unknown
  Bacterial polypeptide expressing nucleotide sequence isolated from the Sargasso Sea
tatgacacaagtaactattaaaacatctgttggtgatatccaacttgagctaaataatgaaaaagcgcctattacagttgaaaacttcaaaaccattgctaattcaggctactacgaaggaactatattccatcgtgtaattaatggatttatggttcaaggtggtggtttgactgcagatatgaacaataaatcaagcggtactagtcctattcagaatgaagcaaataatggtctttcaaatgatagaggaactattgcaatggcaagaactatggatcctcattctgcaacaagtcagttttttattaatcataaagataatggattcttaaatcataccggagaaaactctcaaggatggggttatgcagtttttggagctgtgactgaaggtatggaaattgttgaccaaattgctgaagttgcaactggttcatcaggaggtcatcaagacgttcctgtcgaagttataacaatagaatctgttactatttctgaatga

SEQ ID NO: 290229 - DNA, 343 bp, Unknown
  Bacterial polypeptide expressing nucleotide sequence isolated from the Sargasso Sea
atgtcgactgtgactaccgaatccggcctgaaatacgaagacatcgttgaaggcaccggcgccgaagcggttgccggcaagaccgtcagcgtgcactacacgggctggctgaccgacggtcagaagttcgactcgagcaaggaccgcaacgacccgttcgcgttcgtgctgggcggcggcatggtcatcaagggctgggatgaaggcgtgcaaggcatgaaggtcggcggcacgcgcaagctgacgattccgccgcaactcggttacggcgtacgtggcgcgggcggcgtgattccgccgaatgccacgctcgtgttcgaagtcgaactgctcgacgtgtaag

SEQ ID NO: 290230 - DNA, 505 bp, Unknown
  Bacterial polypeptide expressing nucleotide sequence isolated from the Sargasso Sea
tatgacacttgtaactattcaaacctcacttggcgaaattaagcttgaacttaataatgagaaagcgcctttaacagttgaaaattttagaactattgccagttctggatattatgaagggactatattccatagagtgattaatggctttatggttcaaggcggtggactaactgctgatatgaataataaatcaagcggaacaagtccaatccaaaatgaggcaaataatggactttcaaacgatagaggaaccatagcaatggccagaactggtgatcctcattcagcaactagtcaattttttataaaccataaagataatgggtttttaaatcataccggagaaaatccacaaggctggggttatgcggtatttggtgctgtaactgaaggtatggatgttgtggaccaaatagctgatgtagcaactggaaatgttggcccatatcaagatgttcctctagaagtaataactatagagtctgttaccattagtgaatga

SEQ ID NO: 290231 - DNA, 383 bp, Unknown
  Bacterial polypeptide expressing nucleotide sequence isolated from the Sargasso Sea
caacatgattgaattgagtgaacagggcttctatgatggactggtttttcatcgggttatcaacgattttatgatccagggggggtgtcctaatggcaaaggaaccggaggccccggttatcgttttcgggatgagtgccattccgatcgacgtcatgatggtcccggagtcctctcaatggccaatgcaggaccaaacaccaatgggtctcagttcttcattacgcattctgcacaaccccatctggacggaaaacataccgtctttggacgtgttttggaggggctggatgtggtcaaccgcatcagccagggagacgagattcaatcggttacggttttaaacaagcgcgaccatgagtacagtgtggtcaaattataaa

SEQ ID NO: 290232 - DNA, 493 bp, Unknown
  Bacterial polypeptide expressing nucleotide sequence isolated from the Sargasso Sea
attgattaagctttcaacaaacatgggtgacataacccttgaactatacacagataaagccccagaaacagtggccaactttctcaaatatactaaagagggtaaactgaatggcacaatatttcatagggtgatccctaactttatgatacaaggtggaggtcatttaccagatatgtcgcagattgatacttttgatccaataatcaatgaatcaagcaataatattagcaataaaaaaggcactattgccatggctagaacaagtagccctaattcagcgacttcacaattttttattaatttaagagacaatgaatttcttgataaatcaaatgctgcagatggatatggatattgtgtttttggacaagtcactgaaggtattgaaatagtagaacagattggaggcgtggcaacaggtaataatgctgggcactcagatgttccaatagaaaatgtactcataaacagcgtggaagtcattgaataa

SEQ ID NO: 290233 - DNA, 529 bp, Unknown
  Bacterial polypeptide expressing nucleotide sequence isolated from the Sargasso Sea
catggcaaataagataaataaagaattcactcaagtaattatccaaacctcagaaggcgaaattaagcttgagcttaataacaaaaaagcaccaataacagtgggaaattttaaaaatattgcgaaatctggatattatgaaggaactgtttttcatagagttattaacggttttatgattcaaggtggaggcttaacggctgacatgaacgagaaacctagtggtactgcacccatacaaaatgaagcaaataatggcttgtctaatgacagaggtactattgctatggctagaacttctgctcctcattctgcgactagtcagttttttataaatcataaagataatggattcttaaatcataccgcagagaattctgatggttggggttatgcagtatttggggttgtaactgaaggtatggatattgttgatcaaattgcagatgctgaaacaatgtcctatatgggttatgcagatgttcctatatacgatattacaatagagtctgttacaatcattgaataa

SEQ ID NO: 290234 - DNA, 517 bp, Unknown
  Bacterial polypeptide expressing nucleotide sequence isolated from the Sargasso Sea
atggagaataaaatgacacaagtaacaataaaaacatctgttggagacattcaacttgaacttaatgacgagaaagcacctataacagttgaaaattttaaaactattgcctcaagtggatattatgaaggaacaatatttcatagagttataaatggtttcatgattcaaggtggcggattaactgctgacatgaacaataagtctagtggaactggtcctatacaaaatgaagctaataatggattgccaaatgacagaggtactattgcaatggctagaacgatggatccacactcagctacaagtcagttctttattaatcacaaggacaatgcatttctaaatcataccggggaaacatctcaaggatggggatatgctgtatttggtatggttactgaaggtatggatattgttgatcaaatagcagaagttgcaactggatcatctggagcctatcaagacgttcctgaagaagtgataactattgagtcagttactatctctgaatgac

SEQ ID NO: 290235 - DNA, 508 bp, Unknown
  Bacterial polypeptide expressing nucleotide sequence isolated from the Sargasso Sea
atgccaaaagttaaaataacgacatcgtatggagaaattgttatcgaattagataaagaaaatgctccaatcacaactgaaaactttttaagttatgttgaaagcggtttttataatgaaacaatctttcatcgtgtaatatccggattcatgattcagggtggaggccatcttacagatatgacacctaaagatgaaaagctagatcctatacaaaatgaagcaaataatggtttaaagaataataggggtacaatagcaatggctagaacagctaacccacattcagcttcatctcaattctttattaatcacgccgataatgcttttctgaactttagaaccaatcaggtagacgaaggttggggttatgcagtatttggtcaggtagtcgaaggtatggaagtagtcgataagattgctgctgtcgaaacaacttctatgggaccatatcaagatgtgccagtagaagtaataactgtactaaatactgaattggttgaataaa

SEQ ID NO: 290236 - DNA, 517 bp, Unknown
  Bacterial polypeptide expressing nucleotide sequence isolated from the Sargasso Sea
tatgacaaaaacagttattgcggtagttatttcaacttcccttggtgatattagtctagagcttgatagagaaaaggctccaggtacagttgaaaattttattaacctagttgaatctgggtactacgatgaaactatctttcatagagtaatcgatggttttatggttcaaggaggaggcttaactgctgatatgagaactaagccttctggtactcaaccaatccaaaatgaagctaataatggcttagcaaatgatagaggaactattgctatggcaagaactaatgatcctcattcagctacgagtcagttttttattaatcataaagataatagtttcttaaatcattcatcagaaactatgcgtggctggggatatgcggtatttgggaaagtaacagatggaatggatgttgttgatgcaattgctatggttgataccggtaactttcaacagtattcagatgtaccagttgagccaattatgattcaatcgatatctgttatggaatga

SEQ ID NO: 290237 - DNA, 547 bp, Unknown
  Bacterial polypeptide expressing nucleotide sequence isolated from the Sargasso Sea
tatgggactaatatcgttaacggggtgttctcaaaacaaggagataaaagtgataactttcgaaacaaccttaggccctatagtaatagaattatttgaagaagaagcaccaataacctcaaaaaactttctggaatacgctgaaagtggtttttttaatggaactttattccatagagttattcccggatttgtaatccaaggtggaggaatggaatcaggaatggttgataaaagaggtaaagatccaatccagaatgaagccaataatggtgtaaaaaacttaaaatggactttgtccatggcgagaactaatgaacctcattcagcgagttcccagttcttcattaatcttgtaaacaatagctctctggatcatacggaagaaacaattcaaggatggggctatgctgtatttggggaagttgttgatggttttgaaacagtagaagctatagctgcagttgcaactggaaattctggtttccatcaagatgtacctatagaagagatctcaatactagatacgaaagtaacaacggagtag

SEQ ID NO: 290238 - DNA, 448 bp, Unknown
  Bacterial polypeptide expressing nucleotide sequence isolated from the Sargasso Sea
tatggagaaaactatgacacaagtaattattaaaacatctgttggtgatatacaacttgagctaaatgatgaaaaagcaccaattacagttgaaaactttaaagctatcgctaagtctggttattacgaggggaccatatttcatcgtgtgattaatggatttatggtccaaggtggtggcttaaccgcagatatgaataataaatcaagtggcaccagccctattcaaaatgaagcaaataatggcctttcaaatgataggggaacaattgctatggcaagaactatggatcctcattctgcaacgagccagttttttattaatcataaagataacggattcttaaatcatactggagaaaattctcaaggttggggttatgcagtatttggatctgtaactgaaggtatggacattgtagatagtattgcagatgttccaacgggt

SEQ ID NO: 290239 - DNA, 484 bp, Unknown
  Bacterial polypeptide expressing nucleotide sequence isolated from the Sargasso Sea
attgactagtgtaaatattgagacaaatcatggaaatatttcatttgatttgttaccagagttagcaccagagaccgtaagaaattttgttaagcttgcaaaagagggattttacgatggaacattatttcatagagtcattcctggatttatgattcaaggtggagacccaaataccaaagacccaaacatgaaaagtcaatggggaatgggaggaccaggatataatgtgaaggcagaatttagttcaaggtcacacttgagaggtattgtatcaatggcaagagcaatggatcctgacagtgctggttcacagtttttcattgtaacaaaggatagtacttttcttgatagagaatatacggtattcggagaggtcactgaaggaatggatgtagcagataagatagtaagtcttgataaggatagtaatgattgtcctttgcaagatgcaaaaatggctaaagtttcaatttcagagtaa

SEQ ID NO: 290240 - DNA, 571 bp, Unknown
  Bacterial polypeptide expressing nucleotide sequence isolated from the Sargasso Sea
tatgaaagtaattacagaagagacaactacaactaaaggagaaactgtgagtgaaaagacatacaatcaacctcatgaaatgaatatcgatactagtaagtcatattcagcaacaataaaaacaaatttcggtgaaatgaaaatagaatttttcactgaagatgcacctgtaactgtaaacaattttgttactttagctagagatggttattacgacaatgtaatttttcacagagtgatttcaggttttatgattcaaggtggtgacccatctggcactggccatggtgactatggaaaatatcctggctatgaattcgaagatgaattaaataatcaaaagccatacgaaaaaggaattatggcaatggcgaatagaggtccaaatacaaacggtagtcagttttttataatgcatgttgattatccactaccttatagttatacaatttttggtcaagttactgaagggtttgaagtaattgacagtattgcagccgttcagaccgatgcagctgataagccactagaagatgtggttatagaatctgttgaaatttctgagaattaa

SEQ ID NO: 290241 - DNA, 523 bp, Unknown
  Bacterial polypeptide expressing nucleotide sequence isolated from the Sargasso Sea
gatgacaatcagaatagatgcctctgagaattatccacaaatcgagatcgtaacaacatccggcaccattgtggttgaacttgatcgcaatagagctccaaaaactgttgagaattttctaaattatgttgaatcaggagcttatattggaacaatttttcatcgagtcatacccggttttgtcattcaaacaggggggtatgatgtcaatcttgatgagattgaaacactacctgagatcatcaatgaatctggaaatggtttaaaaaaccaaaggatgtctttgggtatggcaagaaccaatgaaccacactctgcatcatctcaattctatatcaatctaaatgataacttttctcttgatccaatgccgacgagatggggatatgcagtattcggtgatgtcattgatggcttttctgttgttgacgatattgcgagtaatgcaacacaaagcacaaaggggtttcaagatgtgcctgttgcaccaatcattattcttgaagtcaaacgaatagactga

SEQ ID NO: 290242 - DNA, 493 bp, Unknown
  Bacterial polypeptide expressing nucleotide sequence isolated from the Sargasso Sea
tatgactatcaatgaacaggcaaaatatattgcaactatcgaaacatcactgggaacattagtgatcgatctgtatgctgacatagcacctaaaacggttaacaattttgtgaatttatctaatgacggatattacgacgatatcatttttcatcgtgtaattaaaggttttatgatacaaggtggagatccaagtggtactgggcatggtgaaatgggtaaatatcctggttatgaatttgaggatgagttagattatccaatgaattatgcaaaaggaatcgttgcgatggcaaatagagggccaaatactaatggaagccaattctttattatgcacgttgactatccattgccatatcaatacacaatatttggaaaagtctctgaaggccttgatattgttgattcaatagctaatgttcaaacaggcgacaatgataaacctgtagatgatgtagttataaaaagtgtaaaaattacagagaagtaa

SEQ ID NO: 290243 - DNA, 484 bp, Unknown
  Bacterial polypeptide expressing nucleotide sequence isolated from the Sargasso Sea
attgactagtgtaaatattgaaacaaatcatggaaatatttcatttgatttgttaccggatttagcaccagaaacagtaaggaattttgtcaaacttgcaaaagagggattttacgatggaactctgtttcacagagtaattccaggattcatgattcaaggtggggacccaaataccaaagatccaaatatgaaaagtcaatgggggatgggcggaccaggatataatgtgaaagcagaatttagttcaaggtcacatttgcgaggaattgtatcaatggcaagagcaatggatcctgacagtgcaggctcacaatttttcattgtaacaaaagatagtactttcttagatagagaatataccgtatttggagtagtaacagaaggaatggatgttgcagataaaatagtaagtcttgatagggataacaacgattgtccattagaagatgcaaagatggttaaagtttcaatctcagagtag

SEQ ID NO: 290244 - DNA, 511 bp, Unknown
  Bacterial polypeptide expressing nucleotide sequence isolated from the Sargasso Sea
actggatgcctcagaaaattaccctcaaatagaaattgttacaacctctggaacgattgtggttgagcttgaccgaaatcgagccccaaaaactgtcgagaattttctaaactacgttcaatcgggagcctatgtcgggacaatctttcatcgagtcattcctggatttgtaatccaaacaggtggttacgatgtaaatctcaatgagattgatacacttcctgaaatcatcaatgaatcaggaaatggattgaaaaatcaaagaatgtctttgggtatggcaagaaccaatgagccacactctggttcatctcagttttatatcaatctgaatgataatttttctcttgatccaatgccgacaagatggggttatgcagtatttggggatgtcatcgatggattctcagttgttgatgatattgcgagcaatgcaactcaaacaacaaaaggttttcaagacgtccctgtggcgccaatcattattcttgaagtcaaccgcatagactga

SEQ ID NO: 290245 - DNA, 439 bp, Unknown
  Bacterial polypeptide expressing nucleotide sequence isolated from the Sargasso Sea
cctgttacagttgaaaattttattaatcttgttgaatctggatactataatgagactatctttcatagggttatgaatggctttatggtccaaggtggaggcctaacagctgatatgagaacaaaaccttcaggtactcaaccaatacaaaacgaagcaaataatggcttatcaaatgatagaggaactattgctatggcaagaactaacgatcctcattcagctactagccagttttttattaaccataaagataatgatttcctaaatcattcatcagaaaccatgcgtggttggggatatgcagtatttggtaaagttacagatgggatggatgttgttgacgctattgctgatgttgccactggtaactttcaacagtatgcagatgtgccagtcgaaccaataatgattcaatctgtatctgttatggaatgaa

SEQ ID NO: 290246 - DNA, 505 bp, Unknown
  Bacterial polypeptide expressing nucleotide sequence isolated from the Sargasso Sea
atgcctatagcaacaatatctacatcacttggtgacatcgaacttgaattagatgtgcagagtgctccaattactactaaaaactttatcgatctagcaaatgcaggctactatgaaaatacgatctttcatcgtgtcatcgaaggatttatgatacagggcggtgggcttgatagggatatgaacaataaacctagtggtagctcctcaattactaatgaagcaaataatggtcttaagaatgatagaggcactgttgctatggctagaactaatgatccacattctgcaacaagccaattctttatcaatcataaagataatgaatttctcaattttacttctgaaactccacagggatggggatatgccgtctttgggaacgttataaaaggaatggatatagttgatctaatagcagaggttaatactactaccattaatcagtatcaagatgttccccttgatcctataaccatcaaatcagtttctattgatgaatgag

SEQ ID NO: 290247 - DNA, 433 bp, Unknown
  Bacterial polypeptide expressing nucleotide sequence isolated from the Sargasso Sea
atgggaaaagtaaagattgaattatatgctgacaaaactccaaaaactgttcaaaattttattgatcttagtaattctggattttatgacggaattatatttcacagggtaataccaggatttatggctcaaactggagatccagatggcacaggctctggagggcctggatatacgtttgaagatgaatttcacccatcactcagtcatgactctgccgggatactttctatggcaaatcgagggcctgataccaatggaagtcaattctttataacatatggaccacaacctcatttagataatatgcactcagtgtttggcaaggttgtggaaggccttgaattaattgaagcaattccacctagagacccgtcaatgataaatgacccatctgtaaaaatggttgggatagaaataacggaaaattagg

SEQ ID NO: 290248 - DNA, 424 bp, Unknown
  Bacterial polypeptide expressing nucleotide sequence isolated from the Sargasso Sea
tttttaagttatgttgaaagcggtttttataatgaaacagtctttcatcgcgtaatatccggattcatgattcagggtggaggccatcttgcagatatgacacctaaagatgagaagttagaccctatacagaatgaagcaaataatggcctaaagaataatagaggcacaatagcaatggctagaacagctaatccacattcagcttcatctcaattctttattaatcacgccgataatgcttttctaaactttagaaccaatcaggtagatgaaggttggggttatgcagtatttggtcaagtgattgaaggcatggaagtagttgacaagattgctgatgtagaaacaggttctgttggaccttatcaagatgtgccagttgaagcaataacggttttaaaaacggaagtaatagattaag

SEQ ID NO: 290249 - DNA, 348 bp, Unknown
  Bacterial polypeptide expressing nucleotide sequence isolated from the Sargasso Sea
gatgttaaatgcagagatagttacggaaaaaggaaccatttcggtagatctgttttctgagcagacgcctattacggttgccaattttgtgaatttagccagtagaggtttttacgacaatctgaattttcatcgagtgattcaagattttatgattcaaggtgggtgtccctcgggaaatggtatgggaggaccgggttaccgatttgctgacgagtttttgcccgagcttcggcacgactcccctgggaagttgtcgatggccaatgcgggtccaggcaccaacggttcccagttttttattactcatgtaccgactcctcatttggatgatgctcataccatatt

SEQ ID NO: 290250 - DNA, 529 bp, Unknown
  Bacterial polypeptide expressing nucleotide sequence isolated from the Sargasso Sea
ttgagtaataataaagtttacgaatctatgccagaaatgaatattgatattactaaaaattatacagctgtaataaaaacaagtatgggggatatgtcagttgagttctttactgaagatgcaccaatgacagttaataattttattaatttatcacgtgatggatattacgatgatgtaatttttcatagagtaatttctggttttatgatacaaggcggtgatccaagtggtactggacatggagaaatgggtaaataccctggttacaaatttgaagatgaattaaacaatcaaagagcatatgaaaaaggaattcttgcaatggcaaatgcaggtcctgatacaaatggaagtcaattttttataatgcatgtagattatccacttccataccaatatacaatatttggtattgttacagacggacaagatgtcatagataaaattgcttctgttcaaacaggtgatggtgacagacctgttactgatgttgttattaaaacggttgaagttaaagagaattaag

SEQ ID NO: 290251 - DNA, 505 bp, Unknown
  Bacterial polypeptide expressing nucleotide sequence isolated from the Sargasso Sea
tatgacacaagttactatcaagacatctgttggcgatatccaattagagttaaatgatgaaaaagcccctattacagttgaaaactttaaagcaatcgcgcagtctggttattatgaagggactatatttcatagagtcatcaatggttttatggttcaaggtggcggtttaacagcagatatgaataataaatcaagcggcactgctccgattcaaaatgaagcaaataatggactttcaaatgacagaggaactgttgcaatggcaagaaccatggaccctcattctgcaaccagtcaattttttataaatcataaagataatgggtttttaaatcatacaggtgaaaattctcaaggttggggttatgcagtctttggtgctgttactgaaggcatggatgtagtagatcaaatcgcagatgttgcaactggaacttcaggcggttatcaagatgttcctgaagatgttataaccattgagtctgttactattagtgaatga

SEQ ID NO: 290252 - DNA, 613 bp, Unknown
  Bacterial polypeptide expressing nucleotide sequence isolated from the Sargasso Sea
ttgatttcatgtacttctggtgaaaacactgaagcaaattcaaatgaagtaattacagaagaaacaactacaaccaaaggagaaactgtgagtgaaaagacatacaatcaacctcatgaaatgaatattgatactagtaagtcatattcagcaacaataaaaactaatttcggtgaaatgaaaatagaatttttcactgaagatgcacctgtaactgtaaacaattttgttaccttagctaaagatggttattacgacaatgtaatttttcacagagtgatttcaggttttatgattcaaggtggtgacccatctggtacgggccatggtgactatggaaaatatcctggctatgaatttgaagatgaattaaataatcaaaagccatacgaaaaaggaattatggcaatggcaaatagaggtccaaatacaaacggtagtcaattctttataatgcatgttgattatccactaccttatagttatacaatttttggtcaagttactgaagggcttgatgtcattgacagtattgcagccgttcagactgatgcagctgataagccactagaagatgtagttatagaatctgttgaaatttctgagagttaat

SEQ ID NO: 290253 - DNA, 444 bp, Unknown
  Bacterial polypeptide expressing nucleotide sequence isolated from the Sargasso Sea
tatgacagaagtcatcataaaaacatcacttggagatataaatcttgagctaaataatgagaaagctcctattacagttgaaaattttatatcaattgcagaatctggttactatgagggaactatttttcatagagttattaatggttttatgattcagggaggaggacttactgctgacatgagtaataaatcaagtgggacaagtcctatacaaaacgaagcaaataatggactatcaaatgatagaggcaccattgcaatggctagaactatggatcctcactctgcaacaagccagttttttatcaatcataaggataacggatttttaaatcatactggagaaacttctcaaggttggggttatgcagtttttggagtggtcacagatggtatggatgtagtcgatcaaattgcagaagttgcaacaggctcatctgg

SEQ ID NO: 290254 - DNA, 703 bp, Unknown
  Bacterial polypeptide expressing nucleotide sequence isolated from the Sargasso Sea
aatgaaatatgtaagtacaattattatttcagtatttataatagctatatcatgttctaatagtgaacaacaagctgaagatgtcaaattgaatgattatatggacacagttagttatagcgtgggtgtagatattggtaaatcttttcgttatcaagaaatggatattaatcctaaagtattagcgaaaggattagaagatgcatttagtgagaaagaaattgaattaactgaagaagaagtgcaattaacattgggaaagtttcgtcaggagttccaacaaaaacaacgtgaggttgctcagaggaaagcacaggaagcagcagcagcggaacaatcttatttagtcgcaagttcacaaaaagaaggtgtagtctcacttccaagtggtttacaatataaagttgtgcgacctggagatggtccgagtcctttaaaaactgataaagtaaaggtgcactatcgagggactctcacggatggtacagtatttgatagttcatatgatcgtggtcaacctatttcttttaacgtttctggagtcattaaaggttggacagaagcgctattgttaatgcaagttggagcaaaatgggaattaactattccttcaggcttaggttatggtgcaagaggcggtggtgcaaaaatcccacctaatagcacactgctatttgaagttgaattactagaaatcgaatag

SEQ ID NO: 290255 - DNA, 556 bp, Unknown
  Bacterial polypeptide expressing nucleotide sequence isolated from the Sargasso Sea
tatgataaaaaacataacaacattcttcgctatatcaatatttatagtaggatgtggatcaaaacaaaaaggtaaggaatcaatcatggataaagataatgcagttatttcaacacaattcggagatattgttctagagttttttgatgacatagctccaaagcatgtcgaaagctttaagctacatgctcaaaatggatattacaatggtacaacctttcacagggttatacctggatttatgattcaggggggcgatcctctaacaaaatctgatgatagaagtcggcatggaaccggcggtaatgcagcgaagtactttggcataggaacagagtcggatgagtcaacatgggaccttcctgcagagtttagcccgactccacatgaacgtggtattctctcaatggcaagatcacaaaatcctgatagcggaggaagtcaattctttatttgtgttgcagatgctcgttttctggataaccagtatacagtattcggggaaagtagtaagtggggatggatgcgggtagatgctattgtaagtgctcctagg

SEQ ID NO: 290256 - DNA, 529 bp, Unknown
  Bacterial polypeptide expressing nucleotide sequence isolated from the Sargasso Sea
atgacatcagctggtgtcaatggatctgttggagtagttatttcaacttctcttggcgatattaatttagaacttgataaggaaaaggctccgggtacagttgaaaattttatcactcttgttgaatctggatactatgatgagactatctttcatagagtaattaatggctttatggtccaaggtggaggcttaacagctgatatgagaaccaagccttctggtacttcaccaatacaaaatgaagctaataatggcttatcaaatgacagaggaactattgctatggcaagaactaatgatcctcattcagctacaagtcagttttttattaatcataaagacaataatttcttaaatcattcatcagaaactatgcgtggctggggatatgcagtatttggaaaagtaacagatggaatggatgttgttgatgctattgctgtggttgatactggtaactttcaacagtatgcagatgtgccagttgagtcaataattattcaatcgatatctattatggaatgaa

SEQ ID NO: 290257 - DNA, 505 bp, Unknown
  Bacterial polypeptide expressing nucleotide sequence isolated from the Sargasso Sea
aatgaatccaaaagttatcatagagacctcaaaaggaaatatcgagatagaattatatcaaactgaagcacctgaaactgtaaaaaactttataaattatgcgtcgtctggtttttataacgacaccatttttcatagagtaataaaaggctttatgattcaaggtgggggattaacagaagatatgcaaaataaagaaacagacaagccaataaaaaacgaagctactaatggtctcagtaataaaaggggaactatagcaatggctagaacatctgaacctcattctgcatcatcacagttttttatcaaccacaaggacaatgattttttagactttaaggatgagtccccaaatggatggggctattgtgtttttgggattgttgtgaatggtttagacatagttgacgaaatagcaaatgtggaaacaggaaactatggtccttactcagacgtccctaaagatgttatacaaattatatctgtaaaaatatctgaataa

SEQ ID NO: 290258 - DNA, 484 bp, Unknown
  Bacterial polypeptide expressing nucleotide sequence isolated from the Sargasso Sea
ttgactagcgtaactatagaaacaaaccatggaaatatttcatttaacttgttgccagagttagcaccagaaactgtgagaagctttgtaaaattagcaagtgacggattttacgatggaacattatttcacagagtaattccaggattcatgattcaaggcggagacccaaatacaaaaaatccaaacatgaaaagccaatggggaatgggcggaccaggattcaatgttaaaggggaatttagtaccaggtcacatttgcgaggaattgtttcgatggccagagcacaagacccagacagtgcaggttctcaatttttcattgtgacaaaagatagtaccttcttagatagggaatatacagtgtttggagaagtaactgaaggaatggatgttgcagataaaatagtaagtcttgatagggatggaaatgactgtccattagaagatgcaaagatgctcaaagtttcaatctcagagtaaa

SEQ ID NO: 290259 - DNA, 571 bp, Unknown
  Bacterial polypeptide expressing nucleotide sequence isolated from the Sargasso Sea
tttgcttttaagctcatgcggagataggactagtaataatgagattgaaaaaattatggagaaaactatgacacaagtaactattaaaacatctgttggtgatatccaacttgagctaaataatgaaaaagcgcctattacagttgaaaacttcaaaactattgctaattcaggctactacgaaggaactgtattccatcgtgtaattaatggatttatggttcaaggtggtggtttaactgcagatatgaacaataaatcaagcggtactagtcctattcagaatgaagcaaataatggcctttcaaatgatagaggaactattgcaatggcaagaactatggatcctcattctgcaacaagtcagttttttattaatcataaagataatggattcttaaatcataccggagaaaactctcaaggatggggttatgcagtttttggggctgtaactgaaggcatggaaattgttgaccaaattgctgaggttgcaactggttcatcaggaggccatcaagacgttccgatcgaagttataacaatagaatctgttactatttctgaatga

SEQ ID NO: 290260 - DNA, 529 bp, Unknown
  Bacterial polypeptide expressing nucleotide sequence isolated from the Sargasso Sea
atgataaaaagatatgacagcgctccagaaaaccacttagaagaagggaaaaaatattccgctattattaaaacctcaaaaggggacatgactttagaattatttaccgatgaagttcctgtcacaactaacaacttcatcttcctagctcgtgagggattttacgataatggttgtttccatagagtaatcaaagaattcatgattcaggggggatgcccacgaggcacaggttccggagggccagggtatcaatttaatgatgaacccgtttctaggccatacacacgaggaacattagctatggctaacgctggaccaaacactaatggatctcaattctttatcgtacacggtgctgatgtgcctttgcccccaaactatactatttttggtttcttaactgctggagatgaagtgctagaaactttggcaactattgcaattgactacaccaaacctagtggagaacaaagtaccccggcagaacgattaacaatcaacacagtagaaattatagaatcttaat

SEQ ID NO: 290261 - DNA, 583 bp, Unknown
  Bacterial polypeptide expressing nucleotide sequence isolated from the Sargasso Sea
catgaaatggttgatgttggcgctcggcagcgccgccctgatcgcaaatgcccccgcctttgcccagtccggttcgcaggccgcgcacccgtccgtcctcttcaagaccaccgaaggcgacatccgtgtcgagctgtatcctgagaaggcgccgaaaaccgtcgccaacttcctcgactacgtgaaatccggccagtacagcggcacgatcttccatcgcgtgattcccggcttcatgattcagggcggcggttatacgcagagcttcgctgaaaagcccacgcgcgcgccgattccgctcgaaagccgcaacggtctgaagaacaccgtcggcacgctcgcgatggcgcgcaccagcgacccgaattcggccaccgcgcagttcttcatcaacaccgtcgacaacgccggcctcgactatccgaatccggacggcaacggctacgcggtattcggcaaggtcacgagcggtatggacgtcgtgaagaagatcgaaggcacgccgaccaccacgcgcggcccgatgagcgatgtgccgcaaaagccgatcgtgatcgaatcggccacggttgtcagcaagtaa

SEQ ID NO: 290262 - DNA, 493 bp, Unknown
  Bacterial polypeptide expressing nucleotide sequence isolated from the Sargasso Sea
atgacgacatcgtatggagaaattgttatcgaattagataaagaaaatgctccaatcacaactgaaaactttttaagttatgttgaaagcggtttttataatgaaacagtctttcatcgcgtaatatccggattcatgattcagggtggaggccatcttgcagatatgacacctaaagatgagaagttagaccctatacagaatgaagcaaataatggcctaaagaataatagaggcacaatagcaatggctagaacagctaatccacattcagcttcatctcaattctttattaatcacgccgataatgcttttctaaactttagaaccaatcaggtagatgaaggttggggttatgcagtatttggtcaagtgattgaaggcatggaagtagttgacaagattgctgatgtagaaacaggttctgttggaccttatcaagatgtgccagttgaagcaataacggttttaaaaacggaagtaatagattaag

SEQ ID NO: 290263 - DNA, 529 bp, Unknown
  Bacterial polypeptide expressing nucleotide sequence isolated from the Sargasso Sea
tttgaataataataaagtttacgattcaatgcctgaaatgaatattgatatttctaaaaaatacactgctgtaattaaaacaagtatgggggatatgtcgattgagttctttactgaggacgcaccaatgacagtaaataactttataaatttatcacgagatggatattacgataatgtaatttttcatagagtaatttctggatttatgattcaaggaggagatccaagcggcactggacatggagaaatgggaaaatatccaggttataaatttgaagatgaattaaataatcaaagatcatatgataaaggaattcttgctatggcaaatgcaggaccagatacaaatggtagtcaattttttattatgcatgttaactatccacttccttatcaatatacaatatttggatttgttactgatggattagaagtcatagataaaattgcttctgtagagacaggtgacggcgacaaacctgtcaatgatgtggtaatagaaactgttgaagttaaagagaattaa

SEQ ID NO: 290264 - DNA, 523 bp, Unknown
  Bacterial polypeptide expressing nucleotide sequence isolated from the Sargasso Sea
atgacaatcagaatagatgcctctgagaattatccacaaatcgagatcgtaacaacatccggcaccattgtggttgagcttgatcgcaatagagctccaaaaactgttgagaattttctaaattatgttgaatcaggatcttatattggaacaatttttcatcgagtcatacccggttttgtcattcaaacaggggggtatgatgtcaatcttgatgagattgaaacactacctgagatcatcaatgaatctggaaatggtttaaaaaaccaaaggatgtctttgggtatggcaagaaccaatgaaccacactctgcatcatctcaattctatatcaatctagatgataacttttctcttgatccaatgcccacaagatggggatatgcagtattcggtgatgtcattgatggcttttctgttgttgacgatattgcgagtaatgcaacacaaagcacaaaggggtttcaagatgtgcctgttgcaccaatcattattcttgaagtcaaacgaatagactgaa

SEQ ID NO: 290265 - DNA, 616 bp, Unknown
  Bacterial polypeptide expressing nucleotide sequence isolated from the Sargasso Sea
atgataaaacacataacaacattcctcgctatatcaatatttatagcggggtgtggatcaaaagaaaaaggtaaggaatcaatcatggataaagaaaacgcagttatttcaacacaattcggagatattgtcgtagagttttttgatgacatagctccaaagcatgttgagagctttaagttacatgctcaaaatggatattacaatggtacaaccttccacagagttatacctggatttatgattcagggaggtgatcctctaacaaaatctgatgatagaagtcggcatggaaccggcggtaatgcagcgaagtactttggcataggaatagagtcggatgagtcaacatgggaccttcctgcagagtttagccctactccacatgaacgtggtatcctgtcaatggcaagatcacaaaatccagatagcggaggaagtcagttttttatctgtgttgcagatgctcgttttctggataaccagtatacagtatttgggaaagtagtaagtggaatggatgcggtagatgctattgtaagtgctcctagggatgcaagagataaccccaatgatagaatagaaatgaaagttcgactagaagataaaaagtaga

SEQ ID NO: 290266 - DNA, 484 bp, Unknown
  Bacterial polypeptide expressing nucleotide sequence isolated from the Sargasso Sea
ttgactagtgtaaacatagaaaccaatcatggaaatatttcattcaacttgttaccagagttagcaccagaaactgtgagaagttttgtaaaattagcaagcgacggattttacgatggaacattatttcacagagtaattccaggattcatgattcaaggtggagacccaaatacaaaagatccaaacatgaaaagccaatggggaatgggcggaccaggattcaatgttaaagcagaatttagtaccagatcacatttgcgaggaattgtttcgatggccagagcacaagacccggacagtgcaggttctcaatttttcattgtgacaaaagacagtaccttcttagatagagaatacactgtatttggagaggtaacagaaggaatggatgttgcagataaaatagtaagtcttgatagggatggaaatgactgtccattagaagatgcaaagatgctcaaagtttcaatctcagagtaaa

SEQ ID NO: 290267 - DNA, 517 bp, Unknown
  Bacterial polypeptide expressing nucleotide sequence isolated from the Sargasso Sea
tatgacaaaaacagttattgcagtggttatttcaacttcccttggtgacattactctagagcttgataaagaaaaggctccgggtacagttgaaaattttataaatcttgttgagtctggatactacgatgaaactatctttcatagagtaattgatggttttatggttcaaggaggaggcttaacagctgatatgagaactaaaccttctggcacccaaccaatccaaaatgaagctaataatggcttaccaaatgacagaggaactattgccatggcaagaactggtgatcctcattcagctacaagtcagttttttatcaaccataaagataatagtttcttaaatcattcatcagaaaccatgcgtggctggggatatgcagtatttgggaaggtaacagatgggatggatgttgttgatgctattgctgtagttgataccggcaactttcaacagtatgcagatgttccagttgagccaattatgattcaatcgatatctgttatggaatga

SEQ ID NO: 290268 - DNA, 517 bp, Unknown
  Bacterial polypeptide expressing nucleotide sequence isolated from the Sargasso Sea
tatggagaaaactatgacattagtaactattaaaacatcagttggtgaaattaagcttgagcttgacgatggaaaagcaccaataacagtagaaaattttaaaaatatcgctaactctggttattacgaaggaactatctttcacagagtcattaaagattttatggttcagggtggtggtctgactgctgatatgaataacaaatcaagtggaactgctccaatacaaaacgaagcaaataatggtctatcgaatgatagaggtacaattgcaatggcaagaaccatggatcctcattctgcaaccagtcagttttttatcaaccataaagataatggattcttaaaccataccggagaaaattctcaaggctggggttatgcggtttttggagctgtgaccgaaggcatggatgttgttgatcaaattgctgaggttgcaacaggatcttctggaggtcatcaagatgttccagtcgaggttataacaatagagtctgttactattagtgaatga

SEQ ID NO: 290269 - DNA, 505 bp, Unknown
  Bacterial polypeptide expressing nucleotide sequence isolated from the Sargasso Sea
atgacactagtaaccattcaaacttcacttggcgaaattaagcttgcacttaatgatgagaaagcgcctttaacagttgaaaattttaaaacaattgctagttctggatactacgaagggacgatattccatagcgtgattaatggttttatggttcaaggtggtgggctaactgatgatatgaataataaatcaagcggaacaagcccaattcaaaatgaagcaaataatggactttcaaatgacagaggaactatagcaatggcgagaactggtgatcctcattcagcaactagtcagttttttatcaatcataaagataatggatttttaaatcatactggagaaaatccacagggttggggttatgcagtgtttggtgctgtaactgagggtatggatgttgtagatcaaatagctgatgtagcaactgggaatgttggtccttatcaagatgttcccctagaagtaataactatagagtctgttactattagtgaatgaa

SEQ ID NO: 290270 - DNA, 412 bp, Unknown
  Bacterial polypeptide expressing nucleotide sequence isolated from the Sargasso Sea
attgactagcgtaactatagaaacaaaccatggaaatatttcatttaacttgttgccagagttagcaccagaaactgtgagaagctttgtaaaattagcaagcgacggattttacgatggaacattatttcacagagtaattccaggattcatgattcaaggcggagacccaaatactaaagacccaaacatgaaaagccaatggggaatgggcggaccaggattcaatgttaaagcggaatttagtaccagatcacatttgcgaggaattgtttcgatggccagagcacaagacccagacagtgcaggttctcaattttttattgtgacaaaagacagtaccttcttagatagagaatacactgtatttggagaagtggttgaaggaataggatgttgcaagataaaatag

SEQ ID NO: 290271 - DNA, 634 bp, Unknown
  Bacterial polypeptide expressing nucleotide sequence isolated from the Sargasso Sea
atgagaagtatcacagggcttatcttcgcaggcggtttgagcttggtcctcagcgcctgcggtggtggcgatgatgaattaacgccgagcataccgactcccgatccaaccccaccaagtctaagtgctgatgtctgctatttaatgagcacgactaagggggatttgaccttagccatcgacctcaccaatatgcccatcacgggcaagaactttaaacaatatgtcgataagtcattctataacggcactttattccacagaaccatcaataactttgtgatccaaggcggcggtttcactacgggattacaaagcaaaccaaccagcgcgccaattaaaaacgaggccgccgtcggcatcagcaacaaacgtggcactatcgcgatggcgcgtaccacagtgcctgactcagcgacatcacagttctttatcaatgtgttagataatccgcagctcgatgcttcggcgagcagctatggctatgccgtgtttggtaaagtcgtcgaagggatggatgtggtcgatcagataagcattgtgccaaccaaaaccagcaatggttttagcgacacgccagtgactgagattttgatcaatagcgtgacggaaacgagctgccccgccgcctagc

SEQ ID NO: 290272 - DNA, 523 bp, Unknown
  Bacterial polypeptide expressing nucleotide sequence isolated from the Sargasso Sea
gatgacaatcagcacagatgcctctgagaattatccacaaatcgagatcgtgacaacatccggcaccattgtggttgaacttgatcgcaacagagctccaaaaactgttgagaattttctaaattatgttcaatcaggagcttatattggaacaatttttcatcgagtcatacccggttttgtcattcaagcaggagggtatgatgtcaatcttaatcagattgaaacgctacctgagatcatcaatgaatctggaaatggattaaaaaaccaaagaatgtctttgggcatggcaagagacaatccgccacataccgcatcatctcaattctatatcaatctagatgataacttttctcttgatccaatgcccacaagatggggatatgcagtattcggtgatgtgatcgatggcttttctgttgttgacgagattgcgagtaatgcaacacaaagtataaagtggtttcaagatgtgcctgttgcaccaatcattattcttgaagtcaaacgaatagactga

SEQ ID NO: 290273 - DNA, 517 bp, Unknown; identical to SEQ ID NO: 290217
  Bacterial polypeptide expressing nucleotide sequence isolated from the Sargasso Sea

SEQ ID NO: 290274 - DNA, 298 bp, Unknown
  Bacterial polypeptide expressing nucleotide sequence isolated from the Sargasso Sea
atggacgacccgatcgtctttttagacatcgccgtcggcgcgcgtcccgtcggtcgaatcgaaatcgcgttgtcttcgaacgtggcgcccagaacgtgtgaaaactttcgagcgctctgcacgggcgagcgtgcgagcgcgcgcacgagagagccgctgcactttaaagaatcgtcgtttcatcgcgtcataccgggtttcatggcgcaaggcggggatttcacccgacacaacggcaccggcggcgaatccatctacggcgaaaagttcaaggatgaaaatttcgagctcaaacacg

SEQ ID NO: 290275 - DNA, 1018 bp, Unknown
  Bacterial polypeptide expressing nucleotide sequence isolated from the Sargasso Sea
atgaagaaactcaagtttttattgattagctctgtttttttaattaattcatgtaacaatatgaaagattactcaaacttaacagatggcatttatgctgatatacaaacaaacaaaggagatatgatccttaaacttacctatgaggagacgcctctaacggtatctaattttattgctcttgcagaaggaaatcacccattagcatctgaagagtttaaaaacaaaccttattataacggaataaagtttcatagggtaattgataattttatgatacaaggtggagatccaacaggaacaggttcaggtggaccaggatatagttttgaagatgaatttgttgatagccttaaacatgatggggctggtattttgtccatggctaattcaggaccaaatactaatggtagtcagttttttatcactcatctagaaaccccatggcttgatggaaaacatagcgtatttgggaaagtaacaataggtcaagatattgttgataaaatagaacaaaacgatttaatcaataaacttgagataattagaataggtgaaactgccaaagattttgatgctccaactgtatttaatgattatctagaattaaagaaaaaagctaacgaagagaaattagaagcacaaaaagaagagttaaaaaaccttacaaaaggaatgaaatcaactgatagcggtatatcatataagattaccaaaaaaggaaccggaggaaatgcaaaagacaatgacaatgttaaagttcattatactttaaaactaattgatggctcagaagttgattcatcattaagtagaggtgagccaatagaatttacccttggtgttggacaggttatacctggatgggatgaaggaataaaattacttaacaaaggtgcctcatgtacattagttattcctcctaatcttgcatatggtgaagctggagctggtaatggtgttataccttcaaatgcaacattaatatttgatgtaacgctagtagatataaattaga

SEQ ID NO: 290276 - DNA, 455 bp, Unknown
  Bacterial polypeptide expressing nucleotide sequence isolated from the Sargasso Sea
aaataatgagaaagctcctattacagttgaaaattttatatcaattgcagaatctggttactatgagggaactatttttcatagagttattaatggttttatgattcagggaggaggacttacttctgacatgagtaataaatcaagcgggacaagtcctatacaaaacgaagcaaataatggactatcaaatgatagaggcaccattgcaatggctagaactatggatcctcactctgcaacaagccagttttttatcaatcataaggataacggatttttaaatcatactggagaaacttctcaaggttggggttatgcagtttttggagtggtcacagatggtatggatgtagtcgatcaaattgcagaagttgcaacaggctcatctggagcttatcaagatgttcctcaagaagtaatcacaatagagtctgttgttattagtgaatgaa

SEQ ID NO: 290277 - DNA, 634 bp, Unknown
  Bacterial polypeptide expressing nucleotide sequence isolated from the Sargasso Sea
atgagttgtggaaaaccaaaaaaggaagcgcaagtgaatgcaacaacagagcaatcagctcaagaaacaaaacaaccggaacaagtagaccaagataagcaacaaaaggatgttgcgattatcaccaccgattttggtgatatggtcgtcgagttctttgaaggtgtcgcgccaaagcacgttgagagttttaagctccatgcgcaaaatggatactataacggaacactatttcatcgtgtgatccctgggtttatgatccaaggtggtgacccaaatacaaagaccgataataaagcgagctatggcacaggtggtcatgctgcaaaatattttggagtgggtaatgagagtgagcccactacctggaacgtacccgcagagttcaatgatataaaccattcacgcgggatcctatccatggcacgcgcaaatgatccaaatagtggaggaagtcagtttttcatttgtgccgctgatgcaccacacctgaatggaaagtatacggtatttggtcaattgataaagggagaccaggtcttggagcagatcgtaaaccttccccgtgatgcaagggataaccctacacgtagagttgaaatgagcgtacgattagataaaatagataactaaa

SEQ ID NO: 290278 - DNA, 517 bp, Unknown
  Bacterial polypeptide expressing nucleotide sequence isolated from the Sargasso Sea
tatgacaaaaacagttattgcagtggttatttcaacttcccttggtgacattactctagagcttgataaagaaaaggctccaggtacagttgaaaattttattaatcttgttgaatctggatactacgatgagactatctttcatagagtaattgatggttttatggttcaaggaggaggcttaacagctgatatgagaactaaaccctctggcactcaacccattcaaaatgaagctaataatggcttaccaaatgatagaggaactattgctatggcaagaactaatgatcctcattcagctacaagtcagttttttattaaccataaagataatagtttcttaaatcattcatcagaaactatgcgtggctggggatatgcggtatttgggaaggtaacagatggaatggatgttgttgatgcaattgctgtggttgataccggcaactttcaacagtatgcagatgttccagctgagccaattatgattcaatcgatatctgttatggaatga

SEQ ID NO: 290279 - DNA, 467 bp, Unknown
  Bacterial polypeptide expressing nucleotide sequence isolated from the Sargasso Sea
aatgaatattgatactaataagtcatattcagcaacaatcaaaacaaattttggtgaaatgaaaatacaattttttactgaagatgcaccagttactgtaaacaattttgttactttagctagagatgggtattacgacaatgtaattttccatagagtgatttcaggtttcatgattcaaggtggtgacccatcaggtacgggccatggtgactatggcaaatatcctggctatgaattcgaagatgaattgaataatcaaaagccatacgaaaaaggaattatggcaatggcaaacagaggtcctaatacaaacggtagtcaatttttcataatgcatgttgattatccactaccttatagttatacaatttttgggcaagttacggaaggtcttgatgtaattgacagtattgccgcagtgcagactgattcagctgataagccacttgaagatgtagttatag

SEQ ID NO: 290280 - DNA, 634 bp, Unknown
  Bacterial polypeptide expressing nucleotide sequence isolated from the Sargasso Sea
catgagaagtatcacagggtttatcttcgcaggcggtttgagcttggccctcagcgcctgcggcggtggcgatgatgagttaacgccgagcataccgactcccgatccaaccccaccgagtctaagtgccgatgtctgctatttaatgagcacgactaagggagacataaccttagccatcgacctcaccaatatgcccatcacgggtaagaactttaaacaatatgtcgataagtcattctataacggcactttattccacagaaccatcaataactttgtgatccaaggcggcggtttcactacggggttacaaagcaaaccaaccagcgcgccaattaaaaacgaggccgccgtcggcatcagcaacaagcgtggcactatcgcgatggcgcgtaccacagtgccagactcagcgacatcacagttctttatcaatgtgttagataatccgcagctcgatgcttcggcgagcagctatggctataccgtgtttggtaaagtcgtcgaagggatggatgtggtcgatcagataagcattgtgccgaccaaaaccagcaacggttttagcgacacgccagtgaatgagattttgattaatagtgtgacggaaactaactgccccgccgcctag

SEQ ID NO: 290281 - DNA, 343 bp, Unknown
  Bacterial polypeptide expressing nucleotide sequence isolated from the Sargasso Sea
catgtctgtcatcacgaccgaatcgggcctcaaatacgaagacctgaccgaaggcaccggcgacgtagcgcaagccggccagaccgtcagcgtccactacacgggctggctgaccgacggtcagaaattcgactcgagcaaggatcgcaacgacccgttcgcgttcgtgctcggtggcggcatggtcatcaagggttgggacgaaggcgtgcagggcatgaaagtcggcggcgtgcgtcgcctgacgatcccgccgcaactcggctacggcccgcgcggcgcaggcggcgtgattccgccgaatgccacgctcgtgttcgaagtcgaactgctcgacatctga

SEQ ID NO: 290282 - DNA, 493 bp, Unknown
  Bacterial polypeptide expressing nucleotide sequence isolated from the Sargasso Sea
atggttgaactgcatacgaaccacggcgtgatcaagctcgagctcgacgccgcgaaggcaccgaagacggtcgagaacttcctgaactacgtgaagaagggccactacgacggcaccgtgttccatcgcgtgatcaacggcttcatgatccagggcggcggcttcgagccgggcctgaagcagaagccgaccgatgcgccgatcgacaacgaggcgaacaacggcctgaagaacgacaactacacggtcgcgatggcgcgcacgaacgatccgcactcggcgaccgcccagttcttcatcaacgtgaacgacaacgacttcctgaaccattcgtcgccgacgccgcagggctggggctacgccgtgttcggcaaggtcgtcgaaggccaggacgtggtcgacaagatcaagggcgtcaagacgggcaacgccggtttccaccaggacgtgccgactgacgacgtcgtgatcgagaaggccgtcgtggtctgac

SEQ ID NO: 290283 - DNA, 625 bp, Unknown
  Bacterial polypeptide expressing nucleotide sequence isolated from the Sargasso Sea
atgaaaaaatacttaattttatttgtgttactattaactttttgcggtgaagacactgtagaagaaccaattatcgacacaacggaggttacaaaaatggcatacgacaagacctatacatcaccgcctgaaatgactatcaatgaacaggctaaatatattgcaacaattgaaacatcactaggaaccttagtgatagatttgtatgctgacatagcacctaatacagttaacaattttgttaatttatcaaatgatggatattacgatgacgtaatttttcatcgtgtaattaaaggtttcatgatacaaggtggagatccgagtggaaccggtcatggtgaaatgggtaaataccctggttatgaatttgaggatgaattagattatccaatgaattatgcaaaaggaatcgttgctatggctaatagaggaccaaatactaatggaagtcaattctttattatgcacgttgactatccattgccatatcaatacacaatatttggtaaagtttctgaaggccttgacacagtggactcaatagccaatgttcaaacaggcgacaatgataaacctgtagatgatgtagttataaaaagtgtaaaaattacagagaagtaag

SEQ ID NO: 290284 - DNA, 571 bp, Unknown
  Bacterial polypeptide expressing nucleotide sequence isolated from the Sargasso Sea
tttgcttttaagctcatgcggagatagaactagtaataacgagattgaaaaaattatggagaaaactatgacacaagtaactattaaaacatctgttggtgatatccaacttgagctaaataatgaaaaagcgcctattacagttgaaaacttcaaaaccattgctaattcaggctactacgaaggaactatattccatcgtgtaattaatggatttatggttcaaggtggaggtttaactgcagatatgaataataaatcaagtggtactagtcctattcagaatgaagcaaataatggtctttcaaatgatagaggaactattgcaatggcaagaactatggatcctcattcagcaacaagtcagttttttattaatcataaagacaatggattcttaaaccataccggagaaaactctcaaggatggggttatgcagtttttggagctgtgactgaaggcatggaaattgttgaccaaattgctgaggttgcaactggttcatcaggaggtcatcaagacgttcctgtcgaagttataacaatagaatctgttactatttctgaatga

SEQ ID NO: 290285 - DNA, 394 bp, Unknown
  Bacterial polypeptide expressing nucleotide sequence isolated from the Sargasso Sea
tatgaatttagaacccccaaaaggaaatttagacacatcaaaaacttataaagctaaaatcgatactgaaaaaggtgaaattgtcattcatttatattcagatcaaactccacttacctgtgaaaactttataaatctttctaaggctggttattatgatggaactacttttcatagagttataccaggttttatgattcaaggtggtgaccctacagggactggagcaggtgggccgggatatcaatttgaagatgaatttgtttcctcattaaaacatgattctgaaggaattttatctatggcaaatgcaggtcctggaacaaatggttctcaattttttataactcatggtccaacacctcatttagatggagctcatacagtttttggt

SEQ ID NO: 290286 - DNA, 631 bp, Unknown
  Bacterial polypeptide expressing nucleotide sequence isolated from the Sargasso Sea
gcaaatgcagggccatcaacaaatggaagtcagtttttcataactcatttagaaaccccatggttagataataaacatactgtatttggtaatgttgtcgatggaatggatgtagttaattctatatcgcaaaatgatgaaatcatttctatcaaaattaatgctgttggtgataaggctaaagcttttgatgccgcaaaagcttttgaagactttaataaatcaaaagctgatagaattaaaaaggaaaaggaaaatgaacttaaaatgctgaaagatctttcaaaaggtttttcaaaaacttcttctggattgctatataagtttgaaaaagaaaataattcccataaaccttcaaatggaaataaggttaaggttcactataaaggaatgttgttggatggaactgtattcgattcctcttttaaaagaaatcagcctattgaatttactttaggagttggtcaggtaataaagggttgggatgaaggtatttcattgcttggtattggagataaggcaagttttataataccaagtgatttagcttatggtgcatctggtgcaggtggagttattcctcctaatgctaccttaatttttgaggttgagctcatatcagctgaataat

SEQ ID NO: 290287 - DNA, 502 bp, Unknown
  Bacterial polypeptide expressing nucleotide sequence isolated from the Sargasso Sea
tatgaacttagagccaccaaaaggtaacttagatacaaaaaaaacttataaggccaaaattgatacagaaaaaggcgaaatagtaatacatttatattctgatcaaactccaattacttgtgaaaactttataaatctttcaaaagctggatattataatggaactacgtttcacagggtaattcctgggtttatgattcaaggtggagatcctactggaacaggagcaggagggcctggttatcagttcaatgatgaatttgtatcttctctaaaacatgattctgaaggtattctttctatggctaatgcaggtccgggaacaaatgggtctcagttttttataacacacggaccaactcctcatttagatggtgctcatacagttttcggtaaggttataagtggaatggatgtagtgctaaaaattcgtgaaagggatccaatgagtgaccctaatcctggagatatgattaattctatcgaaatagaggaaaaataa

SEQ ID NO: 290288 - DNA, 526 bp, Unknown
  Bacterial polypeptide expressing nucleotide sequence isolated from the Sargasso Sea
catgtccctcgatcgtctcgaggtgaagcaccgtgaaccgttcaagtgcttcttcgacatcaccatcggcggcgaggcggcgggacgcgtggtgatggaaatccgaggcgacgtcacgcccaagtgcggtgaaaacttccgtcagttgtgcacgggcgaaccgggcttcggttacaagggatctccgttccaccgcgtcattccgggcttcatgtgccaaggtggtgacttcaccaaccgcaacggcacggggggcaaatccatctttggcaacaagtttgaagacgaaaacttcatcctcaagcacaccggtccgggcatcttgtccatggcgaacgccggtccgaacacgaacggctcccaattcttcttgtgcaccgccgaaaccgcgtggttggacggtaagcacaccgtgttcggctccgtcgtcgaaggtatggacgtcgtccaaaaggttgaagccgtcggctctcaatccggcgcgacgtctcaagaggttctcatcgccgactgtggtgaactttaa

SEQ ID NO: 290289 - DNA, 754 bp, Unknown
  Bacterial polypeptide expressing nucleotide sequence isolated from the Sargasso Sea
cacgtgcgccccggcggacgcgtacggtgaggttcgtccggaaaatatcctccgcgtgccgaagaaggacgtcgtggacgcggtcggtgaggatttcgtcaaggttggggaaaagttgatggtcgggcagggcatgccggcggagatcatcgaggtgacggattccgaggttgcgctcgacgccaatcacccgttggcgggtaagacgctcaattttgatatcgaggtcatgtccctcgatcgtctcgaggtgaagcaccgtgaaccgttcaagtgcttcttcgacatcaccatcggcggcgaggcggcgggacgcgtggtgatggaaatccgaggcgacgtcacgcccaagtgcggtgaaaacttccgtcagttgtgcacgggcgaaccgggcttcggttacaagggatctccgttccaccgcgtcattccgggcttcatgtgccaaggtggtgacttcaccaaccgcaacggcacggggggcaaatccatctttggcaacaagtttgaagacgaaaacttcatcctcaagcacaccggtccgggcatcttgtccatggcgaacgccggtccgaacacgaacggctcccaattcttcttgtgcaccgccgaaaccgcgtggttggacggtaagcacaccgtgttcggctccgtcgtcgaaggtatggacgtcgtccaaaaggttgaagccgtcggctctcaatccggcgcgacgtctcaagaggttctcatcgccgactgtggtgaactttaa

SEQ ID NO: 290290 - DNA, 695 bp, Unknown
  Bacterial polypeptide expressing nucleotide sequence isolated from the Sargasso Sea
aatgaacaagatatatatcattatgtcggcactaattgctatagcaatgtcaacaagttgcaaatctccacaaaaaccaattgataattcgaaacaattaccagaaggtatttatgctcaatttgaaactactaaaggagaaatcatttgtaaacttgagcatgaaaaaacaccaatgaccgttgcaaactttgttgctcttgcagaaggaaccatgaaaaacaataaaaaagaaattggacaagcattttttgatggattaaagtttcatcgtgttattcccaactttatgattcaaggaggatgccctgatggaaatggaatgggtgatccgggttacaaattccctgatgaaatccattcggatttaaaacactctaaagcaggaatattatcaatggctaattcaggaccggcaacaaatggaagtcaattttttataactcataaagaaacaccatggcttgatggtaaacacactgtatttggtcatgtaatcggaggtggacaaaaagttgttgattctattaaaaaagatgatgttatgaagcgtgttaagattcttagaattggagaaaaagcgaagaaatttgatgctaataaaatttttaatactcaaatggctattattgagaaagaagctgaagaaaaaagaaaagctgctgctgaaaaaataaaaaaattaacagaaggag

SEQ ID NO: 290291 - DNA, 826 bp, Unknown
  Bacterial polypeptide expressing nucleotide sequence isolated from the Sargasso Sea
ctgtgcacgggcgaacgcggacgaagcgcgcgcacggggacgccgttgacgtataaaggatcgacgtttcatcgcgtcattccgaatttcatgtgtcagggcggagatttcaccaaaggggatggcacgggcggggaatccatctacggcgagacgtttcgggatgaaaactttacgctgagacatcaaggcgcgggtacgttgtccatggcgaacgcgggaccgaacacgaatgggagtcagtttttcgtgtgcacgggggacacgtcgtggttggatgggaaacacgtcgtgttcgggagcgtggtgggtggaatggacgtcatcagacgcgtcgaggcgtgcgggacaaagtcgggcaagacgagggagactattaaaatcgttgattgcggggagattcctcgagaattgatcggtgaagacgaactcactgaagctgggaaggagattctcgccagacagcacgcggagcgacgattggcggagaaggaggcgagacaggtggatggcgaaaacgcggacgcggcgtcggcgaggcgactgcgagagacggccgaggcggccgaggccaaggcggtggaagtcgtcgcggacgaacccgagcccgcgcacgatgtctcggcggccgatccaacggcggtaatgtcggcgaagaagcgtaaattgtttgaattgcgtctgaaactgaacgagggacggaaaaagaatcaagcggcggtggtggatgaaaagaagcgaaccgacgcgccggaggattacgccaacgcgcaaaagcgcaaggcgagggaggcatcggcgaaatcgcgcgcggataacatggtga

SEQ ID NO: 290292 - DNA, 884 bp, Unknown
  Bacterial polypeptide expressing nucleotide sequence isolated from the Sargasso Sea
taaattagaatatgaaaaaactcctataactgttgctaattttgtctctttagcagaaggtaataatgactatgtttctgaagaatataaaaataaaaaatactatgacggaatatattttcatagagtaatatctgattttatgatacaaactggggatcctaccaaaacaggatcaggtggccctggatataaatttgaagatgaaattacagatttaacacactataaacctggaattctatctatggcaaatgcaggtataaatactaatggaagtcaattttttataactcataaagcaactccttggttagatggtaaacatactgtttttggagaagtaattaaaggccaaaatgttgttgatagcattgaacagaatgacattatagaaaaattaagtattataaaaaaaggaaaagaagctaaaatgttcaatgctcctaaagttatttctaactacttcgaagaaaaagaaaaaattttagaaaaaagaaggtatgaggaagaggaactaattaaaaatatagttgaagaaatgactaaaacatcaagtggtctatggtataaaataattaaaaactctattaagcctaaacctaaaaatggagaaatggttaaagttcattatacaggaatgcttttaaatggagaagtttttgattcttcatactcaagaaatatgccaattgagtttgttcttggatctggaagagttattaaaggatgggatgaaggtatatctttaatcccaataggtgcttctgctaaacttgtaattcctagtgatttagcatatggagaaagaggtgctggaggtgtaattcctcctaattcaactctaatttttgaaattgaggttatcgattctaaaaaataat

SEQ ID NO: 290293 - DNA, 819 bp, Unknown
  Bacterial polypeptide expressing nucleotide sequence isolated from the Sargasso Sea
atggattaaaatttcacagagtaatccctgaatttatgatacaaggaggatgcccagatggaaatggaacaggagatccaggctataaattccctgatgagattgacgcctcacttaagcattctggtcctggaatattatccatggctaactctggtccagctaccaatggatctcaattttttattactcacaaagaaactccatggctagatggaaaacatacgatttttggacatgttgtggagggacaagaaattgttaataaaattgaacaaaatgatatcatgaaaaaagtggtaatcattagaatcggaaaagaggcaaagaggtttgatgcaaacaaagcctttgaaaatggaattaaaaaagctaaaatagaagaagaaaaaataaaagcaaaagctgctgaaaatttaaaaaaaataaaagaaggagctaccgttactcctagtggacttgcctataaagttttgaaaaaaggttctggaaaagtccacccaaaagcaactcaaacagttaccgtgcattacacgggaaaactattagacggaaaagtttttgacagctctgttaaaagaggacaaccagcatcattcccattaaacagagtaatccctggatggacagagggagttcaattaatggttgtaggagataaattcacttttattatcccttcaaatttagcttatggcgaaagaggtgctggtggggttattccaccaaatgccgatttaatatttgaagtggaacttttagaaattaaagcagaagaatctcatgatggtcataatcatgatggccacaatcactaaa

SEQ ID NO: 290294 - DNA, 613 bp, Unknown
  Bacterial polypeptide expressing nucleotide sequence isolated from the Sargasso Sea
actgaagaatggactttacgccaaattggaaacttccagaggtgaaattctgcttcaactttatcaccagcgtgttccccagacggtggcgaattttgtaggattggccgaagcaaccaaagcctggaaggatccaatttccgggaaatccaagaaaacacgcttttatgacggtcttagctttcaccgtgtgattgccgatttcatgatccaggggggggaccctctgggaaccggaagtggaggtccggggtaccgttttcaggatgagattcacccggatctcaaacattccggaccgggaatcctctccatggcaaacgcgggtccgaacaccaatggaagccagttcttcatcacccacaaagcaactccttggctggacgggaagcattcggtatttggaaaagtgatccagggtatggaaacggtcaacaagatccagaaaggggacttgatccaaaccgtgtccatcattcgacgcgggaaagacgccaaaggatttgatccctcgaaaattgaagccgctcagaaagcaaaacagaagagcctggcgatcaaacaaaaaaaagatcttccaccccttactggggagtcagatccgtccaaggtc

SEQ ID NO: 290295 - DNA, 634 bp, Unknown
  Bacterial polypeptide expressing nucleotide sequence isolated from the Sargasso Sea
atgaaaagaatcacgggacttttactcgccagcagtttgagcatggtcctcagtgcctgcggcggtggcgaagatgatctcactcccaatatccccaaacccgacccaactccaccgagcttaagcgccgatgtctgttatttaatgagcaccacaaagggggatgtaaccttagccatcgacctcacccatatgcccatcacgggcaagaactttaaacagtatgtcgataagtccttctataacggcaccttattccacagaaccattaataactttatgatccaaggcggcggtttcaccacgggattacagagcaagccaacgagctcgccgattaaaaacgaggccgcggtcggtatcagtaacaaacggggcactatcgcgatggcgcgtactacagtgccagactcagcgacatcacagttctttatcaatgtgttagataatccgcagctcgatgcttcggcgagcaactatggttatgccgtgtttggtaaagttgtcgaagggatggatgtggtggatcaaataagcattgtgccgaccaaaaccagtaacggttttaacgacacaccagtgactgagattttgattaatagtgtgacagaaaccaactgccccaaagcttgat

SEQ ID NO: 290296 - DNA, 520 bp, Unknown
  Bacterial polypeptide expressing nucleotide sequence isolated from the Sargasso Sea
catggcaaccacagcgaccatcgcaactaatcatggcgacattcggatcaacctttttcccgatcaggcccccaagacggtgcgtaacttcaccggccttgcggaagggacccaggagtggaccgaccccacagtgcaggccaagtccacggctccgctgtacgacggcacgatcttccaccggatcatccccggattcatgatccaaggcggcgatcccctcgggacagggaccggcgggcccggttaccgcttcgatgacgagccccaccccgagctcaccttcgacaagccgtacttgctggcgatggccaacgcaggacccaacacaaacggatctcagttcttcatcaccgtcgctccgacaacgtggctgaatttcaaacacaccatctttggtgaggtggcggatcaagaatcccgtgatgtcgttgacgcgatagccgccgtggaaactggggctcaggaccgtcccacccaggacgtggtcattgagtcgatctccatttcccgtgactag

SEQ ID NO: 290297 - DNA, 956 bp, Unknown
  Bacterial polypeptide expressing nucleotide sequence isolated from the Sargasso Sea
gaatgattactcagatctaaatgaaggaatatatgcaaacctagaaacctctaaaggtgatttaatactagaactattttataagcagacgccattaactgtatctaattttgtcgcattatctgaagggaaccaccctgcagcagatgaacaattttctggaaaaccatattatgatggtctaaaatttcacagagttattgacaattttatgattcaaggtggtgaccctactggaactggctcaggtggacctggctttcagtttgatgatgaatttagtgaagaattaaaacatacaggaccaggtattttgtcgatggctaatgctggaccaggaacaaatggaagccaattctttataactcatgtagaaactccatggcttgatggaaagcattctatctttggtaaagttaactctggccaagatgttgttgataatattgctcaagatgacattattaaaagcgtaaagatcataagaattggtaaagatgctaaggaatttgatgctcctaagatatttgaagactatataacaaataagagtcaagcagatattttaaaagctgaagaagaagctaaacttctagatgatttaacatcaggaatgattgaaactgaaagtggattaaaatataaagtttcaaaaaaaggaagtggtcctaatgcaaagatcgatgatgtcctttcagttcattactctcttaaacttgttgacggatcagaaattgattcatcttttactagaggagaaccaatcgagttcacctgtggtgttggacaagttattaaggggtgggatgaagctatgcaactacttaataaaggttcaaaagctacactagtgattcctagtgaactaggttacggatcaactggtgcggggaatggagttattcctccgaatgcaacattaatttttgaagttgaattagttgacataaaataat

SEQ ID NO: 290298 - DNA, 490 bp, Unknown
  Bacterial polypeptide expressing nucleotide sequence isolated from the Sargasso Sea
catgaatgattactctgaactaaatgaaggaatatacgcaaacctagaaacttcaaaaggtgatataatactagaactattttttaagcagacgccattaactgtatctaattttgttgcattatctgaaggaaatcaccctgcagcagatgaacaattttctggaaaaccatattatgatggtctaaaatttcacagagtaattgataattttatgattcaaggtggtgatcctactggaactggatctggtggacctggctttcagtttgatgatgaatttagtgaagaattaaaacacacaggcccaggtattttatcgatggctaatgctggaccaggaacaaacggaagccaattcttcataacccatgtagagactccatggcttgatggtaagcattctgtctttggaaaggttaactctggacaagatgttgttgataacattgctcaagatgatcttattaaaagtgtaaagattataaga

SEQ ID NO: 290299 - DNA, 490 bp, Unknown
  Bacterial polypeptide expressing nucleotide sequence isolated from the Sargasso Sea
atgactgagacaataatttctgaggaacttccacaaattcaaattcaaactgagcgaggattaatcactctcgagatgtttgaggatgaagcgccaaacaccgtagccaacatgatatctctgacagagcaggatttttacaacggtcttacatttcacagggtaatacctaattttatgattcagggcggctgtccgcaaggcacgggagctggggatccgggctacaggtttgacgatgaatgtacacctgaaagactacacaacggtccgggagttttgtcaatggctaacgctggacccggaacaaacggaagccagttctttatcacccatgaggcccaaccacatcttgatggaaaacatactgttttcggtaaagtaatatctggaatggaggtagtcaataatattgagcagggagatgtaatagaaaaaatgctggtagtgcggaaacgcgatcatgaatataaagtagaaattctttgag

SEQ ID NO: 290300 - DNA, 934 bp, Unknown
  Bacterial polypeptide expressing nucleotide sequence isolated from the Sargasso Sea
atgaaaaacgggctatatgcaaaatttgtcaccactaaaggtgagattattgctaatttaaaatatgaaattacccctggaactgttggaaactttgttggtctggctgaaggtgaaataaaaaacagcttcaaagaagatggacttcctttctacgatggaattaaatttcatagagtaattaaagattttatgattcaagctggttgtccccaaggtaagggtacaggcggtccaggatatcaatttgatgatgaattttctaaagatttaaaacatgacgaacctgggattctttcaatggcaaatgctggtcctggaacaaatgggagtcagttttttataactcatgttccaacaaattggttagatggaaaacacactgtttttggaaaagtgattgaaggaattgatgtcgtaaatattattgaacaaaacgatttaattattagtatcgaaattattagagtaggaaacaatgcaaaaaaatggaatgcaactaaggcatttaataaatttattaatgacaagaaagactcaaaagagttagaaaataaattagaaatacttgaatttgaaaagcatattgagggaatgagtaaaacctcatctggtttgtattataagataaataaagaaggaaataaaaataaaccccttaaaggacaaaacattagagttcattataaaggaatgcttcttgatggtactgtttttgactcttcaattcaaagagatcagcccatagattttactcttggaataggacaagttatagctggttgggatgaaggtatcagtttattaagtgaaggagcctctgcaaaacttgttattcctagtgaattagcatatggagcaaacggagcaggaggtgtaattcctccaaatgcaacattgatttttgaggttgaattactaaaaataaactgaa

SEQ ID NO: 290301 - DNA, 490 bp, Unknown
  Bacterial polypeptide expressing nucleotide sequence isolated from the Sargasso Sea
atgactgaagtagaaattagtgaaagcctcccaaagattgagattcaaacatctaaagggtctatcaaaattgaattatttgaagaagatgcaccaaatactgtgggtaatatgatatctcttattgagaaggggttctatgatggtttagtttttcatcgagtgattcccaattttatgattcaggggggatgtccgctaggtacaggatcaggagaccctggataccgcttcgatgatgaatttaagtctaatcgttgccatgatggtcccggaattctttccatggcaaatgcaggacctgcgactaatgggagtcagttttttataacacatagtgcccagcctcatctagatggtaaacacacggtatttggtaaggttattgatggtcaagaagttgttgatgaggttcaacaaggggatgttatagaaagaattactatattaaataaaagagaccatgtttatgaagtaataaaactttgat

SEQ ID NO: 290302 - DNA, 902 bp, Unknown
  Bacterial polypeptide expressing nucleotide sequence isolated from the Sargasso Sea
actgaaggatggactttatgccaaattggaaacttccagaggcgaaattctgcttcaactttatcacaaacgagtcccccagacggtggccaattttgtaggattggccgaagcaaccaaagcctggaaggatccgatttccgggaaatccaagaaaacacgcttttatgacggccttagctttcaccgggtgattgccgatttcatgatccaggggggtgatcctctgggaaccggaagcggaggtccggggtaccgttttcaggatgagattcacccggatctcaaacattccggaccgggaatcctctccatggcaaacgcgggcccgaacaccaatggaagccagttctttatcacccacaaagcaactccgtggctggacgggaagcattcggtatttggaaaagtgatccagggtatggaaacagtcaacaagatccagaaaggagatttgatccaaaccgtgtccatcattcgacgcgggaaagatgccaaaggatttgatccctccaaaattgaagccgctcagaaagcaaaacagaagagcctggcgatcaaacaaaaaaaggatcttccaccccttaccggggagtcagatccgtccaaggttccaggaaaaaatcacccccttgcagaagaagtttccctggaactgatggtcatcgcctatgaaggtgtccaaactcctttgcctgcgttgtattacgacaagtccggggccaagaaggtggcggagcagctggcagaactggcccgccgaaagaattcgaatttcagccgattgatcgaccagttctcggatctcaaacaacagaaaaaaatccccatgctccgagcggacactccgaatttgatgccttttttgaaggcaggcttgagcttgaaggaaggacagatca

SEQ ID NO: 290303 - DNA, 625 bp, Unknown
  Bacterial polypeptide expressing nucleotide sequence isolated from the Sargasso Sea
tatgaataagaattttataatcttaatctcaataataactttaaactcatgtaatatgaataattattctgatttatctgaaggactatatgcagatattgaaacatcaaaaggaaatattatcctcgaactgtattatgaacaagcaccattaactgtatctaattttgttgctttagcagaggggaatcacccagttgtagatgatcaacattctggaaaaccttattatgacggattaaagtttcatagagttattgaaaatttcatgattcagggtggagatccaacaggaacaggatcaggtgggccaggatatcagtttgatgatgagtttaatgaagaacttaaacatgatggacctggaatattatctatggctaatgctggacctggaacaaatggtagtcaattttttattacgcaccttgagacaccttggttagatggaaaacattcaatttttggtaaggtaaatacaggtcaagaagtagttgataatgttgaacaggacgacattattaaaaaagttaaaattataagagttggagaagctgctaaaagttttgatgctcctaaaaattttgaagattacatttcagagaaaagtgaagctgatatctta

SEQ ID NO: 290304 - DNA, 1081 bp, Unknown
  Bacterial polypeptide expressing nucleotide sequence isolated from the Sargasso Sea
tatgaattcaaaaaaatacattttaatactattattaactattaatttttcatgtaatatgtcacaaaaaaataacgatggtgtaatttatgcatcaatagaaactaataaaggaattattaaaacagaattgttttacaatcaaacgcctgtaacagtagcaaatttcatatcacttgctgaaggcaaaaacaaggaagtaagtgatcagtataaaggaaaaaaatattatgacggtttgacttttcatagggttattccagattttatgattcaaggtggagatccaacaggaactggttccggatctcctggatataattttaaagatgaatttgttgatgaacttaagcatgattctgctggtattctttccatggcaaatgcaggtcctggaacaaatggaagtcagtttttcataactcacaaagaaactccgtggcttgatggtgctcacactgtatttggaaaagtgttagaggggcaagatattgtggataaaatagaacaaggtgattcaattttaaccgttgaaataatcagagatggtagcggcgcaaaaagatttaatgctactaaagtttttagtaatcattttaaagaagaagaaaaaagaaaaaaagaagctgaaaaacagttgttaaaattaaaggaggatgtttcaactatacattctaaactaaaaaatgatgcaactgaaactgaaacaggacttaaatattttataaatgaaaagggtgaaggggataaagttgatgaaaataaagttgtattaactcactatgcagtttatttcgaagatgggaaccttttagacacttccattctaaaggtagctgaaaagtacaatatggttgacaagaggagggctcaagctggtggatattcacctattgaagcaaaagtaggtccaaaagatatgatgattcagggtttcaaggaaggtttaaaactgttaaatgttggagacaaggcaacactattcttgccatactatttagcttacggagaaactgaatctagaggaatccctgcaaaatcaaatttaatttttgaagttgaaatagttgatcaaaagtag

SEQ ID NO: 290305 - DNA, 487 bp, Unknown
  Bacterial polypeptide expressing nucleotide sequence isolated from the Sargasso Sea
catgatcaagatgacgacaacaattggtgatataacaattgaattatacgaagatgatgctccaatctcttcagaaaacttcatggaatatgtgaaagatggcttttttaatgacactatttttcatagggtcattcctaattttatgattcagggtggtggaatgacagaagatatgatgagtaaaccaaccagagcgccgatcaaaaacgaagcaaagaatggcaaaaagaatctaagaggaacactggccatggccagaacaatggaaattgatagtgcaacatcccagttttttataaatttggtggataataattttttagatcatggagatcgtgattttggatatgcagtttttggtgaagtgaccgaaggaatggatgtggttgataaaatagcgggtgttaccacaggatctaaccaaggtcatcaggatgtgccgaccgagcctatttttatcaaagaagtggtaattgttgactga

SEQ ID NO: 290306 - DNA, 268 bp, Unknown
  Bacterial polypeptide expressing nucleotide sequence isolated from the Sargasso Sea
atgtctaaattagttgccggtaattggaaaatgtttggcaataaagcaatgattgccgacctaaaaaagatcgatcaatattgcaaagaaaaaacttgcgaggttgcaatatgccctccctttccactaatttcggctgcgcatgaacaaaccaaaaatataaaaatcggagcacaaaattgtcacattaatataaatggggctcatacaggtgaggtatcggcagaaatgctcatcgaagtgggtgctcaacttatacttgtggggc

SEQ ID NO: 290307 - DNA, 265 bp, Unknown
  Bacterial polypeptide expressing nucleotide sequence isolated from the Sargasso Sea
gcaattgaacctccagaattaattggaacaggaagagcaatttctactgaaaaaccagcattaattacaaacgcagtgaaagcagttagttctgctaaaaattctacaaaattgttatgcggtgcaggaattgtttcaggtcaagatgtttcaaaagcaaaagaactaggatcaaaaggaattctagttgctagtggaattgtcaaagcaaagaactgggaaaaaattatctcagaattttgtaagggtttaaaaagccagtaaa

SEQ ID NO: 290308 - DNA, 316 bp, Unknown
  Bacterial polypeptide expressing nucleotide sequence isolated from the Sargasso Sea
aaacttaacagaaggaatcttatatacacaaattaaagatagtattccaaatttagcaaatcatcaaaatgcattaattgcatatgagccagtttgggcaataggaacaggattaacaccaactttggatgagataaatcaagtacacgaattaattaaaaattttgatactaaatttaggaactttaagattctttatgggggttctgtaaaatctacaaattctaaagaaattaatgatttaaatcatgttgatggttgtttaattggcggagcttccctaaaagttgatgaattcaacataattatatcttga

SEQ ID NO: 290309 - DNA, 748 bp, Unknown
  Bacterial polypeptide expressing nucleotide sequence isolated from the Sargasso Sea
tatgacaaataataatatttatttcgttgctaattggaagatgtttggttctgtcaaatcagttaatttgttaaataaagtaataagttattcaaaaacaaagaaacataaagccaagatcatttattgccctccatacacattgattaaatcttttgtagataaaactaaaaattcaaatattgagattggagcccaagactgtcattcagaacaaaactacggacccttcacaggagctattagctcaaagatgattaaagaattgggaggtaagtttgtcataatcggacattcagaaacaagatcagaaaatgataataaaaaaattaatttaaagattaaatctgcaataaatgaaaaattaaatgtcattttatgcataggtgaaaaattgattgataaaaaaaaaaataaaacaaaatatattttaaaaaaacagttaattgaaggtttaaaaaatttaacgaatttaagtaaagtaataattgcttatgaacctgtctggtctattggcacaggtattattcctaccgaaaacgatttaaaaaaaaatattacatttataagaaacactttgaaaatttcaaaaaagtttaccaaatcaaaaattttgtatggaggctcagtaaacgcaaaaaatataaaaaatttaatgagaatcgataatattgatggttttttgattggaggggcatcaactaatgaaaaaatatttattgatataataaaaaaaacgattaattaa

SEQ ID NO: 290310 - DNA, 733 bp, Unknown
  Bacterial polypeptide expressing nucleotide sequence isolated from the Sargasso Sea
tatgtatttcattgccaattggaagatgtttgggtcagttaagtcagttaattcattaaataaagtaataagttattcaaaaacaaagaaacttaaagccaatattatttattgtccaccttatacattgatcaaatcttttgtagataaaacaagaaaatcaaatatcaaaattggtgctcaagattgtcatacacaaataaactatggacctttcactggagctataagctcaaagatgattaaagatttagggggtgagtttgttataattggacattcagaaacaagagcagaaaatgataataaaaaaattaatttaaagattaagtctgcacttaatgaaaaattaaatgtcattttatgcataggcgaaaaattgattgataaaagaaaaaataaaacaaaatatgttttaaaaaaacaattacttgaaggtttaaaaaatttaaagaatttaaataaagttataattgcatatgaacctgtttggtcgattggcacaggcattattcctagtgaaaatgatttaaaaaaaaatattagatttataagaaacaccttaaagatttcaaaaaaatttacaaaatctaagattttatatggaggctctgtaaacccaaaaaatataaaaaatttaatgagaatcgataatattgatggttttttggttggtggagcatcaactaatgaaaaaatatttattgatataatgaaaaaatcaaataattag

SEQ ID NO: 290311 - DNA, 297 bp, Unknown
  Bacterial polypeptide expressing nucleotide sequence isolated from the Sargasso Sea
tcaagagaaactttaacacgaaaaatattataattgcctatgagcctgtttggtctattggaacaggaagaattcctaagaactctgatattgaaaaaaatttgaaatttataaagaaggagtttaaaaaaattgtaagaaaaaaatatccacccacagtactctatgggggttcagttaatagtaaaaatattagaaatttttcttctaattccgaaatagacggtttcttgataggtggagcctcacaatcatcaaaaaaatttattgatataataaaaaattactataaatagc

SEQ ID NO: 290312 - DNA, 437 bp, Unknown
  Bacterial polypeptide expressing nucleotide sequence isolated from the Sargasso Sea
gcgaaatgataaaattataaataaaaaaatatcatcagctttaaaaaataatttaaaggtaattttttgcatcggcgaaacaattttacaaaaaagaaaaaaaatgacaaaaaaaattttacttaatcaactcagtaaagggcttcataagattaaaaaaaaagaaaatattttaatagcttacgaaccagtatggtcaattggcacgggccttgttccaaaatctgaagatttaaatcatgttatttcttttattaaaatatttttaagaaataaaatgaaatttaaaaatcctaaagtcttatatggaggttcagtaaacccacagaatatatctccactaagaaaagtgctaaatctagacggatttttggtaggtggatcatcccaaaatagtaaaaaatttattgatataataaaaaaaacgtttatttaaa

SEQ ID NO: 290313 - DNA, 302 bp, Unknown
  Bacterial polypeptide expressing nucleotide sequence isolated from the Sargasso Sea
acaattggaggttataaaaaaagaatctttagatacagtaataattgcctatgagccaatttgggcaataggaactggacagaatgctgaaacctcttacataaatgaaatccatcaatttataaagcaagaagtaaaaataaaattaaaatcttctaacgatattcaaactatctatggcggtagcgttaatatagagaattacaaagaaatttattcttctgaacatgtagatggtctccttattggtggggcatctttagatcacaatattttttcaacaatatataatttagcctaat

SEQ ID NO: 290314 - DNA, 325 bp, Unknown
  Bacterial polypeptide expressing nucleotide sequence isolated from the Sargasso Sea
atgataaaattagataatttttcttcattttttgtagcaaattggaagttaaatggaaattttcagtttattgatcaatttatgagtgaaatatctttacctcaagataaatcgaaatgtgtagttatttgcccaacctctgttcatttggattatatgtcaaaaatgaaaacaagattttatttgggagctcaaaatgtttcacaacatgaagatgggtcatttactggagaaatttcagctgcttcactctctgatttaaatattaatttttgtattgttggacactctgagagaaggcaatttttttttgaaaaggaatgag

SEQ ID NO: 290315 - DNA, 241 bp, Unknown
  Bacterial polypeptide expressing nucleotide sequence isolated from the Sargasso Sea
atagcttacgaaccaatatggtcaattgggacgggtttaattcctgaaataaacgatattcagttggctatagattctattagaagtaaatttcacaaaccgattaaggttctttatggtggtagtgtaaattcttcaaatgcctctagtatttcggataaaacagacattgatggtcttttagtagggggggcttctctaaaccccaaagaatttgctaagatagcgcagttatgttgat

SEQ ID NO: 290316 - DNA, 930 bp, Unknown
  Bacterial polypeptide expressing nucleotide sequence isolated from the Sargasso Sea
ttcagtctttgaagagagagttgcacaacttgagggtggtagaggcgcagttgcaacatcctcagggcatgcggcacaatttatagctgctgcaactcttatggaagctggtgatgaatttattgcttcaagaaatctttatggtggttcagttactcagttcggagtaagctttccaaaacttggctggaaatgtaattttgttgacccaactgatcctgaaaacttcgaaaaagccatgaatgataaagttaaatttatcttctgtgaaggtgttgctaatccaggtggaattattcttgatttagagaaaattgctgatattgctcataaacatggcgttttactaattgtagataatactcttgcttctccatatttattgaggccttttgagtggggtgccgatttagttgtgcattcaacaaccaaatttataggcggtcatggaaatactatgggcggtattttaattgaatctggaaaaattgactggcataaaaatgacaaatacccaggcatgtctaaaccagatcaagcctatcacggtttgacctttgcagaaacttttggcgatttcggatttaccatgaaagcaagaatggttggattaagggattatggatctacgcttagtccacaatctgcttggaatttactgcaaggagttgaaactcttccattgagaatggaaagacattgctctaatgcacaaactgttgctgagtggttggaaggtcattcaaaggtatcttgggtttcttaccccgggctaaagtcaaataaattttatggtcttgcaaataaatatctcccaagaggtaaaggtgcagtttttacttttggagtaaagggaggctatgacgctggagttaaattaattgactctgttgatctgcactcaaatttagctaatataggcgatacaag

SEQ ID NO: 290317 - DNA, 549 bp, Unknown
  Bacterial polypeptide expressing nucleotide sequence isolated from the Sargasso Sea
gactgtcattcagaacaaaactacggacccttacaggagcaattagctcaaagatgattaaagatttaggaggaaagtgtgtgataattggtcattcagaaacaagagcagaaaatgataataaaaaaattaatttaaagattaagtctgcacttaatgaaaaattaaatgtcattttatgcataggcgaaaaattgattgataaaaaaaaaaataaaacaaaatatgttttaaaaaaacagttacttgaaggtttaaaaaatttaaagaatttaaataaagttataattgcttatgaacctgtttggtcaattggcacaggcattattcctagtgaaaatgatttaaaaaaaaatattagatttataagaaacaccttaaagatttcaaaaaaatttacaaaatctaagattttatatggaggctctgtaaacccagaaaatataaaaaatttaatgagaatcgataatattgatggttttttgattgggggagcatcaactaatgaaaaaatatttattgatataatgaaaaaatcaattaattagg

SEQ ID NO: 290318 - DNA, 739 bp, Unknown
  Bacterial polypeptide expressing nucleotide sequence isolated from the Sargasso Sea
atgtattttgtagccaattggaaaatgtatggaaatttaagctcaattaactcaataaaaagtgtaaaaatttttaatcaatcaaagaaattaaaaaatataaaaataatttattgccctccatttaccctgttaaggcctttggttaaaaaattaaaaaactctaaaataagtgtaggtgcacaaaattgtcatcacaattcagattttggtccatttactggttcagttaatgctaagatggtaaagtcagttggttgcaagtatattattcttggccactcagaaaatagacacaatggcgaaactgataaaataattaatttaaaaataaaatctgcattaaaagaaaatttaaaaattattttttgcattggggaaactttaagagaaaaaagaaatcgtaaaactagaataattttaagaaaacaaattatgagtggtttaaaaaatataacaaaattaaataatataataattgcttatgaaccaatttggtcaataggatctggcaaaatacctaaatcaaaagaacttaataaagccattgaatatataaaaagtttaacaataaaaaaaaataaacttaaaaataataaagttttatacggtggctcagtaaatcctaaaaacattaaaaatttatcaaaaataggttcattagatggttttttgataggtggagcttctcaaaaaagtaagaattttattgatatcataaaaaaaactattaattagt

SEQ ID NO: 290319 - DNA, 871 bp, Unknown
  Bacterial polypeptide expressing nucleotide sequence isolated from the Sargasso Sea
tttctggcggcgcttggcgtgctgtacctttacggcggttcggtcaacatgatcagcctgttcgcgctcatcatgacactcggcatcattgtcgatgacgcgatcgtggttggcgaagatgccgtgacgcattttgagcgcggcgagaatcctttaagcgcggcagaggggggcgcccggcgcatgctggcgccggtcgtgtcttcatcgctcaccactatcgcggcgtttatgccgctgctgctgatcggcggcatcatcggctcgatcctgcgcaccatcccgatcatcgtgatctgtgtcattctggcgtcgctggtggaatccttcctggtgttgccggggcacctcagaggcacctttgcgcgcatgggtcactaccggcccaaggggcttcgcaagaaactggatgccggctttgcgcgttttcgcgagggcatcttccgcccaatggtcagtgccggggttcgcgcgcgctggattaccgtcgcgctggctatcgctatcctgacaagcacctttgggtgggtggcaggcggccggatcgctttcaatttcttccccgtggcggagggtccgatcctctttgccaacgtggattttgtctccggcacgccggaatcccaggtggcgcagtatcttgaagagattgaacaggccgcatgggacactgatgcacattttggcggcggcctggttcgcaccgccatctcgcgcaaggggcttggggaaagtggcgactgggaaagacgaagcagtgacaacatcggctcagtactggtcgaactgatcaagcctgacgaaaggtccgtgcgcaaccgcgagttcatcaatgaatggcgcgcccggatcccaaagccgcaggactcga

SEQ ID NO: 290320 - DNA, 739 bp, Unknown
  Bacterial polypeptide expressing nucleotide sequence isolated from the Sargasso Sea
tatgttttttattgcaaattggaaaatgtttggtgatttaaagtcagtaaattctatcaaaaaagtcataaaaatttcaaaaaacaaaaagtataaaaaagcacaaataatttactgtccaccatttactctaattgataagtttttaagattagttaaaaataccaaaattgatatcggagctcaaaattgtcattattcagaaaatcctggaccattcactggttctgtaaatacagacttaattaagtctataggagccaaatatgtaataatcggtcattctgaaaatagagccagtggtgataataataaaactataaatcttaaaataaagtctgctcttaaaaaaaaattaaaagttattttttgtattggtgaaactttaaaagaaagaaaaaataatagaacaaatagaattttaaactcccaaataactcttggtttaaaaaaaataaaaaaaaataataatattatttttgcttatgaacctgtctggtctattggtactggtgtaattcctaaatccgatagtcttaaaaaacaaatttttttaataaaaaaaatgattaacagaatctggaaattaaaaggcccaaaagtactatatggaggatcagtaaattcaaaaaatattactgatctaaaaaaaatcaattcaattaatggttttttaataggtggtgcatcacaaaattcgaagaattttattgatatcattaaaaaaactattaattag

SEQ ID NO: 290321 - DNA, 220 bp, Unknown
  Bacterial polypeptide expressing nucleotide sequence isolated from the Sargasso Sea
attggcactggtaaaacatgtgaggcagaagacgctaataagatatgttctttgattcggaatttaataggttttgatgatgtaattattcaatatggaggatctgttaaacctaataatattgacgaaatcatgtcaatgactgatatagatggggtgttagttggaggggcttcactagatccgaatagttttgcgagaattgcaaattatcaataag

SEQ ID NO: 290322 - DNA, 715 bp, Unknown
  Bacterial polypeptide expressing nucleotide sequence isolated from the Sargasso Sea
atgtttgtagcaaattggaaaatgaatggaagctctattgcagttaaggagtggctgaaaatcatctcttcctcagaaaatttgaatgaatgcattttttgtccgcctcttctatatttaaaggaagcaaatgagtttatttctgaaaaaaaattatctttatctttaggggcacaagatattgatcctgatatcaatattagcctaactggaggaatatctccttctatgctgaaagatgttggatgtaagtattcaataataggccattcagaaagaagaaatttctataaggaagattcaactttgttaattgataaagtctctatttgtttaaaagaaggcataaaagtaattttttgtattggggagtctcttgaagacaggaattcaggtcaaactaaagaaatattgtctcaacagttgagggctttagatggtttttcttcaaaaaatctaatggtggcttatgagcctgtttgggctattggatctggaataatacctctcttagaagatatatctgaaactagtgattatcttatcgatgaattaatatctttgggacataagcaagaagagattacaatactttatggaggaagcgtagatgcttctaatgctaaagagatttatcagctgaaagcagtctctggtttattgataggtggggcttctttagatggtgagcaattcttgaaaattattggataaa

SEQ ID NO: 290323 - DNA, 424 bp, Unknown
  Bacterial polypeptide expressing nucleotide sequence isolated from the Sargasso Sea
atattttgaagaaactaatcaaaatattaataaaaaaataaataacctaatcgagagtgaaataattcctgttatttgtattggtgaaacacttgtacaaaaagagcagggaattacaaatcaaatattaagtacacaaatcgagcaatgtattccagttcaatctaattataaaaatactattattgcttatgaacctatttgggcgataggcacaggtttaacaccatctataaatgatattcaagatgtgcacgcttttattaaatcaatagataataaattaaataattttaaagtactttatggtggttctgttaaatctactaattcaaaagaaattgttaatttaaagaacgttgatggttgtttaattggaggagcttcattaaacataggtgaattcaatacaattatatcttga

SEQ ID NO: 290324 - DNA, 256 bp, Unknown
  Bacterial polypeptide expressing nucleotide sequence isolated from the Sargasso Sea
atgaataagattttagtggcagcaaattggaaaatgaatggttcaaaatcatttgtctcagacttcattagagatattgtcaccaattataatcaagagcattatcatgagttattgatttgcccatcatttccctatcttgatcaagtttcaaaaggactagcaaaaacagatgttaaagtaggcgctcaggacatcgctcagtatgaaaatggtgcatatactggagaagtctcagcagagatgcttcagacaa

SEQ ID NO: 290325 - DNA, 475 bp, Unknown
  Bacterial polypeptide expressing nucleotide sequence isolated from the Sargasso Sea
aatgaaaagggttaaatatactatcgctaattggaagatgaatggcttaaatggagctgtaaaggtagttaattccattgacaggcatattaaaaacacaagacataaaaaatctaaagttgtaatttgtccccctttcacattgttgactaatttcataaacgcaaaaactgtaattgattttgggggccaagactgtcaccacttaaatgaaggtgcatttaccggatgtatcagtgctcaaatgcttaaatctgcagggtgcaaatatgtcattataggccattcagaacgaagggagtatcaaaaagaaacatcaaaagaacttaatttaaaaattgatattgcaaataagtataaattaaaaattatttactgcataggtgagagattaagtgaaataaagattaggaaaaaaattctcaacagtcagctcagctcactcccaaaaaaaataagtataaaaaatcttatt

SEQ ID NO: 290326 - DNA, 331 bp, Unknown
  Bacterial polypeptide expressing nucleotide sequence isolated from the Sargasso Sea
aatgaaatataacccagactcaacgactttcgcgggtaattggaaaatgaacggtcgccaagatgacacacttgatattgagaaattgattaaattaatcagagaagatgatgccaatattattttatttccgccatacacactaatctcaagttttgtcaatattagcaaaaattcaaacctaaatataggtggccaagactgccaccatgaagactctggcgcatttactggttcaatatctgcctctatgcttcgtgactccggtgctgattttgtaatcattggtcattccgaggtgagggcgatacatggggaggggcccagataa

SEQ ID NO: 290327 - DNA, 700 bp, Unknown
  Bacterial polypeptide expressing nucleotide sequence isolated from the Sargasso Sea
atgtttggatcaattaaattagttaattcattaaataatgtaataaattattcaaaaaaaaataaacagaaggctaaaattgtatattgcccaccttatactttgcttaaatcttttatagataaaactaaaaattcaaacattgagataggagctcaggattgtcatataaattcagactatggacctcatactggagccataagttcaaaaatgattaaagatttaggagcgaaatttgtgataatcggacattctgagacaagagaagaaaatgataataaaaaaattaatttaaaaataaaatctgcacttaataaaaaattaaaagttattttttgtataggtgaaaagttgattgataaaaaaaaaaataaaactaactttgttttaaagaaacaattacttgagggactaaaaaatttaaataaattaaataaagttataatcgcatatgaacctgtctggtccattggtacaggaataattccaacagaaaataatttgattaaaaatattaaatttatcaaagatactttaaaaagagcaaaaaaattttcaaaatcaaaggttttatatggaggctctgttaacccaaaaaatattaaaaatttaatgagaatcgataatattgatggttttttgataggtggagcatccactaatgaaaaaatatttattgatataatgaaaaaatcaa

SEQ ID NO: 290328 - DNA, 142 bp, Unknown
  Bacterial polypeptide expressing nucleotide sequence isolated from the Sargasso Sea
aaataaatacaaaattttgtatggaggctctgttaaacctagcaatgctaaagagatcacaggtttaccaaatgtcgatggggccttaattggtggagcttcacttaaatccgaagcattctcaaagattttagaagattaa

SEQ ID NO: 290329 - DNA, 247 bp, Unknown
  Bacterial polypeptide expressing nucleotide sequence isolated from the Sargasso Sea
tatgattgaattaagccatttttcatctttttttattgcaaattggaaattaaatggctcttttgagtttatagataattttgttaatgatttaaatatagaaaaatcaacaaaaaattgcatatctctttgtgttccttatgtttatttaaattatattaagaaaattaaaggtgatttttatttaggagctcaagactgctctttatttgaatctggagcatatacaggtgagatatctgcaaaa

SEQ ID NO: 290330 - DNA, 496 bp, Unknown
  Bacterial polypeptide expressing nucleotide sequence isolated from the Sargasso Sea
tctgtaaacccaaagatgcttaaaagtgttggagcgaaatacgttattattggtcattcagaaaatagacaagaaggtgaaacagataaattaattaatattaaaattaaatgtgctttgaagtctggacttaaggttattttttgtattggtgaaacattaaaagaaaaaaaaaccaaaaaaacaaaacaaatattaaatagacaaatcagaacaggtttagataagataaaaagtaaaaatgatattattatagcttacgaacccgtttggtctataggctcaggtctaattccaaaatcaaaagaattactcgaaacaattaattttattagaaaaaaaactagaaattgtaaaattttatatggtggttcagttaatccaaaaaatattagtaagttaaatacaatgagtaatgtcgatggttatatgataggtggtgcatcacaagatccaaaaaaacttattgatataatcataaaaacatataattagc

SEQ ID NO: 290331 - DNA, 150 bp, Unknown
  Bacterial polypeptide expressing nucleotide sequence isolated from the Sargasso Sea
caaagtctaaggttttatacggaggctctgtaaactcaaaaaatattaaaaatttaatgagaatcgataatattgatggttttttgattggcggagcatcaactaatgaaaaaatatttattgatataatgaaaaaatcaattaattagg

SEQ ID NO: 290332 - DNA, 405 bp, Unknown
  Bacterial polypeptide expressing nucleotide sequence isolated from the Sargasso Sea
ttgtacaaaaaaaaacagatctatgtttaattaataaaataaagcctatagtatgtattggagaaccgttaacgatttataaatcaaaaaaaaccaaagtttttgtaaaaaaacaaatcaatcaaatatttaaaaaatcaaataattatcaagaagtcgtcttagcttatgagcctttatggtcaattggcactggattaacacccaaattatcagaaattaatgatattttgggatttttgtcaaaaatattggaaaattattcttttaaaaaaataaatattttatatggtggttcggtaaatttatcaaatattaaagatattttaagtttgcgaaatttaaacggagttttagtaggctcggcttctacaaaagcttcatttattaaacattttaaatgac

SEQ ID NO: 290333 - DNA, 172 bp, Unknown
  Bacterial polypeptide expressing nucleotide sequence isolated from the Sargasso Sea
ttgaagatttcaaaaaaatttacaaaatctaagattttatatggaggctctgtaaacccaaaaaatataaaaaatttattgagaatcgataatattgatggttttttggttggtggtgcatcaactaatgaaaaaatatttattgatataatgaaaaaatcaattaattagg

SEQ ID NO: 290334 - DNA, 634 bp, Unknown
  Bacterial polypeptide expressing nucleotide sequence isolated from the Sargasso Sea
atgtttggaattccaagctctttcaaaattattgataaaattaatgactttgtaagattggacaaaaaacataatcaaaaatataaagtgataatagctccaccttttactttgctacaagattattcaaaaagatataaatataaaaaaataattttatctgctcaaaattgttatcacaaaaatagttttggcgcattcaccggaaatataagcccatatatggtaaaaaaaataggaataaattatattataattggacactctgaaagtagagctgatggtgataataataaaattattcaagaaaaaatatttttagctattaaaaataatttaaatattatttattgtatcggagaaaataaaaaagaaaaaaaagacaaaaaaactttaaatgttttaaaaaaacaaattttgtcatcaatcaaaaaaaattataatcttaaaaaaattatttttgcttatgaaccagtttggtctataggaagcgggaaagttccgtcaatcaacgatttaaataaaacaatcaattttatgaaaaaatttgtaaagcgtaaatatgacatcaaaaatgaaccaaagtttctatatggaggctctgttgacaaaaaaattatctctaattttaaat

SEQ ID NO: 290335 - DNA, 309 bp, Unknown
  Bacterial polypeptide expressing nucleotide sequence isolated from the Sargasso Sea
aaaaattattaagtaaacaaataaaacttggtttaaataaaattaagaataacaaaaatattattatagcttatgagccaatatggtcaattggatctggtttaattccaaaaaaaaaagaattatatgaaacaataaaatttataaagaaaaaagctaaaaattataaagttctttatggtggatcagtaaacccaaaaaatattaattcattaaatttgatcagtaatatagatggttacatgatcggtggagcatctcaagatccaaaaaaatttattgatataatcaaaaaaacatataattaac

SEQ ID NO: 290336 - DNA, 233 bp, Unknown
  Bacterial polypeptide expressing nucleotide sequence isolated from the Sargasso Sea
gcctgtttgggctattggcactggtctaacacctactttagaggaaattaataaaacacatgaatttataaaaaattataactctaaatttacaaattataaaattttatatggtggatcagtaaaggctaataatgcaaaagaaatagtatccttatcaaatgttgatggtgcattgataggtggggcatcacttaaatcagatgattttaaaaagataattgcagattaat

SEQ ID NO: 290337 - DNA, 727 bp, Unknown
  Bacterial polypeptide expressing nucleotide sequence isolated from the Sargasso Sea
atgacatggattggtacaagctggaaaatgaatcatgatttgccagcaacaaaaaattatataaattctctaattaaaaattctaaatatcttaaaaattcaaaaattaatttttttgttattcctcctcatacatccttgatgatgtttaaaaattttaaaaaaaaattacctgtgatgtatggagcgcaaaatatgcattgggctgaagctggagcttatacaggtgaaatttcagcatcaatgataaaatcctgtggatgtaaaattgttgaattaggtcattcagaaagattaaaatttttcaatgaaaactcaaatttaattaataaaaaaattaatttagcaattaaacacaacctaattccattaatatgtgtaggtgaaaaaaaattagaaaaaaatttgtctagaagaaaacaagttttaaaaaaccaattagacatattatttaaaaaagtaataaataaaaagaaactaattcttatcgcttacgagcctatatgggcaattggtaaaaataataaggctgcaagtattgattattgtaatgaaactatgcaatatataagaaaaattgtttcaaaaaaaataaataaaacaaaaattctttacggaggtagtgttgatgaaaaaaactataaagaatttttaaaaagtgattatattgatggtatatttattggcagagctgctttaaatgcaaataattttataaaaatttgta

SEQ ID NO: 290338 - DNA, 435 bp, Unknown
  Bacterial polypeptide expressing nucleotide sequence isolated from the Sargasso Sea
aaaaccgtgagtctggtgaaacagataaattaattaatattaagattaaagcagccactaaatcaggtttaaaagttattttttgtatcggtgaaaccttagatcaaaaacgaaaaaaaattgccaaaaaaattttatcaaaacaaattactttaggtttacgaaaagttaataaaagaaaaaatattataattgcttatgaacctgtttggtcaattgggactggtattatacctaaacctgatgacctatttagtacgattaattttataaaaaaaaaggttaaaaatatcaaagttttatatggtggttcggtaaatccaaaaaatataaatgaattaaaattgatagaaaatatagatggatttctaatcgggggagcttctcaagattctaaaaaatttattgatataatcaaaaaaacctataattaac

SEQ ID NO: 290339 - DNA, 591 bp, Unknown
  Bacterial polypeptide expressing nucleotide sequence isolated from the Sargasso Sea
aatgtcaaaacttataattgccaatttcaagatgaatggaactaaatcttctattcaggaatggtttaatgttttttctgaagaaaataatggacctaataagattattgttgctttaccatcacctttcttagctgattttgctgctaataatatcagtgttgcctcacaaaatgtttcctcacataactctggagcgtttacatcacaagtgtctgctgaaatattgaaagactgcaatatcaattattcaatcattggtcattcggagtctagagaatttttaaatgaaactaatgaagatattttcgataagtacaaccaacttataaaacattctataaaaccgataatttgtattggagagccatcaaagattcgtgaagataatttattttcagcttttatcacagagcaactagaactctttaaagacgtagaagacgagctaataattgcctatgagcctatttgggcaattggaagtggtataactccaactattgctgatataaatgaggtttctgagttaataaaagggctatgtgacaacgttaaagttttatatggcggaagtgttaataaggaaaa

SEQ ID NO: 290340 - DNA, 400 bp, Unknown
  Bacterial polypeptide expressing nucleotide sequence isolated from the Sargasso Sea
gcacttaatgaaaaattaaatgttattttttgcataggtgaaaaactgattgataaaaaaaaaaataaaacaaaatatgttttaaaaaaacaattaattgagggtttgaaagatttaaaaaatttaaataaagtaataattgcttatgaacctgtctggtcaattggcacaggcattattcctaacgaaattgatttaaaaaaaaatattagttttatacgaaacaccttaaaaatttcaaaaaaatttacaaaatctaagattttatatggaggctctgtaaacccaaaaaatataaaaaatttaattagaatcgataatattgatggttttttgattggcggagcatcaactaatgaaaaaatatttattgatataatgaaaaaatctattaattagg

SEQ ID NO: 290341 - DNA, 732 bp, Unknown
  Bacterial polypeptide expressing nucleotide sequence isolated from the Sargasso Sea
aatatatgtattttgtggcaaattggaaaatgtatggaaacttaaaatcagtaaatacgttaaacaaagttattaaattttcaaaatcaaaggaaattaagaaaggtagattaatttattgtcctccttacacattattaagcctcttttttaataagtttaaaaattgtctaattgatattggtgcccaaaattgccatgaaagtgacgagtttggttctcacacaggatttatcaattcaaaaatgataaaaaatattggtgcaaattatgtgattattggtcactctgaaaatagaaaaaaaggagagactgataaattgataaatttaaaaattcaaagtgctatcaaagcaaaattgaaaattattttttgtataggtgaaacttacactgaaaaaaaaagtggaaaaactaaacaaattttatcaaaacaaattaaattaggtttaaaaagtataaagaaaaaatcaaatttatttatagcatacgagcctgtctggtcgattggtactggtaaggtaccaaaatcaaatgatcttaaacaaattgttgaattcattaaaatgaaatttaaaggtaagttgcctaaaatattatatggcggatctgtgaattcacaaaatattaaagatttaaaaaaaattaataatctcgatggattcttaataggtggagcatctcaaaatactaaaaaatttattgatatagtaaaaaaaacgtatagttagt

SEQ ID NO: 290342 - DNA, 239 bp, Unknown
  Bacterial polypeptide expressing nucleotide sequence isolated from the Sargasso Sea
atcagggctaaatgcagagaaagaccacatagaagaaacgcatggattcattaaaaaatatataaatgatcatctagagtgggataagcttgatatttatcctgcagttctttacggaggtagtgtaaacttgaacaattgcgaagaaataatttcttcaactaatgttgatggtcttttgattggaggagcttccttaaattcagaaaccttttctaaaatatataatttaagctaat

SEQ ID NO: 290343 - DNA, 598 bp, Unknown
  Bacterial polypeptide expressing nucleotide sequence isolated from the Sargasso Sea
atgatctttatagctaattggaagatgaatggagaaaaaagtcacatctctggcatcaataaaaccataaaatttttaaaacaatcaaaaaataaaaaaaatcaaattatttactgtccaccatttaccttaatttcatcggttaaagataaagtaaaaaacactaaaattaaagtaggtgctcagaacctttctcaattaaatgattatggtgcatttacaggatctgtaaattctaaattaattaagtcagcaggaggcgagtatgtaattgttggtcattctgaaattagaaatcaggaaagtgatatactaataaataaaaaaattcattcagcacttaaagaaaaattaaaggtaattctttgtattggggaaacatataaagaaaaaaaaaataataaaactctctcagtacttaaaagacaaataaccattgcattaaagaatataaaaaaaataaataatattatttttgcatatgaacctagatgggcaattggaactggaaaaataccaaaatcatctgaattaagaaaaaactttaaagacataaataatataattaataaattaaaaaaaaatcaaaaacgcaaaa

SEQ ID NO: 290344 - DNA, 713 bp, Unknown
  Bacterial polypeptide expressing nucleotide sequence isolated from the Sargasso Sea
gatgaaatattttattggaaattggaaaatgtttggaattcctggttctatcaaaattttagacaggattaacaactatgttaaaaaagacaaaccaagatctaaaaattataaagtcattatatcaccaccttacactttgttagaaaactttgctaagtccttcaaaaataaaaaaatttcaataagtgctcagaattgttttcacaaaaataactacggttctcacactggtttcgtaagtccttacatgattaaaaaactaggagttaagcacgtaataattggccactcagaaaatcgagaagctggtgaaaataatcatattctcaaagaaaaggttttagcctctgtaaaaaataatttaaatattatcttctgtataggtgaaaataaatacgagaaaagaaaaaaattaactttaaatgttcttaaaaatcaaattagaaaatccttaaacaaaaaatatgattttaaaaaaatactgatagcatatgaacctatttggtcaatagggtcaggtaaattaccatcagaaaatgaattaagtaatattattataaacttgaaaaattttttaaaaatgaattataacaaaaaacataattttagaatactttatggaggatctgttgacagcaaaagtatacataaatttaaaaaaattaaacatttagatggctttttaattggtggagcatcaaaatcatcga

SEQ ID NO: 290345 - DNA, 178 bp, Unknown
  Bacterial polypeptide expressing nucleotide sequence isolated from the Sargasso Sea
cttatcagataattctgcaattcctatggttttatatggcggaagtgtaaaccaggaaaatgctgaaaacttttttaaagaagaatttgttgatggtgctttaatcggaggtgcttctttagatggtagagagtttgctaatattattaatatttttaatgaaataaactttaaatga

SEQ ID NO: 290346 - DNA, 167 bp, Unknown
  Bacterial polypeptide expressing nucleotide sequence isolated from the Sargasso Sea
aaactcattgataccttgtgttttgtatggtggaagtgtgaatgaagaaaatgtaaaaaattttttaaaaagtgaatttgtgatgggtgcattaattggaggagcttctttagatggatcaagttttgcaaaaattgcaaagagttttaatggaagttatagatgat

SEQ ID NO: 290347 - DNA, 318 bp, Unknown
  Bacterial polypeptide expressing nucleotide sequence isolated from the Sargasso Sea
ctaatcaaattttaaaaagacaaattgaaaaaggattaaaatcgataaagaataaatccaaaattattatagcctatgaaccggtatggtctatcggcacaggtgtaattccaaaagaagctgatttaaacaaaactatttcatttattaaaagtagatttataaaaaaatatcctaaaattttatatggtggatctgtaaatgctaataatgtaactatattaaaaaaaattcccagcattgatggttttttgataggaggcgcatcacaaattccaaaaaaatttattgatataattaaaaaaaccattaattaga

SEQ ID NO: 290348 - DNA, 214 bp, Unknown
  Bacterial polypeptide expressing nucleotide sequence isolated from the Sargasso Sea
acaattcacgaatttattaaagatgttgtacaatccgcatctgaaaaaaatttaagaccaaaggttttatacggtggaagtgttaataaattaaatgcaccagatttttttgttgaaaaaaacatagatggtgctttgatcggaggtgcttcattagatgcaaatgttttttcagacattatagaaatttttagtaggcataaagaaaaatgat

SEQ ID NO: 290349 - DNA, 652 bp, Unknown
  Bacterial polypeptide expressing nucleotide sequence isolated from the Sargasso Sea
ttcaaaaccaataaaaaaaataaatttagaataatttactgtccaccttgcactctaattcgccctttatcaaaaagactaaaaaaaactaaaatagaagtaggagctcaaaattgtcatcacagctatgactttggagctaatacaggtcaagtaaattctagaatgcttaaaaatgtcggggcaaaatatgttataattggtcattctgaaaatagacaactaggagaggatgataaattgatcaatttgaaaattaaaagcgcattaaaaactggtttaaaaattattttttgtattggtgaaacattaagagaaaaaagaaataaaaaaactaatcaagttttagcaaaacaaataaaaaatggattaagttcaataaataataaatcaaaaatacttatagcttatgaacctgtgtggtctataggatctggtttaattcctaaatccgaagatctaaaaaaatcaattgctttcattaaaagtaaaatcggtaaaaaatcctcaaaaattttgtatggtggatcagtaaatggtaacaacgtagataagttaaaaattgttactggcatagatggttttttagtaggtggtgcctcacaaaatccaaagaaatttattgatataattaaaaaaaccattaattaga

SEQ ID NO: 290350 - DNA, 217 bp, Unknown
  Bacterial polypeptide expressing nucleotide sequence isolated from the Sargasso Sea
caggaagtgcacaaggcaatccgtcggactcttaaggagctctttggctctcctgcggaagaaataaggattcaatacgggggttccgtaaaacctgagaacgccggggcacttatggctcagaaggacatagacggagcacttattggaggcgcaggccttgcgcatgagagttttgcggcgattgttcgctatcaaatggaatccaaggggtagc

SEQ ID NO: 290351 - DNA, 376 bp, Unknown
  Bacterial polypeptide expressing nucleotide sequence isolated from the Sargasso Sea
ttgaaggaaaatattgtaccggtgatatgtataggtgaaaccttagaacagaaagaaaaaaacttaacagaagaaattttatctacacaaattaaagatagtattccagatttagcaaatcatcaaaatacattaattgcttatgagccagtttgggcaataggaacaggattaacaccaactttggatgagataaatcaagtacacgaactcattaaaaattttgatactagatttaacaactttaaagttctctatggtggttctgtaaaatcagcaaattctaaagaaattaatgatttaaatcatgttgatggctgtttaattggtggtgcttctctaaaagttgatgaattcaatataattatatcttgat

SEQ ID NO: 290352 - DNA, 379 bp, Unknown
  Bacterial polypeptide expressing nucleotide sequence isolated from the Sargasso Sea
gttggtgaaactttgcagcaaagagaagaagaaaaaactttgcaggttcttgcacggcaattagatgcggtgtatgctgcgcagcctcatttactggcgcattctgtggtaagttacgaaccgatttgggctataggcacaggtcagacagcaacaccgcagcaagctcagcaagtgcatcagttcatacgccaacatttggcgcagtatgatgtacaggcggcagaagcggtgaaaattatttatggcggcagtgtcactgctgctaattgtgaagccctgtttgcagaggcggacatagacggcgcccttattggtggtgctagtttgaaagtggcagatttttctgcgatttgcacaatggcaaaggattcataat

SEQ ID NO: 290353 - DNA, 376 bp, Unknown
  Bacterial polypeptide expressing nucleotide sequence isolated from the Sargasso Sea
aatgaaaagggttaaatatactatcgcaaattggaagatgaatggctcaaatggagctgcaaaggtagttaaatccatcgataagcatattaaaaaaacaagacataaaaaatctaaagttgtaatttgtcctccttttacacttctaaataatttcattaacacaaaaacaggaattgattttggaggtcaagactgtcaccactacaatgaaggtgcattcactggatgtatcagtgctcaaatgcttaaatctgtaggatgtaaatatgttataattggccattctgaaagaagggagtatcaaaaagaaacatcaaaagaactcaatttaaaaattgatattgcgaataaacataatttaaaaattatttac

SEQ ID NO: 290354 - DNA, 562 bp, Unknown
  Bacterial polypeptide expressing nucleotide sequence isolated from the Sargasso Sea
aatgtctttgagattaattgcaaattggaaactaaatggttcaatacaatttaatgatcaatgggctgaggatttttttaaaaatttttcaagtttaaattctgaatcaattgggatagcgccagcttttatatatatagatcatattagaaaattgattggagattccgggattaatataggcgtgcaaaatatttgtgaggaggaatctggagcaagaaccggtgaaatctcagcctcgatgattaaagatttaggatgtaaatttagcttaattggtcattctgagagacgcattttttttcatgaatctaacaaaacaatttcaaaaaaattaaatctggccaacaacaattctgtaatgcctattttatgtatcggggagtctgctgaagagaatgaaaggaatgatacttatgacatcctaaaatttcaggttgaagaagcgttaaaagatctttttgagcaaagtgccttaataattgcatatgagcctgtatgggcaattggctctggaaaaattcctaacccagaggaaataaattccgttcataaaatgatc

SEQ ID NO: 290355 - DNA, 751 bp, Unknown
  Bacterial polypeptide expressing nucleotide sequence isolated from the Sargasso Sea
gatgaaatattttatcggaaattggaaaatgtttggaattcctggttcaatcaaaattttagacaggattaacaagtatgttaaaaaagataaagcaagatcaaaaaattataaagttattatatcaccaccttacactttgttagaaaactttgccaagtccttcaaaaataaaaaaatttcaataagtgcccagaattgttttcacaaaaataactacggttctcacactggtttcgtaagtccttacatgattaaaaaactaggagttaagcacgtcataattggccactcagaaaatcgagaagctggtgaaaataatcatattcttaaagaaaaggttttagcctctgtaaaaaataatttaaatattatcttctgtattggtgaaaataaatatgagaaaagaaaaaaattaactttaaatgttcttaaaaatcaaattagaaaatctttagacaaaaaatatgattttaaaaaaatactgatagcatatgaacctatttggtcaatagggtcgggtaaattaccatcagaaaatgagttaagtaatattatcataaatttgaaaaattttttaaaaatgaattttaacaaaaaacataattttagaatactttacggaggatctgttgacagcaaaagtatacataaatttaaaaaaattaaacatttagatggctttttaattggtggagcatcaaaatcatcgaaaaaatttattgatataataaaaaatttctataaataa

SEQ ID NO: 290356 - DNA, 508 bp, Unknown
  Bacterial polypeptide expressing nucleotide sequence isolated from the Sargasso Sea
agtcccatgatgttaaaatctattggatcaaaatatgttataattggacactctgaaaatagatcaactggagaaactgatttccaaattaaaagtaaaattaattcttctattaaaagtggtttaaatgtaattttttgcataggtgagtcattacaacaaagaaaaaaaaaacttactaacaaaaccctaaagaatcaaattttaaaaggattacctaaaattaaaaaattaaataaaatcttaattgcctacgaaccaatttggtcaattggcaccggagttatccctaatcttagtgaacttgataaaaatataacctttataaaaaatattttgaaaaataatattaaaataaaaaaacctaaagttttgtatggtggatctgttaactcaaaaaatgttaaaaatttagcttccattaagaatattgatggttttttagtaggtggtgcatcacaaaaagcaaataattttattgatatagttaaaaaaactattatttaac

SEQ ID NO: 290357 - DNA, 169 bp, Unknown
  Bacterial polypeptide expressing nucleotide sequence isolated from the Sargasso Sea
tttgattcggaaattaataggttttgatgatgtaattattcaatatggtggatctgttaaacctaataatattgacgaaatcatgtcaatgagtgatatagatggtgtgttagttggaggggcttcattagatccgaatagttttgcgagaattgcaaattatcaataa

SEQ ID NO: 290358 - DNA, 184 bp, Unknown
  Bacterial polypeptide expressing nucleotide sequence isolated from the Sargasso Sea
gttggtgaaacctagagaagaaaacaaaaatgatcaaactagagatatattaaaaaaacaattagaagtagttaaagatattgaattaaataactcattagtaattgcttatgagccagtttgggcaattggcactggaaatactccaaccccaaataatattaatgaaattcataaatttatt

SEQ ID NO: 290359 - DNA, 457 bp, Unknown
  Bacterial polypeptide expressing nucleotide sequence isolated from the Sargasso Sea
tcagaaaataggaaaaatggagaaactgattcaataattaacaaaaaaattcattcagcacttaacgaaaatttaaaaattattttttgtataggagaaaaattagctgataaacgaaaaaaaaatactctaagagttttaagaaatcaattaaatcaaggattaaaaggagtgaaaaaatttgatagtcttataattgcatacgaacctgtatggtcaattggaacaggtattatacctaaaaaatcagaattaagtaaaaatattacaaatatcaaaaaaattttatctaattttaaaaattcaaaaaatatcaaattattatatggcggatctgtaaatcctgaaaattcaaaggaactatcgagaataaaggaaataaatggttttcttataggtggagcatctttaaatttaaaaaaatttattgatataataaaaaaatcaattaattaga

SEQ ID NO: 290360 - DNA, 184 bp, Unknown
  Bacterial polypeptide expressing nucleotide sequence isolated from the Sargasso Sea
tttaaaaaattttttacttaaaaaaattaagattaaaaacccaagggttttatatggtggatctgtaaataataaaaatattgtagatttaaaaaaaataaatgcaatagatgggtttttaataggaggagcatcgcataaaacaaataaatttattgatataataaaaaaaacctttaattaa

SEQ ID NO: 290361 - DNA, 318 bp, Unknown
  Bacterial polypeptide expressing nucleotide sequence isolated from the Sargasso Sea
aaaaaaaaggcgcaacaaaagatattttatatgaacaaattaaaaatagctctccaagagaagagttaaatgacacaattattatagcttatgagccgatttgggctattggaacaggtttagtgccaactttagaagaaattaataatattaatttgtttctaaaaaaagagttaaataactgtaaagttttatatggaggttcagttaaaagaagtaatgctcaagatataaaggatttggatagtgttgatggattacttgttggaggctcatcactaaattcgtcagaatttatagaaatacttaatgcttgat

SEQ ID NO: 290362 - DNA, 361 bp, Unknown
  Bacterial polypeptide expressing nucleotide sequence isolated from the Sargasso Sea
catgagacaacgtaagccgttagtggtcgctaactggaaaatgaatggtagtctggatctggtgcaacagatgtcagatgctctgtctgtgttaaaacaacctctgcctgatattttgatctgccctccggtaatttttctatcctactttccaaaacatgccaattataaattgggtgctcagaatatgagcgaacagctggtcggggcctttaccggcgaaatttcagcagatatgctactcacggctggtgctacccatgtcattatcggtcattcagaacgccgtgctttgtatggtgaattggatgcggtaatcagccagaaagtgaaagtggcggtggatgcaggtttaactccg

SEQ ID NO: 290363 - DNA, 280 bp, Unknown
  Bacterial polypeptide expressing nucleotide sequence isolated from the Sargasso Sea
taatttaagtaaagttattatcgcatatgaacctgtctggtcaattggtactggaattatcccaagtgaaaaaaatttagtaaaaaatattaaatttatcaaagatactctgaaaagatcaaaaaaatttttgaaatcaaaggttttatatggtggctctgtaaaccaaaaaaatataaaaaatttaatgagaatcgataatattgatggttttttgataggtggagcatctactaatgaaaaaatatttattgatataatgaaaaaatcaattatttaa

SEQ ID NO: 290364 - DNA, 337 bp, Unknown
  Bacterial polypeptide expressing nucleotide sequence isolated from the Sargasso Sea
catgacttgtgctgaggctaagtcttatttagaagagtttatacctttaataaaaaacataaatgaagatcgtaaagttgttattgcaccaccttttacagctatttcaaccttttctgaccattctgattttgattatttagatatttctagtcaaaatattcattgggaggaagaaggagcatttactgcagaaatttcccccagaatgcttcttgaacatggtgtctcatatgcaatagttggccacagtgagccaaggaagtattttagtgaaagtgacgaacaattaataaaagagcagtttttgctcaatctagtggacttacaccgatag

SEQ ID NO: 290365 - DNA, 889 bp, Unknown
  Bacterial polypeptide expressing nucleotide sequence isolated from the Sargasso Sea
gatttatcagacacatcgtatgtatttcaggacagcgaccatgctgcagctttgtttaatctggaacagggtggacatatatacagtcgaatctctaatcctaccgtagcagtgctggaggagcgcatagcagcattggagggcggagcaggagcagttgccacagcttcaggacaaagcgctctattctcaacaattctgacactgatgggacagggcaatcacatcgtctcttccgcttctctttacggcgggagtgtaaaccttttcaagcacaccctaccgcgcttcggcattgaaacaacttttgtcaatcctcgtaaaccggaggaatttcgtcaggccatatgtcctgaaacccgtttatgttttggtgagattatcggcaatcccggactggaaattttagacgttccttcagttgctgaaattgctcatgctgctggaatccccctgatgatagacgccacatttaatactccatatctttgcaaacctttggagctgggtgctgaccttgtttcacattcagttactaaatggatgggcggtcatggcgttgcgctgggtggaattgtagtggaaggcggacgctttgattgggaaaaagatggaaactttcccacactcactaagccttatgatggatatcatggcataaattttttcgaagaatttggaccgcaggccttttccatgcgcatgcgatcagaagcaatgcgtgattttggtccggccatgagtccacaaaacgcgttttacctgatacagggcttggaaaccctccctgtcaggatggaaaaacatatcagaaacaccaagctgttacttgattttttgcagaacagtgaagaggtttcctgggtaacacatccgagtatgccagacc

SEQ ID NO: 290366 - DNA, 385 bp, Unknown
  Bacterial polypeptide expressing nucleotide sequence isolated from the Sargasso Sea
ttaaatgtaattttttgtattggtgaaacaatacaagaaaaaagaaaaggaaaaacattttctgtgttaaaaaaacaaattttagatactttagaaagaaaagataatattaataaaattatatttgcttatgagccagtttggtcaataggaacaaataagattcctaaaatttcagagttaagcaaaattatcaaatttataaaaaataaagttaaaaaatctcttaaaaaaaaccatccaaaagttttatatggaggttcagttaacaataaaaatataaggttatttcgctccatacctgacatagatggttttttaataggtggagcctctcaatcttcaaagaaatttattgatataataaaaaattactataaatagc

SEQ ID NO: 290367 - DNA, 751 bp, Unknown
  Bacterial polypeptide expressing nucleotide sequence isolated from the Sargasso Sea
atgaagtattttataggtaactggaaaatgtttggtattccaagctctttcaaaattatagaaagaataaatagctttctacaaaaagataaaactaacaaaagaaagtacaaagctataattgctccaccttttactttactgcaagatttttcaaaaaaatgtaaaaataaaaaaattattatttcagctcaaaattgttaccataaagatttgtttggtgcccatacaggaagtattagtccctttatgatcaaaaaaatgggagtgaaatatataataattggacattccgaaaatagagcatcaggtgaaactaataaagaaattgaagaaaaaattttcttttctcttaaaaataaatttaatatcattttttgtattggtgagagcaaacaagaaaaaaagaataaaaaaactttgtcagttttaaaaaaacaaataacttcagtaataaaaaaaaaatatgacttgaaaagaattttatttgcttatgaaccagtttggtctatagggagtggaaaagttccttcaccatttgaattaaggagaatagccattattataaaaaattttattaaggtaaaatttagcaaaaatcaccaaccaaaatttctatatggaggatctgtagataaaaaaatcattaatagtttgaaatctattgaagaattagatggttttttggtaggaggtgcttccaaatcctcaaaaaattttattgatataataaagaatttctataaataac

SEQ ID NO: 290368 - DNA, 658 bp, Unknown
  Bacterial polypeptide expressing nucleotide sequence isolated from the Sargasso Sea
tatgagatattttattggaaattggaaaatgtttggggtgccaaaatctatcagtattcttaacaaagttaattcatactattcaaaagacaaaaatagaaacaaatacagagttataatcacccctccatatactctaattgaaagttattctaaatatttcaaaaataagaaaatttcgataggcgcccaaaactgctatcagaaagaacaattttcctcaaatactgcagccgtaagtccttacatgcttaaaagtgtaggcgctaaatatactttagtaggtcattcagacaatagaggagaaggagatactgacacaatgctaaaagataaagttagatatgctttgaaaaataatttgaaagtagttttttgcattggtgaaaataaaacagaaaaaaaaaataaaaaaacactaagtgttttaaaaaggcaattgacaaaagtgttagaaaaaaaatttaacaagaataatataatagttgcttatgagcctatttggtcaattggcactggaaaaattccaactgcagatgaattaaaaaaaactacaattcatattaaaaaagttttaaagggaatatttaaaaaaaatagtctagcagtgctttatggtggctccgtagatggcagcaatgttgagatgtttaaagaa

SEQ ID NO: 290369 - DNA, 265 bp, Unknown
  Bacterial polypeptide expressing nucleotide sequence isolated from the Sargasso Sea
tacgaacccgtttgggctattggtacagggttatcagcaagcagtcagcaagcacaagaaattcacaaactcatacggacaatcctgagggataatatttcatactctgatgctaacaatatacggattatttatggaggtagtatgaatgcgtctgtaatactaggactattatccgaaccagatattgatggcggtttagttgggggagcttcactacaaggaaaacagtttgcagagcttataaaccttgccatacagtaaa

SEQ ID NO: 290370 - DNA, 394 bp, Unknown
  Bacterial polypeptide expressing nucleotide sequence isolated from the Sargasso Sea
cactccataaatttgtttggcgaaagtattgagcaaagaaacagtggtaagtatttggattacataatcaaacaagttgatagtgcaccaaaaggacttagaaaagataaggttgatgagatagtttttgcttatgaaccaatatgggcaattgaaccaggggagacggcatcattactaaatataatagaagtagtttctgaagttaaaaaatttatcaagtccaagcccttttataatgaagaaaaaataaaattcgtatacggaggtagtgtcacaccaaataattcagaggaaattttaaactctaatattattaatggtgccttggtaggtggagcatcacttgatgtagaacaatttgtaaaaataattgaatcaattgaattatgaa

SEQ ID NO: 290371 - DNA, 665 bp, Unknown
  Bacterial polypeptide expressing nucleotide sequence isolated from the Sargasso Sea
tccttgtattttctgtcctccaacttgttatctagaatatgcaagaagattaattgatgaaaatggttaccagataaaaattggatcacaaattgtaaatcatacctttgaacacgagtctttaactggcggaataagtacaacaatgctcaaagatttaagcgttgagtatgtgcttgttggtcactctgaacaaagaaattttttgaaggaaagcaatattgtaattactaagaaaatagaaaaagctttagatgatgagatgtcgataatttattgtattggcgaagatattgatactaagaataaaaatgaaacttatttattcttgagtgagcaattagacgtattagaccaactcgaatctactcaccaagataaacttaagtcgattacagttgcctatgaaccgatatgggccattggatcaggacttaatgcagagaaagaccatattgaagaaacacataaatttataaaaaaatatataaatgatcatctcgggtggagtcatctagatatttatcctgcagttctttacggcggtagtgtaaacttggataattgtgaagaaataatttctgcaaatgatgttgatggtcttttgattggaggagcttccttaaattcagaaactttttataaaatatataatttaagctaat

SEQ ID NO: 290372 - DNA, 331 bp, Unknown
  Bacterial polypeptide expressing nucleotide sequence isolated from the Sargasso Sea
agaaaaaagaaagaagattacgaaaagggttttagctaaacaaattaagataggtttacaaaaagttaaaagaaaggaaagggtgcttatagcatatgagccggtatggtctattggaactggtttaatacctaaatctggtgatttattaaaaataataaaatttattagagaaaaaacaaaaaaaaataaagttttatatggaggttcagtaaattcaaaaaacatatcagaattaaagaatgtttttaacatagatggttttttaataggaggcgcgtctcaagaagcaaaaaaatttattgatataattaaaaaaacatatagttaa

SEQ ID NO: 290373 - DNA, 418 bp, Unknown
  Bacterial polypeptide expressing nucleotide sequence isolated from the Sargasso Sea
atgaatccaaaattttacaaaccggaaacgctgagtttgcatgggggacaacttcctgatccggttaccggtgcccgggcggtcccgatttaccagaccacctcctacgtttttgaaaacagtgaccaggcggctgccctatacaatctggaacagggcgggcatatctacacgcggattaccaatcctacggtagcggttctggaagaaaggatttcggctcttgaaggcggtagcggtgcgatcgcaaccgcttcaggccaaagcgcgctttttctgactttgatgacgctactggatcagggcagtcacattgtttcctccacctgcctctatggcggcagtgtcaatttactgaaacacacgttgccacgtttcgggattgagacacagttttgttcatcccccgggatctgaa

SEQ ID NO: 290374 - DNA, 238 bp, Unknown
  Bacterial polypeptide expressing nucleotide sequence isolated from the Sargasso Sea
tcattggactggtgttgtaccaaattcttttgaattagataaaaatatatactttattaaaaatattctaaaaaataaaatgagagttaaaaatcccaaggttttatacggaggatctgttaattccaaaaatgttaaaaatttagctttaataaagaatattgatggctttttaataggtggtgcttcgcaaaaagcaaataattttattgatatagtaaaaaaaacgattatttaa

SEQ ID NO: 290375 - DNA, 748 bp, Unknown
  Bacterial polypeptide expressing nucleotide sequence isolated from the Sargasso Sea
ttaaaatatttcgttggtaattggaaaatgttcggcaatatagctgatttaaaaaaaatttaccaaattcatcgtttttgttcttctaaaaaatttaaaacaaaaaatagagttgttatttgcatccctaataccctcctgtaccttttttcaaacaagctaagatcaacctgtatttctgttggtgcacaaaattgtcatcatcatgaaggctatggaccatttacaggttcaattagtgcttcaatgctaaaaaaagttggagcaaagtatattattttaggccactcagaaaatagagcagaaggagatacaaataaaatgattttaaaaaaaatccaaacagctcttaaaaataatcttaaagtaattttttgtattggagaaactttaaaagaaaaattaaatggaaaaactttaacaactttaaaaaaacagttaaaatcttctattaaaagtaaatttaatgaaaaaaatattattatcgcctatgaacctgtttggtcaattggcacaggaagaacaccaaagaatcatgatattgaaaaaaatttaaaatttataaagaaagaatttagaaaaattacaaaaaaaaaatattcaccagcagtgctttatggcggatcagttaatagaaaaaatattcggaatttttcttctaatcgtgaaatagatggatttttgataggtggagcttcccagtcatcaaaaaaatttattgatataataaaaaattactataaataga

SEQ ID NO: 290376 - DNA, 271 bp, Unknown
  Bacterial polypeptide expressing nucleotide sequence isolated from the Sargasso Sea
attcattgcaattgaacctccagaattaattggaacaggaagagcaatttctactgaaaaaccagcattaattacaaatgcagtgaaagcagttagttcggctaaaaattctacaaaattgttatgcggtgcaggaattgtttcaggtcaagatgtttcaaaagcaaaagaactaggatctaaaggaattctagttgctagtggaattgtcaaagcaaagaactgggaaaaaattatctcagaattttgtaagggtttaaaaagccagtaa

SEQ ID NO: 290377 - DNA, 839 bp, Unknown
  Bacterial polypeptide expressing nucleotide sequence isolated from the Sargasso Sea
aacgcatcagccaccatctcgagtggggatgggcagacgaccctcgatgggggcaccagcagtgtcaacattaccgaaggtggaaatgatgatgtagcactcgcgccgccctcaacgagcacacagatggttgtaacagcaggcgcaggatcctccggtactgccacccttgccgagggaggcacgacctctgcaaccatcacggctagtaacgcaacagccaccttggctagcgccgacggccagacgaccctcgatggcagcaccagcaatgtaaatattacggaaggtggaaacgacgatgtcgtcattgctcctccatcaaccagtactcaaatgggtgtcacagctggagcaggatcttcgggaagcaccacactcggtgaaggggcaacaacctcagcgaccattacagcgagtgccgcaactgctaccatctcaagtgcagatagccaaacaactctcgacggtgggactagtagtgtgaacatcactgaacgtgccgatgacgatgttgcgattgcaccgccttctaccacgacacaactaactgtaactgcaggtgctggctcgtcagggaccacaaccttctctgaaggcagcacaacttccgctacgataaccaacagtaaagctacagccaccgtatcaagtgcagacagccagacaactcttgacggcagcacaagtaacgtcaccatcacggagagttctgacgacgatgttgccatcgcgcctgtgtccaccaccacacaactcactatcaccgccggtgccggctcaacaggaaccgcgacactctctgagggtggtaccacctctgcgaccatcacagtcag

SEQ ID NO: 290378 - DNA, 349 bp, Unknown
  Bacterial polypeptide expressing nucleotide sequence isolated from the Sargasso Sea
attgggagaaccattaaagatttataaatcaaaaaaaaccaaagtttttttaaaaaaacaaatcaataaaatatttaaaaaatcaaataactatgaagaagtcgtccttgcttatgagcctctatggtcaattggcactggattaacacccaaattatcagaaattgatgatattttgggatttttatcaaaaatattggaaaattattcttttaaaaaaataaatattttatatggtggttcggtaaatttgtcaaatattaaagatattttaagtttgcaaaatttaaacggagttttagtaggctcggcttctacaaaatcttcatttattaaacactttaaatga

SEQ ID NO: 290379 - DNA, 681 bp, Unknown
  Bacterial polypeptide expressing nucleotide sequence isolated from the Sargasso Sea
cttttaattcactacataaagtctcaaaattttttaaatcctttaaaaaaaataaattagtaaaaataatttattgtcctccaaatacattaattcgtccaatgtccagaaagcttaaaaacacacgaattgatgttggtgcgcaaaactgtcatgagaacaaaaattatggtgccttcactgggtcagtaaacccaatgatgttaaaaaatgttggagcaaaatacgttataataggacattcagaaaatagaaaagccggtgagactaataaattaattaatcttaagattaaaagttcattagattcaggtcttaaagtaattctttgtattggagaaactttacaagaaaaaaagaaaaaaattactaaaaaaattttattaaaacaaatcaaatttggtttgtataaaattaagaataaaaaaaatgttttaattgcctatgaaccagtttggtccattggaacaggtttagttcctaaagaaaaagacctttttgaaataatagattttgttaaaaaaaatattaaaaaatgtaaagttctttatggtggatcagtaaatccaaaaaatattcatttattaaaaacaataagtaatattgatggatatttaattggaggagcatctcaagacccaaacaaatttattgatataattaaaaaaacatataattaac

SEQ ID NO: 290380 - DNA, 330 bp, Unknown
  Bacterial polypeptide expressing nucleotide sequence isolated from the Sargasso Sea
aaaaaagaaaaaaaattaccaaaaaaattttgtcaaagcaaattgctttgtgtttacaaaaagttaataaaaaacaaaatattataattgcttatgagcctgtgtggtcaattgggacaggaataatacctaaactagatgacctattcagtactattaattttataaaaaaaaaagttagaaatatcaaagttttatatggtggttcagtaaatccaaaaaatataaatgaattaaaattaataaaaaatatcgatggatttcttataggaggggcctctcaagatcctaaaaaattcattgatataatcaaaaaaacatataattaat

SEQ ID NO: 290381 - DNA, 591 bp, Unknown
  Bacterial polypeptide expressing nucleotide sequence isolated from the Sargasso Sea
tgctcaaattatgtctgatattaaggccgaatgtaggatggttgctgtagtatcaccatttgatctgtcctcggtagtatccgctgcaccccaattggaagtttggtgccaacaccttgatccaataggattcgggtcaaataccggatggttgcatccagaaactgcaatcgatagaggagctagtgggacactgattaatcacgcagagcataaagtaagtatcgaacatgttgccatgctaatagagcaggttcctgaagagtttgtggtttgtgcttgtgcggcagacgtggatgaggcgagaaaattagcctctttgaatcctgaatacgttgcagtggaaccaccggaactgattggtggagaaatttctgtgacaagtgccgatccagagatcatcaacagtactctacaggcagttaaggaaatctcgggctcagttggagtcctctgtggagcgggtgtcaaagacggggatgacgtgactaaggcaattcatctgggcacaaggggagttctcctagccagcggggttactaaatctgaagacccaaggaaatctctagaaggactagtgcgaaatctata

SEQ ID NO: 290382 - DNA, 565 bp, Unknown
  Bacterial polypeptide expressing nucleotide sequence isolated from the Sargasso Sea
atgtttatcataaattgtaaaaattatgaagaaatagcgggagaaaagattgtcaaaatggcaaaaattacagagaaaatttctaaaaagtataaagtgccaattgcaattgcacctccgcaccacctcattccattaattacgaagtttaagattacagttttagctcaacacgtagatgataaaaaagttggaagtaccacaggttttatagttccagaaattgttaaaaaatcaaaaattaatgggtctataatcaatcatagtgaacaccgaatttctgaaaaagagattatctcattagtgaaacgtttgcaaaaattgaaactgaagacggtattatgtgtaaagaatgtaaatgaggcaaaaaaatatgcaaaattaaatccaacattcattgcaattgaaccaccagaattaattggaacaggtagagcaatttctactgagaaaccagcattaattgtaaatgcagtaaaagcagttagttcatctaaaaattctacaaaattattatgcggtgcaggaattgtttctggtcaagatttcaaaagcaaaagaacta

SEQ ID NO: 290383 - DNA, 176 bp, Unknown
  Bacterial polypeptide expressing nucleotide sequence isolated from the Sargasso Sea
aataacttttattaaaaaagaaaataaaaaatataaagttttatatggaggatctgttaatccaaaaaatattaatgaattaagatttgtagataatattgatggttttttgatcggtggagcatcacaagactcgaaaaaatttattgatataatcaaaaaaacatataattaag

SEQ ID NO: 290384 - DNA, 604 bp, Unknown
  Bacterial polypeptide expressing nucleotide sequence isolated from the Sargasso Sea
atgtcaaaaaaaataatcgcaggtaattggaagcaaaatggaaacatcaagtcaagtattaagcttgcacaagatattattcgcggagtaaaaaaaaataatattaaacacgaagtaataatatttccgccaagcatttatctgttatcaataaaaaatattaataaaaaagaaattattaatattggttcccaaaatgtatctgcatataatgatggagcactcactggagagatttcagctacaatgttgaaagactcaaaaattcaatattgtcttgttgggcactcagaaagaagacatatcctagatgaaaataacttatctctatgtgagaaggtctcaaggcttcgtgaaaataatattaaagtaatatattgtattggagagactctaaaagagtataaaactaaaagaactaaatacatcctcaataaacaattacaatctctatttaaaagcttaaataaatcaaaaagatccaataaagtaattattgcttatgaacctgtttgggcgataggcactggtctgattccatcagccaaagaattgtctaatacttttggttatatatataatactgttaagagatataacgaat

SEQ ID NO: 290385 - DNA, 642 bp, Unknown
  Bacterial polypeptide expressing nucleotide sequence isolated from the Sargasso Sea
ttaatagctggttttcagattttaaaaacgactctcaaaaccaaatattattagcccctccatcagtatatttagattttttttccacaaaaaaacttaactttgagttgtgttctcaaaatgtttgtgaatttgaagaaggtccgttcacatctcaacatactgcttctatgcttttggatttaggtgtaaaaagttgcattataggccattcagaatctagaaagctgctaaaggaggaagatcatcaaatattcgagaaatttcaaaaattaaatagtaaaaaaataagacctattgtttgtatcggagagccattagaaattagagaaaataataaagttaaagactatattagacagcaaacagaaaaatttcatgattttgaagaggagataatttttggttacgagccattatgggctataggaacaggcaaagtaccaaaattagatgaaattgaagaagcagcaaaaactataaaagaattttgtggagaaaataagaaaattctttatggtggaagcataaatagtagtaattgtaaggatatcttaaaacttaaagaaattgatggtgctttggtgggaggagcttcacttaatcctaaagaatttgctatgatagcgcagtcatgctgat

SEQ ID NO: 290386 - DNA, 724 bp, Unknown
  Bacterial polypeptide expressing nucleotide sequence isolated from the Sargasso Sea
tatgtattttattgctaattggaaaatgtttggaggtttgaattcgctaaattcactgcataaaatagttaaattttttaaaactttcaaaaaaaacaagtctatcaaaataatttattgtccacctaatatattaattcgaccaatgtcaaaaaaactcaaaaactctaaaattgaagtgggtgcacaaaattgtcacgaaaatgatacttatggagcattcactggatcagtaaattcaatgatgttgaaaaatgttggagctaaatatgtaataattggacattcagaaaatagacaatcaggagaaaatgataaattaattaatttgaaaataaaaagtgctttaaattcaggactaaaggtaattttttgtattggagaaactttaaaagaaaaaagaaaaaaaattactaaaaaagttttaaatttacaattaagaaagggtttaaacaaaattaaaaataatagaaatattataattgcttacgaaccagtttggtctataggcactggtttaattccaaaatcaacagaattatcagatacaatcgattttataaaaagtaagataaaaaaaaataaagttttatatggtggatcagtaaatccgaaaaatattattcagttaagatctattgataatattgatggatttttagttggtggggcttctcaagatgcaaaaaaatttattgatataatcaaaaaatcctttaattaa

SEQ ID NO: 290387 - DNA, 846 bp, Unknown
  Bacterial polypeptide expressing nucleotide sequence isolated from the Sargasso Sea
aatggaagcaggtgatgaatttattgcctcaagaaatctttatggtggttcagttactcagttcggagtaagctttccaaaacttggctggaaatgtaattttgttgacccaactgatcctgaaaacttcgaaaaagccatgaatgataaagttaaatttatcttctgtgaaggtgttgctaatcctggtggaattattcttgatttagagaaaattgctgatattgctcataaaaatggtgttttactaatcgtagataatactcttgcatctccatatttattgaggccttttgaatggggtgccgatttagttgtgcattcaacaaccaaatttataggcggtcatggaaataccatgggtggtattttaattgaatctggaaaaattgattggcataaaaatgacaaatacccaggcatgtctaaaccagatcaagcctatcacggtttgacctttgcagaaacttttggcgatttcggatttaccatgaaagcaagaatggttggattaagggattacggatctacgcttagtccacaatctgcttggaatttactgcaaggagttgaaactcttccattgagaatggaaagacattgctctaatgcacaaacagttgctgagtggttggaaggtcattcaaaggtatcttgggtttcttaccctggtctaaagtcaaataaattttatgatcttgcaaataagtatctcccaagaggtaaaggtgcagtttttacttttggagtaaagggaggctatgatgcaggagttaaattaattgactctgttgatctgcactcaaatttagctaatataggcgatacaagaagcctaattttaca

SEQ ID NO: 290388 - DNA, 595 bp, Unknown
  Bacterial polypeptide expressing nucleotide sequence isolated from the Sargasso Sea
ttttgtagataaaacaaaaaattcaaatattcagatcggggcccaggattgtcatataaattcaaattatggaccgtttactggagctataagttcaaagatgattaaagatttaggagcgaaatttgttataattggacactctgaaacaagagaggaaaatgataataaaaaaattaatttaaaaataaaatctgcacttaatgaaaaattaaatgttattttttgtataggtgaaaaactaattgataaaaaaaaaaaaagaacgaattctgttttaaaaaaacaattgctagagggtttaaaagatttaaataaattaaataaagttataatcgcatatgaacctgtatggtcaatcggtacaggaattattccaactgaaaataatctaataaaaaacattaaatttataaaatatactttaaagagatcaaaaagatttccaaaatcaaaggttttgtatggaggctctgttaatccaaaaaatataaaaaatttaatgggaatcgataatattgacggttttttgataggtggtgcatccattaatgaaaaaatatttattgatataatgaaaaaatcaattaattag

SEQ ID NO: 290389 - DNA, 754 bp, Unknown
  Bacterial polypeptide expressing nucleotide sequence isolated from the Sargasso Sea
tatgacaaacaataatatctattttgtagcaaattggaaaatgtatggaaatttagcatctaaaaattctataaataatgtaatcaaacttacaaaactgaaaaaattcaaaaaaataagaattgtatattgtcctccttatactttactgaatgtttttgttaaaaaaacaaaaaatactaaaatttatgttggtgctcaaaattgtcattataaattagattatggatcttttactggttttataaatgctaaaatgatcaaagatacaggatcaaaatttgttattgttggtcattctgaaagtagaaaagagggtgatactgataaaaaaattaatttgaaaattaaatctgctttagattcaaatttaaaagttattttttgcataggtgaaacaggctatcaaaaaactaacaaacaaacatacttaactctacaaaaacaaattacaagtggtctaaaaaacataaaaaaatttcaaaatataataattgcttatgagccagtttggtctattggaagtggtattgttcctaataataagctcttaacaaaaactattacttttattaaaaaaacattgaaagaaaaaattaaaaaagaagatattaaaattttttatggaggatcggtaaatacaaataatgttaaaaaattaagaaaaattaaacaaatcgatggttttcttgttggaagtgcttcactcaaagcaaaaaaatttattgatataataaaaaaatcaattatttaa

SEQ ID NO: 290390 - DNA, 859 bp, Unknown
  Bacterial polypeptide expressing nucleotide sequence isolated from the Sargasso Sea
gaattgggaaccatccagtatggtgggagttgctctagtgacaatgcatcagcccaagcggacaacaatactgttacttttaatctccttgcagacggaaactacagtaattgtatgatctcagtaactgacttggcaggaaatttaagtgacaatctaagtatcagttccttcactattgatacgactaagcctttattgagagaaattgaaagtgtagctaccaatacaaatgataacactccaacttatacattcagttcttctgaattgggaaccatccagtatggtgggagttgctctagtgacaatgcatcagcccaagcggacaacaatactgttacttttaatctccttgcagacggaaactacagtaattgtatgatctcagtaactgacttggcaggaaatttaagtgacaatctaagtgttaaagcgtttaccatagacactttggctcctatattagtttctattacccttgataataatactgctatttcttcagacaatttttcgattttggctgaaggatttaaagccaccttcaatgaggccatgaaagtttccactatgcaggttaatgatggaagcactggtgaaattaaaatcaactgcaattccgctaataccctacgtcttggtgcagacaacatcacaactcccggaaaaagccaatgcagagaaatggctcaaatgtcttcgagtgacaatcttagctggacctccttgatcaggacttttggcaacaataattgcccagtgactgataaccttactggaagtccttcgggtacatgtgctgccacccttgatcctgggaccaagtatcaattgatactgacttcaaggtatgact

SEQ ID NO: 290391 - DNA, 220 bp, Unknown
  Bacterial polypeptide expressing nucleotide sequence isolated from the Sargasso Sea
tcctaaaaattcagaattaattaagaatataataaatatcaaaaaaattttatataacttaaaaaaattaaaaaatgttaaaatactgtacgggggctctgttaatccaaataacgctaaagaactagctcaaataaaagatataaatggttttttagttggtggagcatccttaaacccaaaaaaatttattgatataataaaaaaatcaattaattag

SEQ ID NO: 290392 - DNA, 749 bp, Unknown
  Bacterial polypeptide expressing nucleotide sequence isolated from the Sargasso Sea
catgactaaaagaaaaaatgtagatgatgtaacctcaaatattccaggtagtgaggggcaatcaagaaaatacggtatgtcaactttagctgttcacgctggagcaagacctgaccctgttactggtgctcgaggcaccccaatatatcaaacaacttcatttgtttttgatgatgcagagcatggagcagaattatttaaccttcaaacatttggctatgtatattcgagaatgaccaatccgacggtttcagtctttgaagaaagagttgcacaacttgagggtggtagaggtgcagttgcaacatcctcagggcatgcggcacagtttatagctgctgcaactcttatggaagcaggtgatgaatttattgcttcaagaaatctttatggaggttcagttactcagtttggagtaagctttccaaagcttggttggaaatgtaattttgtagatccaactgatcctgcaaattttgaaaaagcaatgaatgataaagtcaagtttatcttttgtgaaggagttgcaaatccaggtggaattattcttgatttagagaaaattgctgatattgcccataaacatggtgttttactaattgttgataatactcttgcatctccatatttattaaggccttttgaatggggggctgatttagttgtacactcaacaactaaatttataggtggacacggtaacaccatgggcggtattttaattgaatctggtaaaatgattggcataa

SEQ ID NO: 290393 - DNA, 442 bp, Unknown
  Bacterial polypeptide expressing nucleotide sequence isolated from the Sargasso Sea
atgaataaaaaatacattatttttaattggaaaatgaatttcaccgttagtgaaagcattgaattttcaaatgacatattaaaaccaatctcaaattttaagaacgaaagatttgagattgttatttgcccatcatttatgagccttccctttaactatcaaatattgtctaacctagttaaatttggagcccaaaatatatcacataatcatggcgaaaaaggttctttcacaggtgaaatatctgcaaatatggtatctgactatgctgagtatgttattttgggtcactcagaaagaagaagaaacttgcttgagactaatagaaatattgacgataaaagaaaactttctatagaaaatggactaaaacccattatttgtattggagaaaatcttgatcttagagattcaaataaatatttagaatttttgtccaaac

SEQ ID NO: 290394 - DNA, 565 bp, Unknown
  Bacterial polypeptide expressing nucleotide sequence isolated from the Sargasso Sea
cttggagcgcaaaactgtcattttgaaatttcaagcggcccatttacaggctctattagtccaagtatgttaaaaagaataggttcaaattatgttattattggacattcggaaaatagaagtattggagagtctgactttcaaattaacaaaaaaataaaatcatcaattaaatctggtttaaaaataatattttgtattggtgaaacattaactcaaaaaaaaaataaaatgacaaataaaattttaagaaaacaaattttaaaaggattatttaaaattaaaaatttaaacaaaattttagttgcttatgaacctgtttggtcaattggtacaggaattgtacctcatacttttgaactagatacaaatatatcctttattaaaaatattttaaaaaataaacttaaaattaaaaatcctaaagtcttatacgggggatctgttaattcacaaaatgttaaaaatttagcttcaatcaagggtattgatggctttttaataggtggtgcctcacaaaaggcaaataattttattgatatagttaaaaaaactattatttaac

SEQ ID NO: 290395 - DNA, 487 bp, Unknown
  Bacterial polypeptide expressing nucleotide sequence isolated from the Sargasso Sea
cctcaatgcttgaaggataataatatagatttttgtttggttggacattctgagcgaagacaatattttgctgaaacgaatgataatgtaaatattaaaagcttaaaccttattgaggaaaatattataccagtgatctgtattggtgaaaccttagagcaaaaagaaaataacttaacggaagaaatcttatttacacaaattaaggatggtattcccaaatcggcaaaccatcaaaatgctttaattgcttatgaaccagtttgggcaataggaactggattaaccccaactttagatgaaataaatcaagtacacgaattaattaaaaattttgatactaaatttggaagttttaaggttctttatggaggttctgttaaatcttcaaattcaaaagaaataaatgaattaaaacaagtagatggctgcttaattggtggagcgtcattaaaagttgatgaattcaatacaattatttcttgat

SEQ ID NO: 290396 - DNA, 544 bp, Unknown
  Bacterial polypeptide expressing nucleotide sequence isolated from the Sargasso Sea
atgcccaacccaaactatggaccttttactggagctataagctcaaagatgattaaagatttagggggtaagtatgttataattggacattcagaaacaagagcagaaaatgataataaaaaaattaatttaaagattaagtctgcactcaatgaaaaattaaatgttattttatgcataggtgaaaaattgattgataaaagaaaaaatagaacaaaatatgttttaaaaaaacaattacttgaaggtttaaaaaatttaaagaatttaaacaaagttataattgcttatgaacctgtttggtcgattggtacaggcattattcctagtgaaattgatttaaaaaaaaatattagatttataattaacaccttgaagatttcaaaaaaatttacaaaatctaagattttatacggaggatccgtaaacccaaaaaatattaaaaatttaatgagaatcgataatatacatggttttttgattggtggagcatcaactaatgaaaaaatatttattgatataatgaaaaaatcaattaattagg

SEQ ID NO: 290397 - DNA, 447 bp, Unknown
  Bacterial polypeptide expressing nucleotide sequence isolated from the Sargasso Sea
gaaatatgggcgatacagacagtcaaataaataaaaaaataaattcgtcaataaaatctggtttaaaaataatattttgtattggtgaaacactaaatcaaaaaaagaagaaaaaaacaaatcaaattttaagtaaacaaattttaaaaggactatttaaaataaataatttaaataaaattttaattgcatatgaacctgtttggtcaattggtactggcgctgtacccagatcttttgagttagaaaaaaacataacttttattaaaaaaattttaaaaaataagtttagaattaaaaatcctaaagttttatatggtgggtcagttaatcctaaaaatgctaaaaatttagctgcaataaacaatattgatggttttttaataggaggagcctcacaaaaggcaaataattttattgatatagttaaaaaaactattatttaac

SEQ ID NO: 290398 - DNA, 703 bp, Unknown
  Bacterial polypeptide expressing nucleotide sequence isolated from the Sargasso Sea
gatgtttggatcagttaaattagttaattcattaaataatataataagttactcaaaaaaaaacaaacagaaggctaaaattgtatattgcccaccttatactttgcttaaatcttttatagataaaactaaaaattcgaacattgagataggagcacaagattgtcatataaactcagactatggaccgcatactggagccataagctcaaaaatgattaaagatttaggagcgaaatttgttataattggacactctgagacaagagaagaaaatgataataaaaatattaatttaaaaataaaatctgcacttaataaaaaactaaatgttattttttgtataggtgaaaagttaattgataaaaaaaaaaataaaactaaatttgttttaaagaaacaattacttgagggactaaaaaatttaaatgaattaaataaagttataatcgcatatgaacctgtttggtctattggtacaggaataattccaacagaaaataatctaataaaaaatataaaatttatcaaagacacattgaaaagatcaaaaaaatttttaaaatcaaaggttttatatggaggctctgttaaccctaaaaatataaaaaatttaatgagaatcgataatatcgatggttttttgataggtggagcatcaactaatgaaaaaatatttattgatataatgaaaaaatcaatt

SEQ ID NO: 290399 - DNA, 427 bp, Unknown
  Bacterial polypeptide expressing nucleotide sequence isolated from the Sargasso Sea
attaaattaaccagattattagaaaatgaaataattccaattttatgttttggtgaaagtctggaacaaagatcagaaggttcatatttagaatttatcaaaaatcaaataaatgaaggtttaaaaggtgttagaaaagacaaggttaataagttagtactagcttatgaacctatctgggcaattggcactggtgaagttgcatctatagaaaatattgttgaagtattagattttgttaaggacttagtttctgataagtcttacttttcagatgaaactgtaaaattaatttatggtggaagcgtctctccagataattcttctgaaatattaaacactagtattgtagacggtgcattagttggtggagcatctctagatgcagataaatttgttgatattatcaaaagtgttaatttatgaa

SEQ ID NO: 290400 - DNA, 758 bp, Unknown
  Bacterial polypeptide expressing nucleotide sequence isolated from the Sargasso Sea
aaacaaatttaaatattttattggtaattggaaaatgtttggcgattttagtgactttaaaattattagtaaaataaaccaattcatttataggtccagaaactcattaaaaaaaaggaaaattgttttgtgtgtgcctaatactttaatacactattttaataaaaaattgatttcaaaatttatttcattaggggtgcaaaattgtcaccaccaagaaggctatggacccttcacaggatctatcagcgcatccatgttaaaaaaagctggagcccaatatataatattaggacattctgaaaatagatctgaaggtgaatcacataaactaataaaaaaaaaaattatttcatctctaaaccaaaatttaaatgtaatttactgtataggtgaaactttttatgaaaagaaaaaaaataaaacttttaatgttcttagaaaacaaattaaaagttccctgcaaaaaaattttaatattaataaaatttttattgcttacgaacctgtttggtctataggaacgaataaaattcctaaatctatcgaattacaaaaaattattatgtttataaaaaaagaattaaaaaaaattttcaaaaataagaaaagtcctacagtcttatatgggggatctgttaatcctaaaaatataagatttttttcttcttttcatgatcttgatggttttttaataggaggcgcgtcacaatcatcaaaaaaatttattgatatagtaaaaaattactataaatagg

SEQ ID NO: 290401 - DNA, 564 bp, Unknown
  Bacterial polypeptide expressing nucleotide sequence isolated from the Sargasso Sea
tatgatttttgtagctaactggaaaatgcatggcaattttaatgatatttcaaaggtaaaaactgttttaaatttgattaaaaataaaaagtataaaaagattaagataatttattgtccaccatttacattgattaaatccttttcaaattattttaacaattctaaatttaatataggtgcccaaaactgttattataaaagtgattatggtccatacacaggaaatgtgaatgcaaagctcatcaaatctgcaggtgcaaaatacattatattaggacattcagaaaatagaaatgagggagaaacagatttgctaatcaaccaaaaaattaaatctgtattaaaggaaaaattaagtattatattttgtgttggtgaaacattacatgaaaagcaaaaaaaaattacattccaagttttaaaaagacaattatccaaaggtcttaaaggtataaaaaatataaataaaattattattgcctacgaacccgtatggtctataggttcaggaattgttccttcaagaaatgaattagaaaaaaatattaaaaatataaaaaa

SEQ ID NO: 290402 - DNA, 317 bp, Unknown
  Bacterial polypeptide expressing nucleotide sequence isolated from the Sargasso Sea
aaaaagacaaattatcaaaggtctgaataaagttaaaaaacttaataaaattataatagcttacgagccagtatgggctataggaacaggtgttatcccaaaaattgaagatctaaaaatgcaaatatataaaattaagaaaattataaaaaaggagtttaaaaaacaaaatccaaaaattatttatggaggatctgtgaatagcgaaaatattgataagttaaataaaatagacaatataaatggatatttaatcggaaaatcatcccaaaattcaaaaatatttattgatatcataaaaaaaacaattaattaaa

SEQ ID NO: 290403 - DNA, 484 bp, Unknown
  Bacterial polypeptide expressing nucleotide sequence isolated from the Sargasso Sea
ataggagcaaactttgtaattttaggtcattctgaaatgagacataatggtgatacaaacaaaattattaataaaaaaattaaatctgcgattcaatctaaattaaaagttatactttgtattggtgaaagccatgttcaaaaaagaaataataaaacccttaatattcttaagagccaaatattaaattgtttaaaaaatattaaaatttcaaaaaatatattcattgcctatgaaccagtatggtctattggcacaggcaatactttatcaaacgaagaactagctaaaataataaaaaagattaaatatatatgttataaaaaattcaaaaaaaatgtaaaaattttttatggaggatcagtcaatcctaaaaatataactaatttaaaaaaaaatcaacttatagacggttttttggtaggtagcgcatcaagaagctcaaacaaatttattgatatcataaataaatcaattaattaga

SEQ ID NO: 290404 - DNA, 1264 bp, Unknown
  Bacterial polypeptide expressing nucleotide sequence isolated from the Sargasso Sea
tatgtcaactttagctgttcatgctggagcaagacctgaccctgttactggtgctcgaggcaccccaatatatcaaacaacttcatttgtttttgatgatgcagagcatggagcagaattattcaaccttcaaacatttggctatgtatattcgagaatgaccaatccgacggtatcagtctttgaagaaagagttgctcaactagagggtggtagaggcgcagttgcaacatcctcagggcatgcagcacaatttatagctgctgcaactcttatggaagctggtgatgaatttattgcttcaagaaatctttatggaggttcagttactcagtttggagtaagctttccaaagcttggctggaaatgtaattttgtagatccaactgatcctgcaaattttgaaaaagcaatgaatgataaagtcaagtttatcttctgtgaaggcgttgcaaatccaggtggaattattcttgatttagagaaaattgctgatatagcccataaacatggtgttttactaatcgtagataatactcttgcatctccatatttattgaggccttttgaatggggcgctgatttagttgtacactcaacaactaaatttataggtggacacggtaacaccatgggtggtattttaattgaatctggtaaaattgattggcataaaaatgataaatacccaggaatgtctaaaccagaccaagcctaccatggtttaacttttgcagaaacttttggcgattttgggtttactatgaaggcgagaatggttggcttacgagattatggatctacgctaagtccgcaatctgcttggaatttgctacaaggagttgaaactcttcctttaagaatggaaagacactgctcaaatgcacaaactgttgctgagtggttagagggtcattccaaggtatcttgggtctcttatcctgggcttaaatcaaataaattttatgatcttgctaataaatatctaccaagaggtaaaggtgcagttttcacttttggtgtaaagggaggatatgacgcaggagttaaactaattgactctgttgatctgcattcaaatttagcaaacataggtgatactagaagtctaattttgcatcctgcatctaccactcaccgccaacttacagaggagcaaagagatggtgcaggtgcatcttcagatgcaattaggttgtcggtcggaattgaggatgttaacgatataatagcagacctcgatcaggctttaaatcaggtataa

SEQ ID NO: 290405 - DNA, 779 bp, Unknown
  Bacterial polypeptide expressing nucleotide sequence isolated from the Sargasso Sea
tatggatccaaaattttacaaactggaaacgctgagtttgcatgggggacagctacctgatccggtcacaggtgcccgggcggtcccgatttaccagaccacatcctacgtttttgaaaacagtgaccaggccgctgcccaatacaatctggaacagggcgggcatatctacacgcggattaccaatcctacggtggcagttctggaagaaaggatttccgctcttgaaggcggtagcggagcggtcgcaaccgcttcaggccaaagcgcgctttttctgactttgatgacgctgctggatcagggcagtcacatcgtttcctccacctgcctctatggcggcagtgtcaatttactgaaacacacgctgccacgtttcgggattgggaccagttttgttcatccccgggatctggaaggattccgccaggcgatccggccggaaaccaggcttgttttcggagaagtgattggcaatccgggattggaaatcctggatctggaagtggtgtccgggatagcgcatgatgccgggataccgttgttgattgacgccactttcaatactccattcctctgtcgtccctttgattggggagccgatttaatcatgcattcggcaaccaaatggattggcggtcatggggtcgcgatcggggggttggtggtcgaaggcggccgtttcgattgggaacagaacaaccgtttcccaaccctaaccgaaccctatgccccttttggcggaatccaatggtatcaggaattcggtccccaggccc

SEQ ID NO: 290406 - DNA, 664 bp, Unknown
  Bacterial polypeptide expressing nucleotide sequence isolated from the Sargasso Sea
tatgggcggctccctagttgttgttaatttcaagacctaccagactgctcacggggcgtgtgccgaagatctggctagagctatggcgagcatagatacgaagatcaggatggttgctgcggtctctgcattcgatctgtctgccgtagtcgctgctgctccgggactggaggtgtggtgccagcatcttgatcccgtaggtttcggttcgaatacggggtggctgcatcctgaaactgcaatggagaggggggcttcaggaactctgatcaatcatgcggaacacaaggtgagcttggagcacgtcgctatgctcatggagcagattcctgatggattccatgtttgcgcctgtgccgcagacattcacgaggcaagggcactggcggcattggggccgggttttgttgctgtggagccgccggagttgattggcggcgagacttcggtgactagcgctgatcctgggatagtcagtggtacagcccaagcagtcagagaagtgtccacgagagttggcatcctatgcggtgcgggtgtaaagaccggcgaggacgtggccaaggcgatcgaacttggcacttcaggggttcttctggctagtggagttaccaagtccgaagaccctaggtcgtcactgattgatcttgtcagcctcctttaa

SEQ ID NO: 290407 - DNA, 1312 bp, Unknown
  Bacterial polypeptide expressing nucleotide sequence isolated from the Sargasso Sea
attggctatagaggaatttcacgtgggctccgataacgaatttaatgggtttcaaactcgctctgtacatgccggtgcaagaccagatgctaatacaggatccagagctcaaccaattcatcaaactacaagctacgtcttcgagagtccggattcggcagccgcctacttcaatttgcaagagtatggcaatacttattcaagaatcatgaatccaaccgtgggagccctggaagagcgaatagctaatctggaaagtgccgttgggagtgttgcatttgctagtggtttggccgctcagagcgcagctctgttcacgctgcttcagcctggcgatcatatcgtggcttcgagatcgttatatggtggaagcgtgactcagctgaagcatctaatgagaaaactttccgttgacttggattttgtcgaagcgaccgagcttgatcagtggaaaggtgcgataaaagaaaataccaagctgttttttggagaaaccataggcaatccctcgggcgttatcctagacattgaagcgatttctaaaatagcgaaggaaaatgaagttcctttaatggtcgataatacctttgctaccccatatttgtgccggcctatggagtggggagctgatattgttgtgcactcggtaacgaagtttttgggtggtcacggcacgtcaattggcggtatcgtgctcgagtccggcgaatttgattggtctaatggccgctttccgattgtcgccgagccttctcctgcttatcacgagctagagtttcacgaaacctttggcacctttggttatttgatgaagttacgagcagagaccttacgtgatttgggtgcttgtatgagccctttcaacgcatttttaattggtctgggtgttgagacattacccttgagaatgcaacagcacattgataacgcgtcgacagtggcggagtttttgaacgcttctgatagggtggagaaggttcattacgtagattattcaacgcccgcacaaagagaccttgccgataaatatctgaaaggaagtgggggagcggtcttttgctttgatttagcggggggacgcaacgaaggggtaaagtttattgaaaatctccatctgtttagccatctagctaatgtgggcgatgcaaagagcctggtcattcaccctgcgtcaacaacccatcgacagttatctgattcagaattattgaatgcaggtattggccctgggacaatcagactgtcgatagggattgaggattcttatgacctgatatcagatctgaagaatagcttggataaactaaattag

SEQ ID NO: 290408 - DNA, 502 bp, Unknown
  Bacterial polypeptide expressing nucleotide sequence isolated from the Sargasso Sea
atgaaaagggttaaatatactatcgctaattggaagatgaatggcttaaatggtgctgtaaaggtagttaattccattgacaggcacattaaaaaaacaagacataaaaaatctaaagttgtcatttgccccccttttacattgttgactaatttcattaacgcaaatactggaattgattttgggggccaggactgtcatcacttaaatgaaggtgcatttactggatgtatcagtgctcaaatgcttaaatctgcagggtgtaaatatgtcataataggtcattctgaaagaagggagtatcaaaaagaaacaccaaaagaattaaatttaaaaattgatattgcaaacaaatataatttaaaaattatttactgcatcggtgagaaattaaatgaaattaagattagaaaaaaaattcttaatagacagctcagctctcttccaaaaaaaataaatataaaaaatcttattattgcttacgaacctgtctgggccatcg

SEQ ID NO: 290409 - DNA, 547 bp, Unknown
  Bacterial polypeptide expressing nucleotide sequence isolated from the Sargasso Sea
tcaccatgaagagtcaagtggcccatacactggatctataagctctaaaatgctaaaaaaaattggcgttaagtatgtaattattggacattcagaaaatagatccacaggcgagactgatgatgacataaataaaaaaataaaatcatctattaaaaataatttaaatataattttttgttttggagaaacattaaaacaaaaaagaaaaaaagatactaatcgtgttttaattagacagatttcaagagcacttaaaggcgttaaagagaaagataaaattctttttgcgtatgagccaatttggtctattggaacaggattaatacccaaatcaaaagatttaaatcaaactataaattttgttaaaaataaattaaaaaataactttagattaaaattccctaaagttttatacggtggatctgtaaatccaaacaatataaaaaaacttaaagaaattaaaattatagatggttttttgataggtggtgcttcacaaaaatctaaaaattttattgatatagtcaaaaaaacctttatctag

SEQ ID NO: 290410 - DNA, 676 bp, Unknown
  Bacterial polypeptide expressing nucleotide sequence isolated from the Sargasso Sea
atgaaacaaaaaataataatagggaattggaaaaattacttaactaaagatgagtcagtgaaacttgcaaaagagattttagatgaaaaaatccctgatggaataagacttatgatttctcctaataacctctacttaaatcatgtaaataatatcctaaaacattcttcagttgaagttattggtcaaaatgtcacttcctatatgtcttcttcagacacggggggagttacaataattggtctcaaagatattggagtagataggactattcttggtcattctgaggtaagaaaaagaaataagagttttagatctgaggaaattttaaaagaagttatacctgaggaatttaaattcattttatgttttgaggttgttgaacagatcccttttagtatcttaaataatgactttgagataatccttgcatatgaaccagtatgggctataggttctggagaaactgcatctgttgagcatattaatgaagttcatggaatagtaaaatcagagctttcaaaacataatttagatattcctgtcctatacggtggaagtgttaatccagataattcaaatgagatattatctcaggaattggtagacggagttctggtcggaggtgcttcaactaattatgagaatctacataaaataattaattctctataat

SEQ ID NO: 290411 - DNA, 709 bp, Unknown
  Bacterial polypeptide expressing nucleotide sequence isolated from the Sargasso Sea
atgtatgggtctatcaaatcagttaaatcgttaaataaagtaataggttattcaaaaataaagaaacttaaagccaagattatctattgccctccatatacattgattaaaacttttgtagataaaaccaaaaactcaaatattgaaattggtgcacaagattgtcatgcgaattctaattatggaccttttacaggagctataagttcaaaaatgattaaagatttaggatgtaaatttgttataattggacattcagaaacaaggtcagaaaatgataataaaaaaattaatctaaaaattagatctgcaataaatgaaaaattgaaagttattttatgtataggagaaaaactgattgataaaaaaaaaaataaaacaaaatccgttttaaagaggcaattacttgaaggtttaaaaaatttaaagaatttaaataaagttataattgcttatgaacctgtttggtcgataggtacaggtatcattcctactgaaaatgatttaaaaaaaaatattagatttataagaaacaccataaagatttcaaaaaaatttacaaaatctaaaattttatatggaggctctgtaaactcaaaaaatattaaaaatttaatgagaatcggtaatattgatggttttttgattggtggggcatcaactaatgaaaaaaaatttattgatataatgaaaaaatcaattaattagg

SEQ ID NO: 290412 - DNA, 521 bp, Unknown
  Bacterial polypeptide expressing nucleotide sequence isolated from the Sargasso Sea
tacaggatctataaacgccaatctattaaaaataactggagcaaaatatgttataatagggcattcagaaaatagagctagaggtgacacaaactatttaattaatttaaaaattaaagcggcacttaataaaaatttaaaaattattttttgtattggagaaactttacttgaaaaaagaaaaaataaagcaaatttaattataaattctcaattatctcgaggtcttaaaaatataaaaaaaaataaaaatatattatttgcctacgaacctgtatggtctataggaactggaataataccaaaaataactgatttggagaatcaagttaataaaataaaaaaaatgataaataaaatttggaagttaaaaaaccctaaaatattgtatggaggctctgtaaattcaaaaaatgtaattcaactaaataaaattagttcaataaatggttatttagttggtggggcttcacaaaatgcgaataattttattgatatcataaaaaaaactattatttaaa

SEQ ID NO: 290413 - DNA, 250 bp, Unknown
  Bacterial polypeptide expressing nucleotide sequence isolated from the Sargasso Sea
tatgattgatttaagccattttacatcattttttatagcaaattggaaattaaatggatcttttcaatttattgacaattttactgaatttttgaaagttcctaaaactgcaaaaaaatgcattactttgtgcccgccaaacctatatttaaattatcttaaattaaaaaaaggtgactttaaattaggtgcacaagattgctcctattttgatgaaggtgcatatactggtgaaatatcagcaaaaatg

SEQ ID NO: 290414 - DNA, 478 bp, Unknown
  Bacterial polypeptide expressing nucleotide sequence isolated from the Sargasso Sea
atggttggagctaaatctattattttaggtcattccgaaaatcgacaagagggtgaaagcgaccaactaattaatttgaagatcagaagtgctataaactctggtttaaaaataattttttgtattggagaaactttaaaagaaaaaaggaataaaaaaacaaataaagttttatcaaatcaaattaaaaaaggacttcaatcaataaaaaaaaagtctgatattattatcgcctatgaaccagtttggtctataggaactggaataattccaaagtcagatgatctaataaaatcagtaaattttattaagagtaaatttggatcaaaaagtccaaaaattttatatggtggctctgtaaataatcaaaatatttcacaattaaaaaatatcagtaccattgatggttttttgattggtggagcatctcaagatccaaaaaaatttattgatataattaaaaaaacgtataattaac

SEQ ID NO: 290415 - DNA, 301 bp, Unknown
  Bacterial polypeptide expressing nucleotide sequence isolated from the Sargasso Sea
aatcttaaaagaaatttctgataactttacatgtaataaatttttaattgcgtatgagccgatttgggcaattggaactggaaaatctgcgtcctcgtctcaaatttatgagatacttaattttatacatgaatacacacatgatactttttctcaagtagatttatcaattctatatggaggaagtgtaagtacttctaatataaaagaattactaactattgataaatgcaatggctttttaattggcggagcctctttatctttagatagttttgaattaatatgtgaatcaatctaa

SEQ ID NO: 290416 - DNA, 424 bp, Unknown
  Bacterial polypeptide expressing nucleotide sequence isolated from the Sargasso Sea
tacttttctgaaactaatgataatgtaaatattaaaagttcaaatcttattgaagaaaatattattccagttatttgtataggcgaaaccttagagcaaaaagaaaacaacttaacagaacaaaccttatcttcacaaattaaagatagtgttccaaattcagcaaatcatcaaaatgctttaattgcttatgagccagtttgggcaataggaactggattgactccaactctagatgaaataaataaagttcacgaattaatcaaaaattttgatcgaaaatttattaactttaaagtgctttatggaggttctgttaaatcttcaaattcaaaagaaattactcaattaagtcatgtagatggctgcttaattggcggggcatcattaaaagttgatgaattcagtacaattatttcttgat

SEQ ID NO: 290417 - DNA, 754 bp, Unknown
  Bacterial polypeptide expressing nucleotide sequence isolated from the Sargasso Sea
tatgacaaataataatatttattttattgcaaattggaaaatgcatggaaatatagctgatattaatagatcaaaatctgtaattaagctatccaatcttaaaaaatataaaaaaaataaaattatatattgcccaccttacactttgttaaagtctttttatagtaaagtaaaaaactcaaacatattaataggtgctcaaaactgtcattctaattctgactatgggccttatacgggatctataaatgtaaagttaattaaatccacaggggctaaatatattattataggacattctgaaaatagaaaaagtggtgaaactgatttaattataaataaaaaaattcaagctgctctaaaagaaaatttgaaagttattttttgcattggggaaaaattatctgaaaagagaaaaaaacaaacattcaaagttttacaaaaacaattaaatattggtctaaaaggaattaaaaaattagaaaatataatagtagcttatgaacctgtatggtctattggtactggaataattcctaaaaattctgaactaaatacaaacataaaaaatatcaaaaaaatattatccaaattgaaaaaaactataaatttaaaaatattgtatggaggctctgttaatcctaaaaatgcaaaggaactagctcaaataaaagatataaatggttttcttattggtggatcatcattaagttcaaaaaaatttattgatataataaaaaaatcaattaattag

SEQ ID NO: 290418 - DNA, 664 bp, Unknown
  Bacterial polypeptide expressing nucleotide sequence isolated from the Sargasso Sea
catgtttatcataaattgtaaaaattatgacgaaattgccggagataagattgtcaagatggcaaaaattgcagaaaaaatttcaaagaaatacaaagtatcaattgccatagcacctccacataatcttattccattaatcacaaaattcaagattacagttttggcacagcacgtagacgataaaaaagttggaagtaccaccggattcatggttcctgaaattgtaaaaaagtcaaaagtttcaggttcaatcataaatcatagtgagcatcgaatttctgaaaaagagatcatctcactagtcaaacgattacaaaagttaaagctcaaaacagttctatgtgtaaaaaatgtcaatgaggcaaaaaaatatgcaaaattaaatccaacatttatcgcaatagaacctccagaattgattgggaccggtagagcaatttctacagaaaaaccagcattgattacaaatgccgtacaagcagtaaagtctgcaaaaaactctacaaagcttttgtgtggagcaggaattgtttcaggcgaagatgtatcaaaagcaagagaacttggatcaagaggaatacttgttgcaagtggaattgtcaaagcaaaaaactgggaaaaaataatctcagagttttgtaagggtttaaaaagccagtaa

SEQ ID NO: 290419 - DNA, 724 bp, Unknown
  Bacterial polypeptide expressing nucleotide sequence isolated from the Sargasso Sea
atgtattttatagcaaattggaaaatgtttggaggattaaatactttaaattcactacataaagtacttaagtttttaaaggaatttaaaaaaaataaatttgttaaaataatctattgtcccccaagcaccttaattagaccaatgtctaaaaaactcaaaaattctcaaataaaagtaggtgcacaaaattgccatgaaagtgaaacatatggttcttttacaggttctataaacacaaaaatgttaaaagatgtaggtgcaaaatatgtgataattggtcattcagaaaatagaaattcaggagaaactaataaattaattaatagcaaagttaaagctgctttaaaaactggtttaaaagtaatattttgtataggggaaacatttcaagaaaaaaaaaaaaaaattacgaaaaaagttttacgtcaacaaataaaattaggcttgagaaaaattaagaatcctaataatgttattattgcatatgaaccagtatggtcaattggaactggtttaattcaaaattctaatgaattatttgaaacgataagttttattaaaaaagaaaataaaagatataaagttttatatggaggatctgttaacccaaaaaatattcatcaattaagatctgtaaaaaacatagatggttttttgattggtggagcatctcaagattcgaaaaaatttattgatataattaaaaaaacatataattaag

SEQ ID NO: 290420 - DNA, 352 bp, Unknown
  Bacterial polypeptide expressing nucleotide sequence isolated from the Sargasso Sea
tatgaaaaagataattatcggaaattggaagctcaaccttgatcatttacaaggtattcagttattgcaaaaaattaattattcattacccaaagatgttgaagaaaatattgatatagttttagccccatcccatacatctttaagatcattacaaactgttatatctactgataaattaaaaataaaattgtcttctcaggatgtttcaatgtataaagaaggagcatatacgggagaagtatcatctacgcaattagaaaagttagacataagttattcaataataggccactctgaaagaagaaccttacttaatgagaacgatgaaattattaatcaaaaactaaaa

SEQ ID NO: 290421 - DNA, 622 bp, Unknown
  Bacterial polypeptide expressing nucleotide sequence isolated from the Sargasso Sea
tatgtatttcattgccaattggaagatgtttgggtcagttaagttggttaattcattaaataaagtaataagttattcaaaaataaagaaacttaaagccaatattatttattgtccaccttatacattgatcaaatcttttgtagataaaacaaaaaaatcaaatattaaaattggtgctcaagattgtcatgctcaacaaaactacggacctttcacaggagctataagctcaaagatgattaaagatttagggggcaagtttgttataattggacattcagaaacgagagctgaaaatgataataaaaaaattaatttaaagattaagtctgcgcttaatgaaaaattaaatgttattttatgcataggcgaaaaattgattgataaaagaaaaaataaaacaaaatatgttttgaaaaaacaattacttgaaggtttaaaaaatttaaagaatttaaaaaaagtaataattgcttatgaacctgtttggtcgattggtacaggtattattcctagtgaaaatgatttaaaaaaaaatattacttttataaaaaacaccttaaagatttcaaaaaaatttacaaaatctaaaattttatatggaggctctgtaacctaa

SEQ ID NO: 290422 - DNA, 661 bp, Unknown
  Bacterial polypeptide expressing nucleotide sequence isolated from the Sargasso Sea
atgaaatatataatatttaattggaaatcatatttaaatatagccgaaagtatgaacttatctaaaatcgtatcaaagcttccatctacaaaaaagtacaaactaatttgtagtccaaataacttttataatctctctcttaaatctagatatccaaaaaatatatatgctgcacaaaatatagatttgcatggtaaaggcgctagtactggctctattgatattgaagacttagtaaataacaagattaagtattgtattcttggtcattctgaagtcagatctaattttggtgagacggatttgattgtacaaaaaaaaacagatctatgtttaattaataaaataaagcccatagtatgtattggagaaccgttaaagatttataaatcaaaaaaaaccaaagtttttttaaaaaaacaaatcaataatatatttaaaaaatcaaataattatgaagaagtcgtcttagcttatgagcctttatggtcaattggtactggattaacacccaaattatcagaaattgatgatattttggagtttttatcaaaaatattggaaaattattcttttaaaaaaataaatattttatatggtggttcggtaaatttatcaaatatcaaagatattttaagtttgcgaaatttaaacggagttt

SEQ ID NO: 290423 - DNA, 432 bp, Unknown
  Bacterial polypeptide expressing nucleotide sequence isolated from the Sargasso Sea
aatgaaaaaaataattattggaaactggaagctgaatttagatcatttagaggctatacagcttttccaaaaattaaattactcactaaacaacgatgtagacaagaaaattgatattgttgttgccccttcatttacttcacttaggtctattcaaacaataattgaagcagataaattaaatttatttttatcatcacaaaacgtttcggagtttgttgagggtgcatataccggtgaagtttcatccgaacagttaataaaattaaaagtttcttattgcattgtcggtcattctgaaagaagacagtattttaaagaaacagacgagtcaattaatctaaaggtccataatttagtaaacaagaagatcactccaataatttgttttggcgaaagtattgagcaaagaaacagtggtaagtatttgga

SEQ ID NO: 290424 - DNA, 691 bp, Unknown
  Bacterial polypeptide expressing nucleotide sequence isolated from the Sargasso Sea
gatgtcaaaaattataatcgctaattttaagatgaatggaactaaatcttctattcaagagtggtttaatgtattttctgaagagaataatacgtctaataagattattgttgccttaccatcaccttttttagctgattttgctactaatgatataaatgtagcctcacaaaatgtttcctcacatgattctggagcgtttacatcacaagtatctgctggaatgctgagagattgtaatatcaattactcaattattggtcattcagagtctagagaatttctaggtgaaaccaatgaagatatttttgataagtacagtcaacttataaaacattctataaaaccaataatttgcattggagaatcatcaaaggttcgtgaagataatttattttcaacttttatcacagagcaattagaactctttaaagacgtagaagacgagctaataattgcctatgaacctatttgggcaattggaagtggcataactccaactattgctgatataaatgaggtatctgagttaataaaaggactatgtggcaacgttaaagtcttatatggcgggagtgttaataaggaaaatgcatctaatttgttaaataattcgaatattgatggtgttttggttggaggggcttctcttgaccctaaagaatttgctaatatagcgcagtcatgttga

SEQ ID NO: 290425 - DNA, 724 bp, Unknown
  Bacterial polypeptide expressing nucleotide sequence isolated from the Sargasso Sea
atgtattttattgctaattggaaaatgtttggtggtctaaattccttaaatacaataaataaggtggtcaaattttttaaagcctttaaaaaaaatagacctataaaaataatatattgtccacccagtactttaataggcccaatgtcaaaaagattgaaaaaaactaatatagaaatcggtgcacaaaattgtcatgaacaagaatcttatggagcttttacaggttcaataaattctaaaatgttgaaaaatattggtgccaagtatgttatcattggtcactctgaaaatcggcagtcaggtgaaagcaatcaattaatcaatttaaaaattaaaagtgcattaaaatctggacttaaaataattttctgtattggtgaaactttaagtgaaaaaagaaaaaaaattacaaaaaaaattttggataaacaacttaaattaggtttaaataaaattaattcgaaaaaaaatataattatcgcttatgaaccagtttggtcaataggaacaggtctcattccaaaatctaatgatctttatgaaacagtaaattttatcaaaaaaaaaatgagaaaaaataaagtattatatggtggatcagttaattctaaaaatatcaatgatttaaaatcaataaataatatcgatggctatttaataggtggggcatctcaaaaccctaaaaaatttattgatataattaaaaaaagatatagttaac

SEQ ID NO: 290426 - DNA, 730 bp, Unknown
  Bacterial polypeptide expressing nucleotide sequence isolated from the Sargasso Sea
catgaagcatttgattgcaaattggaaaatgaattttattaattcagatgcatggctgaaagattttgatctaaataatatcccaaaagaaattcaggtagtaatttgtcccaattacctagatatggaagatttttttgaaatttcatcgaaaactcacgaaaaaatttttatcggtgctcaaaatttgtctgcagagattgaaggcgcatttactggtcaaatatctggaaaaatgctgaaaaatattggagcttcttactcgatagttggccattcggagagtaggcttcaaggcgaggacgatgaaactattctgagaaaagtccatacagctttagagtgtgagctgatacctattttgtgcataggtgaaaatcaggaggaatactccaaaggtagaacagaaaataaaataaaacatcaattaactgaaaatttatttcctcttaaaaacttatcaaaaagtgttttgattgcctacgaacccatttacgctattggttctggaatagctgtcaaaaatgagcatttggaagaggtttcgcttcttgtaaatgatctagttagagacaatttaggaatagatttcacaatgatttatgggggcagcgtaacttcagagagcgctaagaaacttgccaaagtaaatggaatcgatggatttttagtaggaaatgcttctcttgaccctaaagaatttgctaatatcgccctgagtttagagtaa

SEQ ID NO: 290427 - DNA, 733 bp, Unknown
  Bacterial polypeptide expressing nucleotide sequence isolated from the Sargasso Sea
tatgattgttgctaattggaagaatgcaggctccaaagaactaatcaaagtttgggtagattctgtttcgaaagatatagacattgtgcaaggaaaggactgtgtgttttgtccacccacttgttatctggactattctaaagattatattaaacaaagaaataaagatataagaatagggtcacaagagcttgattctgagcttacttctcccttaacaggtgcaattagttctcagatgttagctgatttaggttgtgaatttgtaataattggacattcagaacaaagattacatcttaatgaaagtaatgaaatactttctaataaattattaaaggccgtagaaagagatattattcctattttctgtataggagagacaaaaagtgaaaaagaaagtgatctcaccaagaaggttctgtctaaacaactggacgctattcatactgatcttacaagtaaatgtataattgcatatgagcctgtttgggctattgggacaggagattatgctgaaatcagtcttatagaaaaaatacatgtacatataaaggaatatataatgaataaaactaaatcatcaaatcagatttcagttgtttatggaggtagtgtaaacttagagaattacaaagaaatttactcttctactcaagtagatggacttttaataggtggggcttctttagacgctaacacttttactgaaatttataatatgtctcaataa

SEQ ID NO: 290428 - DNA, 694 bp, Unknown
  Bacterial polypeptide expressing nucleotide sequence isolated from the Sargasso Sea
aatgtcaaaaattataattgctaatttcaaagcgaacggttgcaaagaattttttaataactggttttcagattttaaaaacgactctcaaaaccaaatattattagcccctccatcagtatatttagattttttttccacaaaaaaacttaactttgagttgtgttctcaaaatgtttgtgaatttgaagaaggtccattcacatctcaacatactgcttctatgcttttggatttaggtgtaaaaaattgcattataggccattcagaatcaagaaagctgctaaaggaggaagatcaccaaatatttgagaaatttcaaaaattaaataataaaaaaataagacctattgtttgtatcggagagccattggaaattagagaaaataataaagttaaagactacattagacagcaaacagaaaaatttcatgattttgaagaggagataatttttggttacgagccattatgggctataggaacaggtaaagtgccaaaattagatgaaattgaagaagcagcaaaaactataaaagaattttgtggagaaaataagaaaattctttatggtggaagcataaatagtagtaattgtaaggatatcttgaaacttaaagaaattgatggtgctttggtgggaggagcttcactaaatcctaaagaatttgctattatagcgcagtcatgctga

SEQ ID NO: 290429 - DNA, 640 bp, Unknown
  Bacterial polypeptide expressing nucleotide sequence isolated from the Sargasso Sea
atgtactttattgccaattggaaaatgtttggtgatctaagatcaataaattcactaaataaggtgattaaattttttaaaatctttaaaaaaaaaaaattcgttaaaataatttactgtccgccaaataccttaattcgagcaatgtcagaaaaacttttaaactcaaaaattgaagtcggtgctcaaaattgccatcaaaatgaaaatgcgggtgcttttactggttcagtaaattcaaagatgttaaaaaatgttggtgctaaatatgttatcattggccactcagagaatagaattactggtgaaactgataaacttattaatcttaaaataaaatctgcaattaaatctggattaaaagtaattttttgtattggagaaactttaaatgaaaagagacgtaaggctacaaaaagagttttggatcgacaaataagcttaggtttgaaaaagattaataaaaaaaatagtaatattattattgcatatgaaccagtatggtcaataggaacaggtttaattccagccactgaagaattattaggtatagtaaattttattaaaaaaaaaagtaattcaaaaaaagttttatatggtggatctgtaaatccaaaaaatgttaacgtactaaattcta

SEQ ID NO: 290430 - DNA, 748 bp, Unknown
  Bacterial polypeptide expressing nucleotide sequence isolated from the Sargasso Sea
atgaaattctttataggaaattggaaaatgtttggcgttcccagatctattaatattttaaacaaaataaataaatttattaagaaggattctaatagaaataaatataaagttattgttgctcctccttttacattaatagaaacttttgcaaaaaaatttaaaaaaagctcaatcgaaatcggcgcacagaattgttattacaaagacggatttgcttctgatacagcggcaatcagctcatatatgttaaaaaaagtaaatgccaagtatgtaataattggtcattcagacaatagggcagaaggtgatgataacaaaatacttaaggcaaaattaaatcatgcattgaaaaacaatctaaaagtcatcttttgtataggtgaaaacagtaaagataaaattaaaagaaaaacatatcaaattttaagtaaccaattatcatcagtcctagaaagaaaaatgcctcaaaataatataatagttgcctatgagccaatatggtcgatagggactggcaatgttccttcaaatattgaacttgagaaaataactaaaaaaataaaagagataacaaaaaaaatatttaataaacaaaaacaatcgtacgttttatatggcggttctgtagacggtaaaaatataaagaaaattaataatatatcatcaatagacggatttttaataggcggtgcatccaaaacatcaaagaaatttattgatataataaaaaattactatagataga

SEQ ID NO: 290431 - DNA, 664 bp, Unknown
  Bacterial polypeptide expressing nucleotide sequence isolated from the Sargasso Sea
aatgtttatcataaattgtaaaaattatgacgaaatagcaggagataagattatcaaaattgcaaaaatctcagagaaagtttcaagaaaatataaagtgccaattgcaattgcacctccacatcacctcattccattaattacaaaatttaagattacagttttagcgcaacacgtagatgacaaaaaggttgggagtacaacaggatttatggttccagaaattgttaaaaaatcaaaaattaatggctccataattaatcatagtgagcatcgaatttctgaaaaagagattatttctttagtgaaacgactacaaaaattaaagctaaagacagtactgtgtgtaaaaaatgtcaatgaggcaaaaaaatatgcaaaattaaatccaacattcattgcaattgaacctccagaattaattggaacaggaagagcaatttctactgaaaaaccagcattaattacaaatgcagtgaaagcagttagttctgctaaaaattctacaaaattgttatgcggtgcaggaattgtttcaggtcaagatgtttcaaaagcaaaagaactaggatctaaaggaattctagttgctagtggaattgtcaaagcaaagaactgggaaaaaattatctcagaattttgtaagggtttaaaaagccagtaa

SEQ ID NO: 290432 - DNA, 478 bp, Unknown
  Bacterial polypeptide expressing nucleotide sequence isolated from the Sargasso Sea
tgctgatataaatgttgatttttgtattgtaggacactcagaaagaagacagtttttttttgaaaagaatgaagaaattaattataaatctgaaaatttaatcaaaaataatattatacctataatttgtattggcgaaacattagaagataaagaaaagggcataacaaacgatatactagaagatcaattaaaaaagagcatccccatctcatccaattttgaaaattcgataatagcatatgagcctgtttgggcaataggtacaggcttaactccgacaaatgatgaaataaatgaaactcatagctttattagacagcataatgaaaaatttaataattttaaaattatatatggaggttctgtaaaagctagtaatgtaaatgagattacatctttactaaatgttgatggcgctttaattggcggagcatcacttaaatcggatgaatttacaaagataattcaagattaa

SEQ ID NO: 290433 - DNA, 1099 bp, Unknown
  Bacterial polypeptide expressing nucleotide sequence isolated from the Sargasso Sea
atgactgacagaaaaaacgtagataacgtaaaatcaaatattcctggtggagacggtcaatcaagagaatatggaatttcaactttggctgttcacgcaggagcaagacctgatccagtaactggtgctcgtggaacaccaatctatcagactacatcttttgtgtttgatgatgcagagcacggtgccgaattatttaatttacaaacatttggatatgtatattcaagaatgactaatccgactgtctctgtatttgaagaaagggtagctcaattagaaggtggaaggggtgctgttgctacatcatctggacatgctgctcaattcattgcagctgctacacttatggaagcaggagatgaatttatagcatctagaaatctctacggtggttcagttactcagtttggagttagttttccaaagttaggatggaaatgtaattttgtagatcctactgatcctgaaaactttgaaaaggcaatgaatgataaagtaaaatttattttttgtgagggtgttgcaaaccctggcgggataattcttgatttagaaaaaattgctgaaattgcaaacaaacatggagttttactaatagtagataatacactggcgtcaccttatttattaagaccttttgagtggggtgctgatttagttgttcattcaactacaaagtttattggtggtcatggaaacacaatgggaggcattcttatagaatcaggtaaaatagactggcatagaaatgataaatatcctggaatgtcaaagcctgatcaagcatatcatggtttaacttttgcagaaacttttggtgactttggatttacaatgaaagctagaatggtgggtttaagagactatggatctacattaagcccacagtcagcatggaatttacttcaaggtgtagagactttacctttaagaatggaaaggcattgttcaaatgctcaagcagttgctgaatggttagaaaaacatccaaaagtatcttgggtatcttatcctggacttaaatcgaataaattttatgatttagctaataaatatttgcctaaaggtaaaggtgctgtttttacatttggtgttg

SEQ ID NO: 290434 - DNA, 733 bp, Unknown
  Bacterial polypeptide expressing nucleotide sequence isolated from the Sargasso Sea
tatgtatttcatagctaattggaagatgtttgggactatcaagtcagttaattcattaaataaagtaataagttattcaaaaacaaataaacataaagctaagattgtttattgccctccttataccctattaaaatcttttgtagaaaaaaccaaaaaaacaaatattaaaattggtgcccaagattgtcatactcagccaaactatggtccttacacaggaggtattagctcaaagatgattaaagatttgggatgtaaatttgttattattggacactcagaaacacgagctaaaaataataataaaaaaatcaacttaaaaatcaaatctgcgcttgacgaaaaattaaatattattttgtgcataggtgaaaaactggttgataaaaataaaaataaaacaaaaaatgtgttaaagaaacaattattagaaggtttaaaaaatttaagtaatttaaataaggtaataatagcttatgaacctgtttggtctattggtacaggaattatacctagtgaaaatgatttaataaaaaatattaaatttattaaagatacccttaagaaatcaaaaaaatttactaagtctaaagttttatacggaggctcagtaaacccaaaaaatataaaaaatttaatgagaatcagtaatattgatggttttttaattggaggagcatcaactaatgaaaaaatatttattgatataatcagaaaatcaattatttag

SEQ ID NO: 290435 - DNA, 367 bp, Unknown
  Bacterial polypeptide expressing nucleotide sequence isolated from the Sargasso Sea
aatataataccagtgatatgcataggtgaaaccttagagcagaaagaaaaaaacttaacagaagaaatcttatctacgcaaattaaagatagtattcccaatttagcaaatcatcaaaatgcattaattgcttatgagccagtttgggcaataggaacaggattaacaccaactttggatgagataaatcaagtacacgaactaattaaaaattgtgatactaaatttaggaactttagggttctttatggaggttctgttaaatcttcaaattcaaatgaaattactaaattaagtcaagtagatggctgcttaattggtggggcatcattaaaagttgatgaattcaatacaattatttcttgat

SEQ ID NO: 290436 - DNA, 246 bp, Unknown
  Bacterial polypeptide expressing nucleotide sequence isolated from the Sargasso Sea
taatcgcatatgaaccagtttggtcaattggtacaggaattataccaaaatctgaagacttatttaagacgatcagttttattaaaaaagaaaaaaagaattataaagttctttatggtggctcagtaaatccaaaaaatattaatcaattgaaatctataaataatattgatggttacttaataggtggggcatctcaagatcctaaaaaatttattgatataattaaaaaaacatataattaac

SEQ ID NO: 290437 - DNA, 381 bp, Unknown
  Bacterial polypeptide expressing nucleotide sequence isolated from the Sargasso Sea
tatgtataggagaaactgaaaaagaaaatattgaaggcaagactaaacaagcacttcaaactcagctagaagtaattaaaaattatgagttgcatgaattttttaaagttgcctatgagccagtttgggctataggaagcggcaaaactcctcaaccagaagaaataaatgaaattcataaatttatcaaagatgttgtacaatccttttctacaaataatcttgtgccagatgttttatatggcggcagcgttacagataaaaacgctataggcttttttaatcaagattttgtagatggagcattgataggtggagcttctttagatggctcagtctttgcagaaatagtaaacatttttaatggaactaaaaactaat

SEQ ID NO: 290438 - DNA, 373 bp, Unknown
  Bacterial polypeptide expressing nucleotide sequence isolated from the Sargasso Sea
aatgggtttaatacctatcatttgtattggagaaactttagagcaaaaggaaaaaggaattactaaaaaggtattggaagagcagctaatgaatagtgttccaagctcctcaaattttgagaatactattattgcatatgagcctgtttgggcaataggcacaggtttaacaccaaccattgaagatattgatgaaacccatcgctatattagagagcacaaagataaattaaataaatacaaaattttgtatggaggctctgttaaagctagcaatgctaaagagatcacaggtttaccaaatgtcgatggagctttaattggaggagcttcactaaaaccccaagaattctcagtgatattagcagattaa

SEQ ID NO: 290439 - DNA, 433 bp, Unknown
  Bacterial polypeptide expressing nucleotide sequence isolated from the Sargasso Sea
aatgtctggagaaaatgaaaaactaattaatcttaaaataaaaaatgcaattaagtctggattaaaaattattttttgtataggtgaaactctaaaacaaaaaagagataagaggaccaatcaagttttaaatagtcaattaaaaaaaggattgaaatctatcaaaaaaattaacgacataattattgcttacgaaccagtatggtcgattggaactggattaattccttcttcagaagaattatctaaatctataaaatttataaaaagtaaatttagaaaaaaatctccaaaagttttgtatggaggctctgttaatagtaaaaatattgatcaattaaaaataattcctgacatagatggttttttaataggtggagcatcacaaaatccgaagaaatttattgatataattaaaaaaaccattaattag

SEQ ID NO: 290440 - DNA, 386 bp, Unknown
  Bacterial polypeptide expressing nucleotide sequence isolated from the Sargasso Sea
tatttgttttggtgaaagtaatgaccaaaggactgaagggaactatatggattttttacttaatcagatcgaaaattcaacaaaagggttaagaaaagataaagtagatgaaataatatttgcctatgagccaatatgggcaatcggaacgggtcagaatgcatctcttcaagatattgtggaagtaatttcaaaagtaaaagaatttatatctaaaaaaacattttttaatgaagaaaaaattaaatttatatatggtggctctgtttctccagataattcttacgagatattaaattcaaaaattattgacggtgctcttgttggaggtgcttcacttgatgtagataaatttataaaaataattgaatctgtagatttatgaa

SEQ ID NO: 290441 - DNA, 691 bp, Unknown
  Bacterial polypeptide expressing nucleotide sequence isolated from the Sargasso Sea
gatgccaaaaattataattgccaatttcaagatgaatggaactaaatcatttattacacagtggtttgatgatttttctaaggaaggcaatatatccaatgaaattattgttgccttaccatcaccttttttaattgattttgcagataatgacatcagtgttgccgcacaaaatgtatcttcacatacaactggagcatttacatctcaagtatctgcagagatgctaaaagactgtgggatcaattattctattattggacattctgagtctagagagtttttaaaggaaactgatgaagatatttttaataaatataatcaactcataaaatattgtataaaaccaataatatgtattggcgaaccacttaaaattcgtgaagataatttacttcaatccttcataagctctcagttaaaacaatttgaagatacagaaaatgagctaataattgcttatgagcctatttgggccattggaagcggtttaattccaactgttgaagacattaatgaggtatctgaattaataagaggactatgtaagaacgttaaaattttatatggcggaagtgttaataaagaaaatgcttcaaatttgctaaataattccaatattgatggtgttttagttggaggggcttctcttgaccctaaagaatttgctaatatagcgcagtcatgttga

SEQ ID NO: 290442 - DNA, 333 bp, Unknown
  Bacterial polypeptide expressing nucleotide sequence isolated from the Sargasso Sea
atatttataaatcaaaaaaaactaaaaattttttaaaaaaacaaataaataaaatattcaaaaaatcgaatatttataatgaagttatattagcttatgagccattatggtcaattggtacaggattaacaccaaaaatatcagaaattaatgatattttgcaatttttgatcaaaatattaaaaaattattcttttaaaaaaataaaaattttatatggtggttccgtaaatttatcaaatataaaagaaattttaagtttacaaaaattagatggggttttggtaggctctgcttcaactaaaccttcatttattaaatactttaaataac

SEQ ID NO: 290443 - DNA, 457 bp, Unknown
  Bacterial polypeptide expressing nucleotide sequence isolated from the Sargasso Sea
tcagaaaaaagatctaaaggtgaaaatgataaaataataaataaaaaaatattttcagctttaaaaaataatttaaaagttattttctgtattggtgaaacatctactcaaaaaagaaaaaaattaacaaaaaaggttttatataatcaattaaataatggacttaaaaatattaaaaataaaaaaaatatcataattgcatatgaacctgtatggtctattggcagtggcttgatacctaaaattgaggatttaattaatactactgaaattataaaaatatttcttacaaacaaaatgaagtttaaaaatcccaaagtattatatggagggtcagtaaatccaaaaaatataactttgttgagaaaagtaactaatcttgatggatttttgattggtggttcttctcaaaatagtaataaatttattgatataataaaaaaaacgtttaattaaa

SEQ ID NO: 290444 - DNA, 334 bp, Unknown
  Bacterial polypeptide expressing nucleotide sequence isolated from the Sargasso Sea
aatgaaaaaaataattattggaaactggaaacttaacttagatcatttagaagctatccaactttttcaaaaattaaattactcgttaaatactgatatagacgaaaaaatctcaattgttatagcaccatctcacacctctttaagatctattcaaacgataatagatgctgataaattaaatatatttttatcatcgcaagatgtatcaatgtttaatgatggagcatacacaggtgaagtctccgcacctcagttagccaaattaaatatttcttattctattgttggtcattcggaaagaagacaacattttaatgaaacagatgaattc

SEQ ID NO: 290445 - DNA, 739 bp, Unknown
  Bacterial polypeptide expressing nucleotide sequence isolated from the Sargasso Sea
tatgacaaataaatatatttactttgtagctaattggaaaatgtttggcgttttaaagtcattaaattcactgcataaagtcataaaatttttaaaaaactttaaaaagaataaaattgtaaaaataatttattgtccaccgagtacattaatacgcccaatgtcaaaaaaattaatcaatactgggatagaagtaggcgctcaaaattgtcatgaacatcaaacatatggagcatttacaggttctattaattctatgatgttaaaaaatgttggtgcaaagtatgtaattattggccactcagagaaccgacaaattggtgaaactgataaattaataaattctaaaataaaaagtgcactaaagtctgggcttaaagttattttctgcattggcgaaactcttagagaaaaaaagaaaaatgttatcaaacaagttttagataaacaaattaaattaggcttaaataaaataaagaataagaataatatcattattgcttatgaaccagtgtggtcaattggaacaggcatgattccaaaaacagatgaattatctaacacaattgattttataaaaaaaaaatacaagaatctaaaagttttgtatggaggttctgtgaatcctaaaaatattaatgatctaaaattaattaaaaatattgatggttatcttataggaggtgcatctcaagatcataaaaaatttattgatataattaaaaaaacatataattaa

SEQ ID NO: 290446 - DNA, 160 bp, Unknown
  Bacterial polypeptide expressing nucleotide sequence isolated from the Sargasso Sea
atcaagacttaaaaatataaaaattttatatggtggttcagttaatacaaaaaatattaaagaattatcaaaaataagatcaattaatggatttttgatcggtggagcctctcaaaagactaagaattttattgatatcataaaaaaaactattaattag

SEQ ID NO: 290447 - DNA, 739 bp, Unknown
  Bacterial polypeptide expressing nucleotide sequence isolated from the Sargasso Sea
atgacaaataaatatatgttttttatagctaattggaaaatgtttggtgggttaagctcattaaattcaataaataaggtacttacttttttaaaaaaatccaaaataagtaaatttgctaaaataatatattgtcctccaagtactcttatttgtccgatggcaaaaaaactgaaaagaactcgtgttgaagtgggagcgcaaaattgtcatgagaatgaaaaacctggagcctttactggatcaataaattcatcaatgttaaaaaacgttggagcaaaatatgttattattggtcattctgaaaatagaattttaggtgaaaaagataaattaattaatttaaagattaaaagtgcaatgaagtctggtttgaaagtaattttttgtattggagaaacattacaacaaaaaagaaaaaaaattacaaaaaaagttttgaatagacaaattattcaaggtttaaaaaagattagaaataaacaaaaaattttaattgcttatgaacctgtttgggctattggtacaggcttgattccaaaatctaaagatttagatgaaactgttaattttattaagaataagaataaaaatataaaagttttatacggtggatctgtaagttctcaaaatataaatgaactaaaattaattaaaaatattgatggttttttgatcggtggtgcttcgcaagatgccaaaaaatttattgatataatcaaaaaaacatataattaac

SEQ ID NO: 290448 - DNA, 199 bp, Unknown
  Bacterial polypeptide expressing nucleotide sequence isolated from the Sargasso Sea
tatataaaagatgttgtacaatccacctctacaaacaatcaagtaccaaatgtagtttatggtggaagcgttacagataaaaatgcagaaagtttttttaaagaagagtttatagacggtgcattagttggcggagcatcattgaatggttcaacttttgcaaatatagttaaaatatggggaaaaagtattatttaaa

SEQ ID NO: 290449 - DNA, 464 bp, Unknown
  Bacterial polypeptide expressing nucleotide sequence isolated from the Sargasso Sea
aagaagacagatatttaatgagaagaatgattcaataaataaaaaagttataaaagtaatagaatcgggcattaaaccaatcctttgtgtaggagaaactattgatgaaatgaatgcaggtaaggcatatgatattataaaagaacaattaataagtggcttaaataatattaaatcgttaagcaatatcattattgcttatgagccagtatgggcaattggcactggcctcactgcctctattgagcaaataaatgaggctaacatattcataagaaaaatattaagtcaattatttgatgataaagaatctgaaaatactccaattctatatggcggttcagtcagctcaactaatgcaaatgaactaatttcgatagatagcgtaaatggatttcttattggcggtgctagcctagatgttgttaaattcacagaagtcattaaaatagttaatggctaat

SEQ ID NO: 290450 - DNA, 613 bp, Unknown
  Bacterial polypeptide expressing nucleotide sequence isolated from the Sargasso Sea
atgtatggtgatttaaaagcacttaattcgctgaataaagttattaaattttataaaagtataaaacataaaaaattaaagttaatttattgtccacccagcactcttattaattctttatccaataaacttaaaaatacaaaaattgaagttggtgctcaaaattctcacgagagcgatcattacggtgcgtttactggtcagataaattctaaaatgttaaaaaatgttggagcgcgttatgttatattgggtcactctgagaatagacagacaggtgaagataaccaaaaaattaactctaaaattataaattcgttaaaatctggactaaaaattatttattgtattggcgaaacgttaaaagagaaaagaaacaaaaaaacaaatcaagtgttaagtaagcaaattaaaatgggtttaaaatcaattcgaaacaaatcaaatataataattgcttacgaaccagtctggtcgattggaactggattaattccaaaaccaagtgacttaataaaatctatttcgtttattaaaaaaaaattaggtaaaaaaccatcaaaaattttgtatggaggctctgttaatagtgataacatcaatcaattgaaaa

SEQ ID NO: 290451 - DNA, 424 bp, Unknown
  Bacterial polypeptide expressing nucleotide sequence isolated from the Sargasso Sea
attgggaatagatagaactattcttggccattctgaggttagaaaaagaaacaagggttttaaatctgagaaaattttaaaagaagttatacctgaagaatttaaattcattttatgtttcgaaggtattgaacagatcccttttaatatcttaaataatgactttgagataatccttgcatatgaaccagtatgggctataggtactggagaaactgcatctgttgagcatattaatgaagttcatggaatggtaaaatcagagctttcaaaacttaatttagatattcctatcctatacggtggaagtgttaatccagataattcaaatgagatattatctcaggaattggtagacggagttctggttggaggtgcttcaactaattatgatgaccttcataaaataattaattatctataa

SEQ ID NO: 290452 - DNA, 482 bp, Unknown
  Bacterial polypeptide expressing nucleotide sequence isolated from the Sargasso Sea
aaaaaatgttggagctcgatatgttatattgggtcactcagagaataggcagttaggtgaagataataaaaaaataaattctaaaattaaaagtgcattaaaatcaggtttgaaaattattttttgtattggggaaacattaaaagagaaaagaaataaaaaaactaatatggttttaagtaagcaaattaagatgggtctgaaatcaattcaaaaaaaatcgaatataataattgcttatgaaccagtctggtcaattggtactgggttaattccaaaaccaaaagacttgataaaatcaatttcatttattaaaaaaaaattaggcaaaaaaccttataaaattttgtatggaggctctgtaaatagtgagaacatcaaacaattgaaaaatattaataccattgatggttttttaataggtggagcttctcaagatccaaagaaatttattgatataattaaaaaaaccattaattaga

SEQ ID NO: 290453 - DNA, 688 bp, Unknown
  Bacterial polypeptide expressing nucleotide sequence isolated from the Sargasso Sea
aatgaaaagaaataattatatcattgcaaactggaaaatgaatggcactaaaaagtcaatttctctaataaaatcaattcaaagttatatactaggaaagagaaagcacacttcaaaaattgtaatttgtccacctttcactttattgagcaattttatacagaaatctaacagtattattaaatttggagctcaggatgttcattatgaagtgtctggtgcttttactgggtctataagtgcgtctatgcttcaagagcttggggtaaaatttgttataattggacattctgaaagaagacaatatcaaaatgaaagtatttcggaaataagtaaaaaaattaattcagctttatcaactaatttaaaaataattttttgtattggagagaagctggatgaaattaataaaagatcaataatacttaaaaaacaattaacttcattgcctgatacatttttaagcaagaatattattattgcatacgaacctgtatgggcaattggtactggtaaaactccaactataaatgaaataaacgatatacataaatcgataagaaaaatgatttataagaaaattggtaaagaagctttaaaagttagtattttatatggaggatcagtaaatccaaaaaattcaagcgatatacttaaactttctgatgttgacggtgctcttgttgga

SEQ ID NO: 290454 - DNA, 192 bp, Unknown
  Bacterial polypeptide expressing nucleotide sequence isolated from the Sargasso Sea
aaagagatagagtagctcaacataatgaagtagtggctgaaaccgttaaaatactttacggtggaagcgttaacgaagaaaatgctggaagcttctttgaaaaagatgaaataggtggagccctagttggaggagcttctcttaaacctcacagtttcaacgaaattagaaagttagcagcagagacttagt

SEQ ID NO: 290455 - DNA, 264 bp, Unknown
  Bacterial polypeptide expressing nucleotide sequence isolated from the Sargasso Sea
agcccatatgggctattggaaccggtcagactgcggagccagacgatatcgaagaaattcatggtcatattcgaaataccttaaaagctaaatatcctaataatgagggtattccaattttgtacggagggtcagttaaaccagaaaatgcttcaaaaattttggcattgcctgatgttgggggagcgcttgttggtggtgctagtcttaatccagaagattttttggctatcattgacaaaacttcagggaaatcggagtaaa

SEQ ID NO: 290456 - DNA, 378 bp, Unknown
  Bacterial polypeptide expressing nucleotide sequence isolated from the Sargasso Sea
ttggtgaaaccgaagaagaaaacaagaatgatcaaactaaagatgttttaaaaagacaattagaagtaattaaggacgttgaatttaatgattcattggttatagcttatgagccagtttgggcgattggaactggaaatacaccaaccccagataaaattaatgaaattcataaattcataaaagatgttgtacaatccttatcagataattctgcaattcctatggttttatatggaggaagtgtaaaccaggagaatgctgaaaacttttttaaagaagaatctgttgatggcgctttaattggaggtgcttctttagatggcagacaatttgctaatattattaatatttttaatggaatagatttaaaatgat

SEQ ID NO: 290457 - DNA, 451 bp, Unknown
  Bacterial polypeptide expressing nucleotide sequence isolated from the Sargasso Sea
tggggacagtgatgttatcatcagagcaaaggcaagattactactaaatgagatgatcactccaattatttgtgttggtgaggatgaatcagttagaaacaacggtcagcactttagttttgtgaagagccagttgaaacagggactgccttacctagagtttggagagaacgttcgggatattgtaatagcatatgaaccaatttgggcaattggttcgggtaaaactgcaacattggcgcaaattgaggagatggcaaaagagatacacacgattgtaggtaatttctatcaacactttagccaactccgtataacagtactctatggtggaagcgttaaaccggacaatgcaaaagagatattaggtctacctagcgttgacggcctccttatcggaggggcgtcattggtgccgaaaaatatggaacaaattttatcattttgctga

SEQ ID NO: 290458 - DNA, 472 bp, Unknown
  Bacterial polypeptide expressing nucleotide sequence isolated from the Sargasso Sea
aatggttggggccaaatatgttatcttaggtcattcggaaaatcgcgattctggtgaaacggataaattaattaatgccaagattagagctgcaactcatgcaggtctaaaggttattttttgtataggtgaaaccttaggtcaaaaacgaaaaaaaattaccaaaaaaattttatctaagcaaattattataggtttagaaaaaattaagaaaagaaaaaatattataattgcttatgaacctgtgtggtcaattgggacaggtctaattcctaaagcagatgaattatttaatactattaattatataaaaaaaaaagttaggaatattaaagttttatatgggggttcggtaaatccaaaaaatataaatgaattaaaattaataaaaaatattgatggatttctaataggaggtgcctctcaagatcccaaaaaattcattgatataatcaaaaaaacgtataattaa

SEQ ID NO: 290459 - DNA, 490 bp, Unknown
  Bacterial polypeptide expressing nucleotide sequence isolated from the Sargasso Sea
attgggagcaaaatatattattttaggtcactctgaaaatagagcagaaggggatacaaataaaattattttgaaaaaaattgaatcagctctgaaaaataatttaaaagttattttctgcgtaggagaaactttaaaagatcgattaaatggaaaaacattttccattttaaagcagcagttaaaatcttcaattaaaaataattttaaagcaaaaaatattataattgcttatgagcccatatggtcgataggaacaggaaaaattccaaagaattatcatatcgaaaaaaatttaaaattcataaaaaaagagtttaaaaaaattgttaaaaaaaagtattccccaacagttttgtatggaggttcagttaatgataagaatattagtaatttttctttaaattcagaaatagatggctttttaataggaggagcttctcaatcaccaaaaaaatttattgatataataaaaaattactataaataa

SEQ ID NO: 290460 - DNA, 769 bp, Unknown
  Bacterial polypeptide expressing nucleotide sequence isolated from the Sargasso Sea
atgtcacatcctctagtcattgcaaattggaaaatgaatttaccctctggaggcatttcaagctggattcaaaatgagatgttatctaataataatgaacgagattttaataacaaattttcccactttaaatttatgggaattgcccctccaatttctcacctaactgaacttaaacaacaatttagatttggatttcttggcgcacaagatatctctagatttaatgatggcgctaaaacgggagatataagtgctgatatggtgattgacaaaggctgcacattttcaattttaggtcattcagaaagaagagagttttataatgaaacaaatagcattgtttcagaaaagctaagaatatgtctcgagaagaatattgtgccagttgtctgtattggtgaatctcttgaagactataacgtaggtaaaactcttgatgtgctggagatgcaactaaaagaaatatttacatcaatatctactaaaaagactgttgtaatagcttatgagccagtttgggctattggttcaggaaagacacctactgtagatgaggtgaataatattcaccaacatattaaagatatagtacaatccatcgctgaaattgaagctatcagtgttatttatggcggcagtgtaaattgtgaaaatgctaaaagtttctttcaacaaacaaatattgatggggctttaataggtggagcttcattgaatggaaaagattttttagatatttataatgattttttggagactttttaaa

SEQ ID NO: 290461 - DNA, 703 bp, Unknown
  Bacterial polypeptide expressing nucleotide sequence isolated from the Sargasso Sea
aatgtacggtgatttagcaacacttaattcactcgataaagttataaagttttcaaaaacaataaaagaaaaaagatttaaattaatttactgtccacctaatactctcattcgtcctttgtcaaaaagattaaaaaaaacaaagattgaagttggtgctcagaactcccatgagagtgatcgttatggagcctttactggtcaaataaattctaaaatgttaaaaaatgtcggtgctcaatatgtaatattaggacactctgaaaatcgaaagttaggggaagataataagaaaatcaatttgaaaattaaaagtgcattaaaggctggactaaaaattatatattgtattggcgaaacattaaaagagaaaagaaacaaaaaaactaatcatgttttaagtaatcaaattaaaataggtttgaaaaaaattaaaaataaaacaaacataataattgcttatgaaccagtctggtctattggcactggattaattccaaagacaaatgacttaataaaatctatttcatttatcaaaaataaattaggtaaaaaatcaccaaaaattttgtatggaggctctgttaatggtgagaacatcaaaaaattaaaaaatattaatatcattgatggttttttagttggtggggcatcacaagacccaaagaaatttattgatataattaaaaaaaccattaattag

SEQ ID NO: 290462 - DNA, 624 bp, Unknown
  Bacterial polypeptide expressing nucleotide sequence isolated from the Sargasso Sea
acaaagaatcaatttcccttgctcacttattattagaaattgttaccaaagatataactagagttatggtatctccaaaccatctttatttaaatgaagtaaatcaaattttaagtactacaaatattgaagttatatctcaaaatttaacatctactgaatcaaaatcagatactggaggaattacactaaaaaatctcaaggaaattaatattaataggtccttagttgctcattcagagacaaggataagagagaaaaatccacaaagtattcttttagaaattataccaattggttttccatttgttctctgttttgaagagattagtcaaataccttttgatatattaaatgatgattttgaaattattctagcatacgagcctgtttgggctattggaactggcgaaactgcttcaataggtcatattaacgaaattcattcagatgttaaatcaaagttatctaaattaggtttaaatattccagtactttacggcggtagtgtaaatccatcaaattgtaaagaaattttagcttcagacaatgtagacggagttctagttggcggtgcttccaccaagtatgatcttttcaaggaaatagtgaattctatttaac

SEQ ID NO: 290463 - DNA, 430 bp, Unknown
  Bacterial polypeptide expressing nucleotide sequence isolated from the Sargasso Sea
agaagtaaaactgaaacattacttagaaatggaattagaccaattctatgtgttggcgagtctcttcaacaaagaagttcaggcaatcatgaagatgtcgtcgtagctcaattacgaaaagtattggcaggttttactactgaagatcagagtcgctgcgttttggcatatgagccgatttgggccattggaacaggtaaaaccgcaactccagaacaagccaattctatgcactctataattagaaaagagataggttcactttgtaatactgatgtagcagctaatattcaaattctctacggaggcagtgtaaatgttgaaaacgcggaatatttacttgctcagtcagaaattgatggggccctcgttggtgggtcgagtctcaatatagaagatttttctcgaattgttgccgccggaacgtaat

SEQ ID NO: 290464 - DNA, 346 bp, Unknown
  Bacterial polypeptide expressing nucleotide sequence isolated from the Sargasso Sea
aatgacaaaaattattgctgcaaactggaaacaaaatggtagtcttaaatttctgataaagttaactcgagatataagaactggtattaacagattaaaaattagaccaaaggtaattctcttcccgccatcagtttatttagattcaatttctaaggaaattaaaaagaataaatctaacagtaaaaatatacaacttggcattcaaaatatctctccatatgaaaatggcgcatatacaggagaaatatcgatcgatatgacgaatgattttagctgctcatatatacttatcggacattctgaaagaagacatatttttatggaatctgaggaattgatttca

SEQ ID NO: 290465 - DNA, 766 bp, Unknown
  Bacterial polypeptide expressing nucleotide sequence isolated from the Sargasso Sea
aatgaaaaaaataataattggaaactggaaattaaatcttgatcatttacaaggtattcaattactacagaaaataaattattcattagataaggatatagaagaaaaaatagacatagtcttatcaccatcacatacttcattgagatctttacaaactgtaatttctacagataatcttaaaattaaaatttcatcacaagatgtatctacctatagtgatggagcatttactggcgaagtgtcagctattcagcttaaaaaattaaatatagattattcaattattggtcattctgaaagaaggcttcattttaatgaatctgacaatgatgtgaacattaaattaaccagattattagaaaatgaaataattccaattttatgttttggtgaaagtctagaacaaagatcagaaggttcatatttagaatttatcaaaaatcaaataaatgaaggtttaaaaggtgttagaaaagataaggttaataagttagtactagcttatgaacctatctgggcaattggcactggtgaagttgcatctatagaaaatattgttgaagtattagattttgttaaggacttagtttctgataagcctttcttttcagatgaaactgtaaaattaatttatggtggaagcgtctctccagataattcttctgaaatattaaacactagtattatagacggtgcattagttggtggagcatctctagatgcagataaattcgttgatattatcaaaagtgttaatttatga

SEQ ID NO: 290466 - DNA, 292 bp, Unknown
  Bacterial polypeptide expressing nucleotide sequence isolated from the Sargasso Sea
aaacaaattgaagaaagtgtcccagaaatatcaaactttgataacacaatcatagcttatgaacccatttgggctatcggcacaggtttaactccatccttagatgaaattgaagaagttcattcatttattaaaaatattaatgaaaaatataacaattttagagttttatatggcggttctgtaaaagctgcaaattcagcagatattaacaatttacaaaatgtcgatggatgtttggttggtggtgcttccttaaaagttaacgaattcaacaaaattatatcttgat

SEQ ID NO: 290467 - DNA, 721 bp, Unknown
  Bacterial polypeptide expressing nucleotide sequence isolated from the Sargasso Sea
aatgaaccataatttaccagagactaaaaaatatttaaatattctgatcaaaaattcaaaatatcttgcaaatcctaaaattaatttttttattattcctccttttacttcattagctttattcaataactataaaaaaaaattaccttttatttatggtgcacaaaacatgcattgggaagaaaaaggtgcttttacaggagaggtgtcagcatcgatgttaaaatcatgtgggtgtcaaattgttgaaattggtcatgcagaaagaataaaatattttaacgaaaattttacacatatgagcaaaaaaattaatttagcattaaaatataatttaactcctatagtttgtattggagaggtaaaatatgaaaaaaatatattaaaaagaaaaaaaattttaagtaaacaaatagaaattttatttaaaaaaattagaaataaaaaaaaacaaattattttagcatatgaacctatatgggcgattggggaaaaaaataaagctgcaaacattgaatactgtaatgaatcaataagttatattagaaaaagtgctttaaaaaaattaaataaggttagcgttctttatggggggagtgtaaatgaaaaaaattatagtaaatttacagaaagcaaatttattgatggaatatttattggtcgagcagctttgaatgccaataattttataaaaatatgcaaaggaataactaaaaaatga

SEQ ID NO: 290468 - DNA, 508 bp, Unknown
  Bacterial polypeptide expressing nucleotide sequence isolated from the Sargasso Sea
ttgaggaaacccattgtagccggaaactggaaaatgaacggtaatttgtccagggccaaagatctggcaggggagattgttcgaggtctgtctgttaatcccgttagggagtgtgaggtagtcctgttgcctacttttgttcatctgacaacagttaatagactggcatcgggcactgacattgctatagggtcgcaggatctggatgaaaggaatgaaggcgcagtgacaggtggcatatctgcctcaattttgaaggatgctggatgttcctttgcgctatgtggacattcagagcgtcgaacgctcttcgctgaaaatgataaccaagttgcgtcaaagtttgctgcggctatagatgccggactgattccgatactttgtcttggcgaaaccctggcccagcgagagcggggcaagacggctgatgtggttttcgcgcagctggatgctgtgttagaacagcgtgggcttcaaatgcttttctcgggcggttttagcttatgag

SEQ ID NO: 290469 - DNA, 550 bp, Unknown
  Bacterial polypeptide expressing nucleotide sequence isolated from the Sargasso Sea
ggtgcccaaaactgtcatcacagctatgactacggtgcgtacactggccaagtaaattctaccatgcttaaaaatgttggagcaaagtttgttattttgggacactcagaaaataggcagttaggagaaacagacaatctaattaatttaaaaattaaaagtgcaattaaatcagacttgaaaattatattttgtattggcgaaactttgaaagaaagaagacaaaaaaaaactaatcaaattttaaaaaaacaaattgaaaaaggtttaaaatcgataaagaataaatctaaaattattatagcctatgagcctgtatggtctatcggaacaggtgtaattccaaaagaagctgatttaaataaaactatttcatttattaaaaataaatttataaaaaaatatcctaaaattctatatggtggatctgttaatgctaataacgtaagtatattaaaaaaaattcccaacattgacggttttttgattggaggcgcatcgcaaaacccaaaaaaatttattgatataatcaaaaaaaccattaattaga

SEQ ID NO: 290470 - DNA, 643 bp, Unknown
  Bacterial polypeptide expressing nucleotide sequence isolated from the Sargasso Sea
ctgatttgtccttcatttccttatctaggtcaagcttttgaggcttttaagaaccttggaataagagtaggtgctcaagattgtcattataaagcgaacggagcatatacaggagacgtttcatctaaaatgataagggaacttggatcatcctatataatagttggacattcggaacggcgtgataattatcaattagaagacttgcatatttttgaaaaagtaaaaaggactattgatgaaaatcttattccaattatttgtataggagaaaatttagcagaacggcaaaatgatgacacagaaacagttttgaaaacccaactaaatttttttctaaaaagtgatttgaaggaagtcgactttgtagttgcttacgagccgaagtgggcaatcggcagtggacaagtggcatctctgctagaaatagacaaaacgcatacgttcataagagaaacaattagccgaacattcaatgcggaaatcgcaagaggcacgaggattatttacggcggatctgtaaaaccagataattccaagaaaattctaaaattagaagaagttgacggagttcttatagggggagcttctttaaacccacaagatttcttttcaataataaaagaatttaaaaaagattaaa

SEQ ID NO: 290471 - DNA, 475 bp, Unknown
  Bacterial polypeptide expressing nucleotide sequence isolated from the Sargasso Sea
tatgataaatagaaagcaatattgtgttgcaaatttaaaaatgaatctttctggtaatcagacaatggattatatatcagaattaaataatttatttgataaatctggcaataataaagttaatacaataatttgtccttcagttacatctttatctattttctttgattatattagagataacaattattgtttaggagcacaaaatattcatcataaagaatatggtgcatatacaggcgaaacatcaatcaatatgatatcagactttattaattttgtcatacttggacattctgaaagaagacagtattttaatgaaactaatgaaataattaataaaaaaatcataaaggtttctcaacatagtttaaattctattgtttgtataggcgaaactctagagcaaagaaagaataatgaagttaaaaaaacattaaaaaatcaactgtcaacatgccttcaaaatgttgag

SEQ ID NO: 290472 - DNA, 349 bp, Unknown
  Bacterial polypeptide expressing nucleotide sequence isolated from the Sargasso Sea
taatcaaactacagaggtgttaaacagacaattagaagtaattaaggatattgaatttaatgattcgttggttatagcttatgagccggtttgggcaataggtactggaaatacaccaacctcagataaaataaatgaaattcataaattcatcaaagatgttgtacaatccttcacagatgattctacgattcccatggttctatacggcggaagtgtgaaccaggagaatgctgaaaacttttttaaagaagaatctgttgatggtgctttgatcggaggtgcttctttagatggtagacagtttgctaatattattaatatttttaatggaataaacttaaaatga

SEQ ID NO: 290473 - DNA, 622 bp, Unknown
  Bacterial polypeptide expressing nucleotide sequence isolated from the Sargasso Sea
tatgaatcaaaaaataatcataggtaattggaaaaattatttaaattatgaagaatcaatccttctatcaaaagcaatatccaacatcaatatttccaataaaataagagtaatgatttctccaaatcacttatatatcaaagaagttaatgaaattcttagaaaaactaatgtagaagttatagctcaaaatttaacctctttagaatcaaaatcagatacgggtggaatatcagcagtaaatcttaagaatttaaatataaatagatctctggttgctcattcagaaacaagacttagacagaaagaccctcagaatattctaaatgagattataccaatcggctatcaatttgtattatgttttgaagaaatagatcagataccatttgatttattaactaataattttgaaataattcttgcttatgagcctgtttgggcaataggaacaggtgagactgcatctattgatcacattaatgaaattcatgatcaggttaaatcaagactcaaggatttaagcctaaatataccagtcttatatggtggtagcgtaaacccttctaattctaaggatattttagaatctaaatttgttgatggagttttagttggagga

SEQ ID NO: 290474 - DNA, 474 bp, Unknown
  Bacterial polypeptide expressing nucleotide sequence isolated from the Sargasso Sea
taattataggacattccgaaaacaggtttgaaggtgatacaaataaattaataaaacaaaaaatagaatcagctttaaaacaaaaccttaatgtaattttttgtgttggtgaaactttaaaagaaaaaaataagggaaaaacatttaaagttattaaaaatcaaataaaaagttcattatccaaaaaatataatttcaacaagattattttggcatatgagccggtatgggctattggaactggtaaaataccaaaaatccagacagttaaaaaaacaattatatttattaaaaaccaatttcaaaaaattttgaaagtcaaaaaaacacctgttgtcttgtacggaggctctgtaaataatagtaatattcgaatgttttcatctatttcagagatagacgggtttttaataggtggagcctcccaatcatcaaaaaaatttattgatataataaaaaattactataaataac

SEQ ID NO: 290475 - DNA, 275 bp, Unknown
  Bacterial polypeptide expressing nucleotide sequence isolated from the Sargasso Sea
actagtcatagcgtatgaaccggtgtgggcaataggaactgggaagacagcttcagcggaagatgcccaactcatgtgtgcacatatcaggagcgtcgtgactgacatacataagccggctgggacgaacgtccggattcagtacggtggctcagtaaacgcgtcaaacgctgccgaattgatgtcgatggaagatattgatggagcactagtcgggggagccgctttggaagcagcatcgtttgccaggattgtgagcttccaagacgcctaga

SEQ ID NO: 290476 - DNA, 382 bp, Unknown
  Bacterial polypeptide expressing nucleotide sequence isolated from the Sargasso Sea
atgattattgctaattggaaatgtaatggaagcaaagccatgataaatacgtggattaataattttttaacaaattatgatgaaactaagaaagcatttattggcatcgcaccaccttcaatatatatagaaagccttcttgaaaccgagctaaataagttagcagaaattaatataggatctcaagatattgatatttcatctggtgcaagaacgggagcaatttcttctgatatgattttagactttgattgtaaattttcaattattggtcactcagaaagaagacaactttttaacgagacaaatgaagaaattaaacaaaaaattttaaaaattgcaaaaaaaacaataactattttgtgtgttggtgaaacctaga

SEQ ID NO: 290477 - DNA, 703 bp, Unknown
  Bacterial polypeptide expressing nucleotide sequence isolated from the Sargasso Sea
aatgtatggaaacctaaaatcattaaatacattgaataaagttattagattttcaaaatctaaagaaattaagaaaggaagattaatttattgtcctccaaatactttaatctcttcttttttaaaaaaatttgaaaattgcttaatagatattggaggtcaaaattgtcatgaaagtgaagattatggttcacacacaggttttgtaaattcaaaaatgcttaaaagctctggtgccaattatgtaattttaggtcattcagaaaatagacaaaagggtgaaacagacaaactaattaatctcaaaattaaaagtgccatcaagtcaaaattaaaagttattttttgtattggtgaaactttggctgaaaaaaagaaaaaaaaaacaaagtcaattttatcaaaacaaattaaacttggtttaaaaaagattaaaaaaaagtctaatatttttgttgcttatgagcctgtttggtcaattggcactggaaagattcctaaaatcgacgaacttgaacaaacagttgaattcattaaaaaaaagtttaaaggtaaattaccaaagattttatacggcggatctgtaaatccaaaaaatataagaaatttaaaaaaaataactaacctagatggttttttaattggtggagcttcgcaaaactctaaaaaatttattgatatagtaaaaaaaacgtataattag

SEQ ID NO: 290478 - DNA, 652 bp, Unknown
  Bacterial polypeptide expressing nucleotide sequence isolated from the Sargasso Sea
aatgtatggaaattttacatctataaattctataaatagtgtaatcaaacttacaaaattgaaaaaatttagaaaaattagaatagtttattgtcctccttatactttgctggattcatttgtaaaaaaaaccaaaaatacaaaaatttatattggtgctcaaaattgttattacaaatctccatatggatcttataccggctctataagttgtaaaatgatccaaaatacaggatcaaaatttgtaattatcggtcattcagagagaagaaaggaaggtgacactgataaaaaaattaatttaaaaattaaatctgcattagattctaatttaaaagttattttttgcataggagaaacgctacatcaaaaaaaaaataaacaaacctatagaattttacaaaaacaaattataagtggacttaaaaatataaaaaaacttcaaaacgtaataatcgcatatgaacctgtttggtcaattggaagtggagccgttcctaataatgagcttcttagtaaaactattaaatttattaaaaaaatattgaaagaaaaaattaaatatgaaagggttaaaattttttatggaggttctgtaaatccgactaatattaaaaaaatcagaaaaattaaacaaataaatggctttctt

SEQ ID NO: 290479 - DNA, 541 bp, Unknown
  Bacterial polypeptide expressing nucleotide sequence isolated from the Sargasso Sea
aactgtcatcacagctatgactatggcgcgtatactggccaagtaaattctaatatgcttaaaaatgttggagcaaaatatattattttaggacattcagaaaatagacagctaggtgagacagataatttaattaatttaaaaataaaaagtgcaattaaatcaggactcaaaattatattttgtgttggtgaaaccctgaaggaaagaagacaaaaaaaaaccaaccaaattataaaaaaacaaattgaaaaaggattaaaatcgataacgaataaatctaaaattattatagcctatgagcccgtgtggtctattggcaccggtataattccaaaagaagcagttttaaatgaaactatttcatttattaaaagtaaatttgtaaaaaaatatcctaaaattttatatggcggatctgtaaatactaataacgcagataaattaaaaaaaattcctagcattgacgggtttttgattggaggtgcatcgcaaaacccaaaaaaatttattgatataatcaaaaaaaccattaattaga

SEQ ID NO: 290480 - DNA, 706 bp, Unknown
  Bacterial polypeptide expressing nucleotide sequence isolated from the Sargasso Sea
atgacaaataataatatgatctttatagctaattggaagatgaatggagaaaaaagtcatatctctggcattaaaaaaaccataaaatttttaaaacaatcaaaaaataaaaaaaaacaaataatttactgcccaccatttaccctaatttcatcggttaaaaataaagtaaaaaacactaaaattaaagtaggtgctcagaatctttctcatttaaatgattatggtgcattgacaggatctgtaaactctaaattaattaagtcagcaggaggtgactatgttattgttggtcattctgaaattagaaaacaggaaaatgatatactaataaataaaaaaattcactcagcacttaaagaaaaattaaaagtaattctttgcattggagagacatataaagaaaaaaaaaataataaaactctctcagttcttaaaagacaaataacaatagccttaaaaaatataaaaaaaattaataatattatatttgcatatgagcctagatgggcaatcggaactggaaaaataccaaaatcatccgaattaagaaaaaactttaaagatattaatcatataattaataaattaaaaaaaaatcaaaaatataaaattatttatggtggatctgttaactcaaaaaatgtattagagttaaaaaaaattaatgatttaaaaggatttttaataggaagcgcttcttgag

SEQ ID NO: 290481 - DNA, 691 bp, Unknown
  Bacterial polypeptide expressing nucleotide sequence isolated from the Sargasso Sea
ggattaagcacattaaattcacttaataaagtaatcaaatttttaaaaatttttaaaaagtctaataatactaaaattatttattgtccaccaagcacattaattcgtcctctgtctaaaaagattataaattccaaaattcaagttggtgctcaaaattgccacgaaagctctacatatggtgctgcaactggttccataaatcctacgatgctaaaaaatgttggcgccaagtatgttattctaggtcattcagagaatcgcgagaccggtgaaacagataaattaattaatgcaaagatcaaatcagcaactaaatcaggtttaaaagttattttttgtattggtgagaccttaagtcaaaaaagaaaaaaaattactaaaaaaatcttatcaaagcaaattaccttaggtttgcaaaaagttaagaaaagaaaaaatattgtaattgcttacgaacctgtgtggtcaattgggacaggtgtaatacccaaaccaaatgatctgcttagtactgtcaattttataaaaaaaaaagttagaaatatcaaagttttatacggtggttccgtaaatccaaaaaatataaatgaattaaaattaataaaaaatatcgatggatttctaataggaggagcctctcaagatcccaaaaaatttattgatataattaaaaaaacatataattaaa

SEQ ID NO: 290482 - DNA, 677 bp, Unknown
  Bacterial polypeptide expressing nucleotide sequence isolated from the Sargasso Sea
aaattcattacataatgtagaaaaatttttaaaaagatttaagaaaaataagtttagtaaaataatctattgtcctccctatactttgataagacctatgtctaaaaaactccaaaaatcaagaattgaagttggtgcccaaaattgtcacgaagcagaaatttcaggtgcatttacagggtcagtaaatccttcaatgttaaaaagtgtaggtgctaaatacgttattattggtcattcagaaaatcgaagaaatggagaagatgataaattgataaaccgtaaaataaaaacttctttaaaaatggggttaaaagtaattttttgtataggtgaaaccttacaggaaaaaagaaaaaaaattacaaaaaaaatattgtctaaacaaataaaagatgggttaagaaatataaaaacaaaaaaaaatattattattgcttatgaacctgtttgggctattggaactggtttaatcccaaaaataaaagatttgtttttgatagtagcttttataaaaaaaagaatgaaaaatgttaaaattttatatggcggttcggtaaatccaaaaaatattcaacaattaaaaattatagataatatagacggttttcttgtggggggagcttctcaagactctaaaaaatttattgatataatcaaaaaaacatataattaag

SEQ ID NO: 290483 - DNA, 670 bp, Unknown
  Bacterial polypeptide expressing nucleotide sequence isolated from the Sargasso Sea
atgaaacaaaaaattataattggtaattggaaaaactatttgggtcacaaagaatcagtttcccttgctcactcattatcagaacttgttaccaaagataaaactagagttatggtatctcctaaccatctttatttaaatgaagtaaatcaaattttaagcactacaaatattgaagttatatctcaaaatttaacttctgctgaatcaaaatcagatactggaggaattacactaaaaaatctcaaggaaattaatattaataggtctttagttgctcattcagagacaaggataagagagaaaaatccacaaagtattcttttagaaattataccaattggttttccgtttgttctctgttttgaagagattaatcaaataccttttgatgtattaaatgatgattttgaaattattctagcatacgagcctatttgggctataggaactggtgaaactgcttcaataggtcatattaacgaaattcattcagatgttaaattaaagttgtctaaattaggtttaaatatcccaatactttatggtggtagtgtaaacccatcaaattgtaaagaaattttagcttcagacaacgtagacggagttctagttggcggtgcttccactaagtatgatcttttcaaagaaatagttaattctatttaac

SEQ ID NO: 290484 - DNA, 151 bp, Unknown
  Bacterial polypeptide expressing nucleotide sequence isolated from the Sargasso Sea
tccaatactttatggtggttcagtaaatggatctaacgcttttgaaatttttaacgttcctaacgtaaatggtgcactcgttggtggagcatcactttcttttgataaattttctcctataataagggcactcgaagatgccaattgctga

SEQ ID NO: 290485 - DNA, 317 bp, Unknown
  Bacterial polypeptide expressing nucleotide sequence isolated from the Sargasso Sea
ttttatttgctcgcaattaaaggagtgcttcaaagacattcaagctgataacatagttattgcttatgaaccaatatggtcaataggtaccggcactttacccaaaattaatgagattagcgaaatacacagttctataaaagattattgtataaaccatcttaaatttaaaccggaaagtattctctatggtggaagcgttaatgatgaaaattgctcgaatttgataaatgataagtatattgacggatttttagtaggtggagcatccttaaagggcaattcatttgctaaaatagtaaataatagtatttaaa

SEQ ID NO: 290486 - DNA, 310 bp, Unknown
  Bacterial polypeptide expressing nucleotide sequence isolated from the Sargasso Sea
tatggtaaatcttgataaatattcctcaatttttatagcaaattggaaattaaatggaaattcctcatttttaaaagattattatgaaaaattaaaagttaattctaataattgtaccatcatttgctcaccgtcaatttacttaaaatcgctaaaaacaaataataaaaacttattttgtggagcacaagatgtctcctattataaagaaggtgcttacactggtgaattatctgccataatgttaaaggataataatatagatttttgtttggtcggacattctgagcgaaaacaatactttgctgaa

SEQ ID NO: 290487 - DNA, 535 bp, Unknown
  Bacterial polypeptide expressing nucleotide sequence isolated from the Sargasso Sea
atgttcattcttatcaatctgaaaacgtacgtgtgtgatccgattgaaattgcaaaggccgcaaattctatctcaaatgaattggacgttagaattgcagttgcgcctcaggtgattcacttaaaggaagtggtagaaacaggagtagagacttgggcgcaacatatggataaagagggggataaagttagaacaggaacagttacctcagcgggattatctgaggcaggagtgaggggtagtttgttgaatcattcagaacataggttgttacttgcagaaattgatgaaagcatacaggaagcgtctgaagctaaattagaaacagttgtgtgtgcaaataatccatcccaaattgctgctgcaacgtcgttggatccaacatttgttgcggtggagcccccagagttaatcggaagtggaattccagtaagcaaagctgccccggatattgtcagggatgcggtcgagtctgcaggaaaagttaacccaaaaattccagtcctatgtggagcaggcatatcgaatggggagg

SEQ ID NO: 290488 - DNA, 412 bp, Unknown
  Bacterial polypeptide expressing nucleotide sequence isolated from the Sargasso Sea
atgacctgtgctgagtctaagtcttatttagaagagtttatacctttaataaaaaacataaatgaagatcgtaaagttattattgcgccaccttttactgctatttcaaccttttctgatcattctgattttgattgtttagaaatttctagtcaaaatattcattgggagaatgaaggagcatttactgcagaaatttcccccaaaatgcttattgaacatggtgtctcctttgcaatagttggtcacagtgaaccaaggaagtattttagtgaaagtgatgaacaaataaataaaagagcagtttttgctcaatctagtggacttactcctatagtttgtgttggagaaacactagaacaaagagagagagaagaagctgatagagttattactagacaagtgaacaagg

SEQ ID NO: 290489 - DNA, 571 bp, Unknown
  Bacterial polypeptide expressing nucleotide sequence isolated from the Sargasso Sea
atgaaagaaaagataataataggtaattggaaaaattatttaaatttagataaaactatagaacttgcagcaaaggtttccactgaacaaatacctgacaatataagactcatggtttctccttgtagtctttatataaatgaagtcaatcaagtcttaaaggaatcttcaattgaagtaattggtcaaaacatcacttcctatgaatcttctgcagatacaggtggagtgacagcgattggtttaaataatattggagtaagcagaagtattgttgggcattcagaagtaagaaaaagaaataagggttttaagtctgaagatatattgacacaactaatacctgctagatttaaatttattttatgttttgaggttattgaacagattccttttgatatattaaataatgattttgaaatgattcttgcatatgaacctgtatgggcaattggtacaggggaaacagcgtctattaaacatattaatgaaattcatggtttagtaaaatcaaaactttcaaaattaaatctagatattcctgtactatatggtggaagtgttaaccctg

SEQ ID NO: 290490 - DNA, 517 bp, Unknown
  Bacterial polypeptide expressing nucleotide sequence isolated from the Sargasso Sea
ggttcacatacagggttttgtaaattcaaaaatgcttaaaagctctggtgccaattatgtcattttaggtcattcagaaaatagacaaaaaggtgaaacagaccatctcattaatctcaaaattaaaagtgctatcaagtcaaaattaaaagttattttttgtattggtgaaactttggctgaaaaaaagagaaaaaaaacaaagtcaattttatcaaaacaaattaaacttggtttaaaaaagatcaaaaataagtctaatatttttgttgcttatgagcctgtttggtcaattggtactggaaaaattcctaaaatcgacgaacttgaacaaacaattgaatttattaaaaaaaaatttaaaggtaaattaccaaagattttatacggtggatctgtaaatccaaaaaatataggaaatttaaaaaaaataactaacctagatggttttttaattggtggagcttcacaaaaccataaaaaatttattgatatagtaaaaaaaacgtataattag

SEQ ID NO: 290491 - DNA, 527 bp, Unknown
  Bacterial polypeptide expressing nucleotide sequence isolated from the Sargasso Sea
tccgccaactggctccataaatgcaatgatgattaaatctttaaaatgtgaatatgttattctaggtcattctgaaaaaagagcaaaaggtgaaaatgataaaattattaataaaaaaataatctcagctcttaaaaataatctaaaagtaattttttgtattggtgaaacttctgcacaaaaaaagaaaaaattaactaaaaaagttctattcaatcaacttaataaaggattaaaaaaagtaaaaaataaaaataacgtattaattgcttacgaacctgtttggtctataggttctggaataattccaaaacctcaagctttgaaagaaaccacaaatattattaaattgtttttagctaaaaagatgaatttcaaaaatccaaagatattatatggaggatcagtaaatcctaaaaatatttatttattaaaaaacattggaaatttagatggatttttaataggtggagcatctcaaaatagtaataaatttattgatataataaaaaaaacgtttaattaaa

SEQ ID NO: 290492 - DNA, 358 bp, Unknown
  Bacterial polypeptide expressing nucleotide sequence isolated from the Sargasso Sea
tgttaaaacaaatagaagaatagcgtcgtttttaggttcagaacgaatacaaaaatgtaatattgcgtatgagcctatttgggctatcggaactgggaacgttgctaaagagtctgatattaaagaaatgcatgatgccataagggtatttttagaggaatccattagcaagagttctgctcaagatatttctcttctttatggaggaagtgttaactatgaaaatgttttgtccattgttgaccaggagaatgtggatggggttcttgtaggaggggcttctgtttctatggaaacttttggtaaactattggaagcgttgtcaggtattggtagcagtagtaagcagtattcgtag

SEQ ID NO: 290493 - DNA, 426 bp, Unknown
  Bacterial polypeptide expressing nucleotide sequence isolated from the Sargasso Sea
aagcggtggcccatgggtttgatgtaatgatttgccttggcgagacgctgggcgagcgtcaatctggaaaggccgaacaagttgtgattgatcaattgcgtatttcggtgcccgaggacataccgcaaaatcggttgatgatagcttatgaacctctgtgggccattggcacgggcgaagttgcctcgcttcaggatatcgcagctatgcatgacgcaatttccagcgaacttcccaaaagtcaagatggtgcgacttcagctaaagcgccagtcctttatggtggatcagtcaatgcaggtaatgctgccgccatttttgcgcttgataatgttcacggtgggctagtcggtggtgctagccttgacgctgcggcatttggctcaatctgcgacttagcacagcagcagatgttaagatgttagc

SEQ ID NO: 290494 - DNA, 463 bp, Unknown
  Bacterial polypeptide expressing nucleotide sequence isolated from the Sargasso Sea
gccaagtatgttattttaggtcattcagaaaatcgtgagtctggtgaaacagatgaattaattaataataagattaaagcagccactaagtcaggtttaaaagttattttttgtatcggtgaaactttaggtcaaaaaagaaaaaaaattaccaaaaaaattttatcaaagcaaattgctttgtgtttacaaaaagttaataaaaaacaaaatattataattgcttatgagcctgtgtggtcaattgggacaggtataatacctaaactagatgacctattcagaactattaattttataaaaaaaaaagttaaaaatatcaaagttttatatggtggttcagtaaatccaaaaaatataaatgaattaaaattaataaaaaatatcgatggatttcttataggaggggcctctcaagatcctaaaaaattcattgatataatcaaaaaaacatataattaac

SEQ ID NO: 290495 - DNA, 163 bp, Unknown
  Bacterial polypeptide expressing nucleotide sequence isolated from the Sargasso Sea
aaatcagcggcggaagaggtgagaatccaatacgggggatcagtgaatgcagctaatgctggggaattgatgtcgatgcctgatatcgatggggctttggttggcggcgcatcactggatgcggcctctttcgcgagggtcgtcagctttcaagacacctagt

SEQ ID NO: 290496 - DNA, 625 bp, Unknown
  Bacterial polypeptide expressing nucleotide sequence isolated from the Sargasso Sea
aatggctgaaatagtagtggcagcaaattggaaaatgaataaaaccgtgtctgaatccgataacctgatcaaggaaattttagaaaagataccaccagttaattcggttacatgtgttgtttttcctccgtttctatcgattccgtcagctgccgggctgatagacggctcttctgtcaatttgggtgcccagaacgtgcattcagccaaaaacggtgcttttaccggggaagtgtcagcattaatgctgcaggattactgttcctatgtactgctcggacattcggagaggcgactacttttcggtgagactgatgcatttgttaatgaaaaacttgccggagcaatcgaatgtgggctaagacctatagtttgtgtcggcgaacaatcttcagatagggagagtggattaactgaaaatgttatcagaaaccagatcaaaaactcttttaaagatattcgggcgattaacaacataatagttgcatatgaacctgtatgggcaatcggtaccggtactgcagcatcgccagatgatgctgaggacgttaacaaattgataagagaagaactagctttcattttcggctctgagcaggtctcaaaaactcaatactttacggag

SEQ ID NO: 290497 - DNA, 496 bp, Unknown
  Bacterial polypeptide expressing nucleotide sequence isolated from the Sargasso Sea
gatgattgttgctaattggaaatgtaatggaagcaaagccatgataaatgaatggaccaacaattttttaacaaattatcttgaagtgaagaaagcatttattggtatagcacctccctcaatttatatagaaagcattcttgaaaccaagctaagtaagttaaaggaaataaatataggatctcaagacattgatatttcgtctggtgcaagaacaggagcaatttcttctgaaatgattttagatttcgattgtaaattttcaatcattggccattctgaaagaagacaattttttaatgaaaaaaatgatgaaataaaacaaaagattttaaaaattgcaaataaaacattaacgattttatgtgttggtgaaaccgaagaagaaaacaataatggtcaaactaaagatgttttgaaaagacaattagaagtagttaaggacattgaatttaatgattcattggttatagcctatgagccggtttgggcgatt

SEQ ID NO: 290498 - DNA, 733 bp, Unknown
  Bacterial polypeptide expressing nucleotide sequence isolated from the Sargasso Sea
ttgtttatgacaaataatattatctttatagcaaactggaaaatgtatggaaataaaaataatatcaatggaattgataaagtcgttaattttttaaaaaaaaataaaaaaaaaaaatttaaagtaatctactgtccaccatacacattattatctaaattaaaaaaaaaattttcaaagacaagagttttattaggtgcgcaaaattgtcatcatgaaataaattatggaccttacacaggatcaataaatgcaaagttattaaaaaatgaggaagttaaatatattataattggtcactcagaaaatagaagcagtggtgatactgattatattataaatcaaaaaataaagtcagccatcagagagaatttaaatgtaattttttgtgttggtgaaacactagaagagagaaaaaaaaaaattactagcaaagtaataaaaaaacaaattttaaacggattaagaaatatcgaagcttacaataaaattataatttcttatgaaccacgctggtcaattggaacaggtaaaattttacataaagaagatcttgaaaaagtaatatctttaataattaaaatattaagctcattaaagaaaaatgctaaatttaagattatttatggtggttctgtaaataaaagtaatattcatattttgcgaaaaattcagggtgtagatggttttcttattggtggagcttctttgaaagcgcaatatttttattgat

SEQ ID NO: 290499 - DNA, 754 bp, Unknown
  Bacterial polypeptide expressing nucleotide sequence isolated from the Sargasso Sea
tatgacaaataaatataagtattttgtagcaaactggaaaatgtttggtgatattagatcaattaattcgttaaaaaaagttattaaaataagtaaattaagaaaatataaaacagctaaaataatttactgtcccccatatacattgcttaatacttttgtatcaaggcttaaaaaaaccaatattaatgttggtgctcaaaattgtcatcaatcttcatcaggtggagcatacactggacatgttaattctcaaatgatcaaaaacataggctgcaaatatgtaattataggacactctgaaaatagaattgatggagatactgactcaaaaataaataaaaagattaaagcatccattgaaaataatttaaatgtaattttttgcattggagagaaaattaaagaaaaaaaattaaaaaaaacaaaaagtgttttgtataaacaaataaaaaaaggtctgcgcagattaaaaaatttaaataaaatagtaattgcttatgaacctgtttggtccataggtactggcatggttccaaaaaatcatgaattattaagcaatattctctatataaaaaaaattttgaaaagtaggtttaaacttaagaatccgaaagttttatatggtggttcagtgaatcctgtaaatataaaagatttaagaaaaattaatcaaattgatggctttttaataggtggagcatctcaaaattcttacaaatttattgatataataaaaaaaacctttatttag

SEQ ID NO: 290500 - DNA, 661 bp, Unknown
  Bacterial polypeptide expressing nucleotide sequence isolated from the Sargasso Sea
atgataaatctggctaatttttcttcaatttttatagcaaattggaaattaaatggaaatattgagtttataaaagaatattatcaaaaattaatacctaattcaaagaattgtattgttatatgttcacctaatatttatttaaatcaacttaagtcaaacaacaaatttttattttcaggtgcccaggatgtatctatttacaataacggtgcatatactggagagctatcctcctcaatgttgttagataataatataaatttttgtttagttggtcattctgaaagaagacagtatttcaatgaaagcaatgaagctataaaaataaaaagtacaaacttaattaatgaaagtataataccagtaatatgtattggtgaaagtttagaggaaaaaaaatcagataagactaaagaaattttaaaaaaacaaattgaaaattgtattccagaaatttcaaatcatcaaaacactataattgcttatgaacctatatgggcaataggcacaggattaacaccttcaattagtgaaattgacgaagttcatcagtatataaaaaatataaatgataaatttattaattttaaggtaatttatggaggttcagtaaagtcatcaaattcagctaatggaaaaaccccacctttacaaaaaa

SEQ ID NO: 290501 - DNA, 619 bp, Unknown
  Bacterial polypeptide expressing nucleotide sequence isolated from the Sargasso Sea
gtctattcaacaataattgaagcagataaattaaatttatttttatcatctcaaaatgtgtcggagtttgttcagggcgcatatactggagaagtttcatctgaacagttagtaaaattaaaagtttcttattgtattgttggtcattctgaaagaaggcagcattttaaagaatcagatgagtcaattaatttaaaggtccataatttgataaacaagagtatcactccaataatttgttttggcgagagtattgaacaaagaaacagtggtaagtatttggattacataatcaaccaagttgatagtgctacaaaaggacttagaaaagataaggttgatgagatagtttttgcatatgaaccaatatgggcaattggaacaggggagactgcatcattacaaaatattattgaagtagtttctgaagtcaaaaaatatatcgagtccaagcctttttataatgaagaaaaaataaaattcgtatacggaggtagtgtctcaccaaataattcggaggagattctaaattccaatattattaacggtgccttggtaggtggagcatcacttgatgtagaacaattcgtaaaaataattgaatcaattgaattatgaa

SEQ ID NO: 290502 - DNA, 388 bp, Unknown
  Bacterial polypeptide expressing nucleotide sequence isolated from the Sargasso Sea
aatattgttttgggtgagacattagaacaaaggaatagtaatcaatatttagaacatattacaaatcaaattaattcagctgttaaaggtttaagaaaagacaaagttgaaaatcttgtttttgcttatgaaccaatctgggcaattggaacaggagaagttgcctctctagaagatgctgttgaggttatgtctatggtaaaagaaaatatttctgaaaaacctttttatgacagtgacagtgtccgctttatatacggaggtagtgtcactcctgataactcttctgaattattaaattctaaaattattgatggagctttagttggtggagcatctttagatgtcgataaatttgtaacgataattaattcaatagatttatgaa

SEQ ID NO: 290503 - DNA, 715 bp, Unknown
  Bacterial polypeptide expressing nucleotide sequence isolated from the Sargasso Sea
aatgtttggtcttataagctcaatcaataaaattgataaagtaataaatttaactaaaaaaaacacatttaaaaaaatcaatataatatattgcccaccttctaccatattgtcaatttttgcaaataaacttagaaatagtaaaattaaaataggagctcaaaacatattttatacagaaaattttggacctcatactggaaatgtaaatgctaaaatgattaaagattctggtgctagctatgtgatattaggtcattcagaaaatagaaacgaaggtgaaacagacttagtaattaataaaaaaattaaagctgcactaaaagaaaagataaaagttattttttgttttggtgaaaaattaagagacagaaataataaaaaaacatcaaatgttttaaaaaaacaaattttaaatgcattaaaaggtgtaaatgatatcaaaaatataatttttgcttatgagcctgtttggtcaattggtactggaaaagttcttaaatctgaaaatttgtttaaagatatagaaaaaattaaaggtattattcgaacgaattttaatattaaagaaataaatatactatatggtggatcagttaatacaaagaatattatagatttaaaaaaagttgataatttgtctggatttcttataggggcggcttcgcaaaatcaaaacaaatttattgatataataaaaaaaacatttaattag

SEQ ID NO: 290504 - DNA, 527 bp, Unknown
  Bacterial polypeptide expressing nucleotide sequence isolated from the Sargasso Sea
gatgattattgctaattggaaatgtaatggaagcaaagccatgataaatgaatgggcaaataattttttaacaaattatgttgaaatgaataaagcatttattggcatagcacctccttcaatctatatagaaagcattcttaacaccaagctaaataagttaaaagaaataaatataggatctcaagacatcgatatttcatctggcgcaagaacaggagcaatttcttctgaaatgattttagattttgattgtaaattttcaataatcggccattcagaaagaagacaattttttaatgaagaaaatgatgaaataaaacaaaagattttaaaaattgcaaataaaacacaaacgattttatgtattggtgaaaccgaagaagaaaacaagaatgatcaaactgaagatgttttaaaaagacaattagaagtaattaaggacattgaatttaatgattcattggttatagcttatgagccagtttgggcgattggcactggaaatacaccaaccccagatagaa

SEQ ID NO: 290505 - DNA, 178 bp, Unknown
  Bacterial polypeptide expressing nucleotide sequence isolated from the Sargasso Sea
actttcaaatctagtgagcctcagatttagtaagcatgtttctattctttacgggggttcagttaatgcggtaaattcggttgatattcttaaccttgatcaagtagacggtgctttggttggaggagcttcattaaaatccaaagaattttgtaaaataattgattcttatctctaa

SEQ ID NO: 290506 - DNA, 592 bp, Unknown
  Bacterial polypeptide expressing nucleotide sequence isolated from the Sargasso Sea
atggataaaaagttctacattgctgcaaactggaagatgaatgcatcattggcattcattgatgaatattttgcttcattgggatcagaatctaaaaactccaatgaaatgatcatatgcccccctgacatttacctgcaatttgtaacagagaaagctccaagctttgtaaaagtaggtgctcagaatatctcacctcatgattcaggtgcttatactggagaatgctctgggcagatgattgcagatcagtcagcacaatatgcaatcatcggacattcagaaagacgtgagtaccataatgaatccaatgaccagataagattaaaacttctcaaagccattgagtacgacataaatcccatactttgtataggtgagtcgatcgaacaaagagattccggtcaaactcttgatgtaataaatgatcaaatcagaagtgtattggataatgaaatattatcagcaaatacaaacatgctcatcgcatatgaaccaatttgggcaatcggtactggactcacagcaacaccagatatggcaaatgaagttcatgcacatattcattctgtactgagcgaaatgtctccaa

SEQ ID NO: 290507 - DNA, 376 bp, Unknown
  Bacterial polypeptide expressing nucleotide sequence isolated from the Sargasso Sea
tatgataaatttatctgaattttctaaattttttatcgcaaattggaaattaaatggaaatttaagctttatcaaggaatatactcaattacttaaagttaattcttctaaaggtaattgcgttgttatctgtcccacggctatatatttgaataattttaaacaaaatgaaggtaattattatttaggtgctcaagatatttcacaatatgaaactggcgctttcacaggcgaaatatcatctaaaagcttaactgaatttggagtaaatttttgtatagtagggcattctgaaagaagacaatattttaatgaaaaaaatgaagatgttaaagaaaaagcaactaaattattagaaaatgaaattatacctata

SEQ ID NO: 290508 - DNA, 556 bp, Unknown
  Bacterial polypeptide expressing nucleotide sequence isolated from the Sargasso Sea
atggaacaaacaggtgcgcgtactggagaaatctctgcctccatgatcaaagacctgggatgtgcatttagcatcgttggtcattctgaaagacgaattttgttccatgaaaccaatcagatgatttgtcagaaattaattcaagccaataatcactctttaattccaattttatgcattggagagtcagctgatgagaaccaaaggaataacacttataaggtacttaaggagcagattattgaggctctcgaaaacgcaaatgaattaagttctttgattattgcttatgagcctgtttgggcaattggatctggaaaaacaccaaatccagaagaaataaattcagttcatgaaatgatcaaagatgtagtacaatcacgttttccaaaaattggcttagagtcagttttgtatggaggaagtgttaacttaaaaaacgcatcatctttgtttgagcaaaaaaatattgatggagcattgatcggtggagcttctttggatggaagagaatttgctttaattgcaaatgtcttgaaggaacaaagggtataac

SEQ ID NO: 290509 - DNA, 484 bp, Unknown
  Bacterial polypeptide expressing nucleotide sequence isolated from the Sargasso Sea
atgatcaatctaacgagtttttcgtctatttttatagctaattggaaattaaatggaaataaagcctttattaaagaatattatcaaaaattgtcgccaggaaagggcaattgtgtaattgtctgttcaccaaacatatatttaagccagctatattcaaacaataaaaatattttttcaggtgctcaggacatatcaaaatttatagaaggagcatacacaggagagctatcatctataatgttaaaagattttgatataaatttttgtattgttggtcattctgaaagaagaaaatattttaatgaagtagatcaatctgtgaatttaaaatcttcaaatttaataaaacataatattgttccagtcatttgtatcggtgaaactttagaagaaaaagaaaaaggtattactaaagatgttttaaagaaacaaattgaaaatggcattcctgacaattcatctgatcttaatacaattattg

SEQ ID NO: 290510 - DNA, 748 bp, Unknown
  Bacterial polypeptide expressing nucleotide sequence isolated from the Sargasso Sea
atgagaaagaaagttcttgctggaaactggaaaatgaatttaaactctgagcagtctttagcactctttaacgacatatctgttgctctttcgtcaaaaaaagagattgattttatcgttttccctccatttttgtatttaaaagaattgattgattcaagaagttttgttgaagttggagcacaaaactttcatccggaattaagtggagcttttactggagaagtttcggtttctcaactaaatgatataggggttaaatctgctcttgtaggtcatagcgagagaagaatctccttcaaggagtctaattcttttttaaagcagaaagtggatgcagcaattcaacatcaaattcgagttgttttttgttgtggagaacctttggaagttagagaaaatcaagatcctgtaatgtatgtaaccaatcaacttgaagaaagcctttttcatctcaattctgaacaactaaaaacttgcatgattgcttatgaaccgatatgggcaattggcactggcaaagtggcaactgaagaacaaatatctcaaatgcatactgctattagaaatgaacttaaatccaaatatggtcaagaaatagcaaatgaaatctctattttatatggaggaagttgtaaaccttctaatgcaaaagccattttctcatgcgaaaatgtagatggtggattaattggtggtgcatccttggactctacttcatttattgaactatcgaagtgcttttaaa

SEQ ID NO: 290511 - DNA, 610 bp, Unknown
  Bacterial polypeptide expressing nucleotide sequence isolated from the Sargasso Sea
cccccaaatactttaatctcttcttttttaaagaaatttaaaaattgcttaatagatattggaggacaaaattgccatgaaagtgaagattatggttcacatacaggttttgtaaattcaaaaatgcttaaaagttctggtgccaattatgttattttaggtcattcagaaaatagacaaaaaggtgaaacagacaaacttataaatcttaaaattaaaagtgccattaaggcaaaattaaaagttattttttgtattggtgaaactttggctgaaaaaaagaaaaaaaaaacaaaatcgattttatcaaaacaaattaaactcggtttaaaaaagattaaagaaaaatcaaatatatttgttgcttatgagcctgtttggtcaattggtactggaaaaattcctaaaatcgatgaacttgaacaaacggttgaatttattaaaaaaaaatttaaaggtagattaccaaagattttatacggtggatctgtaaatcctgaaaatataagaaatttaaaaaagataactaaccttgatggttttttaattggtggagcttctcaaaactctaaaaaatttattgatatagtaaaaaaaacgtataattagt

SEQ ID NO: 290512 - DNA, 253 bp, Unknown
  Bacterial polypeptide expressing nucleotide sequence isolated from the Sargasso Sea
atacttgcttatgaacctgtatgggcaatagggactggtgaaactgcatcatttgatcacattaatgaaattcatgaacagatcaaatctaaattaaaagatttagagctcaatatacctgttttatatggtggtagtgtaaacccatctaattcaaaaggcattttagaatctgaatttgtagatggagttctagttggaggagcatctactaaaatagatcagttagaaggaattcttaattctatttaac

SEQ ID NO: 290513 - DNA, 718 bp, Unknown
  Bacterial polypeptide expressing nucleotide sequence isolated from the Sargasso Sea
atgaataatgatgagattgaatctcagagattaattaattcaattatagaaaaaaaattagataataattgtgaggtttatgtttctccatcttttccctttttaaaagacgcaataaaattatgtgataaaactaatatcaaagttttagctcaaaatgtatcacacgagatagagggtgcttttacaggggatgtttcatgtaaaatgttagatagtcttgaagttaaaagcgttattataggtcactcagagcgaagaacaatattcaaagaagataacaatatgcttttgaacaaattgaaattatgttttaaaaataattttcaagtatttttttgtattggtgaagatattgatgcaagaaaatctgaagaacaattctttgtgattgaagatcaattaaataaaacagtttttcaattagaaaatattgacccaaataagttaataattgcttacgagccagtttgggcaattggaacaggcctctcagcaacccctaatcaagctcaggaaatgcacaaattcatcagggaaaaatttaaaaataagttttcagaatctatttctgagaaattatcaattatttatggtggaagtgttaaacctagctctgcaaaagaaatttttgctcaaaatgatgttgatggcgggttaattggaggagcttctttgaaatctaaggattttgctgatattgttaattcaatttaac

SEQ ID NO: 290514 - DNA, 703 bp, Unknown
  Bacterial polypeptide expressing nucleotide sequence isolated from the Sargasso Sea
aatgtatggtgacttaaaagtacttaattccctggataaagtaattaaattttctaaaagtattaaacaaaaaaaaattaagttaatttattgcccacctagcactttaattaatattttgtttaataaattaaaaaaaacaaaaattgaagtgggtgcacaaaattctcacgagagcgataaattcggtccgtttaccggtcagataaattctagaatgttaaaaaatgttggagcaagatatgtcattttgggtcactctgagaatagacaattaggtgaagacaacaaaaaaataaattctaaaattaaaagcgcattaaaatctggtttgaaaattattttttgtattggggagacattaaaagataaaagaaataaaaaaactaatcaggttttaagtaagcaaattaagattggcctaaagtcaattcggaaaaaatcaaatattattattgcttatgagccggtctggtctattggtactggattgatcccaaagcgaaatgacttaataaaaactatatcatttattaaaaaaaaattgggtaaaaaaccttcaaaaattttgtatggaggctctgtgaatagtgaaaacatcaatcaattgaaaaatatttatgatattgatggttttttagttggtggagcctctcaagatacaaaaaaatttattgatataattaaaaaaaccattaattag

SEQ ID NO: 290515 - DNA, 610 bp, Unknown
  Bacterial polypeptide expressing nucleotide sequence isolated from the Sargasso Sea
atgtatggtgatttaaaagcacttaattcgctgaataaagttattaaattttataaaagtataaaacataaaaaattaaagttaatttattgtccacccagcactcttattaattctttatccaataaacttaaaaatacaaaaattgaagttggtgctcaaaattctcacgagagcgatcattacggtgcgtttactggtcagataaattctaaaatgttaaaaaatgttggagcgcgttatgttatattgggtcactctgagaatagacagacaggtgaagataaccaaaaaattaactctaaaattataaattcgttaaaatctggactaaaaattatttattgtattggcgaaacgttaaaagagaaaagaaacaaaaaaacaaatcaagtgttaagtaggcaaattaaaatgggtttaaaatcaattcgaaacaaatcaaatataataattgcttacgaaccagtctggtcgattggaactggattaattccaaaaccaagtgacttaataaaatctatttcgtttattaaaaaaaaattaggtaaaaaaccatcaaaaattttgtatggaggctctgtaaatagtgataacatcaatcaatgaa

SEQ ID NO: 290516 - DNA, 435 bp, Unknown
  Bacterial polypeptide expressing nucleotide sequence isolated from the Sargasso Sea
ttacacgggggaaatctcgtgtcagatgctggtcgaggcagggtgtcgatacgtactggtagggcactccgagcgcaggcgtctctttggtgagaccagttttatcgtcgcagagaagtttgcggcagccagagcggcaggtctgatccccatcctctgtttgggtgagtcaggggcggcgaggcaggcgagaagaaccttcgaggtgatcgccgaagagctggacatcgtcatagagaaaaatggcgcgatggctttcgataatgctatcatcgcctacgagccgatttgggctgtaggtacaggtaaatgcgccacacccgagcaggcacaagaggttcattcctttatacgtggtcgcttggcggaggatactccggtcataggtgagaaagtcataatcatctatggtgggagcgtgacgccggccaatgc

SEQ ID NO: 290517 - DNA, 661 bp, Unknown
  Bacterial polypeptide expressing nucleotide sequence isolated from the Sargasso Sea
atgaaaaaaataattattggaaactggaagctgaatttagatcatttagaggctatacaactttttcaaaaattaaattattcactaaacaacgatgtagacaagaaaattgatattgttgttgccccttcatttacttcacttaggtctattcaaacaataattgaagcagataaattaaatttatttttatcatctcaaaacgtttcggagtttgttgagggcgcatatactggtgaagtttcatccgaacagttattaaaattaaaagtttcttattgtattgttggtcattctgaaagaagacagcattttaatgaaacagacgaatcaattaatttaaaagttcataatttaataaacaagaagatcactccaataatttgttttggcgaaagtattgagcaaagaaacagtggtaagtatttggattacttaatcaaacaagttgatagtgctacaaaaggacttagaaaagacaaggttgatgagatagtttttgcttatgaaccaatatgggcaattggaacaggggagacggcatcattacaaaatataatagaagtagtttctgaagtaaaaaaatttatcgagtccaagcatttttataatgaagaaaaaataaaattcatatacggaggtagtgtctcaccaaaataat

SEQ ID NO: 290518 - DNA, 283 bp, Unknown
  Bacterial polypeptide expressing nucleotide sequence isolated from the Sargasso Sea
tttgatacattaaatgataattttgaaattattctagcatatgagcctgtctgggctataggaactggcgaaactgcttcaataggtcatattaacgaaatccattcagatgttaaatcaaagttgtctaaattaggtttaaatatcccaatactttatggtggtagtgtaaacccatcaaattgtaaagaaattttagcttcagacaaggtagacggagttctagttggcggtgcttctactaagtatgatcttttcaaagaaatagtgaattctatttaac

SEQ ID NO: 290519 - DNA, 215 bp, Unknown
  Bacterial polypeptide expressing nucleotide sequence isolated from the Sargasso Sea
aatgaaaaaagtacctataatagcaggaaactggaaaatgaataaacttccttctgaaggtagatcatttatcaatgaggtgaccaacttggttttggatatcaaatcagtttcggttatttttgcgcccccttttacagggctctttgaagtacaggtcaagtcaccatttcatattgccgcgcaaattgtcattgggaggactcgggtgcatt

SEQ ID NO: 290520 - DNA, 178 bp, Unknown
  Bacterial polypeptide expressing nucleotide sequence isolated from the Sargasso Sea
cgtctggcagcgcgatttgggagccatggcgacgcattccggatcctctatggcggatcggtcaaaccatcaaatgccgaagagctcatgagcgtgccgaacgtgaatggggcgctggtgggtggtgcaagcctgaacgccacagacttcttcgggatcatctccgcctacctctaac

SEQ ID NO: 290521 - DNA, 427 bp, Unknown
  Bacterial polypeptide expressing nucleotide sequence isolated from the Sargasso Sea
ttttcttattaacaaaaaaatcaaatcagcattacgagaaaatttaaaagtaattttttgtgttggggaaaaattatctgataaaaaaaataaaactacatataatgttttaaaaaaacaaataaataatggtttaaaaaatattaaaaatttaaacaatattatatttgcttatgaacctgtgtggtctattggaacaggcataataccaaaaaatcaagaattaactaaaaatataaataatattataaatattttaaataaattaaaaaaatcaaaaaaacctcgaatattgtatggaggatctgttaatccaaaaaatgtaaaagaactagctgaaataaatcagataaatggttttcttgtaggtggagcttctttaagtgcaaaaaaatttattgatataataaaaaaatcaattaattag

SEQ ID NO: 290522 - DNA, 661 bp, Unknown
  Bacterial polypeptide expressing nucleotide sequence isolated from the Sargasso Sea
atgaaaaaaataataattggaaactggaaattaaatcttgatcatttacaaggcattcaattactacagaaaataaactattcattagataaggatatagaagaaaaaatagacatagtcttatcaccatcgcacacttcattgagatctttacaaactgtaatttctacagataatcttaaaattaaaatttcatcacaagatgtatcttcctatagtgatggagcatttactggtgaagtgtcagctattcagcttaaaaaattagatatagattattcaattattggtcattctgaaagaagacttcattttaatgaaactgataatgatgtgaacattaaactaaccagattattagaaaatgaaataattccaattttatgttttggtgaaagtctagaacaaagatcagaaggttcatatttagaatttattaaaaatcaaataaatgaaggtttaaaaggtgttagaaaagacaaggttaataagttagtactagcttatgaacctatatgggcaattggcactggtgaagttgcatctatagaaaatattgttgaagtattagattttgttaaggacttactttctgataagccttacttttcagatgaaactgtaaaattaatttatggtggaagcgtctctcccagataat

SEQ ID NO: 290523 - DNA, 544 bp, Unknown
  Bacterial polypeptide expressing nucleotide sequence isolated from the Sargasso Sea
aatgaaaagaactaaatataccattgccaactggaagatgaatggccaaaaagactcttataaattagtaaaatcgatatcaaattattaccataagatgaaacgcaaaacatctaaagttgtaatttgcccaccatttactcttttgtcagaattaataaaaaaagaaaaaaaaattaaattcggtggccaagattgccattataaatctgagggcgcatatactggctccataagtgcaaatatgcttaaaacaataaattgccaatatgttattttgggtcattcagaaagaagaatatatcaaaaagaaacttctcaagagctgtatttaaaaattcaatctgcaattaaaagtaatctaactgtgatatattgcataggagagaagttagaggaaataaaaaaaagaaatataatacttaaaaaacaactttcatcattgcctaaaaaaattgaccccaagaaaatcataattgcttacgagcctgtatgggcgattggaactggtaaggttccatcactagacgatattaataaaata

SEQ ID NO: 290524 - DNA, 533 bp, Unknown
  Bacterial polypeptide expressing nucleotide sequence isolated from the Sargasso Sea
tggcccttatacaggtgcactcagtgccggcatgttaaaacacgctggagcgaaatatgtaattttaggtcattctgaaaaccgaagtacaggagacactaatactattattaaaaaaaaaattggagcttctttaagcaaaaatttaaaagtaattttttgtattggtgaaactatttcagaaaaaaacaaaggaaaaaaattttctgttttaaaaaagcaaataaataattcaattaataaaaattttgatttaaaaaaaattataattgcttacgaaccagtttgggctattggttcttctaagataccaaaatataaggatttaaaaaaaacttttatttttataaaacagcattttaaaaagagatttagaactaaaaaaactcctattgttttgtatggaggttcagtaaatcataaaaatataacgatgttttcttcgattagtgagattgatggttttttaattggtggggcatctcaatcttcaaaaaaatttattgatataataaaaaattactataaataga

SEQ ID NO: 290525 - DNA, 591 bp, Unknown
  Bacterial polypeptide expressing nucleotide sequence isolated from the Sargasso Sea
aatgaaaaaaataattattggaaactggaagctaaatttagatcatttagaggctatacagcttttccaaaaattaaattattcactaaacaacgatgtagacaagaaaattgatattgttgttgccccttcatttacttcacttaggtctattcaaacaataattgaagcagataaattaaatttatttttatcatctcaaaacgtttcggagtttgttgagggagcatatactggtgaagtttcatccgaacagttaataaaattaaaagtttcttattgtattgttggtcattctgaaagaagagagcattttaaagaaacagacgagtcaattaatctaaaggtccataatttagtaaacaagaagatcactccaataatttgttttggcgaaagtattgagcaaagaaatagtggtaagtatttggattacattattaaacaagttgatagtgcaacaaaaggacttagaaaagataaggttgacgagatagtttttgcttatgaaccaatatgggcaattggaacaggggagacggcatcattacaagatattattgaagtagtttctgaagttaaaaaatttat

SEQ ID NO: 290526 - DNA, 352 bp, Unknown
  Bacterial polypeptide expressing nucleotide sequence isolated from the Sargasso Sea
aatggataagaaattctacatagcagcaaactggaagatgaatgcatctctatcattcattgatgaatattttgattcattgggatcagaatctaaaaactccaatgaaatgatcatatgtcctcctgatatttatatacaattggtaaaagaaaaagctccaaactttgtaaaagtaggtgcccagaatatctcacatcatgattcaggcgcttacactggtgaatgctctggacagatgattactgatcagtcagcacaatatgcaatcatcggacactcagaaagacgtgagtaccataatgaatccaatgatctgataagattaaaacttctcaaagccatgaacacg

SEQ ID NO: 290527 - DNA, 738 bp, Unknown
  Bacterial polypeptide expressing nucleotide sequence isolated from the Sargasso Sea
tgtattttattgcaaattggaaaatgtatggaaatatagctgatattagcaaatctaaatcagttgttaggctatctaatcttaaaaaattcaaaaaaacaaaaattatatactgtcccccgtatactttgttaaagactttttatgagaaagttaaaaattcaaacatttctattggagcacaaaattgtcattcaaattatgaatatggcgcttttaccggatcagtaaatgcgaaattaattaaatcctctggcgctaaatttgtcattcttggacattcagagaatagaaaaaatggcgaaaatgatttgatcataaataaaaaaattcactcagttttaaaagaaaatttaaatgttatattttgtattggggaaacattagctgaaaagaaaaataaaaaaacatatagtgttttaaaaaaacaaataaccaaaggtttaaaaggtataaaaaaaataaataatattatgatagcctatgagcctgtatggtctataggtacaggtttaatacctaataattcagaattactaaaaaatataagcaatattaaaaaaatttttaagaaatttacaaaatattcaaatattaaaattttatacggaggatctgttaatccaaaaaatataagagaactagctcaaattaaagcaataaacggtttccttgtgggtggagcatctttaaactcaaaaaaatttattgatataataaaaaaatcaattatttaaa

SEQ ID NO: 290528 - DNA, 259 bp, Unknown
  Bacterial polypeptide expressing nucleotide sequence isolated from the Sargasso Sea
tatggtaaatcttagtaaatattcctcaatttttatagcaaattggaaattaaatggaaattcctcatttttaaaagattattatgaaaaattaaaagttaattctaataattgtacgattatctgctcaccttcaatttacttaaaatcactaaaacgaaataatgaaaacttattttgtggcgcacaagatgtctcttcttatcaagagggcgcttacacaggagaattatctgcctcaatgctgagagataataat

SEQ ID NO: 290529 - DNA, 493 bp, Unknown
  Bacterial polypeptide expressing nucleotide sequence isolated from the Sargasso Sea
ttgaaaagtccaatagttgcagctaactggaagatgaacctaactatcgatgagggtttaaagttagttgagcagattttagatagctcgtcctctgatagttctgaaattatttttttcccaccatcaatagctttgagtgctatttgtggtgagttaaaaaataccggatataaaattggaattcaaaatattcaccacgaggaaagcggagcatatacaggagaaatttctgcaggcatggttaaatctttggatgtacaatatgctattattgggcattctgagcgtaggcagtattttctcgaaacagatttgcaggtcaatggaaaaataaaaagtgctcttggtgctggtctttgtccgatagtgtgcgttggggaatcgttggatgaaagagaatctggtaaaactaacgagatattaaaaaaacaattaatgtccgcttttaacaatattgacaataaattagatcgtttggtagtagcatatg

SEQ ID NO: 290530 - DNA, 652 bp, Unknown
  Bacterial polypeptide expressing nucleotide sequence isolated from the Sargasso Sea
aaaaagtacaataaggcaaaaattatatactttcctccttttaccttaattagtgatttaataaaaaaatttagcaaaacaaaaattttggttggtggacaaaattgccatcatattgaagactacggttcctttacaggttcaattagtcctaaaatgttaaaagatcttggatgcaaatatgtaattcttggacactcagaaaatagaacttcaggtgaaaatgataatgaagttaataaaaaaattagatctgctttaaataaaaaattgaaaattgtattttgtattggggaaactcttaaagaaaaaagaaagaaacttacttactcagttttaaaaaaacaaattaataaaggacttaaaggagttaaaaattatcaaaatattttaatcgcatatgaacctgtttggtcaattggaactggcgtaatacctacagataaagaattgaaatttaatgttgccacaataaggaaattagtatcaaaaaaaacaaaaaaaaaattgcccatcctttacggaggctctgttaacagtaaaaatatatctggacttaaaaatataactggtattagtggttttttggttggatctgcttctcaaagttcaaaaaaattcattgatataataaaaaaaacaattaattagt

SEQ ID NO: 290531 - DNA, 334 bp, Unknown
  Bacterial polypeptide expressing nucleotide sequence isolated from the Sargasso Sea
aatgaataataaatttataatcgctggaaattggaaaatgaataaaaccccatcagagggtaaaatttttataaatgaggtaagatcgatggtaccgggccttcaaaatacaaaagtaatattttttccggcatattctggccttgctaatatcgatgtcagagaccctttttatttgggagctcagaattgtcattgggaagggtctggtgctttcactggcgaaatatcgattgagatgataaaagattgtgatgctaaatatattatcgttggacattcggaaaggcgccaactttttaaagagcatgataaagatattaataataaaatc

SEQ ID NO: 290532 - DNA, 607 bp, Unknown
  Bacterial polypeptide expressing nucleotide sequence isolated from the Sargasso Sea
atgatcgtagccgcaaactggaaaatgaacaagaatctatctgaagccatcgaatttttagaaaaattagactttcacattgatgaaaatgatagccaaagttcggtaattatttttccaccatttattggattagaaagtttagctggaaaattcaattctaataatttttaccttggttcgcaaaatttttactatgaagaaagcggtgctttcactggtgaggtctctatttcaatgcttgagcatattggaatagattatgcaataataggacattctgagagaagaagtttgttctatgaaaacgacaatttaatcaataaaaagattagatcatgtttagcatcatcaatcaaacctatactttgcattggtgaatcattggaacaaagagatagtagtttgactgagaatacattaaagaatcagctaaagagtggattaaaaaacattgatgcgttaaaactagataaacttatcatcgcatatgagcctatctgggctattggaactggaaaaacagcgacagttgatcaaatttattctactcatcagcaaataaagggtatattaaatgagcttttcaatgacgaatccccatgat

SEQ ID NO: 290533 - DNA, 733 bp, Unknown
  Bacterial polypeptide expressing nucleotide sequence isolated from the Sargasso Sea
tttgttaatagcggggaattggaagttaaattgtgatattgaagaagccaaagacctgtctacctcaattttaaataatttgcgtgataaagctttaagttcagaagtagcattatttccgccaaatatttatattgatactgttaaaaaaattgtaaataattcaaatatatttattggagcacaagactgcagtgttcatacatcaggagcatacactggggatgtttctgctaaaatgttaaatgatatggaatgcaaatatataatagttggtcattcagagagaagaattggaaaatttgaaacaaataatgatgttgctttaaaagcaaaaaatgtaatggaaaataaaatgtgtcctattatttgtgttggggaagatgcaaaagatagagatgatggaaatgctttaaactttattgaaaagcaattaaacgaatccatacctaaaagttattataaagattttattattgcttatgaacctatatgggccataggctctggaaaaattcctactatagactctattaatgaaatgtttaatatgataagacaatggttattaaataatggtatagataataatataaaaattttatatggtggttctgtaaataaagaaaatgtgaaagaaattttctcttgtagagatttaggtggattattaataggaggtgtatctttaaaagctaaggagttttcagagatatgtatattggcaggttaa

SEQ ID NO: 290534 - DNA, 445 bp, Unknown
  Bacterial polypeptide expressing nucleotide sequence isolated from the Sargasso Sea
atgcgggccccactggttgcagcaaactggaaaatgaatggctcgttttcaatgcttgacaaaatgttagaatttctcagaaaaaattctgagaatacaccttgtcaagtcgttatatgccctcctcatgtccttctttcatcattaaaaaaatctgttgaaggatctgggattgaagtcggtgcacaaaatgttcatagcgaattatctggagcattcactggagaaacttcagctcccttacttaaagaatgtggagttaagttttgcatcgtaggtcattcagaacgcaggaagctttttgacgaatcggatcaattcataagaagtaaaactgaaacattacttagaaatggaattagaccaattctgtgtgttggtgagtctcttgaacaaagaagttcaggtaatcatgaagatgtcgtcactagatcaattacgtaaa

SEQ ID NO: 290535 - DNA, 268 bp, Unknown
  Bacterial polypeptide expressing nucleotide sequence isolated from the Sargasso Sea
ttggcatacgagccgatttgggcaattggaacaggtaaaaccgcaactccagaacaagccaattctatgcacgctataattagaaatgagataggttcacttagtaatactgaagtagcagcaaatattcaaattatctacggaggcagtgtaaatgttgaaaacgcgaaatatttacttgctcagtcagaaattgatggggccctcgttggaggggcgagtctcaaaatagaagatttttctcatattgttgccgccggaacgtaat

SEQ ID NO: 290536 - DNA, 766 bp, Unknown
  Bacterial polypeptide expressing nucleotide sequence isolated from the Sargasso Sea
atgaaaaaaattattattggaaactggaagctcaatttagatcatctagaggctatacagctttttcaaaaattaaattattcacttaacaacgatgtagataataaaattgatattgttgtagcgccttcatttacttcacttaggtctattcaaacaataattgaagcagataaattaaatttatttttatcatctcaaaatgtgtcggagtatgttgggggcgcatatactggagaagtttcctccgaacagttagtaaaattaaaagtttcttattgtatcgttggtcattctgaaagaaggaagcattttaaagaaacagatgagtcaattaatttaaaggttcataatctgataaacaagaatatcactccaataatttgttttggtgaaagtattgaacaaagaaatagtggtaagtatttggattacataatcaaccaagttgatagtgctacaaaaggacttagaaaagacaaggttgatgagatagtttttgcttatgaaccaatatgggcaattggaacaggggagactgcatcattacaaaatattattgaagtagtttctgaagtcaaaaaatatatcgagtccaagcctttttataatgaagaaaaaataaaattcatatacggaggtagtgtctcaccaaataattcagaggagattttaaactctaatattattaatggtgctttggtaggtggagcatcactcgacgtagatcaattcgttaaaataattgaatcaattgaattatgaa

SEQ ID NO: 290537 - DNA, 530 bp, Unknown
  Bacterial polypeptide expressing nucleotide sequence isolated from the Sargasso Sea
aatgaaaagaactaaatataccattgccaactggaagatgaatggccaaaaagactcttataaattagtaaaatcgatatcaaattattgtcagaagatgaaacgcaaaacatctaaagtcgtaatttgcccaccatttactcttttgtcagaattaataaaaaaagaaaaaaaaattaaatttggtggtcaggattgccattataagtctgagggcgcatatactggctccataagtgcaaatatgcttaaaaacattaattgccaatatgttattttgggtcattcagaaagaagaatatatcaaaaagaaacttctcaagagctgaatttaaaaattcaatctgcgattaaaagtaatctaactgtgatatattgcataggagagaagttagaagaaataaaaaaaaggaatataatacttaaaaaacaactttcatcattgcctaaaaatattgacccaaaaaaaatcataattgcttacgagcctgtatgggcgattggaactggtaaggttccatcactagatg

SEQ ID NO: 290538 - DNA, 703 bp, Unknown
  Bacterial polypeptide expressing nucleotide sequence isolated from the Sargasso Sea
atgtatggtgatttaaaagcacttaattcgctgaataaagttattaaattttataaaagtataaaacataaaaaattaaagttaatttattgtccacccagcactcttattaattctttatccaataaacttaaaaatacaaaaattgaagttggtgctcaaaattcgcatgagagcgatcattacggtgcatacactggtcaaataaattccaaaatgttaaaaaatgttggagcgcgttatgttatactgggccactctgaaaatagacagacaggtgaagataatcaaaaaattaactctaaaattaaaagtgcattaaaatctggtttaaaaattatttattgtattggcgaaacgttaaaagagaaaagaaacaaaaaaacaaatcaagtgttaagtaagcaaattaaaatgggtttaaaatcaattcgaaacaaatcaaatataataattgcttacgaaccagtctggtcgattggaactggattaattccaaaaccaagtgacttaataaaatctatttcgtttattaaaaaaaaattaggtaaaaaaccatcaaaaattttgtatggaggctctgtaaatagtgataacatcaatcaattgaaaaatattaatactattgatggttttttaataggtggggcttctcaagatccaaataaatttattgatataattaaaaaaaccattaattaga

SEQ ID NO: 290539 - DNA, 769 bp, Unknown
  Bacterial polypeptide expressing nucleotide sequence isolated from the Sargasso Sea
aatgtcacatcctctagttattgcaaattggaaaatgaatataccctctggaggtatatctggctggattcaaaatgagatgatatctaataatgataaagtagattttgataataaatcttcctactttaagtttatgggaattgctcctccgatttctcacttaactgaactcaaaaacctatttcaatttggatttctcggcgcgcaagatatctctaaatttaatgatggcgctaaaacgggagatataagtgctgatatggcaattgacaaaggctgcacattttcgattttaggtcattcagaaagaagagagttttataatgaaacaaatagcattgtttcagaaaagctaagagtatgtcttgagaaggatattttaccagttgtttgtgttggtgaatctcttgatgatttcaacgcagttaaaactcttgatgtgctggagatgcaactaaaagaaatatttacatcaatatctgctaaaaagactgttttaatagcttatgagccagtttgggctattggttcaggaaagacaccatctgcagatgaggttaataatattcaccaacacattaaagatatagtacaatccgtcgctgatattgaagctataagtgttatttatggcggcagtgtaaattgtgaaaatgctaaaagtttttttcaacaaacaaatattgatggggctttaataggcggagcttcgttgaatggaaaagaatttttagatatttataatgattttttggagactttttaa

SEQ ID NO: 290540 - DNA, 721 bp, Unknown
  Bacterial polypeptide expressing nucleotide sequence isolated from the Sargasso Sea
atgataattgctaattttaagtcaaatgtaataaattttgataaatgggttgatgactttgaaaattcatgtgtaccagttgatttttatgtgggaatagctccgccgtcaatttacataactgaatatagctcgtttagattagcaattggagctcaagacgttgatcattcgtcaggatcaagaacaggcgcagtatcgattgaaatgcttgatgaggttggtgtggagtttgtaattattggacattcagaaagacgagaatttttccatgaagataatgacttgattagaaaaaaaatacaagctgttaatgagagcaaaataggttcaataattctatgtattggagaaacaaaagaagaaaataaaatgggtgctacgaaagatgtcttaaaaaatcaacttagtgtaattgatggatttgaacttggtaaaaactttacaatagcttatgagcctgtctgggcaattggtagtgggcataccccagaaccaaaagacataaatgaaattcataaatatataaaagatgttgtacaatccgtctcagaaaacaatcatgtaccagacgtagtttatggcggaagtgttactgataaaaatgcagaaagtttttttaaagaagaatttgtagacggtgcattagttggaggagcatcattgaatggcagtacttttgcaaatatagttaacaaatggagagaaaatattatttaaa

SEQ ID NO: 290541 - DNA, 760 bp, Unknown
  Bacterial polypeptide expressing nucleotide sequence isolated from the Sargasso Sea
atgcccatatgcatagtagcaaattggaagcttaatggttcaagagcatttaatactcaatggacgcttgaattttttaaaaacttcaatggccacaatttttcctctctaggaattgcgcctgcttctttatatatagaccatttgaagagcgtgattggtgactatgatattaagattggctctcaaaatattgatttagagcaaacaggagcacgcactggagaaatttctgcctctatgattaaagacttggggtgtgaatttagcattattggtcattctgaaagacgaatgttgttccatgaaactaatcaaatgatttgtcagaaattaattcaagccaataataactttgtaattccaattttatgcattggagagtcggctgaagagaaccaaagtaataccactttcaaggtacttgaacaacagattattgaggctctagagaatttagatgagttgagttctttaattattgcctatgaacctgtttgggctattgggtctggtaaaacaccaaatccagaagaaatagattctgttcatgaaatgatcaaagatgtagtacaatctcgttttccaaaaattggtttagaatcagttttgtatggagggagtgtaaatcttaaaaatgcatattctttgttcgagcaaaaaaatattgatggagcattgataggtggagcttctttggatggaagagagtttgctttaattgcaaatctctttaacgaattaaggatacaacaatgat

SEQ ID NO: 290542 - DNA, 559 bp, Unknown
  Bacterial polypeptide expressing nucleotide sequence isolated from the Sargasso Sea
cagactaggatctcaagagttagattcattactgtctaaacctttaacaggtgggattactgcagagatgttggtagaagtcggttgtagtttcgtgattattggtcattcagagcagagaattcatttaaatgaaagtaatgaacttctttcaaataagctggtaagcgccatagataacaacctcacacccatttactgtgtaggagaaactgcaaagcaaaaaaaatctaatcaaactaaagaggttcttttggagcagttagatgttattcaaagtcaaataatagataaatgtataatagcctacgaaccagtatgggctattggaactggagaaagtgctgagatttcttatatagaagaagttcactctttcattaaagaagagtttaaaaatacaactgatttctcaaaagagatttcagtagtgtatggaggtagtgtaaacttggaaaattacaaggaaacttataactcaagtcaagtagatgggctgcttatagggggagcttctttaaatcacagcacatttacaaaaatatataatatgtcataa

SEQ ID NO: 290543 - DNA, 748 bp, Unknown
  Bacterial polypeptide expressing nucleotide sequence isolated from the Sargasso Sea
catgctctgggtaggtacaagctggaaaatgaaccataatttaccagagactaaaaaatacttaaatattctaatcaaaaattctaaatatctatcaaatcctaaaattaaattttttattattcctccttttacgtcgttagctttgtttaataaatataaaaaaaaattaccttttatttatggtgcacaaaacatgcattgggaagaaaaaggtgcttttacaggagaggtgtcagcatcgatgttaaaatcttgcggatgtcaaattgttgaaattggtcatgcagaaagaataaaatattttaacgaaaatttgatacatatgaataaaaaaattaatttagcattaaaatataatttgattcctttagtttgtattggagaggctaaatatgaaaaaaatattttaaaaagaaaaaaatttttaaataaacaaatagaaattttattaaaaaaaattagaaatagaaaaaagcaaattattttagcatacgaacccatatgggctatagggggaggaaataaagctgcaaatattgattattgtaatgaatcaatacgctatattagagaaagtgctttaaaaagattaaataaggttagcgttctttatggcggaagtgtaaatgaaaaaaattatacaaaatttacagaaagcaaatttattgatggaatatttattggtcgggcagctttggatgccaaaaactttataaaaatatgcaaaggaatagataaacaatga

SEQ ID NO: 290544 - DNA, 461 bp, Unknown
  Bacterial polypeptide expressing nucleotide sequence isolated from the Sargasso Sea
tatgcttgaaattaaagaatttaataaaattattgtagcgaattggaagttaaatggctcaaacgactttttagaagcctattttgagaaattagtcttaaaaggcccaaattcagatatttgtggggttatttgtcctccaataacatatatgaaaaattgttattctaaattacattcattataccttggggctcaagattgttctaaattcaaagatggtgcttacacaggtgaaattagtgcatccatgttaagagaaaataattgtaaattttgtatagttggtcattcagaaagaagacaagtatttaatgaacacaatgaagatataaaacttaaagctgaacaattattggatgcaagaatcatacctataatatgtattggagaaactttagagcaaaaaaaaatgaataaaacccatgaagtattaaaagaacaagtaattaatagtttgc

SEQ ID NO: 290545 - DNA, 727 bp, Unknown
  Bacterial polypeptide expressing nucleotide sequence isolated from the Sargasso Sea
tatgtattttgtagctaattggaaaatgtttggtgatttaagaactctaaattcacttgataaagtaataaagttttcaaaaaataataaaaaaaataagataaaaatagtttattgcccaccaaatacattaattcgtccattgtcgagaagacttaaaaaaacaaaaatagaggttggtgcccaaaactgtcatcacagctatgactacggtgcgtacactggccaagtaaattctaccatgcttaaaaatgttggagcaaagtttgttattttgggacactcagaaaataggcagttaggagaaacagacaatctaattaatttaaaaattaaaagtgcaattaaatcaggcttgaaaattatattttgtattggcgaaactttgaaagaaagaagacaaaaaaaaactaatcaaattttaaaaaaacaaattgaaaaagggttaaaatcgataaagaataaatctaaaattattatagcctatgagcctgtatggtctatcggaacaggtgtaattccaaaagaagctgatttaaataaaactatttcatttattaaaagtagatttgtaaaaaaatatcctaaaattttatatggcggatctgtaaatactaataacgtaagtatattaaaaaaaattgctagcattgacgggtttttgattggaggtgcatcgcaaaacccaaaaaaatttattgatataatcaaaaaaaccattaattag

SEQ ID NO: 290546 - DNA, 754 bp, Unknown
  Bacterial polypeptide expressing nucleotide sequence isolated from the Sargasso Sea
aatggataaaaagttctacattgctgcaaactggaagatgaatgcatcattgacattcattgaagaatactttgcttcattgggatctgaatctaaaaactccaatgaaatgatcatatgtcctcctgatatttatatacaatctgtaacagaaaaagctccaagctttgtaaaaataggtgcccagaatatctcacctcatgattcaggtgcttatactggtgaatgctctggacagatgattgctgatcagtcagcacaatatgcaatcatcggacattcagaaagacgtgagtaccataatgaatccaatgagctgataagattgaaacttctcaaagcaattcaacacgacataaatcccatactttgtataggtgagtcgatcgaacaaagagattccggtcagactcttgatgtaataaatgatcaaatcagaagtgtattggataatgaaatattatcagcaaatacaaacatgctcatcgcatatgaaccaatttgggcaatcggtactggactcacagcaacaccagatgtggcaaatgaagttcatgcacatatccattctgtattgaatgaaatgtcatcaaataagatcccaatactttatggcggtagcatgaaatcatcaaatgctaaagaattactacaaatggaacatattcatggaggcttgatcgggggtgcatcacttgatgcttctgaatttttaaaaatatataatattgcagaggaaataagaaatggctaa

SEQ ID NO: 290547 - DNA, 736 bp, Unknown
  Bacterial polypeptide expressing nucleotide sequence isolated from the Sargasso Sea
tatgatttttatagctaattggaagatgaatggagaaaaaagtcacatctctggcatcaataaaaccataaaatttttaaaaaaatcaaaaaataaaaaaaatcaaataatttactgtccaccatttaccctaatttcattagttaaaaataaagtaaaaaacactaaaattaaagtaggtgctcagaacctttctcaattaaatgattatggagcatttacaggatctgtaaattctaaattaattaagtcagcaggaggtgagtatgtaattgttggtcattctgaaattagaaatcaggaaaatgatatactaataaataaaaaaattcattcagcacttaaagaaaaattaaaagtaattctttgtattggggaaacatacaaagaaaaaaaaaataataaaactttctcagtacttaaaagacaaataactattgcattaaagaatataaaaaaaattaataatattatttttgcttatgaacctagatgggcaatcggaactggaaaaataccaaaatcatctgagttaagaaaaaactttagagaaataaataatataattagcaaattaaaaaaaaatcaaaaacacaaaattatctatggcggatctgttaattcaaaaaatgtatttgagttaaaaaaaattaatgatttaaaaggttttttaataggaagcgcttctttgagagcaaaaaattttattgatataattaaaaaatcaactaattag

SEQ ID NO: 290548 - DNA, 565 bp, Unknown
  Bacterial polypeptide expressing nucleotide sequence isolated from the Sargasso Sea
agtcaaacaacaaatttttatttcaggtgcccaggatgtatctatttacaataatggtgcatatactggagaactatcctcctcaatgttgttagataataatataaatttttgtttagttggtcattctgaaagaagacagtatttcaatgaaagcaatgaagctataaaaataaaaagtacaaacttaattaatgaaagtataataccagtaatatgtattggtgagagtttagaggaaaaaaaatcagataagactaaagaaattttaaaaaaacaaattgaaaattgtattccagaaatttcaaatcatcaaaacactataattgcttatgaacctatatgggcaataggcacaggattaacaccttcaattagtgaaattgacgaagttcatcagtatataaaaaatataaatgataaatttattaattttaaggtaatttatggaggttcagtaaactcatcaaattcagctaatattaataatttaaataacgttgatggctgtctaattggagggtcttcattaaaagttgacgaatttaatagaattatatcttga

SEQ ID NO: 290549 - DNA, 727 bp, Unknown
  Bacterial polypeptide expressing nucleotide sequence isolated from the Sargasso Sea
aatgaataaattttttatatcaaattggaaaatgaaccttactgtagctgacagcattgttttttctaatgaaatttctagtgctataaatgaaggtaacattaaggatgatattgaaataattatatgcccaccttttatttctattccttattgtttccaaatccttaagtctgtttcaaaaattggtgcccaagatatatcaaaaatggatggggcaaaaggtgcatttactggtgaaatatcagcaaaaatggtttcagattatgctgattatgtgattattgggcattccgaaagaagattaaatcaaaaagaaacgaatcaagatgttgctttaaagggtgcaaatattttaaaaaataatatgactccaatattgtgtataggagagacagaagaggagagaaaaacaggggagtacatatctattttaattaatcaattagctgagagctccaaaggtcttgataacaaaatgatcgttgcatatgaacctatatgggcgattgggtcaggaaattcttgtaatttagaacaaataattgaggtatcaggtcaggttaaggcgaaatatggagatgataccccatttgtatatgggggaagtgtaaatgaagaaaactgccaggagttattaagccaaaaagaaatagacggagtattagttggctctgcatcattaagcttggatagttttaataaaatgataattttcaataaatag

SEQ ID NO: 290550 - DNA, 623 bp, Unknown
  Bacterial polypeptide expressing nucleotide sequence isolated from the Sargasso Sea
agctccaccatcaatctatataactgaatatagcacgcctaaactagcaattggagctcaagacgttgatcattcgtcaggatcaagaacaggagcaatatctattgaaatgcttgatgacgttggtgtggagtttgtaattattggacattcagaaagacgagaattttttcatgaagataatggtttgattagaaaaaaaatacaagctgttaatgagagcaaaataggttcagtaattctgtgtattggagaaacaaaagaagaaaataaaatgggtgccacaaaagatgtcttaaaaaatcaacttagtgtaattaatggatttgaacttggtaaaaactttacaatagcttatgagcctgtatgggcaattggtagtgggcagacaccagaaccaaaagacataaatgaaattcataaatatataaaagatgttgtacaatccgtctctggaaacaatcatgtaccagacgttgtttatggcggaagtgttactgataaaaatgcagaaagtttctttaaagaagaatttgtagacggtgcattagttggaggagcatcattgaatggcacaacttttgcaaatatagttaacatatggagagaaaatattatttaaa

SEQ ID NO: 290551 - DNA, 721 bp, Unknown
  Bacterial polypeptide expressing nucleotide sequence isolated from the Sargasso Sea
atgataaatctggctaatttttcttcaatttttatagcaaattggaaattacatggaaatattgagtttataaatgaatattatcaaaaattgtcaattaacagcaataattgtgtcgtagtttgttcacctagtatttttttaaatcatctaaaaactaatagtaaaaatctattttcaggatctcaagatgtttcaatttataatgaaggtgcatatactggtgagttatctgcagcaatgcttgctgataataatataaatttttctttggtcggacattctgaaagaagacaatatttttttgaaaataatgaaaaagttaaattaaaatcaattaatttaattgaaaataaaataattcctgtaatttgtgtaggtgaaaccttagaacaaaaagaaaaaaaaatgactaaggaaatattaactgaacaaatcaatcaaagtgtcccagaaatttcaaattttgaaaatacaataattgcttatgagcctatttgggcaattggtacaggcttaacgcctagtattaatgaaattgaggaagttcatcagtatattaaaaatataaataagaagcttaacaattttaaagtaatatatggaggatcagttaaagcttcaaattctgcagatattaacaatttaaaaaatgtagatggctgtttaattggaggagcatcattaaaagttgacgaattcaatacaattatatcttgat

SEQ ID NO: 290552 - DNA, 214 bp, Unknown
  Bacterial polypeptide expressing nucleotide sequence isolated from the Sargasso Sea
gtagacctgcgaggcagccgaagccacaggatctgcggactgatccgaagctgggtgggagccaccgatctgatcattcagtacggcggatccgtgaaacccaccaacatcgatgagctcatggccatgagtgatatcgacggtgtcttggtcggtggtgcatcgctcaaacccgacagtttcgcccgcattgccaactaccaggccagttgat

SEQ ID NO: 290553 - DNA, 546 bp, Unknown
  Bacterial polypeptide expressing nucleotide sequence isolated from the Sargasso Sea
caggttcacgcaccggggaaatctccgcttccatgattaaagatctaggatgtgcatttagtattattggccattctgagagacgaatgttgttccatgaaactaatcagatgatttgtcagaaattaattcaagccaataataactctataattccaatcttatgcattggagagtcagttgatgagaataaaagtaatattacattcaatgtacttaagaaacagattattggggctctcaaggatgtgaatgagttaagttctttgattattgcgtatgaacctatttgggcgattggatctggaaaaacaccaaatccagaagaaatcaattcagctcatgaaatgatcaaagatgtagtacaatctcgttttccaaaaattgatttagagtcagttttgtatggaggaagtgtaaactttaaaaatgcatcatcattgttcgagcaaaaaaatattgatggagcattgataggcggagcttctcttgatggaaaagagtttgctttaattgcaaatgtttttaatgaattaaggttataaa

SEQ ID NO: 290554 - DNA, 496 bp, Unknown
  Bacterial polypeptide expressing nucleotide sequence isolated from the Sargasso Sea
acaatatgcaatcatcggacattcagaaagacgcgaataccataatgaatccaatgacataataagattaaaacttctcaaagccattcagcacaaaataaatcccatactttgtataggtgagtcgatcgaacaaagagattccggtcagactcttgatgtaataaatgatcaaatcagaagagtattggataatgaaatattatcagcaaatacaaatatgctcatcgcatatgaaccaatttgggcaatcggtactggactcacagcaacaccagatatggcaaatgaagttcatgcacatattaattctgtattgagtgaaatgtcatcaaatgggatcccaatactttatggcggtagcatgaaatcatcaaatgcaaaagaattactgcaaatggaacatattcatggaggcttaatcggtggtgcatcacttgatgcttctgaatttttaaaaatatataatattgcagaggaaataagaaatggctaa

SEQ ID NO: 290555 - DNA, 763 bp, Unknown
  Bacterial polypeptide expressing nucleotide sequence isolated from the Sargasso Sea
tatgacaactggctcaaaatactttgttggaaattggaaaatgtttggaataccaagctcatttaaaattttagatagaattaaccaatattttcaaaaagacacaaagaataaacgaaaatataaaattataatggctcctccatttacattgttacagaactttgtaactagatataaaaataaaaatatttttatatcagcacagaattgttatcacaaagattccttcggagcctacacgggaaatataagtccatttatgttaaaaaaaattggcattaattatgttattataggtcattctgagaatagagcatctggagaaactgatgctatgcttaaaaagaaagtattttttgctttaaaaaataatttaaatattattttttgtataggagaaaataaaaaagaaaaaagaaacaagaagacattttctgtactaaaaaaacaattaacaagcgttttagaaataaaatataactttaaaaatattataattgcatatgagccgatatggtcaattggtagtgggaaagtaccgtcatcatatgagctgttaaaaatatcaattaatcttaaaaaatttattaaatcgaaatttaagttaaataaaatgcctaaatttctttatggaggctctgtaaatagtcaaattattagtgattttaaatctattaagcaattagatggttttttaatcggaggcgcatctaaatcttcaaaaaattttattgatataataaaaaatttctataaataa

SEQ ID NO: 290556 - DNA, 769 bp, Unknown
  Bacterial polypeptide expressing nucleotide sequence isolated from the Sargasso Sea
atgagacctataatagcagcaaactggaagatgaacaaaactattgatgagtctatttcttttattaatagtgtaaaagagactgcttcagatgggaatagatctaaaataatattttgccctccatttacctcattattttctatatcaaaattgttgtacaaatccgatttattacttggtgcacaaaatgttcatcctcaaaagaaaggtgcttttactggtgaaatatcagttgatatgcttaaatcagcacttgttcaatatgtaataattggtcattcagaaagaagaaagctttttggtgaatcaaataaatttattcaggaaaaagtattttcagtgcttaattcaggattgatacctattctttgtataggagaagagctagatgaacgctcttctggggaaaccgaattaattttaaaggaacaacttgaatcagtttttaattcaaataatatagttgatataaaaaaaataattattgcatacgaaccaatatgggcaattggaactggtgatactgctactacaaatcaagtagaagaggcccattcatttattagattaattttagaaaatatatttggaaataatggtcaaaatatacctattatctatggtgggtcggttgatgttgataacgcaaaatcgcttattaacgtaaatggcgttgatggtttccttattgggggtgccagcttagatggtaaaagtttttgtaagataattaaaatagtatcagaaaattataatagaggttaga

SEQ ID NO: 290557 - DNA, 733 bp, Unknown
  Bacterial polypeptide expressing nucleotide sequence isolated from the Sargasso Sea
atgagtaaattttatattctagcaaatttgaaaatgaataagtcttttgatcaaagtgtgaaatacttagaatctttgtctaaaaaagttacaaattatgatgacgaaattatattattcccttcaaatatatctctagaatatttttctagaaatataggaaaatttaaattaggaatacaagatttagactttagaaatgaagggcagggaacaggttctattgctgcttctcaagttaagaatttatgtgattattctttgataggtcattcagaaagaaggcaacatttttttgaaaatgatgaaattatatctagaaaaatcaatatttctcaaaaaaataatataactcctgttttgtgtgtaggagaagatttagatacaagaaataaaggtttttcagaggttgaaaaatttatttcaaatcaaataaataaagcaatctctgaagaaactgatttaagaaatattatgattgcatatgaaccaatttgggcaattggaactggtaaatctgcatcgataattgatattgaagaagtgatactaattattaaaaattgtctagaaaaaatttctaaacaatttattgttccaattctttatggtggaagtgtaagtgaaaaaaattcagaagaatttagaaaaagcaaaaaaatcaatggtatattagttggaagtgcaagcctagattcagaaatattatcaaaaataataaattatgggtaaa

SEQ ID NO: 290558 - DNA, 661 bp, Unknown
  Bacterial polypeptide expressing nucleotide sequence isolated from the Sargasso Sea
aatgtcacaccctctagttattgcaaattggaaaatgaatataccctctggaggcatttcaggctggatccaaagtgagatggtgtccaataatgaagaagaggattttgataacaaatcttcccactttaagtttatgggaattgcccctccaatttctcacttaactgaactcaaaaacctttttaaatttgggtttcttggcgcacaagatatctctagatttaatgatggcgctaaaacgggagatataagtgctgatatggtgattgacaaaggctgcacattttcaattttaggtcattcagaaagaagagagttttataatgaaacaaatagccttgtttcagaaaagctaagaatatgtctcgagaagaatattgtgccagttgtctgtattggtgaatctcttgaagactataacgcaggtaaaactcttgaagtgctggatatgcaactaaaagaaatatttacatcaatatctactaaaaagactgttgtaatagcttatgagccagtttgggctattggttcaggaaagacacctaatgtagatgaggtgaataatattcaccaacatattaaagatatagtacaatccatcgctgaaattgaagctattagtgttatttatggcggcagtgtaaattgtgaaaatgct

SEQ ID NO: 290559 - DNA, 754 bp, Unknown
  Bacterial polypeptide expressing nucleotide sequence isolated from the Sargasso Sea
aatgataatcgcaaactggaaatgtaatggaagcaaggccatgattgatgattggtttaattcttatagaaagacaatacaaaacaaaggatttgatgcaggaattattggtatcgctcccccatcaatatttttaaatgaattagatctgcatattaaaaaatacgatatggacattgatttatgttctcaagatatttctgggtcagtaagaagatgtactggagcaatttcaagtgatatgttaaaagataataatacttttggttattgcatagttggccattcagagagaagagctttatacaaggaggataatgaaataattcaagataaggtttttgaatgcttatcatcagatattaatcctataatatgtattggtgaatccgaagaagaaaacaatcttggtaaaaccgaagaaattttaaaagaacaactaaatattttaagaaatgtttctttaagtgattcgacaataatagcatatgagcctatttgggcaattggtactggtaaaactcctgacccaaaagatgtaaatgaaattcataaattcattaaagatgttgtacaatcgatttctgcaaattcacgtgtacctttggttttatacggcggcagtgtttcaaaagaaaatgctgaaagctttttaaaagaagaatatgtagatggagcattaataggtggagcttcattagatggtaagaattttgctgaaattattaatacaatgagaaatataaaatgttag

SEQ ID NO: 290560 - DNA, 730 bp, Unknown
  Bacterial polypeptide expressing nucleotide sequence isolated from the Sargasso Sea
atgacaaataaatatctatattttgtagctaattggaaaatgtttggtgacttaaaagcacttaaatcactggataaagtaattaaattttctaagactataaaacaaaaaaaaataaagttaatatattgcccgcctagtactttaattaactctttatctaataaattgaaaaaaacaaaaattgaagttggtgctcaaaattctcatgagagcgataaatatggtgcgttcactggtcagataaattctaaaatgttaaaaaatgttggagctcaatatgttatactaggtcactcagagaataggcaattaggtgagaataataaaaaaataaattctaaaattaaaagtgcgttaaaatctggtttgaaaatcattttttgtattggtgaaacattaatagagaaaagaaataaaaaaaccaatcaagttttaagtaagcaaattaagatgggtctaaaatcaattcgaaaaaaatcaaatataattattgcttatgaaccagtctggtcaattggcactggattaattccaaatcaaaatgacttaataaaatctatatcatttattaaaaaaaaattaggtaaaaaaccttcaaaaattttgtatggaggctctgtaaatagtgacaacatcaatcaattgaaaaatattaataccattgatgggtttttagtaggtggagcatctcaagattcaaaaaaatttattgatataattaaaaaaa

SEQ ID NO: 290561 - DNA, 543 bp, Unknown
  Bacterial polypeptide expressing nucleotide sequence isolated from the Sargasso Sea
aatgtcaaaaaaattactaatagcaggaaattggaaactaaatggtgaaaaaaaagatatttctttcattaaaaatttattgaaatttcattcaaaaaaattaactaagaaagttgatatccttatttgtccaccatttacattgattgataaattttgccaacttactcaaagatctaatattgaaattggtgggcaagattgtagtgaaaatgaaaccggtgcttataccggagaagtttctgcaaatatgttaaatgatttaaaggccacttattgcattgttggccattcagaaagaagattgtaccataatgagaacaataatcttttaaacaaaaaaatattaaatattcaaaaaaataacattaaggcaattttatgtattggcgaaagcttatcagacagaaaacaatcaaaaacattaagagttttaggaaatcaattaaaaggggctttaaaaaataacattaatccaaatctattagaaattgcttatgaaccaatttgggctattggaactggtttggtaccagaatactc

SEQ ID NO: 290562 - DNA, 739 bp, Unknown
  Bacterial polypeptide expressing nucleotide sequence isolated from the Sargasso Sea
tatgttttttattgcaaattggaaaatgtttggtgatttaagggcaataaattctactaaaaaagtgatcaaattttcaaaaaataaaaaatttgctagagcccaaattgtgtattgccctccttatacgttaattgaacaatttaataaaattacaaaaaattctaaaattaaagttggtgctcaagattgccattttctagaaagtcatggtccatttacaggatctgtaaatgcaaatttattaaaaataattggtgctaagtatgttatagttggacattcagaaaatagggcaagaggtgatacaaattatttaattaacttaaaaattaaatctgctcttaataaaaatttaaaagttattttttgtataggtgaaactctaaaagaaaaaaaaaagaataaaacaaatttgatcatcaatacccaaatatctcgtggcttaaaaaatattaaaaaaaataaaaatgtaatatttgcctacgaacccgtatggtcaattggaacaggaataattcctaaaatttctgatcttgaaaaacaagtttcattaataaaaaaaatgattaataaaatttggaagtataaaaatcctcaaatattatatggaggttcagtaaattcaaaaaatgtaagacagcttaaaaagattagatcaataaatggttatttaattggaggagcctctcaaaatgctaataattttattgatatcataaaaaaaactattatttag

SEQ ID NO: 290563 - DNA, 727 bp, Unknown
  Bacterial polypeptide expressing nucleotide sequence isolated from the Sargasso Sea
tatgtattttgtagctaattggaaaatgtttggtgatttaagaactctaaattcgcttgataaagtaataaagttttcgaaaaataataaaaaaaataagttaaaaatagtttattgcccaccaaatacattaattcgcccattatcaagaagacttaaaaaaacaaaaatagaggtcggcgcccaaaactgtcatcaaagttatgactacggtgcgcatactggccaagtaaattctactatgcttaaaaatgttggagcaaagtatgttattttgggacactcagaaaatagacaactaggtgagacagataatttaattaatttaaaaataaaaagtgcaattaaatcaggtctcaaaattatattttgtattggcgaaaccttgaaagaaagaagacaaaaaaaaactaatcaaattttaaaaagacaaattgaaaaaggattaaaatcaataaagaataaatccaaaattattatagcctatgaacctgtatggtctattggcacgggtgtaattccaaaagaagctgatttaaacaaaactatttcatttataaaaagtagatttgtaaaaaaatatccaaaaattttatacggtggatctgtaaatactaataacgcaagtatattaaaaaaaattcccaacattgatggttttttgataggaggagcatcacaaattccaaaaaaatttattgatataattcaaaaaaccattaattag

SEQ ID NO: 290564 - DNA, 532 bp, Unknown
  Bacterial polypeptide expressing nucleotide sequence isolated from the Sargasso Sea
atcaagaacaggtgcaatatctgttgaaatgctcgaagagtatgtgaattttgtaattattggtcattcagaaagaagagagttttttcatgaagataatgacttgattaggaaaaaaatacatgccgttaacgaaagcacactaatgccaatactctgcatcggagagacaaaagaagaaaatgataagggtataacaaaagatgtgcttaaagaccagctcgaaatagttaatgcaattgatttagatgaatcatttacagttgcttacgaacctgtttgggcaatcgggagtggaataacaccagaaccaaaagatataaatgagattcaaaaatatattaaagatgttgtacaatccaattctgcaaacaaccttataccaaaagttttgtatggtggaagtgttacagataaaaatgctgaaagcttttttgtagaagaatttgtagatggtgcattagttggaggcgcttcactagatggctcaacttttgcaaaaatagtaaatatttttaatagtactaaataa

SEQ ID NO: 290565 - DNA, 736 bp, Unknown
  Bacterial polypeptide expressing nucleotide sequence isolated from the Sargasso Sea
tatgatctttatagctaattggaagatgaatggagaaaaaagtcatatctctggcatcaataaaaccataaaatttttaaaaaaatcaaaaaataaaaaaaatcaaataatttactgtccaccatttaccctaatttcatcggttaaaaataaagtaaaaaacactaaaattaaagttggtgctcagaacctttctcaattaaatgattatggtgcatttacaggatctgtaaattctaaattaattaagtcagcaggaggtgagtatgtaattgttggtcattctgaaattagaaatcaggaaaatgatatactaataaataaaaaaattcattcagcacttaaagaaaaattaaaagtaattctttgtattggggaaacatacaaagaaaaaaaaaataataaaactttctcagtacttaaaagacaaataactattgcattaaagaatataaaaaaaattaataatattatttttgcatatgaacctagatgggccatcggaactggaaaaataccaaaatcatctgaattaagaaaaaattttagagacataaataatataattaaaaaattaaaaaaaaatcaaaaatataaaattatctatggaggatctgttaattctaaaaatgtatcagagttaaaaaaaattaatgatttaaaaggatttttaataggaagcgcttctttgagggcaaaaaattttattgatataattaaaaaatcaactaattaa

SEQ ID NO: 290566 - DNA, 727 bp, Unknown
  Bacterial polypeptide expressing nucleotide sequence isolated from the Sargasso Sea
atgtattttgtggctaattggaaaatgtttggaaacttaaaatcaataaatacattggataaagttattaaattttcaaaatctaaagaaattaagaagggaagattaatttattgtcctccatacactttaataacctcttttttcaaaaaatttgaaaattgtttaattgatattggtggacaaaattgtcatgaaaatgatgattacggtgcacatacaggttctataaattcaaagatgctaaaaagtataggggcaaattatgttatattaggacattctgaaaatagaattaaaggagaaacagacaaacttataaatttaaaaattagaagtgctattaaagcaaaattaaaagttatattttgtattggagaaactttaaaagaaaaaaatagtggtaaaacaaattcaattttatcaaaacaaattaaatttggtttagataaggttaaaaaaaaatctaatatatttattgcatatgagcctgtctggtctattggtactggcaaaattccaaaatctaaagaacttcagcaaacagtagaatttattaagaaaaagtttaaaggtaaattaccaaaaattttatatggaggatctgttaatcctaaaaatataaatgacttaaaaaagattagtagtcttgatggttttttaattggaggagcatcacaaagttcaaaaaaatttattgatatagttaaaaaaacctttaattaat

SEQ ID NO: 290567 - DNA, 625 bp, Unknown
  Bacterial polypeptide expressing nucleotide sequence isolated from the Sargasso Sea
gcccctccaatttctcacttaactgaactgaaaaacctttttaaatttggttttcttggcgcacaagatatctctagatttaatgatggcgctaaaacgggagatataagtgctgatatggtgattgacaaaggctgcacattttcaattttaggtcattcagaaagaagagagttttataatgaaacaaataaccttgtttcagaaaagctaagaatatgtctcgagaagaatattatgccagttgtctgtattggtgaatctcttgaagactataacgcaggtaaaactcttgaagttttggatatgcaactaaaagaaatattcacatcaatatcttctaaaaagactgttgtaatagcttatgagccagtttgggctattggttcaggaaagacacctactgcagatgaggtgaataatattcaccatcatattaaagatatagtacaatccatcgctgaaattgaagctattagtgttatttatggcggcagtgtaaattgtgaaaatgctaaaagtttttttcaacaaacaaatattgatggtgctttaataggtggagcttcattaaatggaaaagattttttagatatttataatgattttttggagactttttaaa

SEQ ID NO: 290568 - DNA, 682 bp, Unknown
  Bacterial polypeptide expressing nucleotide sequence isolated from the Sargasso Sea
aattgctgctaattttaaaatgcatggagatgtagatttttactcctcatggttaaaaaaatttgagttaccaaaacaaaacacagtgttatttgctccaccatatttatactttgattgctttctaaaagacgaaaggaatttactcgtgatgtctcaagatgtatcagatgaggaaattggaccctttacctcacaaatttctgcaaaaatgcttaatgagataggagtagagttttctcttataggccactcagaaacaagggataaaatggggtttaccaacaaaaatgtttttcaaaaatttttgtcgttaagagccaatcgtattaccccaataatttgcgtgggtgaatcaaaagattatagagatgggggtaagcattttgggttcttagaagagcaattaagcttttataaagcagaatctaaaacaggtctaatatttgcttacgaaccagtttggtctattggaactggtattctaccaaaatcaagtgagatttttgaagttgttgaatttattaaatcttactttgacttcaaaataaaagttttatacggcggaagcgtaaatgcaagcaatgcaaaagacttgctcagaataaaaaatcttgatggtcttttagtgggtggggcttctctaaaggcagaagaatttgctatgatagctggctcatga

SEQ ID NO: 290569 - DNA, 655 bp, Unknown
  Bacterial polypeptide expressing nucleotide sequence isolated from the Sargasso Sea
ttgggtattgaacattggcctgaagttggaatagctccaccatcaatctatataactgaatatagcacgcctaaactagcaattggagctcaagacgttgatcattcgtcaggatcaagaacaggcgcaatatctattgaaatgcttgatgacgttggtgtggagtttgtaattattggacattcagaaagacgagaattttttcatgaagataatgatttgattagaaaaaaaatacaagctgttaatgagagcaaaataggctcaataattctatgtattggagaaacaaaagaagaaaataaaatgggtgccacaaaagatgtcttaaaaaatcaacttagtgtaattaatggatttgaacttggtaaaaactttacaatagcttatgagcctgtatgggcaattggaagtggacagacaccagaaccaaaagacataaatgaaattcataaatatataaaagatgttgtacaatccgtctctgtaaacaatcatgtaccagaagttgtttatggcggaagtgttactgataaaaatgcagaaagtttctttaaagaagaatttgtagacggtgcattagttggaggagcatcattgaatggcacgacttttgcaaatatagttaacatatggagagaaaatattatttaaa

SEQ ID NO: 290570 - DNA, 769 bp, Unknown
  Bacterial polypeptide expressing nucleotide sequence isolated from the Sargasso Sea
ttgattattgccaattggaaatcaaacggcgggttaaggatgatttataaatggaattctgatttcaagaattcgtgtccacccgtagatttttatgtaggagtagctcctcccgtaatttatatgtctgaaataagtttattagaatttcctttagatactcctcaaaaaaaatcaaataataaagtttgggatattaatattggcgcccaagacgtagatcatttatctggttctagaacaggaactgtatccattagaatgtttgaagaatttagtatagattttgcaattattggtcattctgaaagaagagagtttttcaatgaagacaatgatttaataagacaaaaaattattgctctaaataatagtaatgtaaaaacaaagatattgtgtattggagagactaaagaagaaaacgataaaggtatcacaaaagatgtgcttaaaaatcaacttgaagtagttgatgctatggatctagaaaattttataatagcttatgaaccggtctgggcaataggtagcgggttaactccagatccaaaagatataaatgaaatacataaatatattaaagatgttgtacaatccaattctacaaataagcttataccaaaggttttgtatggcggaagcgttacagataaaaatgctgaaaacttttttaaggaagattttgtagatggcgcattggttggaggagcatcgcttgatggtaaaacctttgcaaatatagtaaatatttatagtagtacaaaataga

SEQ ID NO: 290571 - DNA, 247 bp, Unknown
  Bacterial polypeptide expressing nucleotide sequence isolated from the Sargasso Sea
gcgatcggaactggcgcgactgcgtccccgtcggatgcccaagaaatgtgttcgcacattcgttccacgcttgcttccatgcacgctccagccgcagagaaagttcgcattcagtacggaggttcggtcaatgcttccaacgttaacgagctgatgtcgatgcccgacgtggatggggccttagttggaggggcgtctctggaagctgcttctttcgcgagaattgtcggctatgaggatgcgtaaa

SEQ ID NO: 290572 - DNA, 565 bp, Unknown
  Bacterial polypeptide expressing nucleotide sequence isolated from the Sargasso Sea
aatgttttttagggaagatgatggtccatatactggtgaggtctcggtaaagatgctcttggacatggggtgtagttgggcaatgattggtcattcggagagaagacaatatttattagaaacaaacgaaatgattaataaaaaggttttaagctcaatcaaaaaagggcttaaggttatactttgtgttggcgaatcattcgagcaaaggagaagaaagaaaacttttgaatctattgctgatcagctctatagaggtctaagaggagtaagtgaagatttaataccccaaatagtcattggctatgaaccaatctgggttattgggtctggtgaagcagcaagtgtgaatgatatatcaagcgtccataattttatttctgatgaacttaagtctatgttcccttctgcaaaattattacccaggattgtttatggaggtagcgtaaatactgataatatcagccaaatatctaacctcaacaatgtagatggagtgcttgttggaaatgcaagtatggattgtgacaaattctgtgatattgtaatgaaggttgtaaaatga

SEQ ID NO: 290573 - DNA, 742 bp, Unknown
  Bacterial polypeptide expressing nucleotide sequence isolated from the Sargasso Sea
atgagtgaaaaaatatttgcagcaaattggaaaatgtatttgaatgataaagaatctaaagaatttatatctagaataacttcaaataaggaatttttttcagaatttaatatcatgatttttcccaatcatctctctattgcagctgtccaaaatcttgctaaagatttaccgaatataaaaataggtatgcaagattgtgatgcttcgacatctggtgcaataactggttcaaattcaattacctctttagatgttgactcatgtattgttggacattcagaaagaagaaatgtctttaatgaaagtaatgaaataattaagagtaagttaaataattgtttaaataatattgattcagttattctttgtgttggagaacagcttgatgaaaaagagcaaaataaaacatttgaaataatccaaaaacaattatctattttgccaaaagaattgaatggtaaaaatcttataatcgcatatgagcctgtttgggcaattggaactggattagttgcatcaaaagaatatattgatgatgttctttcatatataaataatttaataaaagagttatattccgaagaaaactgttctaacataagtttattttatggtggatcagtagatgaaaattctgttaaagagttatcatcaattaatttgttagatggatttttgattggtagcgctagtgcagattttgaaaaatttgaaaatattttaaataaaatgaggtaat

SEQ ID NO: 290574 - DNA, 697 bp, Unknown
  Bacterial polypeptide expressing nucleotide sequence isolated from the Sargasso Sea
atgaaacagaaatatattgtaggtaattggaagatgacattaaataaaaaagattctctaaagttagctgaagatattaggttaattaaacaaaaggataatgttagtattgaaattgctccaacctatttgtacttacaagatatcattgaaattcttaatgatactgatgtaagtgtcattagccaaaactttgattatgaatcattaggctcttttacaggtggaatttctttgactcaacttaaggaaataggcttgtcaaagacaattttggggcattctgaaaggaggtcaaagtttaatgaatcaaatgaaatggtcgataaaaaattagagatagtattaaattcaaattttgatgtaatctactgctttgacagctatgaacagataccatttaaccttattaagaataatctcaatactaattctaaactgaccctagcatatgaacctatttgggcaataggaactggggaaactgccacagttgaacatattgaagaaattcattcaaaagtaagttccactcttaaaagtcttgatattaaggatatcccaattctttatgggggaagtgtgaatcctgctaattcaaatcaaattttacatgcaaacaatgttgatggtgttcttgtaggtggcgcgtccactaaatttaacctgcttaaaggtatcattaactctatttaac

SEQ ID NO: 290575 - DNA, 742 bp, Unknown
  Bacterial polypeptide expressing nucleotide sequence isolated from the Sargasso Sea
tatgacaaacaaaattatgtatttcattgctaattggaagatgtatggaaatttaaaatcattaaatacattgggtaaagttattaaattttctaaatctaaagaaattaagaaaggaagattaatttattgtcctccatatactttaatttcttcctttttgaaaaagttcgaaaattgtttaatagatatcggaggtcaaaattgtcatgagagtgaaaattatggttcacatacaggttttgtaaattcaaaaatgcttaaaagctctggtgccaattatgtaattttaggtcattcagaaaacagacaaaaaggcgaaacagacaaacttattaatctcaaaattaaaagcgctattaaatcaaaattaaaagttattttttgtattggcgaaactttggctgaaaaaaagaaaaaaaaaacaaaatcaattttatcaaaacaaattaaacatggtttaaaaaagataaaaaaaagatctaatatatttgttgcttatgagccagtttggtcaattggtactggaaaaattcctaaaatagatgaacttgagcaaacagttgaattcataaaaaaaaaatttaagggtaaattaccaaaaattttatacggtggatctgtaaatcccgaaaatgtgagaaatttaaaaaaaataactaaccttgatggttttttaatcggtggagcttcacaaaactccaaaaaatttattgatatagtaaaaaaatcgtataattag

SEQ ID NO: 290576 - DNA, 455 bp, Unknown
  Bacterial polypeptide expressing nucleotide sequence isolated from the Sargasso Sea
tatgactaatcggcaaatattggtcgcggcaaactggaagatgaatggctctctcaagagcattcgtgagttgggcgatgcttttactgagggtgtttcagataaaacaccgacagaagtagtggtttgtccctcatttgttcatctatttcagttgtcggaaaaattaaacgagtctgacatcaaactcggcgcgcagaatgtgtcacatttagacgaaggggcatataccggtgaggtttgtgcttcaatgcttgttgattttggttgtgagtatgtaattgtgggtcattctgaacggagaatgctctaccacgagacggatatgcgtgttgccgagaaattttataccgtgcaagctagtggtatgattccaattttatgtgtgggtgaattacttgaggaacgggaatcgaacagtacagaagaggtgattgcccgacaacttgatgcgg

SEQ ID NO: 290577 - DNA, 763 bp, Unknown
  Bacterial polypeptide expressing nucleotide sequence isolated from the Sargasso Sea
catgacaaacaaattaaaatattttataggtaactggaaaatgtttggtgattttagctcattggaaatcattaaacggatcaacaatttttgtcttaaatttagaaaaaagaacaaaaatagtaaagttattttatgtgtaccaaatattttaattaatttttttaaatctaaacttaattcgaatattatttctattggtgctcaaaattgttctcataacaaaaattatgggccctttactggttctgtaagcgccttaatgcttaaaaagtctggagctaattttgttattttgggtcattcagaaaatagatttgaaggtgaatctaataaattaattatgcaaaaaattgagaatgcccttgaagctaatttaaaagttattttttgtattggagaaacacaaaaacaaaaaaacaaaggtcaaacatttgctgtaattagcaaccaattaaaaaaatcaatcaaaaaaagctttgataaaaataaaattattatagcttacgaaccagtttggtctatagggtctggaaagataccaaaaaaaagtgaacttataaaaattttcaaatttataaaaaatatatataaaaagttattcaaaactaaaaaatatccaaaagtactttatggaggatctgtaaataataaaaatatcagtttattttccaagattagtgaaatagatggttttttaatcggtggagcgtctcaatcatctaaaaaatttattgatataataaaaaaatactataaataa

SEQ ID NO: 290578 - DNA, 742 bp, Unknown
  Bacterial polypeptide expressing nucleotide sequence isolated from the Sargasso Sea
tatgacaaataaatatctgtattttgtagctaattggaaaatgtatggtgatttaaaagcacttaattcgttagataaagttatgaaattttcaaaaagtataaaacacaaaaaattaaagttaatttattgtccacccagcactcttattaattctttatccaataaacttaaaaatacaaaaattgaagttggagctcaaaattcccacgagagcgatcattacggtgcacacactggtcaaataaattccaaaatgttaaaaaatgttggagcgcgttatgttatattgggacactctgaaaatagacagacaggtgaagataatcaaaaaattaactccaaaattaaaagtgcattaaaatctagtttaaaaattatttattgcattggcgaaacattaaaagagaaaagaaacaaaaaaactaatcaagttttaagtaagcaaattaaaataggcttaaaatcaattcgaaacaaatcaaatataataattgcttatgagccagtctggtcgattggtactggattaattccaaagccaaaagacttgataaaatcaatttcatttattaaaaaaaaattaggcaaaaaaccttctaaaattttgtatggaggctctgtaaatagtgacaacattaatcaattgaaaaatattaatagcattgatggttttttaataggtggggcctctcaagatccaaagaaatttattgatataattaaaaaaaccattaattag

SEQ ID NO: 290579 - DNA, 754 bp, Unknown
  Bacterial polypeptide expressing nucleotide sequence isolated from the Sargasso Sea
tatgacaaataataatatatattttattgcaaactggaaaatgtacggaaatatagctgatattaacaaatctaaatcagttgttaggctatctaatcttagaaaattcaaaaaagcaaaaattatatactgtcccccgtatactttactaaacacattttatgagagagttaaaaattcaaatatttctattggggcacaaaattgtcattcaaatccagaatatggagcttttactggatcagtaaatgcgaaattaattaaatcctctggcgctagattcgtcatacttggacattcagagaatagaaaaaatggtgaaaatgatttgaccataaataaaaaaattctttcagttttaaaagaaaatttaaatgtaatattttgtattggcgaaacattaactgaaaagaaaaataaaaaaacatatagtgttttaaaaaaacaaataaccaaaggtttaaaaggtataaaaaaattaaataacattttggtagcctacgagcccatatggtctataggtacaggtttaatacctaataattcagaattactaaaaaatataagtaatattaaaaaaatttttaagaaatttaaaaaatcttcaaatattaaaattctatatggaggatctgtaaatccaaaaaatataagagaacttgctcaaattaaagcaataaacggttttcttgtgggtggagcatctttaaattcaaaaaaattcattgatataataaaaaaaacaattaattaa

SEQ ID NO: 290580 - DNA, 231 bp, Unknown
  Bacterial polypeptide expressing nucleotide sequence isolated from the Sargasso Sea
caccagaaccaaaagatataaatgaaattcataaatacattaaagatgttgtacaatccaattctgaaaataacctctcaccaaaagttttatatggtggaagtgttacagataaaaatgctgaaagcttttttaaagaagaatttgtggatggagcattggttggaggggcttcgttagatgggacaacctttgcaaaaatagtaaatatatttaatagaactaaataaa

SEQ ID NO: 290581 - DNA, 769 bp, Unknown
  Bacterial polypeptide expressing nucleotide sequence isolated from the Sargasso Sea
aatgtcacaccctcttgtaattgcaaattggaaaatgaatataccctctggaggtatttcaagctggatccaaagtgagatggtatctactaatgatgaagtagattttaataaaaaatcttcatactttaagtttatgggaatcgctcctccaatttctcatttatcagaactagagaatttattaaattttggatttcttggctcacaagatatctctagatttaatgatggcgcaaaaactggagatataagtgctgatatggtgattgacaaaggctgcacattttcaattttaggtcattccgaaagaagagagttttataatgaaacaaataaggatgtttcagaaaaactaagaatatgtctcgagaagaatattttgccagttatctgtattggtgaatctcttgaagactataacgcaggtaaaactcttgaagtgctggatatgcaaatcaaagaaatatttacatctttatctactaaaaagactgttgtaatagcttatgagccagtttgggctatcggctcgggaaagacaccaactccagatgacgtgaataatattcaccaacacattaaagatatagtacaatccatcgctgaaattgaagctattagttttatctatggcggtagtgtaaattgtgaaaatgctaaaagtttttttcaacaaacaaatattgatggggctttaataggtggagcttcattgaatggaaaagaatttttagatatttataatgattttttggagactttttaa

SEQ ID NO: 290582 - DNA, 742 bp, Unknown
  Bacterial polypeptide expressing nucleotide sequence isolated from the Sargasso Sea
gatgattgttgctaattggaaatgtaatggaagcaaagtcatgataaatgaatggaccaataattttttaacaaattatgttgagatgaagaaatcatttattggcatagcgcctccttcaatttatatagaaagtattctcgacaccaagcttagtaagttagaagaaataaatataggatctcaagacatagatatttcatctggcgcaagaacaggagcaatttcttatgaaatgattttagattttgattgtaagttttcaatcattggccattctgaaagaagacaattttttaatgaaaacaatcatgaaataaaacaaaagattttaaaaattgcgaataaaacattaacgattttatgtgttggtgaaaccgaagaagaaaacatgaatgatcaaactaaagatgttttaaaaagacaattagaagtaattaaggacattgaatttaatgattcattggttatagcttatgagccagtttgggcgattggaactggaaatacaccaaccccagataaaattaatgaaattcataaattcattaaagatgttgtacaatcctattcagatatttcttcaattcctatggttttatatggcggaagtgtaaatgaggagaatgctgaaaacttttttaaagaagaatctgttgatggtgctttaatcgggggtgcttctttagatggcagacaatttgctaatattattaatatttttaatggaataaacttaaaa

SEQ ID NO: 290583 - DNA, 592 bp, Unknown
  Bacterial polypeptide expressing nucleotide sequence isolated from the Sargasso Sea
aaccataagtcataagaaattagttattggcgcacaaaattgtcatcatgatgaaagtggtgcatatactggcgatgtttcagcaaaaatgcttaaggatgctggtgctaaaataattattgtaggacattcggaaagaagacaattttataatgagaccaatgaaatagttaataaaaaggcagtatcagtaataaaatcagctctacaaacaataatttgtataggtgagacagaggaagaaaaaaatatgggtttaactaataaaatagtttgtactcagcttaagaattcaatgccttcagtttctgatgaaaataatactgtaattgcttatgaaccaatttgggctattggaacaggcagaattccaaccattaaagaaatagaagttgtacataaagagttgagatctttagtttctaaaattaaaggtatagacactgcaaataaaatgagaatcttgtatggaggttcggttaaaccaaataatgccaaggatatttttgatttagacaatgttgatggtgcgcttgtagggggagcatctttaaaatctgacgattttatgggaataataaatgtttgttaa

SEQ ID NO: 290584 - DNA, 553 bp, Unknown
  Bacterial polypeptide expressing nucleotide sequence isolated from the Sargasso Sea
tttaagatagtggtgcttatactgggtgaaatttcattaagtatgttattagaatgtaatgttgagtatgtaataataggacattccgaaagaagacaaatatttaatgaagagaatgattcaattaataaaaaagttttaaaagtaatagaatctggtattaaaccaatcctttgtgtaggggagactattgatgaaatgaatgcagggaaggcacataatactattgaagaacaattaataagtggcttaaatggcattaaatcattaaacaatatcattattgcttatgagccagtgtgggcaattggtactggtctaactgcctcttttgaacaaataaatgtggttcataaattcataagaaaaatattgagcaaattatttgatgataaaggatctaaaaacactccgatcctatatggcggttccgtcaactcagctaatgcaaatgaactaatttcgatagatggcgttaatggatttcttattggcggtgctagcctagatgttgttaaattctcagaagtcgttaaaatagttaatggctaat

SEQ ID NO: 290585 - DNA, 643 bp, Unknown
  Bacterial polypeptide expressing nucleotide sequence isolated from the Sargasso Sea
tatggttgctccatcttacattcatcttagtgatgctgttgagatggttaaagattctaaccttgaagtattagctcaaaacatgcattttttaaataatggagctttcactggcgaggtatctgttaaaatgttgaaaagtatcgacgttaataaagtaattctaggtcactctgaaaggagaatttattataatgaaaatgatgattctcttaaagaaaagattaaaattgccttagaaaataattttgaaataatattttgttttggtgagcaattatcagaccgcaaaaatggtaagcatttcgatgttatagaagatcaacttagcattcctctttttcatctagaatcaagcaattggaagaatataattctcgcatatgaacctgtttgggccattggaacgggcgaaacggcaactccaaatcaagttcaagaaatacattcttttataaggactttgattacaaataaatatagtttggaccttgctaatagcatctctattctttatggaggaagtgtaaaatcaaataactcgcaagaaattttttctaaacaagacgttgatggaggtctcataggtggagcatcattagattttaaggaatttgttaaaattattgaatctataatataa

SEQ ID NO: 290586 - DNA, 701 bp, Unknown
  Bacterial polypeptide expressing nucleotide sequence isolated from the Sargasso Sea
aatggccgccaattggaagatgaattatacgagagaagaaacaaaagagtattttgagaatttcaagtctcttgctgagaagtctttgtggtattcagataagtcctttgaacttgtttttgcagttccttttacctcaattctgaccactcaaaagtggcaaaatgaacttttctttttaacagctgcacaaaatgtacattttgctcaaaaaggagcttttactggggagatttctattcctatgttacaagaccttggggtgcagtgggtcattcttggtcatagtgaacgcagacagttttttgcagagacagacgagagtgttgcaaaaaaagccgtttcatctatggaggcaggtttaaatatcattgtttgtgttggtgaaagtaaagaagaaagacttgcaggagagagtgaaagaattgtgagctcacagttaaagcctcttttagagaaaggttttaatgctgaaaagcttgttgttgcttacgaacctatttgggctattggtacaggtgaagctgcaagtgcacatgaagcacaaaaaatgcatcacttgattcgttgtgaactctctcgttattgctctgcacaagaagcagaaaaaattcgtattctctatgggggtagtatgaatgaaaaaaactgtcataatttcttaaaagaaaaagatattgatggaggtcttgtgggggggg

SEQ ID NO: 290587 - DNA, 754 bp, Unknown
  Bacterial polypeptide expressing nucleotide sequence isolated from the Sargasso Sea
tttgtcttatttaattgttgctaattggaaaatgaataaaaccaatcaagaatctcttaaattgattactgagattaataatgcgattcaacagacttcaaatataaatgtggttatttgtcctccatacacttcaatagtaccagctgcagaagtattagagaattcttctattatgcttggttctcaaaatatgtctcatgaggctcctggagctcatacaggcgaaatttcagtagatatgatatctccttattgtgagtacgttattcttggacattcagaaagaagaataatctatggagagacgaatgatattgtaaatatgaaaatattaaaagcattgggtagcaaattaacaccaattatatgtattggtgaaaatattgatcaaagaaatgaaggtaaattggattcaattttgaaggaaatgttagaatcctctctgacgggtgtaaaaagttttgacaatttagttatagcctatgaaccgttatgggctataggcactggtatttcagcctccccagaacaggcaaatgaggcatgtagtaaaataaaaatcttattaatggaacatttcaataaaacggaaaaagacattaccactcctattctctatggtggtagtgtaactaaagaaaatattaaagattttctaaaccaggattgtattgatggagctttaatcggatcagcaagtctgagttcagaacaatttctttctattattcaaacaattgatactttgtaa

SEQ ID NO: 290588 - DNA, 754 bp, Unknown
  Bacterial polypeptide expressing nucleotide sequence isolated from the Sargasso Sea
atgcgaaaacctctgatcgccgggaactggaaaatgaacggcaaccgagggcttgcctccaaaatgcttcaggcgatggagagcagtcttgatcaaacttctgcggatctggtggtttgtcctcctttctccctacttcagagtgtgggggagtgttttgaaaaaactccgattttcctcggtgcacagaatgttcatgcccaactttcaggtgcatacactggtgaaatctctgcgccgatgttgaatgagatggatgtgaagtggtgtattgtcggtcattcagaacgtcgagcacaattttccgaaacagatgccattgttcgacagaaagtgggtattttactccaaaatggaatccaacccatcatgtgcgtcggagaatccctagaagagcgtgaagcaggcaagcatgaggaagtggtagtcgagcaactgaaaaatggactttcgggtttgacctcagatgaccatttacgctgcacaatcgcctatgagcctgtctgggcgatagggactggaaagacagcaaccccagagcaggcgaattcaatgcacctcgtcatccgtaaccaacttgctgagctggcgaacgaacagttcgccaccaagatgaggatcctttatggcggcagtgtcaatgccgataatgcagaggaactcctcggtcagtcagagattgacggagcgttggtgggaggtgcgagtttgaaaaccaatcaatttcctggcatcattactgccgcgaagggat

SEQ ID NO: 290589 - DNA, 421 bp, Unknown
  Bacterial polypeptide expressing nucleotide sequence isolated from the Sargasso Sea
ttttagtgaaagtgatgaacaaattaataaaagagcagtttttgctcaatctagtggacttactccaatagtttgtgtcggagaaactttagaacaaagagagagaggagaagcttttagagttattactagacaggttgaacaaggattagaaaatacagatccatctaatttaattgttgcctatgaaccaatatgggctattggcactggtaaaacatgtgaggcagaagacgctaataagatatgttctttgattcggaaattaataggttttgatgatttaattattcaatatggtggttctgttaaacctaataatattgacgaaatcatgtcaatgagtgatatagatggagtattagttggaggggcttcattagatccgaatagttttgcgagaattgcaaattatcaataa

SEQ ID NO: 290590 - DNA, 384 bp, Unknown
  Bacterial polypeptide expressing nucleotide sequence isolated from the Sargasso Sea
ttaatttaataaatgataaaataattccagtgatttgtgttggggaaactttagaacaaaaagaaaaaaatttaactaaatcaattatcactgagcaattagaaaaaggtatttcagaaaattcaaattttcaaaatacagttattgcatatgaacctgtttgggcgattggaactggattaacaccatcattgaatgaaatagaagaagttcattcatttataaaagaagtagataaaaaatttaataattataaagtactttatggaggttcagtaaatgcttctaattcagctgatattaatagtttaaatagtgttgatggttgtttagttggtggttcatctctaaatgttgacgaatttaataaaattatttcttgat

SEQ ID NO: 290591 - DNA, 550 bp, Unknown
  Bacterial polypeptide expressing nucleotide sequence isolated from the Sargasso Sea
aatggcaacgcctccaataatagccggcaattggaagatgaatcttgtgttagaaagttcgacaaaacttatctcagacttgaagaaaggcggcatatcgaaatctagagcgagagtaataattatccctcccgctaccttgctttcgtctattgcagatcaaataaaaaataccggtatttttttaggcgcccagaattgtcacgaagagttaaaaggcgcatttactggagaagtttcagccgagatgctaacaagtgctggctgtaattatgtaatcctgggtcactcagaaagaagaacgctttttggggaaacgaatgctcagattaaggcaaaaatgttatcagctattaagtgtggtttgacccccattgtttgcgttggcgagagcctaaggcaacgcgaagcagggggggctatggatacagtggaaacgcaattagaagaatgtctcatagatgaagtaagtaaagataattgtatcattgcgtatgaacccgtatgggccattggaaccggtcagactgcggagccagacgacatttga

SEQ ID NO: 290592 - DNA, 552 bp, Unknown
  Bacterial polypeptide expressing nucleotide sequence isolated from the Sargasso Sea
tatgacttgtgctgaagctaagtcttatttagaagagtttatacctttaatacaaaatataagtgaagatcgtaaaattgttattgccccaccttttacagctatttcaaccttttctaatcattctgattttaattatttagatatttctagtcaaaatattcattgggaagatgaaggagcctttaccgctgaaatatctccaaaaatgctccttgaacatggagtctcatatgcaatagttggtcacagtgaaccaaggaaatattttagtgaaagcgatgaacaaattaataaaagagcagtttttgctcaatctagaggacttactccaattgtttgtgttggagaatcattagaacaacgagaaagaggagaagcagatagagttattactagacaggttgaacaaggactggaaaatacagatccatcaaaactaatagttgcctatgaaccaatttgggctattgggacaggtaaaacatgtcaggctatagatgccaataagatatgtgctttgattagaaaattaataggttttgatgatgt

SEQ ID NO: 290593 - DNA, 667 bp, Unknown
  Bacterial polypeptide expressing nucleotide sequence isolated from the Sargasso Sea
ggaaatattgaatttattaaggaatattatcaaaaattattacctaattctaaaaattgtactgtagtttgttcaccgagtattttcctaaataggctcaaatataatagcaataatttgtttataggcgcgcaggatgtttcaatttataatgaaggcgcatttacaggtgagatatctgcaaaaatgctttctaatgaaaatgttagtttttgcttagttggtcattctgaaagaaggcaatacttccatgataaaaatgaaattataaataaaaaatctataaatctaatagaaaacaaaattattccagttatttgtgtaggtgaaactttaaaagagaaagaaaataaattaactaaaaatgttttagtaaaacaaattgaagaaagtgtcccagaaatatcaaactttgataatacaatcatagcttatgaaccaatttgggctattggtacaggtttaactccttcgctagaagaaattgaagaagttcattcatttattaaaaatattaatgaaacatataataattttaaagttttatatggtggttctgtaaaagctgaaaattcagcagatattaacaatttacaaaatgtcgatggatgtttggttggtggtgcttccttaaaagttaacgaattcaacaaaattatatcttgat

SEQ ID NO: 290594 - DNA, 629 bp, Unknown
  Bacterial polypeptide expressing nucleotide sequence isolated from the Sargasso Sea
tatgatcaaattgtctgatttttcatcattttttgtagcaaattggaagttaaacggaaattttcaatttattgatgaatttattaataatttatcgttaccaaaagataattctaagtgtgtagttatatgcccaacagctgttcatctagattatatgtccaaaaataaaaatggcttttatgtaggtgcacaaaatgtttcagaacacaaggaaggagcttatacaggtgaaatttcagttcattcactgtcagatttaaatgtgaatttttgcataatagggcattctgaaagaagactaatctttaaagaaaaaaatgaggcaattaatctcaaatctgagaaattaattggtaatggtttaatacccatcatttgtattggagaaactttagagcaaaaggaaaaaggaattactaaaaaggtattagaagagcagctaatgaatagtgttccacgttcctcaaattttgagaatactattattgcatatgagcctgtttgggcaataggcacaggtttaacaccaaccattgaagaaattgatgaaacccatcgctatattagagagcacaacgataaattaaataaatacaaaattttgtatggaggctctgttaaagcta

SEQ ID NO: 290595 - DNA, 550 bp, Unknown
  Bacterial polypeptide expressing nucleotide sequence isolated from the Sargasso Sea
tttgatatttctagtcaaaatattcattggggaagatcaaggtgcatttactgcagaaatatctccaaaaatgcttcttgaacatggtgtctcatatgcaatcgttggacatagtgaacccaggaaatattttagtgaaagtgatgaacaaattaataaaagagcagtttttgctcaatctagtggacttactccaatagtttgtgtaggagaaacattagaacaaagagagagaggagaagctgatagagttattactaggcaggttgaacaaggattagaaaatacggatccatctaatttaattgttgcctatgaaccaatatgggctattggcactggtaaaacatgtgaggcagaagacgctaataagatatgttctttgatccggaaattaataggttttgatgatgtaattattcaatatggaggatctgttaaacctaataatattgacgaaatcatgtcaatgagtgatatcgatggggtgttagttggaggggcttcattagatccgaatagtttcgcgagaattgcaaattatcaataa

SEQ ID NO: 290596 - DNA, 160 bp, Unknown
  Bacterial polypeptide expressing nucleotide sequence isolated from the Sargasso Sea
atcggagaaaatatcaggattttgtacggtggcagtgtgacaccgagtaatgcggcagatttatttgcccaacctgatgttgatggtggactgattggcggtgccagtttaaactctaccgagtttttaagtttgtgtaccatagcgatgagcgcataat

SEQ ID NO: 290597 - DNA, 748 bp, Unknown
  Bacterial polypeptide expressing nucleotide sequence isolated from the Sargasso Sea
atgtcagaaaatatattaattgtttcaaattggaaaatgaatttgaatttagataatgctacaaaattgttggacaatttaaaaaaaataaagttaggaagtaaaccaaaagttttgaatattgtatgcccacagttcctcttgatcccatatgtttcgaatttactgtcttccactgatataattcttggcggacaagattgtcattttgaagattttggctcatttacaggcgattcaagcattcaattattaaaatattataaatgtgaatatgtaattctgggtcattctgagagaaggtctcagtatggtgaaacaaatctcatgataaaaaagaaatgtgagattgctagaaaaaataaaatcaagccaattgtctgtgttggagaatcaattaaattgaggaaaaaaggtaaacatattgattttattataaatcaattagatgagtgtattgaaaaaaatcttgaaaatatcattgttgcatatgaaccaatttggtcaataggatctggtttgattccttcttatgacgaaatacttgaagtgaagacgaaatctatgaattttttaaaagaaagaaaaggaataaagaatgttaaaattctttacggaggatcagtaaactcagagaatttcaatgatataatccaaatgtcaggagtcgacggtgccttgattggtagtgctagcataaacattaaggaaataactaaaattattttaaatgttgattttaattgat

SEQ ID NO: 290598 - DNA, 712 bp, Unknown
  Bacterial polypeptide expressing nucleotide sequence isolated from the Sargasso Sea
aatgaattttaattcaactcaatcaaaagaatatttagattcaatacgcagtaagatctttaaaagaaataacataaaaattattatagcatcatcatttattgatatagctatgaattcaaaatatttatctaataatatttcttttgctgcccaaaatgttttttacaaaagtcaaggagcatatactggtgaaatatcttgcaatatgctcaaagaagttaattgcaattgggttattattggtcattctgaaagaagggcaatgtttcatgaaagtaatgaaattattaataaaaaattaacaaaagttattaatgaaaaattaagtcctatcttatgtattggagagaccgaggaagaaagaaaacagaataaaactttagaaatattaactagtcagttgttaacagcttttaatggaatatcttatgataaaattaataatattaaacttgcttatgagcctgtatgggcaatcggtacaggaaatactgcaaattttgatattatagatgatactcataaaataataagaaatattttattaaaaaatgggtataatggtaatgatatacctattttatacggtggtagtgttaatgaaaaaaatgctaaagagttagcaggaattaaaaatgtagatggttttttaataggcggtgcatctttagaagtagaaaaattttattcaatttataaaaatctttaa

SEQ ID NO: 290599 - DNA, 710 bp, Unknown
  Bacterial polypeptide expressing nucleotide sequence isolated from the Sargasso Sea
catgcgagaaaatttaattgttgcaaattggaaacttaatggtgattggcaactctgtcaaaaatttgctagtcataactgggttgttccaaataatacttcggtcatagtttgtccccctagtatttatttgcaatcttttagcgaggttttaattaaaaataaaagccctctaaagctgggagctcaagatgtttcagaacggtcgggtggcgcttatacagggcaaatttctgcaaggatgttaaatgacgcctccttggagtatgtgataattggtcattctgaaagacgtcaatggtgtatggaaacgaatgagcaagttgcagagaaggttcgacaatctcttaaagtaggtttacacccaattatatgtgttggtgaatctctagagcaaagggaagctgataaaacttttaaggttatagaggaacagttatcttctgtttttaaagtattagaagattttgatacttcgttgggaaatgtatcatttgcttacgagccaagatgggctatcggaacaggaaagtctgctacaccagagcaggcacaattggtgcatgagtcgataagagaatttttatcggttttgagcttgagtgatgacctacgaattttatacggaggtagcgttacagatgctaatataagatcacttttagctatgactgatattgatggagcacttgttggtggtgcctcattaa

SEQ ID NO: 290600 - DNA, 742 bp, Unknown
  Bacterial polypeptide expressing nucleotide sequence isolated from the Sargasso Sea
aatgggtgatttaaaatttttgactaaattagtcaataattttattaaattacataaaaaagtaaaacctagatgcgatgtactattattgccccctacattatatctaagcatgatcttaagtagattaaggtatcatagaatttctcttagaaaaatatctctcggagttcaaaacatatctccatttttaaatggagcatatactggcgaacaatctgttgacatgattaaagattataaatgttcatttactttaattggtcattcagaaagacgacatattttattagaggatgagaacatgattacgagcaaagtaaaattatctctacaggccaatttaaacaccatattatgtgtaggagaaactttgaaagaatataatcagaaattaacaaaaaaagtaatttcaagacaactaaggtctgctttatcaaagtctacacatttatttaaatctgatcatagtaaagttattatagcttatgaaccagtatgggctataggtactggtaaagcagcaatctcagaagatatagttgaagtacatagctatatccgtcaagttctcaataaaatactaggatctaagagcaattccattaagatcttatatggggggagcgtaaacgatgctaatgccaaatcaattttagatcttccagatgtaaatggagcattagttggtggagcctcattaaattctaaaaaatttattgatatttgctcttcaatttga

SEQ ID NO: 290601 - DNA, 709 bp, Unknown
  Bacterial polypeptide expressing nucleotide sequence isolated from the Sargasso Sea
tggtaatttaaaatctattaaatcaaccaataatgttatcaaacttacaaaattgaaaaaatttcaaaaattaagaattatatattgtccaccatatacattgctggatgctcttataaaaaaaacaaaaaattctagaatttcagtaggggctcaaaattgtcattacagatctgactatggtgcttatacaggttctgttaatgcaaaaatgattaaagatataggatctaattatgtaattttgggacattctgaagcaagattagaaggtgatgatgataaaaaaataaattttaaaattaaatctgctttagatgctaaattaaaagttattttttgcgttggcgagactttaaaaaataaaaaaaacaatagaactaaccaagttataaaaaaacaaattaatattggtttaaaaaaaattaataattataaaaatattatagttgcctacgaacctgtatggtcaatcggcactggtatattgccaaataaaattgagttagagaaaaatattaactttataagaaagcttttaaacaagaggaaaaatggaaaaaaagttattatactttacggcgggtccgtaaattcaaataatatcaaaaatttgataaaaatttcacaaattaaaggatttattgtaggaggggcatctcttaaagcaaaaaatttcattgatataataaaaaaatcaattaattag

SEQ ID NO: 290602 - DNA, 402 bp, Unknown
  Bacterial polypeptide expressing nucleotide sequence isolated from the Sargasso Sea
aaattaataaaagagcagtttttgctcaatctagtggacttactccaatagtttgtgtaggagaaacattagaacaaagagagagaggagaagctgatagagttattactaggcaggttgaacaaggattagaaaatacggatccatctaatttaattgttgcctatgaaccaatatgggctattggcactggtaaaacatgtgaggcagaagacgctaataagatatgttctttgatccggaaattaataggttttgatgatgtaattattcaatatggaggatctgttaaacctaataatattgacgaaatcatgtcaatgagtgatatcgatggggtgttagttggaggggcttcattagatccgaatagtttcgcgagaattgcaaattatcaataag

SEQ ID NO: 290603 - DNA, 714 bp, Unknown
  Bacterial polypeptide expressing nucleotide sequence isolated from the Sargasso Sea
atttagacaatttttcttcaattttagtagcaaattggaaattaaatggaaataaagagtttataaaagaatattatcaaaaattaatacccagtaatagtaattgtgtcgttatatgttcacctagtatttttcttactagtcttcctcaaaataataaaaatttattttctggtgctcaggacatctcatcatataaacaaggtgcatacacaggagagttatcagctagtatgctttatgataacaatatccatttttgtattgttggtcattcagaacgaaggaattattttagagaaaataatgcaataattaattctaaatcaataaatttaatagaaaataaaattattcctatcgtatgtgttggcgaaactttagaagaaaaagaaaaaaatttgactaaaaatgttttgtctaatcaaataaaagagagcattccctcaatctctaatcatcaaaatacaattattgcttatgagcccatttgggctattggaactggtttaacaccaagtttaaaggatatcgaagcagttcattcacatatcaaaaatattgataagagatttaataaatttaaagtattatatggtggctcggtgaaaaactcaaattcagcagatattaaaagtttaaaaaacgtagatggttgtttaattggaggagcttcattgaaagtggacgaattcaacacaattatttcttgat

SEQ ID NO: 290604 - DNA, 493 bp, Unknown
  Bacterial polypeptide expressing nucleotide sequence isolated from the Sargasso Sea
tatatgcttattggacattccgaaagaagacatattttcatggaatctgagaaattcatttcaaacaaaataagcatagcacttcaaaaaaataaaaaagttattttgtgtgtaggagaaacactaaaagattatagatctaacaatactaagcaagtcatcacaaaacaaattaattctgctttaaaagagtcattgcagctcattaacaaaaataaaaaaaatcttgtcattgcttatgaaccagtgtgggctataggtacgggaagatctgctaagattcaggatatagaaacaacacataccctgataagaaaacttttatttaaacttataaatgatgcaaaatcagaaataaaaatcttgtatggagggagtgtatcgccacaaaatgcaaaagaaatactagatgctgagaatgttgatggtgctttggttggaggagcttcattaagtgctaaaaaatttattgaaatttgtcgcacaatctgag

SEQ ID NO: 290605 - DNA, 938 bp, Unknown
  Bacterial polypeptide expressing nucleotide sequence isolated from the Sargasso Sea
tcgggcgtcgcccatcggcgcgcaaaacatctaccacgaatcgagcggcgcgtacacgggtgagatgagcgcggagatggcgaagagcgtcgggtgtacgcacgttctcgtcggacactcggagcgaagggagctcttcggcgagacggatgaggtgactcgtctcaagacgcgaaaggtgatcgattgcgacatgacggccgtcctgtgcatcggagagacgaaggaagagtacgaaacgggtcaagcgaaacgagtgtgcgcgcgacaactcgcggcggcgctcgaaggtgtggaggcggacgagatgaataaagttatcatcgcgtacgaacccgtgtgggccatcggtacgggcctcacggcgactccggcgatcgcgcagtccgtgcacgcgggcattcgcgattggttccgacaaacgtacggcgaggccgtggcgagtaaggtcagaatccagtacggcgggtccgtcaaaccggaaaccgtggatgagctcatggaggcaccggacgtcgacggatgtttagtcggcggcgcgtcgctcaacgccgaacaattcgggcgcatcttcggcttcaacccgaccccgacgggaccgacaaagatttgggcagaagaggtcgtcccgtgcgggaaccagctcggcgaatcgccgatttggtcggaagagcgtcagatgctctactgggtcgacgcgccttcgggaacgttgtacagctgggacttgaagagcgcgccacagcgaacgaatttcggcgaaaccctgggatgtgtcgcgcttcgctctaaggacacgcttctccttggattggagtctggtcttcacgcgtacgaaccgtcgtcgagaaagttgaagctcttgagtgagtttgagccaggactcaacacgcgtccgaacgacggtcgagtggatcgattcggtaactttgtcatcg

SEQ ID NO: 290606 - DNA, 616 bp, Unknown
  Bacterial polypeptide expressing nucleotide sequence isolated from the Sargasso Sea
atagattatttacgtaatctgattaacaacttacctatatctgttggaggacagaattgtcatttcaaatcttctggagcgttcactggagaagtttctgctaattttcttaaagatacgggttgtgaatatgtgttaataggtcactctgaaagaagaatactaaataatgaaaacaatgctgagataaaatcacgtgctcaaacagcaataaattcaaatttaaaagttattctttgtgttggagaaagcttaactaatcgagaagaaggtaaggctcttgaatatatagaaaaacaaattaatgactgtttgccaaataattttaaaaattcattcatagcatatgaacctatatggtcaattggtactggtaaaattccaagtgcatttgaaattcaagaaatgcattctcatataaaaaaaattgtatttagaatttcaaataaaaatataaacattctttatggtggttcagttaatactgaaaatataaatgaaatattaaaaataactaatgttgatggagtattagtaggtggagcaagccttaaagcaaaagattttcttgcaatttactcagcagcagttaaacatttagataatttatcataac

SEQ ID NO: 290607 - DNA, 661 bp, Unknown
  Bacterial polypeptide expressing nucleotide sequence isolated from the Sargasso Sea
atgtctttgagattaatagcaaattggaaacttaatggctcagtagaattttgcgataattgggcagaagagttttttaaaaatttctctagttcaaattccatagaaatagggattgcaccagcttctatttacatagatcatttaaagaagttgattactgattgcaggattgaaataggcgcgcaaaatatttgtgatgaggaatctggatcaagaactggtgaaatttcagcgccgatgattaaagatttaggatgcaaattttcattaattggccattctgagagacgtattttttatcatgaatctaacaaaaaaatttcaaaaaaattaaatctggcaaataataatactatcatccctgtattatgtattggcgagtctgccgatgaaaatgacagaaataatactcattatgttcttgaatctcagattaatgatgccttaaaaggttccaatgagattaattctctaataattgcatatgagcctgtttgggcaattggttctggaaaacttccaaatcctgaagaaataaatttcattcataaaatgattaaagatgtagtacaatctcgatttcctaaaattggtctaaagtcagttttatatggaggaagtgttaattctgataatgcatcatctttgtttgctcaag

SEQ ID NO: 290608 - DNA, 700 bp, Unknown
  Bacterial polypeptide expressing nucleotide sequence isolated from the Sargasso Sea
ttcgtcattttcattgcaaattggaaattgaatggaaatattgaatttattagagaatattatcaaaaattattacctaattctagaaattgtactatagtttgttcaccgagtattttcctaaataagctcaaatataatagcaataatttgtttataggtgcacaggatgtttcaatttataacgaaggtgcatttacaggcgagatatctgcaaaaatgctttcttacgaaaatgttagtttttgcttagttggtcattctgaaagaaggcaatatttccatgacaaaaatgaaattataaataaaaaatctataaatctaatagaaaacaaaattattccagttatttgtgtaggcgaaactttaaaagaaaaagaaaataaattaactaaaaatgttttaattaaacaaattgaagagagtgtcccagaaatttcaaactttgataacacaattatagcttacgaacctatttgggcaattggcacaggtttaactccatcgctagatgaaattgaagaagttcattcatttattaaaaatataaatgaaaaatataataaatttaaagttttatatggtggttccgtaaatgctgaaaattcagcagatattaacaatttacaaaatgtcaatggatgtttggttggcggcgcttccttaaaagttaacgaattcaacaaaattatatcttgat

SEQ ID NO: 290609 - DNA, 760 bp, Unknown
  Bacterial polypeptide expressing nucleotide sequence isolated from the Sargasso Sea
atgtcaaagaaaatcatagcaggaaattggaaacaaaatggaaccttgaaaagctccatcagcctaactaaaaaagttcttcaagctgtaaagaaggaaaaatataaccacgaaattattattattcctccttctatatttttattacctatcaaagatttaattcacaagagtcaaataaaattaggagctcagaacgtgtctgcttttaaagatggtgcatatactggtgaaatatcaggctcaatgttaaaagactctggagtagattattgtttagtgggacattcagagagacggcatataatcaatgaagatgaatctgatttttccagtaaagtaagccgtctaatcgataatgatatcaaaattatttattgttttggcgaaacactaaaagactataaaaataaaaaaacaaagctaatcataaaaagacaattaaaaaaattgtttttgaataacaaggataatttaaaaaaacatccaagcaaattaattttagcatatgaaccagtttgggctattggtacaggattagtaccttcttcagaagaattagtaagtacttttaaatatataagagatacagtaaataatttggataagaagtacgcatccataaaacttctctatggtggaagtgtcacaccagataatgcatcatctttgatggatactgagcacatagatggactcctgattggtggcgcgtcattgatagcgaaaaaatttattgatatttgctccacaatttgag

SEQ ID NO: 290610 - DNA, 737 bp, Unknown
  Bacterial polypeptide expressing nucleotide sequence isolated from the Sargasso Sea
aattattgctggaaatttgaaaatgaataaaacacccaatgaatgtagaattcttgcaaaagaaattattagttcattaaatggaataatggggattcatgtaattttttcacctcccttcactgggcttaatgaaattgaaacaagtaatccatttttcaaagcagctcaaaattgttattttgagcaaagtggtgcatttactggagagatctcaattgaaatgattaaaagttgtgatgctacccatgtaataattgggcactctgaacggagaatgctttttaatgaagacaactatacgatcaatcaaaaaatattagcagtgaaaaaaaatgggttaattcctattttctgtataggcgaaagtcttgaggatcgaaataatggatccactgaaaaaaaaatcagtgaccaaattgaaaaaggattaattggcatagattctctagaaggattagttgtagcatatgaaccggtttgggcaattggtactggagtagctgccagcgcaaaagaaattgaagacattcacaaatttattcataacgtattgaaaaatattgataaaaaacactatactcaggtattgtacggaggatcagtaaaaccagaaaattcagaagaattaattagggttcccggcgttgacggttttttaattggtggggcaagtttaaatgtagattcttttgtttcaatagctaaagtaatggaaaaatataggagtaattaat

SEQ ID NO: 290611 - DNA, 472 bp, Unknown
  Bacterial polypeptide expressing nucleotide sequence isolated from the Sargasso Sea
atgagaagaaaaattgttgcaggtaattggaaaatgaataatggcttgaaagaatctacaggattagttaaagaaattattaaaaaaaacaattcatataactgtgaagtatacgttgcaccagcatttccttttttgaatgacgtatctgttatttctaattcatctcaaattaaagttcttgcacaaaatgtttcaagcaaaagtaatggagcttttacaggtgaggtttcagttgatatgttaaaaagtataaatattaaaagtgttattattggtcattcagaaagacgaatgttatttggtgaagatgataaaatcttgaagatgaaattagaaaattgttttaaaaatgatatggaagtttttttctgtgttggagaaacattggataagagagaaaaaagaatgcaaaatgaagttattgaaaatcaattaaaaaatactttatttgatctcgataatggttaat

SEQ ID NO: 290612 - DNA, 730 bp, Unknown
  Bacterial polypeptide expressing nucleotide sequence isolated from the Sargasso Sea
atgatcaaattagatagtttttcttcattttttgtagcaaattggaaattacatggaaatttaaactttattgatgaatttcttgataaaatacaaatgcctaatgatatatcaaaatgtatagtcgtatgtcctacctcaatttatttggatactttatctaagaaaaaaaagaaatttttcattggcgctcaaaatgtttcacaatatgcagatggagcttatactggtgaaatttcatctaattctcttcgtgattttaaaattgatttttgtatagttggtcattcagaaagaagacaaattttttatgaaaaaaatggtgaaataaacttaaaatcttttcaattgataaaagatggaattataccaattgtttgtgttggtgaaacattagaagaaaaaaagcaaggtagaacaaatgaagttttagaaaatcaattaaaagaatctatttctgactcatctaattcattcaatactataatcgcctatgagccggtatgggctatcggaactggtttgactccatcatatgaagaaattgaatctactcataaatttataagagaaaataataaaaaatttaataattttaaaattttatatggtggatctgttaagtcatctaatgcaaaagaaatagttgctttacctaatgttgatggagcattaataggtggtgcctcaattaatttagatgaatttaaaaaaataatagaagattaat

SEQ ID NO: 290613 - DNA, 538 bp, Unknown
  Bacterial polypeptide expressing nucleotide sequence isolated from the Sargasso Sea
actgggtgaaatatcagtttccatgattaaagattgcaatgctaagtttgttattattggtcactcagagagacgtcatgtttttggtgaattggatgagcacataaacttaaaagttagtgcagtaatgagtggtggacttaaaccaatactatgtatcggtgaaactttagagcaaagacagcaaaataaaacaaactcagtcatcaaatcccaaatagagaaaggtttaaaaggtatcagctcttttgaaaatattgttattgcgtatgagcccgtatgggctatcggtaccggactaactgcggaagagaatcaaatttatgacgcacatgagagagttcgtatcactatgagagaactctacggtgaaaatcttaatattcaagttttatacggcggatcagtaaattcaaaaaatgctgattctcttattcaggtttcaggagttgatggatttttaatcggtggagcgagtcttgatattgaatcatttacgtctattgttaaaattgttgaaaaaatacaggggaaatga

SEQ ID NO: 290614 - DNA, 688 bp, Unknown
  Bacterial polypeptide expressing nucleotide sequence isolated from the Sargasso Sea
catgacttgtgtcgaatctaagtcttatttagaagagtttatacctttaataaaaaacataaaagaagatcgtaaagttgttattgctccaccttttacagctatttcaactttttctactaattctgattttgattatttagatattgctagtcaaaatattcattgggaagatgaaggtgcatttaccgctgaaatatctccaaaaatgcttctagagcatggagtatcatatgcaatagttggtcacagtgaaccaaggaaatattttagtgaaagcgatgatcaaattaataaaagagcagtttttgctcaatctagtggacttactccaatagtttgtgttggagaatcattagaacaaagagaaagaggagaagcagatagagttattactagacaggttgaacaaggactagagaatacagatccatcaaatctaatcgttgcctatgaaccaatttgggctattgggacaggtaaaacttgtgaggcaatagatgccaataagatatgttctttgattaggaaattgataggttttgatgatgtgattattcaatatggaggatcagttaaacctaataatattgacgaaattatgtcaatgagtgatatagatggagttttagttggaggagcttcattagatcctaatagttttgcaagaattgcaaattatcaataa

SEQ ID NO: 290615 - DNA, 754 bp, Unknown
  Bacterial polypeptide expressing nucleotide sequence isolated from the Sargasso Sea
atgcgagccccactggttgcagcaaactggaaaatgaatggctcgttttcaatgcttgacaaaatattagactccctcagaaatagttcggggagtaattcgtgtcaagttataatctgcccgcctcatgtccttctttcttcgttaaaaactgctattgaagggacaagaattgaagttggtgcacaaaatgtacatagcgagttatctggtgcattcactggagaaatttcagctccattactaaaagaatgtggggttaagtggtgcattgtcggtcattcggagcgcaggaagctttttgacgagtccgatgaattcataaggagtaaaactgaaacattgcttagttatggaattaggccgattttgtgtgttggcgagtctcttgaacaaagagattcaggtaaacatgaagatgtagtcgtagctcaattacgaaaaggattgtcaggttttaataccgaagatcaaagccgttgtgttttggcgtatgagccgatttgggcaattgggacaggtataacagcaactccagagcaggctaattctatgcacgctataattagaaatgagcttgaatccctagggaatcatgaagtggcagcaaatattcaaattatttacggaggcagtgttaatattgaaaacgcgaaatctttacttgctcaatcagaaattgatggagccctcgtcggtggagcaagccttaaagcaggagatttttctcaaattgttgccgcaagaacttaat

SEQ ID NO: 290616 - DNA, 748 bp, Unknown
  Bacterial polypeptide expressing nucleotide sequence isolated from the Sargasso Sea
catggcaaaggcaccgaaggtcctgattgcgggtaactggaaaatgaacggcaagtccgcatcggcttcagagatcaagaagctggcaaaactgaaaaaaccgaaagctgaggtgctgatctgtccgccagccacgctgatcggggagttcggcaagattgccaaggggacagcagtcaaaatcggcgcacaggactgccataccgccgtttccggtgcccatacaggggacatttctgcggagcagctcgtcgatgcaggggccaagtatattattgtcggtcactccgaacgacgtgccgaccatggtgaaacggatgctgttgtgcgcgccaaggcggaagccgtgctggcgaccaaggcatcggtcattgtctgtgttggtgagacggaagcacagaaagacaagggccagaccctacgcgtggtcggtgcccagttgaaaggttctgtaccggacggatcaacggcaaagaacatggttgttgcttatgaaccggtctgggcgatcggcacaggccggaccccgaccgtggaagatatcgataaagtgcacagcttcatccgcaagaaactggtggaacgcttcggggaagatggcaatggcgtgcggattctgtatggcggttccatgaaaccggacaatgccgcagaaatcctgaacgtgacggatgtaaatggtggactggtcggcggcgcaagcctgaaagcggctgatttcagcaagatcatcaaagcggctgaataa

SEQ ID NO: 290617 - DNA, 600 bp, Unknown
  Bacterial polypeptide expressing nucleotide sequence isolated from the Sargasso Sea
aaaaagctgttgaaggaacaaggattgaggttggtgcacaaaatgtacattgtgaattatctggagcatttactggagaaacatcagtaacattattaaaagagtttggagttcagtggtgcattgtcgggcattctgagcgtaggatgctttttgaagaatcagatgaatttattcgtagaaaaaccagaacgttgctcaaccatggaatccgaccaatcttgtgcgttggtgagtctattgagcaaaggaattcaggtactcacgaagatgtagttgtagagcaactaagaaaagtattctcaggtctttcaacagaagatcaaggtcgctgtgttgtcgcatatgagccgatttgggctattggaactggtaaaaccgcgactcctggacaggccaattccatgcacactctaatcagaaaagaggtggaatcactggctaatcctggaatagctgagaattttcaaattctgtatggaggcagtgtgaatgttgaaaacactaaatcattactttctatgtcagaaattgatggagcccttgtcggaggcgcaagcctcaaaacagaagatttttctcaaattgttacagcctaaa

SEQ ID NO: 290618 - DNA, 736 bp, Unknown
  Bacterial polypeptide expressing nucleotide sequence isolated from the Sargasso Sea
catgaagtatctaattgctaattggaaaatgaatagcctagacatttctgattggatttttaaatttgaaaataattgtggtgagatttcttctaaagaaacgttgcaaattgtaatttgtccaaattttttacaaattcctttttttattgaaaaatctgctttttctaaatatttattaactggaagccaagacgtatctgaaaaagaccccggtccttttaccggtcaagtctcttctaagcatttatcaaacttctctgagattcattattgtattgttgggcattctgaacaaagaatggcaggagatactaattcaattgttttccagaagactcaaaaattaattaatgaaaaaatttctcctatagtctgtgtaggagaaagccttgaaactagggaaagcggagatagagaaaatttcttatttaaacaattagagtcttttagtaattttgaaaactttaaatcaaactcaataatagttgcttatgagcctatttgggcaattggaacgggtatttctgcagaaatatcgagtattagagaatccatagatttcattaaagcaactttagaaactaaaaacattcaatcagaaattttatatggcggaagtgtaaatgcgacgaattcaaaagaaattttggctgaaaaaaatatttcaggattattagtaggaaacgcttcacttgatggagaagaatttgctaagatcgcccaaaatttttaa

SEQ ID NO: 290619 - DNA, 354 bp, Unknown
  Bacterial polypeptide expressing nucleotide sequence isolated from the Sargasso Sea
aagagcgtaagtccggccaaaccctgaacatcaatcgccgccaattgcggggctctttgcccgttggtgtaaccgccgcgaatacagtgatcgcctacgaacccatctgggctattggcaccggccaagtggccacgccttcccaggcgcaagaggttcacgcggctatccggaaggcgctgaaaagcaaactgggggcgaatgagggggacaatatgcgcattctttacggcggctccatgaagccagataacgcagcggaattgttgatcctgccagacgtggacggcggcctcatcggtggagccagcctttcgatgaccgatttctgggctattgccaaagcagcctagg

SEQ ID NO: 290620 - DNA, 532 bp, Unknown
  Bacterial polypeptide expressing nucleotide sequence isolated from the Sargasso Sea
tatgagaaaaaaaattgttgcaggtaactggaaaatgaatatgaataaagctgaagctaatgatttatttaataatataaatggattcgaaattccagaaggaattaatgtcattattgcgcccccatccctgtatttgactcaatttgctgttacaaatcctaaattaaaacttgcttcccaaaatgtgtcacatgaaatgaatggggcttttactggtgagatttcagctgaaatgttatcctcaattgatttaacttattctatagtaggtcattctgaaagaagaacttacaattgggaaaatgataaattaattagtaaaaaaattgattctttattatcctttaatgttacaccaatttattgctgtggggagttaaagtcggatagagaaagtgaaaatcatgagtatgttgttgagacacaaataaaggaagccttatttcatctttctaatgaacaaattagttccataataattgcttatgaaccagtttgggctattggtactggtttaacagctagcgct

SEQ ID NO: 290621 - DNA, 828 bp, Unknown
  Bacterial polypeptide expressing nucleotide sequence isolated from the Sargasso Sea
ccgcggcaccggcgccatctgcgtcgcacgcgggcggcaaacgacgaccgatcgtcggcggcaactggaagtgcaaccccgccaccgcgtcctctctcccggcactctgccggaacttcgacggcgtcgcgccgtacctcgaaaattgtgatgtttatgtgtgtccgtcgaatttacacgttgctctcgtcaaggacaacttcacgcctggtgtccatgtagctccgcaaaactgcaacttcaagggctgcggcgcctacaccggagagatgtcggtagatcagatccaagacctgggcctcgggtgggtgctcatcggccacagcgagaggcgcggagaattcggcctgcccacaccggccgagtccaaccagctcatggcgacgaagctccagtatattttggaccaggggctaaattgcgtcttctgcatcggcgagccgctgtcgattcgacaaaaggggattcaagcggtgttagctgaatgcgccgaccagctcacggacattgtgccaatcctgtctgcattatccgacaagtcgagggtcgtcatcgcctacgagcccgtctgggccatcggcacgggcgaagcggccaccccggaacaagcgcaggagacgcacaagggcatccgcgactggatcgcggccaacgtcgatcgcgcgacggccgacgcgatccgcatccagtacggcggcagcgcgaacgctcagaacgcgcccgagctctcgtcgttcccggacatcgacggcttcctggtgggcggcgcgtccctcaagccggagatcagcgacatcgtgaaggcgatcgccgaggcaaaagtctaac

SEQ ID NO: 290622 - DNA, 733 bp, Unknown
  Bacterial polypeptide expressing nucleotide sequence isolated from the Sargasso Sea
atgcttgaaattaaagaatttaataaaattattgttgcaaattggaagttaaatggctcaagtgagtttttagaagcatattttgaggaattagacttaaaagagataaattcagatatttgtggaattgtttgtcctccaataacatattttcaaaattgttattcaaaattacattctctacatcttgggggccaagattgctcaaaatttaaagaaggagcatacactggtgaaattagtgcatcaatgcttagggaaagtaattgtgaattttgtatagttggacattcagaaagaagacaagtttttaatgaaaagaatgaagaaattaaactaaaagctgaattgttattagaagaaaaaatcataccaataatatgtattggagaaacatttgaacaaaaaaaagcaaatgagactaaaaaaattcttaaagaacaaattataaaaagtttacctagaaaaacatcaaatgaattagttgttattgcatatgagccaatatgggctattggttctggaattacaccctcaccccaagaaattaataatatccatgaatatttaaaaaaagaaatacaagatattcaaggctataaaatcctatatggcggttcagtaaattcaaataatgctaatgaaattatgagtttagaaaacgtagatggagttttagttggtggagcttctttaaaacctaaacaattttcagaaattcttagagcttgat

SEQ ID NO: 290623 - DNA, 631 bp, Unknown
  Bacterial polypeptide expressing nucleotide sequence isolated from the Sargasso Sea
tatgatcaaattgactaatttttcgtcattttttgttgcaaattggaagttaaatggaaatcttcaatttattgatcaatttattaataatttatccttgcctaatgatcattctaagtgtgtagttatatgtccaacagccattcatttagattatttgtcaaaaaataaaaatggtttttacgtaggtgctcaaaatgtttctgagcacgaggagggagcttatacaggtgagatttcagttctctcactctcagaaacaaatgttaacttttgcatagtagggcattcagaaagaaggcaaatttttaaagaaaaagataaaaacatcaatctcaaatctgaaagattgattgaaaataatgtgattcctatcatatgtattggagagacattggaacaaaaagaaaaaggtattactaacagaatattagaagagcaattaatgaatagtatcccaagctcttcaagttatgaaaatactattattgcctatgagcctgtttgggctatcggtactggcttaacaccaacaattgaagaaatagatgaaactcatcgctttataagagagaaccatgataaactaaataaatacaaaattctgtacggaggctctgttaaagctagc

SEQ ID NO: 290624 - DNA, 730 bp, Unknown
  Bacterial polypeptide expressing nucleotide sequence isolated from the Sargasso Sea
atgataattgcaaattggaaatctaatggaagttcggagatgtataagtcatggagcaatgactatctaaaagaaattaatgatagccataaaatgtttataggaatagctcctccaataatatatttttctaatttacagaattttcataaaaatcttccatttgtaggagttcaagatgttgatcatttatatggtgcaagaacaggagcaatatcagttgatatgcttgttgatatgaattgtgccttttcaattattggtcattctgaaagaagagagttgtttaatgaagataatgatttaattaaactgaaactcaagagccttaataaaaaaattatgacagttttatgtattggagaaacaaaagaagaaaatgacattggagcaacaaaagatgttcttaaaaatcaactagaagtgcttaataagattgagttagacaatcaatttacaattgcttatgaacccatttgggcgattggtagcggactaacaccagaaccaaaagatataaatcaaattcataaatatattaaagatgttgtacaatccaaatctataaataaccttttaccaaaagttttatatggtgggagtgttactgataaaaatgctgaaagcttttttaaagaagaatttatagatggtgcattagttggaggcgcttcattagatggggtaacttttgcaaagattgctaacatttttaatattactaaataaa

SEQ ID NO: 290625 - DNA, 779 bp, Unknown
  Bacterial polypeptide expressing nucleotide sequence isolated from the Sargasso Sea
aatgaataaatattgtatagcaaattggaaaatgtatatgaataaatcaaaaattaattcatatttttctgaatttttagatatggattttaaatcagcatgcaatattgtaatatgtccttctactatccatcttggttacgtaaatgatattataaaatctaatgaacatattaaactaggtgcacaaaatgtgtctgaatttgaatccggagcttatacaggtgaacattcgttagaaatgcttaatgaatataattgtaagtatagtataattggtcattcagaaagaaggcaattgtatggagaaactgatttaaatataaataataaactaaggttattaaataattctaatatagtgcctattgtttgtataggtgaaacacttgaagaaaatgaatctggtattgcttatgctgttttagaaaatcaattaaaaaaaatatttaataatatagatttaaataatactaaagattgtataattgcatatgaaccaatttgggctattggaacaggaaaatctgctgatgttcaaactatttattctgtacataaacatttaaaaaatattattaatgaaattaatacaaataattgtaatatatgcctgttgtatggaggtagtgttaatgaagataatgctactgaaatattaaaaattaatgaagttgatggttttttaataggttcagcatctttagtagctgataaattttataacatttataataaatttttaaggagagttaatttgaacgctttatactatataa

SEQ ID NO: 290626 - DNA, 144 bp, Unknown
  Bacterial polypeptide expressing nucleotide sequence isolated from the Sargasso Sea
ccgtgatcatccagtacggcggcagcgtcaacgacgccaacgtcgacgcgctcatggcgtgccccgacatcgacggcgcgctcgtcggcggcgcgagcctcaaggcggagtcgttctcgcgcatcatcaacttcgtgaagtgag

SEQ ID NO: 290627 - DNA, 757 bp, Unknown
  Bacterial polypeptide expressing nucleotide sequence isolated from the Sargasso Sea
tatgtttatagcagcaaattggaaaatgaacttagataaaaagtctatattagaattttctaaatcattacaaaaatttaaattttcaaataaaataaatacatgtatttttcctccaatgacgtatatagattatttaaataatcttatttataatttacctatatctattggtgggcaaaattgtcattttaagtcttccggtgcgtttactggagaagtatcagcatcttttttaaaagatactggttgtgattatgtattaattggacactctgaaagaagaacactcaataatgaaaataatgctgaaataaaattacgtgctgaaacagcaataaactctagtttaaaagttattctttgtgtgggagaaaatttaactgaccgtcaagaagataatgctcttgaatttatagaaaaacaattaaatgattgtttgccggacaattttgaaaattcatttatagcatatgaacctatatggtcgattggtactggtaaaattccaagtgcaatagaaatccaagaaatgcatactcatataaaaaatattacatacaaaattgtaaataaaaaaataaacgttctttatggtggttcggttaacgataaaaatattaaagatatactggaaataactaatgtagatggggttttagttggtggagcaagtcttaaagcaaaagattttcttgcaatttactcagcagcagttaaacatttaaatacttcttttatattacaggatatatga

SEQ ID NO: 290628 - DNA, 241 bp, Unknown
  Bacterial polypeptide expressing nucleotide sequence isolated from the Sargasso Sea
gactggaaaagttccaagtttggatgaaattaatcatgtccatgaaacgctccgaaatttgttaagagaagtaaaaggtgaagatgtctctaaaaagatcaaaattttgtatggtggatcagttaaaccagataatgcaaaagcaattttttccctagatgatgttgatggagctttggtaggtggagcctctttaaaggcagatgacttcataaatattgccaaaaaagctcaggcataa

SEQ ID NO: 290629 - DNA, 670 bp, Unknown
  Bacterial polypeptide expressing nucleotide sequence isolated from the Sargasso Sea
cttacagatttatcgggtgattcgcagatagcagtatgtccaagttttgttcactgggacttggtataccagatcctgaagagttctggcagtaagattgaattgggtgcccaagatgctcgagctgaagataaaggagcgttcactggggacgtttctgtgtcgatgcttaaagacttcggtgcttcattcgttttagtcgggcactcagagcggaggttggggcttggagagtctgacgagttagtagcgtcgaaatttggtgctattcaagatatcggattgaccccagtactttgtgtaggcgagtccgaatcgcagcgtgaaacgggtaagacagaaaaaattgttctatcacaagttagagcagttattgataaattcggaatctcagcttttgaaggggcgataattgcatacgaaccaatttgggcaatagggaccggtgttacggcgaccccagagcaggcgcaggaagtgcacgagttaattcgggcatatctagcgatggaaaatgctttaacagcggactctgttagaataatttatggtggtagcgtgaacagcagaaacgctgccagtttgttcaatcagagagatatagatggtggcttagtgggcggagcttctctgaaagctgaagaatttatatcgatttgtaagagttagg

SEQ ID NO: 290630 - DNA, 685 bp, Unknown
  Bacterial polypeptide expressing nucleotide sequence isolated from the Sargasso Sea
gcttgcgcgcgcgatcgcggcgcagggcgatataccgacctgcgatcttctggtctgcccgccggcgactatcctgcgtgcggtagccgaggccgccggcggatcgtcggtcgcggttggcggacaggattgccacgaggccgaaagcggtgcgttcaccggcgacgtttccgctgcgatggtccgcgatgctggcgccagccacgtgatcctcggtcattccgaacggcgtcacggcctaggcgaaagtgacgcgcgggtgtgcgcgaaggccgttgcggcgcatgccgcgggactgacggcgatcgtgtgcattggcgagacggaggcggaacgcgatgcgggtaagaccctcgatgtccttagcggacaactggctggctcgcttccggatgcaggggtggacggcgcgaccacggtcatcgcctatgaaccggtatgggcaatcggcacgggccgtaccccgaccctggacgaggtggcggttgcccacggccacatccgggcaacgctcgcggtggcaatgggggacacggcagcggacatcggacttctgtacggcggctcgatgaagcctgggaacgcggccgatctgctggcggttcccgatgtggacggtgggctgatcggtggtgcaagcttggatgcggagagctttctggctattgcggcggcagcgggttaa

SEQ ID NO: 290631 - DNA, 630 bp, Unknown
  Bacterial polypeptide expressing nucleotide sequence isolated from the Sargasso Sea
gatgacaaataaatatctgtattttattgctaattggaaaatgtttggtggattaagtacattaaattcacttaataaagtaattaaatttttaaaaatttttaaaaagtcaaatgacaccaaaattatttattgcccaccaagtacattaattagtccaatgtctaaaaaagttatgaattctaaaattcaagttggtgcccaaaattgtcatgaaagccttacctatggcgcttcaactggttcaataaatcctaagatgttaaagaatgctggggccaagtatgttattttaggtcattcagaaaatcgcagctctggtgagacagataaattaattaatgccaagattagagcagcaactcaagcaggtttaaaggttattttttgtataggtgaaaccttaggtcaaaaacgaaaaaaaattaccaaaaaaattttatctaagcaaattaattttggtttacaaaaaattaagaaaagaaaaaatattgtaattgcttatgaacctgtgtgggcaattgggacaggtctaattcctaaagcagatgacttatttaaaactataaatttcataaaaaaaaaagttcgaaatatcaaagttttatatggtggttcagtaaatccaaa

SEQ ID NO: 290632 - DNA, 322 bp, Unknown
  Bacterial polypeptide expressing nucleotide sequence isolated from the Sargasso Sea
aatgaataaaaccaatgaagtattaaaagaacaagttataaatagtttgcctcaaaaatcatctaaagaatcaattgtaatcgcatatgaaccaatatgggcaattggaactggaatgacccctactcttgaagaaattaataatattcataattatctaaaaaaagatataaaaaaaattgatgaatataaactgctatatggtggatcagtaaattctaaaaatgctagagatattatgaatttagaaaatgtagacggagttttagttggtggagcttctttaaaagctgatcaattttcagaaattcttaaagcttga

SEQ ID NO: 290633 - DNA, 721 bp, Unknown
  Bacterial polypeptide expressing nucleotide sequence isolated from the Sargasso Sea
atgataaatcttgataaatattcttcaatttttatagcaaattggaaattaaatggaaattcgtcatttttaaaagattattatgaaaaattaaaagttaattctaataattgtacgattatctgctcaccttcaatttacttaaaatcgctaaaaggaaataatgaaaacttattttgtggtgcacaagatgtctcttcttttaaagatggtgcatatactggagaattatccgcctcaatgctaaaggataataatatagatttttgtttggttgggcactctgagcgaagacaatatttcgctgaaacaaataataaagtgaatactaaaagttcaaatcttattgaagaaaacattattccagtgatctgcataggagaaaccttagaacaaaaagaaaaaaacttaacggaagaaattttaacttcacaaattaaggatagtgttccaaatttagcaaatcatcaaaatgcattaattgcttatgagccagtttgggcaataggaactggattaactccaactttagatgaaataaatcaagctcacgaattaatcaaaaattttgatcaaaagtttattgactttaaagtgctttatggaggttctgttaagtcttcaaattcaaaagaaattactaacttgagccatgtagatggctgcttagttggtggggcttcattaaaagttgatgaattcaatacaattatttcttgat

SEQ ID NO: 290634 - DNA, 781 bp, Unknown
  Bacterial polypeptide expressing nucleotide sequence isolated from the Sargasso Sea
gatgtcgaaacaacgagccaagctggtagtcggtaactggaagatgcacgggcgcctcgccgggaacgcaacgctgttgcaggccgtggcgcagggtgcgggcgaattgccggctgatgtgcgcgtcggtgtctgtgtgccgtgcccttatctcacgcagactcagtcgttgctggaaggcagcagggtcgtgtggggcgtgcaggacgtctccgcattcacgcatggggcctataccggcgaagtggcggcgcagatggtggtggattttggcgccacacttgcgattgttggtcactcggagcgccgtgcttaccatcgtgaaagctcggacctggtggcggtgaagacgcaacgttcactggaggcgggtttgaccccgatcgtctgtgtcggtgaaacgctcgaggagcgtgacgccggttcgacggagcaggtggtcggcgcgcaactggatgcggtgttggcaacgctgtcggcggacgatgcggcacggatcgtcgtcgcgtacgagccggtctgggcaattggtactggcaagagcgccacgtcggcgcaggcgcaggcggtgcatgctttcttgcgggctcgtctggccgccaagggcgcggcggtggcagacgtaccggtgttgtatggcggcagtgtgaagccggagaacgcggaagaactgttccgcgagccggatatcgacggtggcctgatcggcggcgcgtcgttgaaagaccaggatttcctggcgatctgcaaggcggcggccgcgacgagcgtcgccggttaa

SEQ ID NO: 290635 - DNA, 784 bp, Unknown
  Bacterial polypeptide expressing nucleotide sequence isolated from the Sargasso Sea
gatggcactcagacgtcctatggtagctggcaattggaagatgaacggcagtgcggcattagcccaagagttgttcaagaaatttgcctcaaagctccaaaatgattcagctgaagtggttttatgcccgccttctatctatctagaaagcgtcaggcaactgctagaagcaaacaaggaagcgttagacggttcacttgttaggatgggcgctcagaatttaagtcaacatgactttggcgcttataccggagaagtttcgggccagatgcttaaagattgcggatgtcgatatgtcattatcgggcattcagaacgtcgccgtatgtacggagagactagtaatatcgtagcggagaaattcgccgctgcacaaaagcacggtttaaccccaatcttatgtgtgggtgaatcgggtccagcacgtgaagcaagacgtaccttcgaggtgattgcggaagagttggatatagtgatccagaaaaatggcactatggcttttgataacgccattatcgcttacgagccgttatgggctgtagggactggtaagagcgcgacaccagagcaggcacaagaagtacatgcgtttatacgcaaacgtctctctgaagtgtctccgtttatcggagaaaatatcaggattttgtacggtggtagtgtgacaccgagtaatgcggcagatttatttgcccagcctgatgttgatggtggactgattggcggtgccagtttaaactctaccgagtttttaagtctgtgtaccatagcgatgagcgcataa

SEQ ID NO: 290636 - DNA, 760 bp, Unknown
  Bacterial polypeptide expressing nucleotide sequence isolated from the Sargasso Sea
atgtcaaagaaaatcatagcaggaaattggaaacaaaatggtaccttaaaaagctccattagccttactcgaaaagttcttcaagctgtaaagaaggaaaaatacacccacgaaatcgttattattcctccttctatatttttattacccatcaaagatttaattcacaagagtcaaataaaattaggagctcagaacgtgtctgcttttaatgatggtgcatatacaggtgaaatatcaggctcaatgttaaaagactctggagtagattattgtttagtcgggcattcagagagacggcatataatcaatgaagatgaatccgaattttctaacaaagtaagccgtttgattgataatgacatcaaaattatttattgttttggggaaacactaaatgactataaaaataaaaaaacgaagttaatcataaagaggcaattaaaaaaattgtttttgaataacaaaaataatttaaaaaaatatccaagcaaattaattttagcatatgaaccagtttgggctattggtactggattagtaccttcaccagaagaattagtaagcatttttaaatatataagagatacagtaaataaatttgataagaagtatgcatccatacatattctctacggtggaagtgttacaccagacaatgcatcatctttgataaataccaagcacatagatggactcctgattggtggtgcatcattgatagcaaaaaaatttattgatatttgctccacaatttgag

SEQ ID NO: 290637 - DNA, 733 bp, Unknown
  Bacterial polypeptide expressing nucleotide sequence isolated from the Sargasso Sea
tatgcttgaaattagagaatttaataaaattattgtagcaaattggaagttaaacggctcaaatgactttttagaagcgtattttgaagaattagactcaaaaaacctaagtttaaatgtttgcggggttatttgtcctccaacagcatatattcaaaattgttattcaaaattacactcattatatcttggagctcaagattgttctaaattcaaagaaggtgcttacacaggagaaattagtgcatcaatgttaaaagaaaataattgtatattttgtattgttggccattcagaaagaaggcaagtgtttaaagaaaataatgaagatataaaaattaaagctgcacaattgttagatgaaaaaattatacctataatttgtattggagaaactttagagcaaaaaaagatgcataaaactcatgaagtattaaaagaacaagttattaatagtttgcctccaaactcatctaaagaatcagttgtaatagcatatgaaccaatttgggcaattggaactggaatgactcccactcttgatgaaattaataatattcataaatatttaaaaaaagatataaaagaaattgaaggatataaactgctgtatggtggatcggtaaatcctaaaaatgctagtgatattatgaatttagaatatgtagatggagttttagttggaggagcttctttaaaagctgaccaattttcacaaattcttaaagcttga

SEQ ID NO: 290638 - DNA, 754 bp, Unknown
  Bacterial polypeptide expressing nucleotide sequence isolated from the Sargasso Sea
atgcgagccccactggttgcagcaaactggaaaatgaatggctcgttctcaatgcttgacaaaatgctagatattctcagaaaaaattcggggaatacagcttgtcgagtcgtaatctgccctcctcatgtccttcttacatccctaaaaaaagctgttgaaggatcaggaattgaagtcggtgcacaaaatgttcatagcgagttatctggagcattcactggagaaacttcagctcccttactaaaagaatgtggagttaagtggtgcatcgtaggtcattcagagcgcaggatactttttaaagagtcagatgaattcataagaagtaaaactgaaacattgcttagaaatggaattagaccaattctgtgtgttggcgagtctcttgaacaaaggatatcaggtaatcatgaagatgtcgtcgtagctcaattacgaaaagtattggctgattttactactgaagatcagagtcgctgcgttttggcatatgaaccgatttgggccattggaacaggtaaaaccgcaactccagaacaggccaattctatgcacgctataattagaaaagagataggttcacttagtaatactaaagtagcaacaaatattcaaattctctacggaggtagcgtaaatgttgaaaacgcggaaaatttacttgctcagtcagaaattgatggggctctagttggaggggcaagcctcaaaatagaagatttttctcaaattattaccgccggaacgtaat

SEQ ID NO: 290639 - DNA, 739 bp, Unknown
  Bacterial polypeptide expressing nucleotide sequence isolated from the Sargasso Sea
gatgtacaagacgcctcaagagggtgttgattttatatctgaattaagtaatttgcttttggataaggaaaaaccaacaattatattcttcccgccgtttacatcgctatttcacatgaatgaaatgatatctgatttggatatgagtcttggcgctcagaatgtgtattttgaagaggaaggtgcatttactggtgagatttcagttaatatgcttaaatcttgtagtgttcaatatgtgattattgggcattcagaacgtaggtatatttttaatgaatcaaataaagatacaaataggaaaattcacacagtgttggataatgaaattattccaatattctgtgtaggagaaaagcttgatgatcgtgaatcaaataatacgcgtacaattctattagagcaattggaggaaggtttagctggagttaatatagatgcattggatagaatcattatagcttatgagccagtttgggcaataggaactggagtgaatgctcttcctaatcaagtgcaagaatctcatgaaatgattcgagatatattaatggaattatatgataataatttaaatattgatattccaatattatatggaggttctgtgaaacctgataattcagaagagttaattaatgcaaaaggagttgatggttttttaattggtggcgcaagtttaaatttggacactttttctaaaataatagaaattgttcatagtaagtttatgaggtaa

SEQ ID NO: 290640 - DNA, 535 bp, Unknown
  Bacterial polypeptide expressing nucleotide sequence isolated from the Sargasso Sea
ggtgcatatacttggagaagtctcagcagagatgctttcagataatgattgtaagtatgttttggtgggccactctgaacgaagaacaattcttggtgaaaatgatcatattatctcagaaaaattcaatatggcgattaaaaaaaatctcgtgccaatcttatgtattggagagacacttgatcaaaaagagaaatccttaacagaggagataataaattctcagataacagccattactgaaggtattgacctagataagcattctaaatttatcattgcatatgaacctgtttgggccattggatcaggattatcggcaacaccagaagatgctcaagatgttcatgaatttataagatctatgataaaaaaaatatcaaaagaactggcagaaagtacacagattctttatggtggcagtgttaatattgacaacgctaaaaaattattttcaatgcctgacatagatggcggtttaatcggcggtgcatctcttgattcatctggttttttggcgatagcgaaacaataa

SEQ ID NO: 290641 - DNA, 562 bp, Unknown
  Bacterial polypeptide expressing nucleotide sequence isolated from the Sargasso Sea
ttgggggccaagactgtcatcaccttaaatgaaggtgcatttactggatgtatcagtgctcaaatgcttaaatctgcagggtgcaaatatgtcataataggccattccgaacgaagggagtatcaaaaagaaacatcaaaagaacttaatttaaaaatagatattgcaaacaagtataatttaaaaattatttactgcataggcgagaaattaagtgaaataaagattagaaaaaaaattctcaatagtcagctcagctcacttccaaaaaaaataaatataaaaaatcttattattgcttacgaacctgtctgggccatcgggacaggtaaaaccccaacaatcggtgaaatcaatagtatacatttagatattagaaatttactctcaaaaaaaattggtaaatctaaaagtcaaaatatctcaatattatatggagggtcagtcaatccttccaatgctagtgatattttaaatttagatcaagtagatggggctttagtgggtggcgcatctttaaaatcaaaagattttagtaaaataattgattcttactcataat

SEQ ID NO: 290642 - DNA, 742 bp, Unknown
  Bacterial polypeptide expressing nucleotide sequence isolated from the Sargasso Sea
catgaccaacttttatctcatcggcaactggaagcagcacggcagccgcgccgcgattcaagccttctcggaacagtggtcttttgacgccaatcctgcgctacgcattgctatcgcccccccatttccctacctgcaggccttggttgaggcgttacctggctgtgagttggcggcacaggactgctctgtgcacgctcagggcgcgtataccggcgaggtgtcggccgatatgttggcggatctcggctgccagtttgtgctcgtcgggcactccgagcgccggcagtatcaccacgaaacagatgaactgattgctgagaagttggcggcggcgcaatcggcgggggtgacccctgtactttgcgtcggggaacagctatctgcccgtgaggcgggagagcatggggttgcggtgcgcgcgcaactgcgatcggcgctggcgacgtctcaatcgaccctactgattgcttatgagcccgtgtgggccatcgggacgggcctgacggcgacgccggatcaggcgaatgagatgcacgccatgatcaaacaggaagtcgaatccctgttgggagcgtcacaggccacgcccattctttacggtggcagtgttaacgcagagaatgccgatgcgctctttgcctgtccgcacgttgatggtgcgttggtggggggtgcctcactggaagcggcctctttcacggcgattgcgcagtccgcgtctaataacctgagtcactga

SEQ ID NO: 290643 - DNA, 754 bp, Unknown
  Bacterial polypeptide expressing nucleotide sequence isolated from the Sargasso Sea
aatgtctaaaaaattactaatagcaggaaattggaagttaaatggagagaaaaaagatatttcttttattaaaaatttagtgaaatttaattctataaaattaagtaaaaatgttgatattcttatttgtcctccattcacaatgattgatagattctgccagcttacccaaagatcacaaattcaaattggcgctcaagattgcagtgaacatgattttggcgcttatacaggcgaggtttctgcaaatatgttaaatgatttaaacgcttcttattgtatagttggtcattccgaaagaagattataccataatgaaaataacaatcttttgaataagaaaatattaaatgtacaaaaaaataatatcaaagcaattttgtgtattggtgaaagtttattagatagaagaaattcaaaaacattaagagttttgggcaatcaattaaatggcgtattaaagaataatataaatccaaatttattggaaattgcttatgagccgatatgggctattggcaccggcttggttcctgagtattctgatattgaggaagtccatgattatatttctaataaactcgaaaaattatatggaaaaaaatcaaaaaaaataagaattctttatggcggctcggttaattcaaaaaatgtttttcaaattttatctataaaaaatgttgggggcgcactcattggaggtgctagtctaaaaattagggatatgaaatctattcttaagcaatttatttaa

SEQ ID NO: 290644 - DNA, 745 bp, Unknown
  Bacterial polypeptide expressing nucleotide sequence isolated from the Sargasso Sea
atgattgttgctaattggaaatgtaatggaagcaaagccatgatcaatgaatggaccaataattttttaacaaattatgttgaaatgaagaaagcatttattgggatagcacctccttcaatttatatagaaagtattcttgacaccaagctaagtaagttaaaagaaataaatataggatctcaagacatcgatatttcatctggcgcaagaacaggagcaatttcttctgaaatgattttagattttgattgtaagttttcaataatcggccattcagaaagaagacaattttttaatgaaaaaaatgatgaaataaaacaaaagattttaaaaattgcaaataaaacattaacgattttatgtgttggtgaaactgaagaagaaaacaagaatgatcaaactaaagatgttttaaaaagacaaatagaagtaattgaggatattgaatttaatggttcattggttatagcttatgagccagtttgggcgattggaactggaaatacaccaaccccagataaaattaatgagattcataaattcattaaagatgttgtacaatccttctcagataattctgcaattccgatggttttatatggcggcagtgtaaatcaggagaatgctgaaaacttttttaaagaagaatctgttgatggtgctttaatcggaggtgcttctttagacggcagacaatttgctaatattattaatatttttaatggaataaacttaaaatgat

SEQ ID NO: 290645 - DNA, 757 bp, Unknown
  Bacterial polypeptide expressing nucleotide sequence isolated from the Sargasso Sea
gatgtcgaaacagagaactaagcgtgtgatcggcaactggaagatgcatggccggctggccggcaaccaggcattgctgaacgaagtggtgcagggcgcgggcgcggtggcggccgaaacgtcggtcggcgtgtgcgtgccgttcccgtatctcgcgcaggttcaggcgcagctcgacggtggccgtgtcgcctggggcgcgcaggacgtgtcggcgcacgagcagggcgcgttcaccggtgaagtcgcggccgcaatggtggcggagttcggcgcacgctatgcgatcgtcggtcactcggagcgccgcgcgtatcacggcgaacgcaacgagacggtcgcggcgaagacgcagcgcgcgctcgcagcggggctcacgccggtcgtgtgcgtcggcgagacgctcgacgagcgcgagtcgggcgcgaccgagcaggtagtcggtgcgcagctcgacgcagtgctggccgtgctgacggccgacgaggccgcgcggatcgtcgtcgcgtacgagccggtctgggcgatcggcacgggcaagagcgcgacgtcggcgcaggcgcaggacgtgcacgcgttcctgcgtgcgcgtctcgcggcaaagggcgcggcggacgtgtccgtgctgtacggcggcagcgtgaagccggacaacgcggaagagctgtttgcgcagccggacatcgacggtggcctgatcggcggcgcgtcgctgaaggcggaagatttcctggcgatctgccgggccgcgcgctga

SEQ ID NO: 290646 - DNA, 649 bp, Unknown
  Bacterial polypeptide expressing nucleotide sequence isolated from the Sargasso Sea
atgaaagttattctgatccctccggctaccttgcttggatcgattgctgatcaaataagaaattcgcccttttttctcggagctcaaaactgtcatgaagaaagatttggtgcatttacgggagaggtctcggcagaaatgctggctgacctgggttgcaaatacgtggtcctagggcactctgagaggcggacactttttggagaaacaaataatcaaatcagagcgagagcgtcatcagctttagattttgggttaactgcaattatctgtgttggagaaagtattgaacagcgccaagcgggcctggctatggatacagtcagtaaacaattggaagagtgtgtgggaagtgaatcaaattcaaataattgtattattgcttatgagccaatttgggcaattggtacaggtaagacggctgagctgcaagacatagaggagatgcaccgccatatacgaaatgttttaatagctaaaagtgccacgggaaatgatattcctatcctgtatggcggatctgtaaaagcagaaaatgcttcgaatatatttgcggtaccccaggtgggaggagcgctcgtagggggtgcgagcctaaattcccaagatttcttggaaattattaaagctggtcaaagaaatgactaat

SEQ ID NO: 290647 - DNA, 763 bp, Unknown
  Bacterial polypeptide expressing nucleotide sequence isolated from the Sargasso Sea
tatgatagtagctggaaattggaaaatgaatttaagtgtaaatgaggcaattgagctatcaaatgaattattaaaacataatgagatttttgttgaagaaaaaataattattttcccatcttttctgataatacctgatatctataaattatataaaaattcaaaaatatcaatcggtgcccaagattgttcaatgtatgataatggtgcattcactggacaagtttccgctgaaatgatcagagatgtcggatgcaaatatgtaattattggtcattctgaaagaagatctctttgccatgaaacatcgagtattgtttcacttaaagctgtaaaggcagtttctgctggtctaaaagttattatttgtataggcgaaaattctaaagatagagaaaaaggggattatctatttgttttagaaaaccagcttaaacagagcctttctgatatttcaagtgatagtaatcttttaagtaaaaacataataatcgcatatgaaccagtatgggctatcggcacgggaaataccgcttctgaaaaagatatagaagaagtacataaatttataaaagaaattattaatacaaattatcaatttaattatgatctaccaattttatatggtggatcggttaattccaaaaactcctcagaaatttttaaaattaataatgttgatggagttttagtaggaggcgcaagtttaaaattagatgagttcttaaaaattattaaaaattcaatgtacttttttatgtaa

SEQ ID NO: 290648 - DNA, 778 bp, Unknown
  Bacterial polypeptide expressing nucleotide sequence isolated from the Sargasso Sea
gtctccgccgtaagttggcccgcagatcagtcaaggattgaaggcgtgcgtagaccggtgattgctggcaactggaaaatgcacatgacctgtgcccaggccagggattacatggcagcattccttccgcaaattgaacgtgccccccaggaccgcgagatcgtcctggctccgcccttcactgcgctctccaccatggcggcagcagctgaacactccgttgtgggactcgccagtcagaacgtccattggcaggaccatggtgcattcacagccgaaatttcggccgagatgctgttagagcacggcgttgcatacacaatcgttgggcacagcgagccccgcaaatacttcagcgaaagtgatgagcagatcaaccacagggcccgctgctcccaggccaaggggttgatccccatcgtctgtgttggagaaagtgatgagcagcgcgaacggggtgaagcggagcgggtgatccgccgacagatcgagcagggacttgaagggttggacgccaacaaacttgttgtggcctatgaaccgatctgggccatcggcacgggtaagacctgcgaagcagccgaagccaacaggatctgcggactgatccgaagctgggtgggagccaccgatctgatcattcagtacggcggatccgtgaagcccaccaacatcgatgaactcatggccatgagtgatatcgacggcgtcttggtcggtggtgcatcgctcaaacccgacagtttcgcccggattgccaactaccaggccatttgat

SEQ ID NO: 290649 - DNA, 748 bp, Unknown
  Bacterial polypeptide expressing nucleotide sequence isolated from the Sargasso Sea
aatgaaaccaattattgcagccaattggaaaatgaattttacccctgaggaaagtctatgtctgattgatgatattactagtcagggactaccctcagatgttgacattattttcttcccttcttttatatcattgcctgcagtggtcgataaactgcttgattcagcttatagtgttggtgggcaaaatatttttcacaaagaaaatggtgcatttacaggtgaaatttctgcctctatgctgaaagctttaaatatccaatacgtcattattggacattctgaaagaaggcaatatctgcatgagaatgataaacaggtaaatgataaaatccatcttgcgctcaacgctgaattaataccgattatttgcattggtgaaactctaaaagagagagaaaatgggcaaacagacccggttttaaaggagcaattaaattctgcatttgaaaatattaatctagacaatcagaaaaacattatagtagcttatgagccggtttgggccattggaacgggactaacagctgaaaaaaataaaatattagacgcacatagcttgattaaagaaactttagaaaccatttataattttaacataccaatactttacggaggatcagttaatactgacaatgctgcttcattaattaatattgaaaatgttgatggttttttagtgggtggcgctagtttaaaatcggaaagtttttgtcaaatagtaaaaaatataacaaaaaatttttga

SEQ ID NO: 290650 - DNA, 727 bp, Unknown
  Bacterial polypeptide expressing nucleotide sequence isolated from the Sargasso Sea
ttgagaaaatctgtaattgctggtaattggaaaatgcacatgacttgtgctgatgctaaatcctatttagaaaagtttattcccttaataaaaaacataaaaaacgatcgtaaaattgttattgctccaccttttactgctatttcaaccttttcggatcattctgattttgaatatttagatatttctagtcaaaatattcattgggaagatcaaggggcatttactgcagaaatatcgccaaaaatgcttcttgaacatcgtgtcgcatatgcaatcgttggacatagtgaaccaaggaaatattttagtgaaagtgatgaacaaattaataaaagagcagtttttgcacaatctagtggacttactccaatagtttgtgtaggagaaacattagaacaaagagaaagaggagaagctgttagagttattactagacaggtcgaacaaggattagaaaatacagatccatctaatttaattgttgcctatgaaccaatatgggctattggcactggtaaaacatgtgaggcagaagacgctaataagatatgctctttgattcggaaattaataggttttgatgatgtaattattcaatatggaggatctgttaaacctaataatattgacgaaatcatgtcaatgagtgatatagatggggtgttagttggaggcgcttcattagatccgaatagttttgcgagaattgcaaattatcaataag

SEQ ID NO: 290651 - DNA, 742 bp, Unknown
  Bacterial polypeptide expressing nucleotide sequence isolated from the Sargasso Sea
gatgtctaaattagttgccggtaattggaaaatgtttggcaataaagcaatgattgccgacataaaaaagatagatcagcattgcaaagaaaaaacttgcgaagttgcaatatgccctccctttccactaatttcgactgcgcatgaacaaaccaaaaatataaaaatcggagcacaaaattgtcacattaatataaatggggctcatacgggtgaagtatcggcagaaatgcttatcgaagtgggtgctcaacttatacttgtggggcactcggaacgtcgccaagataattatgaaactaatgatatagttaaacttaaatcagaggctgttcatagagcaggagcaacagcagtcgtttgtattggcgaaacattggaagaaagaacagcagagaaaacactctcagtgttacaagagcaaatgcttaaatcgcttcctaaaaatattaccccaataaataccgtcgttgcttatgagcctgtatgggcaataggtacagggctggttccagaaacagaccaaattcgctctgctcatgcatttataaggggatttttagcaagcacttacggagctgaagcccataatgtaaaaattttatatggcgggtctgtgaaaggttccaacgcaaaagaaatattctcgatatcaaatgtaaatggggccttagttggtggcgccagtcttaaaagcgatgattttatagaaataattaaagctgcatcaaattcaatataa

SEQ ID NO: 290652 - DNA, 775 bp, Unknown
  Bacterial polypeptide expressing nucleotide sequence isolated from the Sargasso Sea
atgacaaaaattattgctgcaaactggaaacaaaatgggagtcttaaacttctgataaaattgactcgagatataagaactggtattaacagattaaaaaaaagaccaaaggtaattctttttccaccatcagtttatttagattcaatttctaaagaaatcaaaaagaataaagctaataataaaaacatacagcttggtattcaaaatatctctccatataacaatggagcatatactggagaagtgtcgattaatatgacaaatgattttgactgctcatatattctcattggacattccgaaagaagacatatttttatggaatctgagaaattcatttcaaacaaaataagcatagcatttcaaaaaaataaaaaagttattttgtgtgtaggagaaacactaaaagattatagatctaagaatactaagcaagtcatcacaaaacaaattaattctgctttaaaagagtcattaaagctcattaaaaaaaataaaaaaaatcttgtcattgcttatgaaccagtgtgggctataggcacgggaagatctgccaagattcaggatatagaaacaacacatactctgataagaaaacttttatttaaactcataaatgatgcaaaatcagaaataaaaatcttgtatggagggagtgtatcgccacaaaatgcaaaagaaatactatatgctgagaatgttgatggtgctttggttggaggagcttcattaagtgctaaaaaatttattgaaatttgtcgcacaatctgag

SEQ ID NO: 290653 - DNA, 422 bp, Unknown
  Bacterial polypeptide expressing nucleotide sequence isolated from the Sargasso Sea
catggctcgaacactcatagctggaaactggaaaatgaacaccacgttatctgatgctatctcattatctataagcattagagaccaattgaccttacctccagacacagaagtagtactcttccctcctgccccatttgcagtacctgttagagatgctgtaagaggaacaacaatcaagttaggggctcaaaacatacacaacgaagaatcgggggcatacaccggcgagacatctgtcaccatgcttgatgggatatgcgaatatgccttaatcggacattctgaacgacgtactttatttaacgaatcaaatgatttcataaaccaaaaaatccaagcatgctttgcgcatggaataaaagccatactatgtgtaggcgagaccgaaaccgaacggaacgaaggtataacctctcaag

SEQ ID NO: 290654 - DNA, 757 bp, Unknown
  Bacterial polypeptide expressing nucleotide sequence isolated from the Sargasso Sea
atgcgaaaacctctgatcgccgggaactggaaaatgaacggtaacctagggcttgccgccgatatgcttcaggcgatgcagagcagtcttgatcaaacttctgcggatgtggtggtttgtcctcctttctccctgcttcagagtgtgagggagtgttttgaaaaaactccggttttcctcggggcacagaatgtacatgcccaactttcaggtgcatacactggtgaaatctctgcaccgatgttgaatgagatggatgtgaagtggtgtattgtcggtcattcagaacgtcgggcacaattttccgaaacagatgccattgttcgacagaaagtgggtattttactccaaaatggaatccaacccatcatgtgcgtcggagaatccctagaagagcgtgaagcaggtaagcatgaggaagtggtggtcgagcaactgaaaaatggactttcgggtttggccgcagatgaccagttacgctgcacaatcgcctatgagcctgtctgggcgatcgggaccggaaagacagcaaccccagagcaggcgaattcaatgcaccgcgtcatccgtaaccaacttgctgagctggcgaacgaacagttcgccaccaagatgaggatcctttatggcggcagtgtcaatgcagataatgcagaggaactcctcggtcagtcagaaattgacggagcgttggtgggaggtgcgagtttgaaaaccgatcaatttcctggcatcattactgccgcgaagggataac

SEQ ID NO: 290655 - DNA, 706 bp, Unknown
  Bacterial polypeptide expressing nucleotide sequence isolated from the Sargasso Sea
gatgaatggccaaaaagactcttataaattagtaaaatcgatatcaaattattgtcagaagatgaaacgcaaaacatctaaagttgtaatttgcccaccatttactcttttgccagaattaataaaaaaagaaaataaaattaaatttggtggtcaagattgccattataagtctgagggtgcatatactggttccataagtgcaaatatgcttaaatcaattaattgccaatatgttattgtgggccattcagaaagaagaatatatcaaaaagaaacttctcaagagctgaatttaaaaattcaatctgcaattaaaagtaatctaactgttatatattgcataggagagaagctagaagaaataaataaaagaaatataatacttaaaaaacaactttcatcattgcctaaaaaaattgacccaaaaaaaatcataattgcttacgagcctgtatgggcgattggtactggtaaggttccatcactaaatgatattaataaaatacatgaaaaaatcagacacatactttcaaatctattgagcctcagatttagtaagcatgtttctattctttacggagggtccgttaatgcaacaaattcagttgatattcttaaccttgatcatgtagatggcgctttggttggaggtgcttcattaaaatctaaagaattttgtaaaataattgattcttattactaa

SEQ ID NO: 290656 - DNA, 760 bp, Unknown
  Bacterial polypeptide expressing nucleotide sequence isolated from the Sargasso Sea
tatgggaagagtgccaatagttgcaggaaattggaagatgaataaaaatccagaagaaggattttccttcgtcgatgaagtgcagaatttgcttttggaaatcaaacatgtatccattattttcgcgccgccgtttacggggctctttgaaatgaatgtacatccacctttttatagtgcagcgcagaactgtcattgggaatctaatggtgcttttacaggcgaagtttcagtatcaatgataaaagaatgtggtgcaaagtacgttataattggccattccgaaaggcggcatatatttggggaattagatgattggatcaataagaagttaaaagctattttgaatgtaggattaagccccatactatgtgttggtgagacaattgatcaaagagataaaggtcaaacagagcaaatcctttacgagcaattagatgaaggacttaggggaatcactaattttgaagattgtgttattgcatatgaaccggtttgggcaattggtactggtgtaaccgcagataacgagcaagtaagattagcacatagtgcaattcgagatatacttaaaaataaattaaatggtagtgatgacgttcacattttatatggtggttcagtaaattcggcgaatgcagaggatttaattcagatagaaggtgttgatggctttcttataggtggagcaagcctgcagttagattcttttacatctatagcacgaactgttgaaatggttcaggagaaaaaattatga

SEQ ID NO: 290657 - DNA, 757 bp, Unknown
  Bacterial polypeptide expressing nucleotide sequence isolated from the Sargasso Sea
atgcgaaaacctctgatcgccggaaactggaaaatgaacggcagccgagggctagccgccgaaatgcttcaggcgatggagagcagtcttgatcaaacttttgcggatgtggtggtttgtcctcctttctctctgcttcagagtgccggggagagttttgaaaaaaccccggtttttctcggtgcacaaaatgttcatgtccaactttcaggtgcatacactggtgaaatctctgcgccgatgttgaatgagatggatgtgaagtggtgtattgtaggtcattcagaacgtcgagcacaattttccgaaacagattcgcttgtccgccagaaagtggctactttactccaaaatggaatccaacccatcatgtgcgtcggagaatccctagaggagcgtgaagcaggcaagtatgaagaagtggtggtcgaacaactgaagaatggactttcgggtttggccgccgatgaccagttacgctgcacaatcgcctatgagcctgtctgggcgattgggaccgggaaaacagcaaccccagagcaggcgaattcaatgcacctcgtcatccgtaaccaacttgctgaactggcgaccgaacagttcgccacgaagatgaggatcctttatggcggcagtgtcaatgctgataatgcagaggaactcctcggtcagtcagagatcgatggagcgttggtgggaggtgcgagtttgaaaaccgatcaatttcctggcatcattaatgccgcgaagggataac

SEQ ID NO: 290658 - DNA, 682 bp, Unknown
  Bacterial polypeptide expressing nucleotide sequence isolated from the Sargasso Sea
attgcaatctactatttttggagttgctccaccatcattatatattgaaaaaatgcaaaggatgggacaaataattcatgtattcgatgatggagagcttggttcccaagaagtattgtgcggtgtgcaagatgtagaccattcatatggatcaaggacaggagctatatcagtagatatggttcttgactcaggatgtaattttgcaatcattggtcattcagaaagaagagatttatttaatgaagataatgatctgataaaggaaaaacttaagagtcttaaaaataaagtcatggctgttttatgtattggagaaaccaaagaagaaaatgataaaggtataacgaaagatgtacttaaacagcaacttgatatagtaaaggaagttgagttagatcaatcatttactgtagcatatgaacccgtttgggcgatcggaagcggattaacaccagagccaaaagatataaatgaaattcataaatatataaaagatgttgtacaatccaattctgcaaacaagcttataccagaagttttatatggtggaagtgttacagataaaaatgctgaaagcttttttaaaaaagaatttgtagatggtgcattggttggaggagcatcgcttgatggtaaaacttttgcaagaatagtaaacatttataatagtacaaaatag

SEQ ID NO: 290659 - DNA, 739 bp, Unknown
  Bacterial polypeptide expressing nucleotide sequence isolated from the Sargasso Sea
atgaaagttattgcaaattggaaaatgcatgggtttaaagacgattacttgcattggtataaaaatctatctaaatccgcagatgaaaatctttttgatgatttaggaattgcacctccttttacactcttggatgtatgcaaaactcatcaatctaaaattaagctaggcgctcaaaatataagtcatcttcctgaggggccagttactggggagatttctgcagctatgattaaaaactccggagctgattttgtaattttaggccactctgagaggcgagaattacacactgaaacagaagaagctattaaatctaaaattttagaggcatcaaatcacaacattcatcctgttttatgtattggagagccaaaagagatatatgttgcaaaaaaaactgaggatttcttatgttctcagcttcaaggatcattaaatgatttgaacaatataaatctatctattgcttatgaacccatttgggcaataggaactggagatgttgcaaaaccatctgacatcaataaaatccattcaattattaaggatatctgctctagagaatttgatgtgaagatagaaaatattatttatggtggcagcgttaatgatcaaaactcaaaagaaatctttgaacaagaacatgtaaatggagctttaatcggtggggcttcattagatggacattcttttggtagaatagcgaacaatttttttgagattcataacgggtaga

SEQ ID NO: 290660 - DNA, 688 bp, Unknown
  Bacterial polypeptide expressing nucleotide sequence isolated from the Sargasso Sea
catgacttgtgctgaagctaaatcctatttagaagagtttattcccttaataaaaaacataaaagacgatcgtaaagttgttattgctccaccttttacagctatttcaaccttttcggatcattctgattttgattatttagatatttctagtcaaaatattcattgggaagatcaaggggcatttactgcagaaatatctccaaaaatgcttcttgaacatggtgtctcatatgcaatcgttggacatagtgaaccaagaaaatattttagtgaaagtgatgaacaaattaataaaagagcagtttttgctcaatctagtggacttactccaatagtttgtgtaggagaaacattagaacaaagagagagaggagaagctgttagagttattactagacaggttgaacaaggattagaaaatacagatccatctaatttaattgttgcctatgaaccaatatgggctattggcactggtaaaacatgtgaggcagaagacgctaataagatatgttctttgattcggaaattaataggttttgatgatgtaattattcaatacggtggatctgttaaacctaataatattgatgaaattatgtcaatgagtgatattgatggagtcttagttggaggagcttcattagatccgaatagttttgcgagaattgcaaattatcaataa

SEQ ID NO: 290661 - DNA, 664 bp, Unknown
  Bacterial polypeptide expressing nucleotide sequence isolated from the Sargasso Sea
tatggtaaatcttggtaaattttcctctatttttatagcaaattggaaattaaatgggaattactcatttttaaaagattattatcaaaaattaaatgttaattctgataactgtacgattatctgctcacctccaatttacttaaaatcactaaaaggaaataatgaaaacttattttgtggtgcgcaagatgtctcatcttttaaagaaggtgcatacactggagaactatctgcttcaatgctaaaggataataatataaatttttgtttggttggacattctgagcgaagacaatactttgctgaaacaaatgataatgtaaaaataaaaagttcaaaccttattgaggaaaatattataccagtgatctgtgtaggtgaaaccttagagcaaaaagaaaataatttaacggaaaaaatcttatctacacaaataaaggacggtattccaaattctgcaaatcatcaaaatgcattaatagcttatgaaccagtttgggcaataggaactggattaactccaactttagatgaaataaatcaagtacacaaattaatcaaaaattttgatcaaaaattcgctaactttaaagtgctttatggaggttctgttaagtccacaaattcaaaagaaattactgaattaagtcatgtagatggt

SEQ ID NO: 290662 - DNA, 742 bp, Unknown
  Bacterial polypeptide expressing nucleotide sequence isolated from the Sargasso Sea
atgtctaaacctttaatagtagctaactggaagatgaatgggtcacttgaagggctaaaagacttctttgaaaaactagacctgcctgaatatgctgaagcggtggtattgccacccgcggtctatattcgagactgtataagcgctattggaaaccgagcgcttgctgttggcatccaaaatatttggacagaagacgctggagcatttacgggtgaaatttctgcaaaaatggccagagatataggagcttattgggctctagttggacattcagaaagacgacagctgcaaaaggagagtgatgagttagtgaagcagaagctcgagtgttcgttgaaggctggtatgaatgtcattgtgtgtgtgggtgaaactttagaagagcgactatctggtcaagctgaatcagtggtttctaagcaactaaagaaggtgttagcgattgatttgaccaaaattcagaatgaagtggtaatcgcttatgagccaatatgggctataggaagtggtgaaagtgccacgcttgaagaagtgaaagaaatgcatgccttcattcgaaacgcgttgttaggggttttaggaagattgggtgctaatgttaggatcctttatgggggaagtgtgactgccgaaaatgccgccgacttgatcaagcaagatcatgtaaatggattgttagtaggaggcgcatcgcttaaagccgatagtttttcgttaatccttaatgcattggactgat

SEQ ID NO: 290663 - DNA, 766 bp, Unknown
  Bacterial polypeptide expressing nucleotide sequence isolated from the Sargasso Sea
atgaaaaaaataataataggcaattggaaattaaacctagatcatctagaagcaattcagcttctccaaaaacttaattacacgatagaagaaggcaaagaggaaaagatagatatagtagtctctccgtctcatacatctttacgttccattcaaacaattattgatacagataaattaaatattcaactatccgcacaagatgtatctcaattttctggaggagcatatactggagaagtttcaagtcaccaattaaataaactaaatgtaaattactgtattgttggacattctgaaagaagaatagagcttaatgaaagtgatgaagtaataaaccaaaaagtacataacttagttagtgaagggataacaccaatagtatgttttggagaaacattagaacaaaggaatagtaataaatatttagaacatattacaaatcaaattaattcagctgttaagggtttaagaaaagacaaagttgaaaatcttgtttttgcctatgaaccaatctgggcaattggaacaggagaagttgcttctttagtagatgctgttgaggttttgtctgtcgtaaaagaaaacatttctgaaaaacctttttatgacagtgacagtatccgctttatttatggagggagtgttactcctgataactcttctgaattattaaattctaaaattattgatggagctttagttggtggagcgtcattagatatcgataaatttgtaacgataattaattcagtagatttatgaa

SEQ ID NO: 290664 - DNA, 754 bp, Unknown
  Bacterial polypeptide expressing nucleotide sequence isolated from the Sargasso Sea
aatgtcaaaaaaattactaatagcaggaaattggaaactaaatggtgaaaaaaaagatatttctttcattaaaaatttattgaaatttcattcaaaaaaattaactaagaaagttgatatccttatttgtccaccatttacattgattgataaattttgccaacttactcaaagatctaatattgaaattggtgggcaagattgtagtgaaaatgaaatcggtgcttataccggagaagtttctgcaaatatgttaaatgatttaaaggccacttattgcattgttggccattcagaaagaagattgtaccataatgagaacaataatcttttaaacaaaaaaatattaaatattcaaaaaaataacattaaggcaattttatgtattggcgaaagcttatcagacagaaaacaatcaaaaacattaagagttttaggaaatcaattaaaaggggctttaaaaaataacattaatccaaatctattagaaattgcttatgaaccaatttgggctattggaactggtttggtaccagaatactctgatattgaagaagtacatgattatatttctaagaaacttgaagacttctatggaaaaagatcaaaaaaaattagaattctctatggaggttcagttaacgcaaaaaatgttttttcaatattatctttaaataatgttaacggagcattgatcggtggagctagcttgaaaataaaagatatgaaatcaattcttaagcaattcatttaa

SEQ ID NO: 290665 - DNA, 754 bp, Unknown
  Bacterial polypeptide expressing nucleotide sequence isolated from the Sargasso Sea
aatgtcaaaaaaattactaatagcaggaaattggaaactaaatggtgaaaaaaaagatatttctttcatcaaaaatttattgaaatttcattcaaaaaaattaactaagaaagttgatatccttatttgtccaccatttacattgattgataaattttgccaacttacacaaagatctaatattgaaattggtggacaagattgcagtcaaaacgaaactggtgcttataccggcgaagtttctgcaaaaatgttaaatgatttaaaagcctcttattgcattgttggtcattcagaaagaagattatatcatgatgagagcaataatcttttaaacaaaaaaatattaaatattcaaaaaaataaaatgaaggcaattttatgtattggcgaaagcttatcagatagaaaacaatcaaaaacattaagagttttaggaaatcaattaaaaggggctttaaaaaataacattaatccaaatctattagaaattgcttatgaaccaatttgggcgattggaactggtttagtgccagaatactctgatattgaagaagtgcatgattatatttctaagaaacttgaagacttctatggaaaaagatcaaaaaaaattcgaattctctatggaggttcagttaacgcaaaaaatgttttttcaatattatctataaataatgttaacggagcattgattggtggagctagcttgaaaataaaagatatgaaatcaattctaaagcaatttatttaa

SEQ ID NO: 290666 - DNA, 775 bp, Unknown
  Bacterial polypeptide expressing nucleotide sequence isolated from the Sargasso Sea
tatgataccaaaacctattgttgctgctaattggaagatgcacaaaactccccaggaaggtgttaaatttctttctgagctaaacaatttgcttttggataaggaaatgccatcaattatattctgcccgccatttacatcgctctttcacatgaatgaaatattatcagatttggagtattgtctgggtgctcagaatgtttattttgaaaacgaaggtgcctttacaggtgaaatttcaatgaatatgcttgtatcttgtggtgttcagtacgttattattggtcattctgaacgaaggcatatttttaatgaatcaaataatgatattaataagaaaattcatactgtattgaaacaagaaatctttccaatattttgcattggagaaaaacttgatgatcgtgaaacaaataatactcgtaaagttttagtgaagcagttagaagaaggtttattaggaataaataaagatatgatgagcaaaataattatagcttatgagccagtttgggccattggtaccggaattaacgctgttccaaaacaagttgaagaatcccatgatatgattagagaaatattgcttgaattatattcaatgaatatagcaaatgatattccaatcttatatggtggttctgtaaagccagataattctgaagaattaatcaaaacaaaaggagttgatggttttttaattggaggcgcaagcctaaatttggaaatgttctctggtataattgaaaatgttcataacaattctatgaggtaa

SEQ ID NO: 290667 - DNA, 424 bp, Unknown
  Bacterial polypeptide expressing nucleotide sequence isolated from the Sargasso Sea
tctgggcgtgcgcagacgggtgatcgccggcaactggaagatgcacatgacctgtgcccaggccagggactacatgggtgtgttcctgccgctgatcgaagcgacaccggacgaccgccatgtggtgctggctcctcccttcacagccatctcaacgatggcaggcctggccgacggcagtcgggtgcagctagccagtcagaatgtgcactggcaggccgagggtgccttcacagctgagatctccgctgagatgctgctggaacacaaggtgcgctacacgatcgttggccacagcgagccgcgcaagtatttcagtgagagtgatgagcagatcaaccacagggcccggtgcgcccaggccaacggactgatcccgatcgtctgtgtcggcgagagcgatcagcagcgggaacgcggggaa

SEQ ID NO: 290668 - DNA, 769 bp, Unknown
  Bacterial polypeptide expressing nucleotide sequence isolated from the Sargasso Sea
aatgattattgccaattggaaatcaaatattgttgacataggccaatggactgaagattttcatgacgagtacatagttaatgaaaggttgcaatctactatttttggagttgctccaccatcaatatatattgaaaaaatgaaaggatggaaagaaatacatactgtattcgttgatggagagcttgatttccaagaagtattgtgtggtgtgcaagatgtagaccattcatatggatcaaggacaggagctatatcagtagatatggttcttgactcaggatgtaattttgcaatcattggtcattcagaaagacgagatttattcaatgaagacaatgatcttataaaggaaaaacttaagagtcttaaaaataaagtcatggctgttttatgtattggagaaactaaagaagaaaatgataaaggtataacgaaagatgtacttaaacagcaacttgatatagtaaaggaagctgagttagatcaatcatttactgtagcatatgaacccgtttgggcgatcggaagcggattaacaccacagccaaaagatataaatgaaatacataaatatattaaagatgttgtacaatccaattctgcaaataagcttataccaagagttttatatggtggaagcgttacagataaaaacgctgaaagcttttttatggaagaatttgtagatggtgcattggttggaggagcatcgcttgatggtaaaacctttgcaaatatagtaaatatttataatagtacaaaatag

SEQ ID NO: 290669 - DNA, 682 bp, Unknown
  Bacterial polypeptide expressing nucleotide sequence isolated from the Sargasso Sea
caataaattttttgaaaaatataactttaaaaacgaggaaacttttattggtattgcccctccatttgtatatatagagcaaatcaatattttaaaaaaatctaatatcaatacaggattacaggacattgaacccttttctggagcaagaactggagccatttcagccgatatggctttagatttagaatgttgtttctcaataattggtcattcagaaagaagagaattgtataaagaaagcaataatcaaattaaagaaaaaattataaatcttgataataagataatacctatactatgtgtaggagagacagagaaagaaaatattgcaggtaagaccaaacaagtaattcaaaatcaactggaaataattaaagattatgaattgcatgatttgtttacagttgcatatgagcctgtttgggctattggaagcggtaaaactcctcatgctgaagaaataaatgaaattcataaatttattaaagatgttgtacaatccatttctacaaatgatcttgtaccagatgttttgtatggtggtagcgttacacataaaaacgctagcagcttttttaatcaagattttgtagatggcgcattgataggcggagcttctttagatggctcaatctttgcagagatagtaaacatttataatggaactaaaaacaaatga

SEQ ID NO: 290670 - DNA, 784 bp, Unknown
  Bacterial polypeptide expressing nucleotide sequence isolated from the Sargasso Sea
atggcactcagacgtcctatggtagctggcaattggaaaatgaacggcagtgcggcgctagcccaagagttgttcaagaagtttgcctcaaagctccaaaatgattcagctgaagtggttttatgcccgccttctatctatctagaaagcgtaaggcaactgctagaagcaaacaaggaagcgttagacggttcacttgttaggatgggcgctcaaaatttaagtcaacatgactttggcgcctataccggagaagtttcgggtcagatgcttaaagattgcggatgtcgatatgtcattatcgggcattcagaacgtcgccgtatgtacggagagacgagtaatatcgtagcggagaaatttgccgctgcacaaaagcacggtttaacccccatcttatgtgtgggtgaatcaggtccagcacgtgaagcaagacgtacctttgaggtgattgcagaagagttggacatagtgatccagaaaaatggcactatggcttttgataacgccattatcgcttacgagccattatgggctgtagggactggtaagagtgcgacaccagagcaggcacaagaagtacatgcgtttatacgcaagcgtctctctgaagtgtctccgtttatcggagaaaatatcaggattttgtacggtggcagtgtgacaccgagtaatgcggcagatttatttgcccaacctgatgttgatggtggactgattggcggtgccagtttaaactctaccgagtttttaagtctgtgtaccatagcgatgagcgcataat

SEQ ID NO: 290671 - DNA, 481 bp, Unknown
  Bacterial polypeptide expressing nucleotide sequence isolated from the Sargasso Sea
atgcttaatgagaataaaacaaacttttgtatagtaggacattctgaaagaaggcaattgtttaatgaaacaaataataatattaaattaaaggcaattaatctaattgataaaaatataatccctgtgatttgtgtaggtgaaactttaaaagaaaaagaaagtaaaattactaaatcagttttattaaaacaattagaagaaacaattcctgatattgctaatattgaaaatacattagttgcatatgagcctatttgggctattggtactggtttaacaccggtacttgaagaaattcaagaagttcatgagtatataaaacaaattgataagaaattaaataattttaaagtgctctatggtggttcagttaaaccaacaaattctatcaatatcaatcaattaaaaagtgttgatggatgtttagttggtggtgcatcattaaaagtgcatgattttaataaaattatatcttgat

SEQ ID NO: 290672 - DNA, 757 bp, Unknown
  Bacterial polypeptide expressing nucleotide sequence isolated from the Sargasso Sea
atgagaagaaaaatagttgcaggtaattggaaaatgaataatgatctaaatcaatcaatgagtttgattgattctgttattgaaaatagcgagggcattactaattgtgaattgtatttatctccgtcatttcccttccttagggactcaaaaattaaatgcgaacctacaaatatcaaagttttagctcaaaatgtatctcatttagaaaaaggagctctaactggtgatgtttcatgtgatatgctcaaaagtataaacattaatagcgtaataattggacactctgaaagaaggactatttttaaagagaatgatgatatactattaaaaaaaattgaattatgtgtaaaaaataattttgaaatttttttatgtattggagaggatttagaatcaagaaattctaataaagaattttcagttatagaggatcagttaaataacacaatttttaatttaaatgatataaatcctaaaaaattaataattgcttatgaaccagtctgggcaataggaaccggactttctgctaacccaagccaagcacaagaaatgcataatttcattagagaaaagtttaaagttaagttctcggaatcaatttctgataacttaacaataatttatggtggtagtgtaaaaccagagacagctaaagatatttttgatcaaccagatgtagatggcggattgattggaggagcatcattaaaccataatgattttattaaaatcgtaaaatcaatcacttaat

SEQ ID NO: 290673 - DNA, 598 bp, Unknown
  Bacterial polypeptide expressing nucleotide sequence isolated from the Sargasso Sea
tccggctctgtccacaatggcggatctcagccaaggctcccgcctttgtctctccagccagaacgtgcactgggaaggacaaggagcttttactggcgagatctcccctgcaatgctcaaggagcatggggtcacccacacgatcgtgggccacagcgaaccgagaaagtatttcagtgaaagcgacgagcaaatcaaccaccgagccaggtcatcccagtcgaacggtttaattccgatcgtttgtgtcggtgaaagtgatgagcaacgcgaacgcggcgaagccgaacgggtgattcgacgccaaatcgagcagggtctggagggactcgacgccgagaagttagtcgtggcctacgaaccgatctgggcgatcggaacaggcaaaacctgcgaagccgaggaagcaaaccgcatttgcggtctcatccggagttgggtcggctcccctgatctcgtgatccagtacggagggtccgtcaaacccaccaacatcgatcagttgatgggcatgagcgatatcgatggggtgcttgtggggggcgcttccctggaacctgaaagctttgcccgcattgcgaattaccaaaccgcttga

SEQ ID NO: 290674 - DNA, 571 bp, Unknown
  Bacterial polypeptide expressing nucleotide sequence isolated from the Sargasso Sea
atgtcagaaaaataccagaaagttatagcagctaattggaaaatgaatggatctttagagttattacgttctttatcttcattcccatcttcaaaaaataaaatcatcatttgccctcctactactcttatctataagtgtaaagaaatcttacctcgagaagtttttattggcggacaaaactgtaacgaaaatgcgtcaggaccctatactggtgaaatatctgcagcaatgttgtacgaatccggggcaaggtatgtaattttaggtcactcagaaagaagatctatcttccaagaaagtaacaagatgattttaaataaggtgttgtctgccacaaaatttaatctggtgcctatattatgcgtaggcgaaaccttagaagaaaagaaacaaggtaaagcaaaggaaattataaagagtcaacttggacaatgtattcccaaggatgtagattttgagcatttaattattgcctatgaaccagtatgggcaataggaacaggtcttgtcccaaaaatcaaagatattgaagaaattcacggatttatacgaaattttctaaaagaga

SEQ ID NO: 290675 - DNA, 802 bp, Unknown
  Bacterial polypeptide expressing nucleotide sequence isolated from the Sargasso Sea
atgacttttaaccatcctgatagactgttcccctccgatacttttactcgaggtttggcacgggaactttttgaaaatatagaaacacttcccataatttcacctcacggtcattgtgacccaagttggttttctgaaaataaaaggtttcctgatcccgctcagctttttgttgttcctgatcattatgtctttcgcatgttggttagccagggcctcactttgaatgagcttggagtacagactctagacggtagtgtttttgaaaatgatccacaaaaaatatggaaaaagtttagcgaaaattattatctgttaaggggaactccaacagcaatgtggcttgactattctttcgaaaaagtttttggaatatctgagccacttacgccattaaatagtgatttttactttaatcatatcgaagaaaaattatctcaaccggaatttttaccacgagcactttttgataaatttaatattgagacacttgccacaacggatgctgcccttagcgagttatccgatcatcaaaatattaaaagttgtacttgggatggacggattatcccaacttatagaccagatagtgtaattgatcctgataatattgaatttaaaaataatcttagaattcttggtgaacttactgataatgatacctgttcatgggatggatacttaaaagcccataaatcaagaagactattctttaaagaaatgggtgctacagcttcagatcatgggcatccaaccgcaagaaccgaaaatttgtcatatactcatgcggaacaactattta

SEQ ID NO: 290676 - DNA, 370 bp, Unknown
  Bacterial polypeptide expressing nucleotide sequence isolated from the Sargasso Sea
aatgacacttaaccaccctgatagactattaccctctgatacttttactcgaggtttggcacgagaactttttgaacatatcgaaggtctacccataatttcacctcacggtcattgtgacccaagttggttttctgaaaataaaaggtttcccgaccctgctcaactttttgttgtccctgatcattatgtctttcgcatgttggttagccagggtctcacattaaatgaacttggagtacaggctctagacggtagcgtttttgaaaatgatccaaaaaaaatatggaaaaagtttagtgaaaattattatctttttcggggaactccaacagcaatgtggcttgattatctttcgaaaaagtttcgg

SEQ ID NO: 290677 - DNA, 640 bp, Unknown
  Bacterial polypeptide expressing nucleotide sequence isolated from the Sargasso Sea
ccgtacaagaggaaacctgttgtgggtgatgctctcgctgcctaccaaagcttcctcatgattgcttttggtgagatggatgccgaacaaggctgggtaaaacaactccatctcggtgcgctacgcaatccaaacacaaaggcgtttgatcagcttggtccggactctggctttgactccatcggtgatttctctcaaatcgatggactcacaggctatcttgatgcattagagcaacgggagaaacttccaaagatggtcctttacaacatcaatccacgtgataactatgcaatcgcagcattgtgtggcagttttcagggcgaaggtgttcgggggaaaattcaatttggaagtggttggtggtttcttgatcaactcgatggcatgcgttggcaaatgaacgcactctcccagattggtttactctctaatttcattggcatgctcactgactcaagaagttttctttcgttcccacgtcacgaatacttccgacgtcttttatgtgatattgttggaaatgatgttgaacaagggctcatcccagcagacatgagtacactcaaacaacttatcaaagacatttcctacagaaatgcaacaaacttttttgatatgcccggatcgaacatctgag

SEQ ID NO: 290678 - DNA, 832 bp, Unknown
  Bacterial polypeptide expressing nucleotide sequence isolated from the Sargasso Sea
tctttaggcatatctcggctagacgttacgccaattgaaaaagatcatcgaagaatttggcaaacctttgcggatcatttttatcttttccgtggaactccttcacgaatctggtttgaacacgctctgcatgaagtcctcggtattgaacttcctttcaatcctgaaaatgcggatgtgatttatgacgaaatcaatgaaaaactgactcaggaatcctttcagcccagagcgttgtttgaacggttcaaccttgaagtcctggcaaccacggaatcacccttggatgaattagttcatcaccgctcgatagctgattcaggatggaacggaagagtgatcaccgcctttcgtcccgacccggtagttgatccggaattcgagggtttttccgaaaatatcatattacttggccagctatccggagaagatactacaagttggaagggctatctcaatgcactgatgcagcgacgagccttttttaagtcgatgggagcaacttccacggaccatgggcatcccagtgcagtgactgcgaatcttgaacctgaagaatgtgaaaccctctacattgaggcattgaagaaaggattgagcgggaaaaaagcagaaatgttccgcggacagatgctaaccgaaatggcaagaatgagcctcgaagatgggttggtgatgcaaatccatcctggatccctccgaaaccataaccaaactctgtttcaacgtttcggcagggacatgggggcagacatacccactcagacggactatgtccatgcacttcagcccttgctcaaccgattcggcaacgaacccgagttgagtgtca

SEQ ID NO: 290679 - DNA, 592 bp, Unknown
  Bacterial polypeptide expressing nucleotide sequence isolated from the Sargasso Sea
tatgcttaatcaccctgacaggcttttacctgctcaaccatttgcacgtgatatagcacgtgaactattcacaactgttgaagatttaccgataatttcaccgcacgggcactgtgatccaggctggtttgcgcacaacgtgagatttccagatcccgcgcagttgtttgttgtgccagaccactatgtatttcgcatgttagctagccaggggattgcattgggtgaactgggcgtaaatactttagataacaccccatttcaaaaaaatccccaaaaaatatggaaaaaatttagtgaaaattataaactatttcgtgggactccaacctcaatgtggttagattattcattcgaaaaagttttcggattaactgaaccccttacatcagaaaactgcgatttctattttaatcacattgagggaaaactatctaagcctgaatttttaccgcaagcacttttcgaaagatttaatatcgaagttctagcgacaactgacgcagctgttagcgaattaaaagagcataggagcataaaaaatggtgattggagtggaagaatattcccacctatcgtccagatgccgtaa

SEQ ID NO: 290680 - DNA, 545 bp, Unknown
  Bacterial polypeptide expressing nucleotide sequence isolated from the Sargasso Sea
cttgagtgatactgcaaaagagctttacgcagtcgcagccaaagagcctatctacgattaccactgccatctttctcctaaagaaattgcccagaacaagcagtgggataatctggctgaggtctggcttgccggggatcactacaagtggcgggctctacgcgccgcgggaataccagaaaagtacatcacgggaaatgcaacagactatgagaaattttgtgcatttgctgaaactatgccgaagctcttccggaatcctttgtggcactggagccatcttgagctctctcgggtctttggcatcaatgaggtccttaaccaatcatctgctcaacgtatttgggatgaagcaaatacgcaacttggcaaaatctctgctcagacattgcttgcagattttcgtgtggccgcaattggcacaacagacgacccgtgtgacagcttgccgcatcatattgaaattgctaaaagtgaactaaaaacgcgcgtttaccctgcctttcgtcccgacaaggcactcgccgccgatgacgcagaacttt

SEQ ID NO: 290681 - DNA, 487 bp, Unknown
  Bacterial polypeptide expressing nucleotide sequence isolated from the Sargasso Sea
cttccgtaaccacaacccttctatatttgagcgttttggtgctgataaaggtgcagatattccaagcccgactgagtttgtcagcaacttaaaacctctgctggacaaatacggcaacaatgccgctttgaaaataatcctgtttaccctggatgaaactacttatgcccgtgaactggcgcctttggcaggccattatccggcattaaaactgggtcctgcctggtggttccatgacagccctgaagggatgttgcgtttcaggcatcaggtcactgaaaccgcaggcttttacaacacagtcggctttaacgacgatacccgagctttcctgtctattccggcccgccatgatgtggcgcggcgtattgattgccgctttttagcaggtttagtggctgaacatcgcttaagcgaagacgaagcgcatgaactggcgcagcagctgacctatcagctggtgaaacaagcctatcagctggattaa

SEQ ID NO: 290682 - DNA, 472 bp, Unknown
  Bacterial polypeptide expressing nucleotide sequence isolated from the Sargasso Sea
aatgatcagctgttccgcttatttggccgtgacaagggcgctgatattccactgagtatcgaatatgtgaaagcgctcaagccgttattggataaattcggcaacaataaagacttaagcctgattttatttacgctggatgaaaccacctacagccgcgagctggcgcctttggccgggcattatccttgcctgaaactgggcccggcctggtggttccatgacagccctgaaggcatgattcgattccgccgtcagaccaccgaaaccgcaggtttttataatacggttggttttaatgacgacacccgtgcctttttatctattccggcgcgacatgacgtagcgcggcggatggatgctgtttatctggccgagttagtggcccggcatatgctggatgaagaagatgcagccgtgattgccaaagatctggcatacggcctggcaaaaaaagcttatcaattgtaag

SEQ ID NO: 290683 - DNA, 405 bp, Unknown
  Bacterial polypeptide expressing nucleotide sequence isolated from the Sargasso Sea
aagcgcttcgcccgttactcggtaaatacggtaacgagcctaacctcgacattattctatttacattagatgaaaccacgtacagccgtgaattagcaccactcgcaggccactacccttgcctgaaacttggtccttcttggtggttccacgatagccctgaaggcatgttgcgctttagacatcaagtgacagaaaccgcaggtttcttcaatactgttggttttaatgacgatacgcgcgcgttcttgtctattcctgcacgtcatgatgttgccagacgcattgattgtcgcttccttgcacagctagttgtggagcaccgcatcagtgaaacagaagcggccagcattgcaagaaaactcacttatgattttgctaaacaagcgtacaaattggggtaat

SEQ ID NO: 290684 - DNA, 949 bp, Unknown
  Bacterial polypeptide expressing nucleotide sequence isolated from the Sargasso Sea
ttgctggataaatttaatatcgaactgattgcgactaccgaaggcgctgtgaattcgttaaaacaccatgccgcgttaaaaggcactggttatgaaaaacgggtgatcaccaccttcagacctgacgatgtgatagacgccgaccgtgctgattttctggccaatatcaaaaaactggctgaacaaacaggtcaggacacgcatagctggcaaggttatttacaggctttgcgtattcgtcggcagtttttccgcgaccatggcgctaccgccacggatcacggtcaccccacagccaaaacggccaatttatcagagcatgaagcaagcagcctgtttcagctgtgtttatccggcactgccagtaaagagcagaccgagttattccgtggccaaatgctgacagaaatggcgggtatgagcattgaagatggcatgacgatgcaaattcacccaggtgcgtttcgtaaccataacccgtctatttttgagcgttttggtgccgacaaaggcgcggatattccaagcccaactgaatttgtcagcaacttaaaacctctgctggataaatacggcaacaatgccgctttgaaaattattttgttcaccctggatgaaaccacttatgcccgtgaactggcgcctttggctggccattatccggcattaaaactgggtccagcctggtggttccatgacagccctgaaggcatgttgcgtttccgtcatcaggtcactgaaaccgcaggtttctacaacaccgtaggctttaacgacgataccagagctttcttgtctattccggcccgccatgatgtggcacgtcgcattgactgccgatttttagctggcttggtggctgaacatcgcttaaacgaagatgaagcccatgaactggcacagcagctgacctatcagttggtaaaacaagcctatcagttggactaag

SEQ ID NO: 290685 - DNA, 1251 bp, Unknown
  Bacterial polypeptide expressing nucleotide sequence isolated from the Sargasso Sea
cggcagagcttctagtggttccggaccattacctgctccgcatgctggcaagccaaggtgtaccactgaccgatcttggcgtgctgcgttccgacgggggtaaaactgaagaggatccgcgcgcgatctggcagcgcttcgccgcgcattaccatttctttcgcggcacaccctcggccatctggcttgatcattccttcgaacatcttttcgggatcgacgaagtgctgtccgccgacaccgctaatgcatattacgatcatatcgacaactgtctggggcgggacgaattccggccgcgggcgcttttcgaacaattcaatgtcgagctgctggccaccacggacgccgccactgacccgctgccatggcatcagcagctgcgcgacagcggatggaagggacggatcgtaaccacctatcggccagatgccactgtggacccggagttcccaggtttcgccaagacggtcgccgaacttggcgagatcacccgagaggacacatcaagttgggccggctatctggcggcgcaccggtcccgccgcgcttattttaagagcttcggggcgaccgccaccgatcacggccatgccagcgcgcgcaccgcggacctgccgcgggccgaggcagaagcgctgtttggcaaagtgctggccagcacctgcacagctgatgaggcggatctgttccgcggacagatgctaaccgagatggctcgcatgagccttgatgacgggctggtgatgcagattcatgccggatcgcgccgcaaccacaatggcgacatcttcgcccgccacggccgcgacatggggttcgatattccgggccgcaccgattatgtggaaggtctaaagccgctgctgaacgctgtcggactggaaccaggcctgaccattatcctgtttacgctagacgagaccacctatggacgcgagcttgcgccgctcgccggggcctatccatcactgcgactaggaccgccctggtggttcttcgactcttttgagggaatcagcaatttccggcgcgcggtgaccgagacctgcggcttctacaacaccgccggcttcaatgacgacacccgcgccttctgttcaattcccgcgcggcatgatgttgcgcggcgttcggactgtgcttatctggcggaacttgttggcaccggccggttgcgcgaggctgaagcgttcgaagtggcgcacgacctagcctacagcctcgccaagtctgcctacaatctttaga

SEQ ID NO: 290686 - DNA, 407 bp, Unknown
  Bacterial polypeptide expressing nucleotide sequence isolated from the Sargasso Sea
tatggaaattggtgtgataactttgtcaacatcaaaacataagcaatctgacgcactcgttgagaggaagacgataatgaccccgtttatgactgaagatttcctgctggacaccgaatttgcccgccgtctgtaccatgattacgccaaagaccagccgatcttcgattaccactgccatttaccaccgcaacaaatcgctgaaaactaccgttttaataacctgtatgacatctggctgaagggtgatcactacaaatggcgtgcgatgcgtaccaatggcgtcgctgagcgcttgtgtaccggcgatgcgtccgatcgcgagaagtttgacgcatgggccgccacggttccgcacactatcggtaacccgctgtaccactggaaccacctcgaattacgtcgtc

SEQ ID NO: 290687 - DNA, 503 bp, Unknown
  Bacterial polypeptide expressing nucleotide sequence isolated from the Sargasso Sea
tctggcgcgacgatgcggcgactcgcgggccggtgcggccgttgctaaagacggaagctttgatgtgaaagtgctgccgagctggcgtccggataaagcctttaacattgagctggcgacctttaatgactacatggcgaagctcggtgaagtgtctgacacggatatccgccgcttcagcgacctgcaagctgcactgaccaaacgtcttgatcacttcgcggcgcacggctgtaaagtctcggaccacgcgctggacgtggtgctgtttgccgaatctaacgaatctgaactggatagcattctggcgcgtcgcctggcgggtgaaaccctgagtgaacatgaagttgcccagtttaaaaccgccgtgctggttttccttggtgcggaatacgctcgtcgcgaatgggtacagcagtaccacatcggcgcgctgcgtaataacaacctgcgccagttcaagctgttgggcgcggatgtcggtttcgactccatcaatgatc

SEQ ID NO: 290688 - DNA, 874 bp, Unknown
  Bacterial polypeptide expressing nucleotide sequence isolated from the Sargasso Sea
caattcaatatagagactctttgcactactgaaagtgctgacgataaactaattcatcatacagcaataagaaattctggatgggatggacatgttataacagcgttcaggcctgattcagttatgaatattgattcaggagaatggaaacaggaaatagaaaaattatcaatttcttctggtattaatatcgactcatataaaagctttttacacgctattgaaaacagaagggaattttttaaaaaaatgggagcaacctctactgaccaaggggtgatatctccttacactggtagagtttcagatagccttgcagatgaaatttttcaaagggctttaaaatctaatctaaatcaagatgatcaagaaatctttataggccatatgttaatggaaatggcacgtatgagtacagaagatgggttagtaatgcaaattcatgctgggtctagaagaaatcataatcaatttatatttaatagatttggaccagataaaggcgctgatatacctgtcaagacagactttacaaacaatctgcattctttgttgaatgagtttggtaataatattgatttttctttaataatctttacactagatgagtctgtatatgcaagagaactggctccactcgcaggccattacccatccatgaaacttgggcccccttggtggtttcatgacagtatagagggaatgaaacgttttcgcaaaagggttacagaaactgcaggaatatataatactgctggatttaatgatgatactagagccttcttgtcaattccagcaagacatgatttatgcagaaggattgattctaattttttagctgagcaagttgttagacatataattgatatggatg

SEQ ID NO: 290689 - DNA, 609 bp, Unknown
  Bacterial polypeptide expressing nucleotide sequence isolated from the Sargasso Sea
acacagaggcgttgaagaaaggattgagcgggaaaaaagcggaaatgttccgcggacagatgcttaccgaaatggcaagaatgagcctagaagatgggttggtgatgcaaatccatcctggatcattccgaaaccataaccaaactctgtttcaatgtttcggccgggacatgggggcagacatacccactcagacggactatgtccatgcgctacagccgctgctcaaccgatttggcaacgaatctgatttgagtgtcatcctcttcaccctcgatgagactagttatagccgtgaacttgcacccctcgcagggcattaccccatcttaaaactaggtccgccttggtggttttttgacagccctgaaggcatgctacgattccgtcgggaaaccaccgaaaccgcaggcttttataacaccgttggttttaacgatgacactagggcatttctatcaattccggcacgtcatgatatggcgcgccgcatcgactgcaggttcctcgcagaactcgtgtgtgaacatcggctttccgaggaagaagcccatgaaacttcaatcgatttggcttacaggctggttaagaaagcatatcgactataaa

SEQ ID NO: 290690 - DNA, 878 bp, Unknown
  Bacterial polypeptide expressing nucleotide sequence isolated from the Sargasso Sea
catgaaggtccagttcggggcggccaccagcgaccttttttatgacagcatcacggaaagtcttgcgtccgaagcctttcgcccacgggccttgttcgatcgtttcggaatcgaagtcattgcgacgacggaaggtccgcttgatactctggatcatcatgccgccatccgagcggagaatcggaaagcgggcggctggcagggcaaagtgatcacggcatatcgtcccgacgccgtcatcgaccctgagtttgaaggctttgccgcaaatctcggtaggctatcggatttgactggggaagattgcttcacctggagcggctatctcgccgcgcatcggcagcgccgcgccgtcttcgccgagatgggggcgacgtcaagcgaccatggacacgcaaccccccggacggcgaacctgcggcccgatgaggctgcctccctgttcgccaagattgtcagcggaatgtttgatatgcacgatgccgaactgtttcgcgcgcagatgttgaccgaaatggctgggatgagcgtggatgacggcctggtcatgcaaatccatcccggctccttccgcaatcataatgccagcctgttcgcgcgcttcgggcgcgacaagggtgccgacataccaatgcgtacggaattcgtcgccaacttgaagcccctgctcgaccggtttggtaacgacccgcgcctgtcgatcatcttgttcaccttggacgagagcgtctatgcgcgcgagcttgcgccattggccggccattacccctgcctgaagctcgggccggcctggtggtttcatgacagccccgaaggcatgcgacgcttccggcatatgacgaccgagacagcaggctgttacaacacggtcggtttca

SEQ ID NO: 290691 - DNA, 856 bp, Unknown
  Bacterial polypeptide expressing nucleotide sequence isolated from the Sargasso Sea
attggagtggaagaatattcccacctatcgtccagatgccgtaatcgatccagagaacagagattttaaacgaagtcttttgaagatgggcgaattaaccgatgaagatgtaaactcttggcttggctatcttaatgcgcataaatcacggcgattatattttaaaaagctgggtgcaacagccactgatcatggtcacccatcagcacgcaccgaaaatttatcacaaaatgaggctgaaaaattatttaagttgattttgacaggtaattttacaagagatgatgcagataagttcagaggccagatgctaactgaaatggccaagatgagttgtgacgatggattggtcatgcaaattcatcctggttcgatacgaaatcattcaaataaaatttttaaccaatttggtttagataaaggttttgatattcctggatcgactaactatgtctcagcgcttaaacctctattagatcaggtgggattgaggacagacctgacaataattttatttactctggacgaaactagctattctagggaacttgctccattggctggagtttatcctgccttaaaacttggtccaccctggtggttttttgatagctatgaaggaatgaagcgatttcgtgagaccacaacggaaacttgtggattttacaatacagttggatttaatgacgatactagggcgttctgttcaataccagctcgccatgacgtcgcacgtagagtagactgtgcctatttggcagagttgatatctactgggcgtttgagagaaaatgaggcctatgaactggcttatgacctcgcttacggccttgcaaaaagtgcatacaatttatga
